United States Patent Application Publication US 2006/0134663 A1 - sequence listing, part 119

SEQ ID NO: 369009 - DNA, 848 bp, Homo Sapiens; identical to SEQ ID NO: 98019
  misc_feature (698)..(698): n is a, c, g, or t
  misc_feature (773)..(773): n is a, c, g, or t
  misc_feature (791)..(791): n is a, c, g, or t
  misc_feature (837)..(837): n is a, c, g, or t

SEQ ID NO: 369010 - DNA, 789 bp, Homo Sapiens
ggggtgcagatctattatgtattgaaacaatgaaatgtagtctatgctattgattcttaaagcaaaatggacttaggaggagaaactaaattgcctggagaaatagaacaagatatcatgaaggaagtagttattgaactaaactagttttggtgggaggagaggggaggatggatggaacattcatggagggtttatcatgcatggtctacaggcatttattagcaggaaagaaggtgaagatgcactttttcagcagcagaaaatacaatttgggatgtttctgaagtcttatttgaggattattaaagccatgtttttgcctataacatttttgaggttttcctagtagaaaagtgatgttacaacagcaggttttataagacattcttttaggatctacttcaagtgagctctgtcatttggaggctgtgtagtcaatttatcaattagtaactgaatttggttgataacagttgaaagggaaatgtagaataaggataaagcaagaatccaaaaaattgaatgaaagaaacaacgaaatctaggagacagattgaatataagtgtattagtttcctgtggttgccataacaaattgccacaaactgcgtggctttaaacaacataaatttattctcacaggttttggaatccagaagttagaaaatctgggtaaacctgtgctcacttctaaaaggtccctggccttgccggctttcctagtttcctgggtgggctccaagccattcccttgggctttgtggggcaacccaaaacctcttgaac

SEQ ID NO: 369011 - DNA, 1376 bp, Homo Sapiens
ccgcacggcgggggtttcggccgcgaagaggagtcgatgcgggagggtgaacattgtcgtacggggagtgcgcccgggcgcgtgatcgtgcagttttccgcgccatcccccgagggaggcgggaggtccccccatggccatttggataaaggggtgtagttaacggtaattaggggagtggggcggtgccttccccaagggaaaccgggaaatgtccctatccaaaaaagggagtcgtaaggttacaggactgccactcttaccacttcctccaaagcctacccaccattggagcagagactagacgtagaaaagcacgacggaaagagctagagatggagcagcagaatgaggcttcagaggagaataatgaccagcaatcacaagaagttccagaaaaagtaactgtatccagtgatcatgaggaagtagacaatccagaagaaaaaccagaagaagagaaagaagaggttatagatgaccaggagaacctagctcatagcaggaggaccagggaagatagaaaggtagaagccatcatgcatgcttttgaaaacttagagaaaagaaagaagcggcgggatcagcccttggaacagagcaactctgatgtagagattactacaaccacctcagagactcctgttggtgaagagacaaaaactgaagcccctgaatctgaagttagcaactctgtttcaaatgttaccatcccaagcaccccacagagtgttggtgtgaatacccggaggtcttcccaagcaggggatattgctgcagaaaaactagtccccaagccacctccagcaaagccttctaggccccggccgaagagtcgaatttctcggtacaggaccagttcagcccaaagactaaagcgtcagaagcaggccaatgcacagcaggcagaattgtcacaagctgccttggaagagggaggaagtaacagtttagtaactcctactgaagctggaagtctagacagttcaggagaaaacaggccattaacagggtctgacccaactgtggtgtcaattactggatcccatgtcaaccgtgctgcatctaaatacccccaaaaccaaaaagtatctagttacagaatggttgaatgacaaagcaaagaaacaagagtgccctggttgagtgccctttacgtatcacaacgggatccaattgtactggcaacgacccctaaacatgttacccaggtcttatccctttccccgtttaatttgcaccacccccaaaacactacatttcgctttgggctccccccttttatccctgaaaagacgtcgaaaggccccctttctggcctgaagggcccattcagccttcctgtaaaaaagcgcctgggataaaaccaagccttt

SEQ ID NO: 369012 - DNA, 1105 bp, Homo Sapiens
  misc_feature (490)..(649): n is a, c, g, or t
  misc_feature (757)..(820): n is a, c, g, or t
gggagtattccctcggccagcagagcgcttaataaacatcagtggatctgaacttgaatcaaatggcaggtagcagcttgcagaagcctgaaaaacctgggcactgaggtctcgcatgcctgtggtcctgtcgcaagaggtggagtccgttcttgtgggtgctgctgttctgggtgcctgtgcctcaggggatttcgcttctgtacaggaagcaatggcaaaaatgagcaaagttgggaaagttgtgttcccgagactacaggataaaaaatactatgataagaaataccaagtattcctgaagctggttgaacaccagaaggagtatttggcgatcatgaatgatgactgaacagggcttgcaggtgctgatgccagaagcttctgtgccattgcattaaagacttctgtcatttgatccatgttcaagacccttgaggtattgtttcatcatttctgtattgtctttcaataaagaaaacaaacatgnnnnnnnnnnnnnnnnnnnnnnnnnnnnnnnnnnnnnnnnnnnnnnnnnnnnnnnnnnnnnnnnnnnnnnnnnnnnnnnnnnnnnnnnnnnnnnnnnnnnnnnnnnnnnnnnnnnnnnnnnnnnnnnnnnnnnnnnnnnnnnnnnnnnnnnnnnnnnnnnttttgcgcccccccccgccccccaaaaaaattttataaacccttttccttggggcccggggccccccaaaaagagaaaaaagacaggggccaaaacgtgtttcccacnnnnnnnnnnnnnnnnnnnnnnnnnnnnnnnnnnnnnnnnnnnnnnnnnnnnnnnnnnnnnnnnaacacacgaagggtttctggaaaaaaacccaaaaggggatttctcgggggggcttttcagtgggttttattacacagggaggcccccaaggcgggctctcatattttaataatatacgcccccgcgcccggggcaattttataagagaaatagagggtgggaaaatttaactataacacttcccccgccgaccggcgggaaccccccccacaaacaggcggagtgtatgaaaaaccctcatactccccaagggggacactcaaaccctctttgggcccctccgtg

SEQ ID NO: 369013 - DNA, 781 bp, Homo Sapiens
  misc_feature (327)..(736): n is a, c, g, or t
actaagtattgggtaatatataaggataacagttcaaccaatatacaaaggcaaacatacaaaaatccccctatctgtacaggaacgcatttacgtgctccgaaaccagaaaggcttatcacggttccctgcactgggggggacacagtgttttgtccctggggacaattgccaatcccttgtgacatcttcacgcgggagtctgacggaggctgtcactgtctctccggacatcagtgcaacagtaacacggcgatttcagaaagaacctgaagtcccgtcaaacgatccagactggaggatttatttatttttttatagttgtannnnnnnnnnnnnnnnnnnnnnnnnnnnnnnnnnnnnnnnnnnnnnnnnnnnnnnnnnnnnnnnnnnnnnnnnnnnnnnnnnnnnnnnnnnnnnnnnnnnnnnnnnnnnnnnnnnnnnnnnnnnnnnnnnnnnnnnnnnnnnnnnnnnnnnnnnnnnnnnnnnnnnnnnnnnnnnnnnnnnnnnnnnnnnnnnnnnnnnnnnnnnnnnnnnnnnnnnnnnnnnnnnnnnnnnnnnnnnnnnnnnnnnnnnnnnnnnnnnnnnnnnnnnnnnnnnnnnnnnnnnnnnnnnnnnnnnnnnnnnnnnnnnnnnnnnnnnnnnnnnnnnnnnnnnnnnnnnnnnnnnnnnnnnnnnnnnnnnnnnnnnnnnnnnnnnnnnnnnnnnnnnnnnnnnnnnnnnnnnnnnnnnnnnngccgtaatggccgaattcccgggcatatgtccggtaccgtcgact

SEQ ID NO: 369014 - DNA, 849 bp, Homo Sapiens
  misc_feature (591)..(591): n is a, c, g, or t
  misc_feature (639)..(639): n is a, c, g, or t
  misc_feature (643)..(643): n is a, c, g, or t
aaaagccatggagacttcagcatcctcctcccagcctcaggacaacagtcaagtccacagagaaacagaagatgtagactatgctcctggagaggtggtaccctctggggaatcaggactccgaaggagaggctctgacccagcaagtggagaagtggaggcctctcagttaagaagactgaatataaagaaagatgatgagtttttccatttcgtcctcctgtgctttgccatcggggccttgctggtgtgttatcactattacgcagactggttcatgtctcttggggtcggcctgctcaccttcgcctccctggaaaccgttggcatctacttcggactagtgtaccgtatccacagcgtcctccaaggcttcatccccctcttccagaagtttaggctgacagggttcaggaagactgactgaggccacttccaggtgggcagcagaggcaggccccagtgtgaccaccactgcgacccctgagcccacaagggcagagcagcattctgagagacgcacaggagaacaagccagaccaataaacagaacactttttccttcccatgtggtctgaatgttggcaccangcccgggcaggggcatctcatttgggcagtactgctgtgcaacccagnctgncaaggatggaaggcagagggtgggtgtggggcctgaggcttcacagtacctggaccagggaggaagatgctgggaggtcactgctctcagaggaccagcaagggaccctgagctctccaagctgtgatctgtctgggttcatggtttctcaaaatcccaggctatctgcatgcgctctcaggtgctaccgagcctcctgggagaga

SEQ ID NO: 369015 - DNA, 704 bp, Homo Sapiens
ttatctgaactcagctaggaggtaaaatatttaatttaaattaaggcactacatacacatttctttaaagcacactgatgttattttatttacacactattttaagaattaacaataaatacacattttccatctcctccttgtccttcatttataactttatatgttaacaaggaagtaaaaccctccaaataaaaggaattaaatgcaataatccataaagcttatcagatatgggcacaagaaggagacacccaaaaacaatgtaaaaacattttaatcctttaatgttacaagaatttatctataaattcttatgccattcctagtggaataataatataaaacctatacacaaacattgaaatatgttttattctattgctatttaccagaagaattgcatataaataacagcagcagaactgtccctatgttatacatgaatgtacttattctgaattcactgactgaattcaaaaacagcgttaactcaaacttttcctaataaccttggggtattgtagttcacaacacaagtaaatgtaacctagagccaaagactgactacacacagaaatatagagcagcgatgtaagttatttcaacaaaatacacaacaaaacacttaatgtgaaaggctagattaactataagatagacaacagtgtactaaaggagtccacggctgtaacacgtgaaaa

SEQ ID NO: 369016 - DNA, 1485 bp, Homo Sapiens
  misc_feature (446)..(446): n is a, c, g, or t
  misc_feature (723)..(731): n is a, c, g, or t
  misc_feature (1228)..(1228): n is a, c, g, or t
  misc_feature (1359)..(1359): n is a, c, g, or t
gggggccaagcatatattgaactgagacatagggctcctgacggaaggcaacggctgcctttcagtgctccacctggcagcgttgtagaggcatcttctaatctgagacatggaaacttcattccccggccagactttccgggccctagacacacagaccccatgcgacgacctccccagggtctacctaatcagctacctgtgcacccagatttggaacaagtgccaccatctcaacaagagcaaggtcattctgtccattcatcttctatggtcatgaggactctgaaccatccactaggtggtgaattttcagaagctcctttgtcaacatctgtaccgtctgaaacaacgtctgataatttacagataaccacccagccttctgatggtctagaggaaaaacttgattctgatgacccttctgtgaaggaactggatgttanagaccttgagggggttgaagtcaaagacttagatgatgaagatcttgaaaacttaaatttagatacagaggatggcaaggtagttgaattggatactttagataatttggaaactaatgatcccaacctggatgacctcttaaggtcaggagagtttgatatcattgcatatacagatccagaacttgacatgggagataagaaaagcatgtttaatgaggaactagaccttccaattgatgataagttagataatcagtgtgtatctgttgaaccnnnnnnnnnggaacaagaaaacaaaactctggttctctctgataaacattcaccacagaaaaaatccactgttaccaatgaggtaaaaacggaagtactgtctccaaattctaaggtggaatccaaatgtgaaactgaaaaaaatgatgagaataaagataatgttgacactccttgctcacaggcttctgctcactcagacctaaatgatggagaaaagacttctttgcatccttgtgatccagatctatttgagaaaagaaccaatcgagaaactgctggccccagtgcaaatgtcattcaggcatccactcaactacctgctcaagatgtaataaactcttgtggcataactggatcaactccagttctctcaagtttacttgctaatgagaaatctgataattcagacattaggccatcggggtctccaccaccaccaactctgccggcctccccatccaatcatgtgtcaagtttgcctcctttcatagcaccgccctggncgtgtttttggataatgccatgaaattctaatgttgacagtaagtctctaggggtaaaacatgttttttctcagggtgtgcaggtaaaccccagggctcattcccaggtcaatcaacagttaaaccacagnctgggggaacaggaaaaccctgcaactcaaactgggccctccaaacaaggtcagtcctgggtacccaagtagcatgtcctgggacccccaacaggctaaatggattccctccaaaccattaagcac

SEQ ID NO: 369017 - DNA, 377 bp, Homo Sapiens
gggaagaactctttttgtgctgttggcttttcttcaatatagaagacttcgaaaaggatatacacccctaatggagacacatttaagcagcaagagatacacagaagaagcctagggtgctcatgccttacctaagagaagaggctggccaagccacagttctgacgctgacaataaaggaactaatcctcactgttccttcttgagttgaagatctttgacataggttcttctatagtgatgatgatctcattcagaagatgcttagctgtagtttccgctttgcttgcttgtttaacaaacccaactaaagtgcttgaggctacctctaccttcaaataaagatagacctgacaatttgtgatatctaataataa

SEQ ID NO: 369018 - DNA, 795 bp, Homo Sapiens
agcggggggccgccccactgcgccgagggccgccatcgctattgcggcattctccctcggctccggaggtaggggcaactcttctcttcctgtctgggaaaaagaccatagctcaaaaggaaggccgagggagaagttagaaagggatgatgaacgaagcgttttgaggggactgcaacgccgcggcaatacccgcccctgagctgcgcgcactaccgcctcggtagctgtcatggccgccgggtcacgttgactccggcttggcgccgtcctggttttccgtcaccctggttctgtagtctcggttctccgactccctctttttctcgcttgtggactccgatatattgcccttcttcccttagaagaactgctgaaccgactctgagaaatttgaaaacatctggagaaaatgacccattggtttcataggaacccattaaaagccacagctcctgtgtcttttaattactatggtgtagtcactggcccattctgcttcaacaaatatgcaatgacttgaggtcatccaggcacgactcccttgaactggttcactgattttgagctgttaatccaggaaactgatgaagaatgcagcagattcatatttctcacctttacaaggttccataaattctttggatgaatctacccaagacagcaaggttacgatattatccaaacatttcaagtggcactgatacattgcaaggaacaggttccaagtgcccagcaggatgctcgtgatgaattaatttccatgcgatttaatggtagcctactggtatacca

SEQ ID NO: 369019 - DNA, 926 bp, Homo Sapiens
ccgccccacgtgcacttctcctctctgggccttggcttgggaccaggtacgaaggatccccaagcccttcaggcctgagatcagagccagatcagccttaagtcacctcccatccaagaacttggcctaaaaatactcccctatttctaaccctcaggacggatctgatataaatgccttccctgggaggaagggtgctttccccctccctagaggtgcccattccataccctgggagactgaggagagcattggctgaagcccagttcctttcccatccatccccaactccaataatcccccactcctcgcaggtctcagtgtcatgctgtcttggggcagggtgaaagggtagtggcagcagggcgcccactctggagatcctcaaaaaaggccctcctctgtggctggcagcctctgacctttccctgggcttcaaaggaaggctatggagtttgctgtgggccctgcaaccttcccagccactcctgctgcactaaggacttaggatccttttatcacaaatcgggattctctcccccaccccgaattctgtctgcttaaactggaatacacaggagcccttcctggcctggatggtgtctcccagcttccccgcccagcttgcccaccccatagttggtgagatgcgaagtttggtctgagttgtgaccccttcagagtagatgcccggcaggctggggttggcccctggagggtcaggggaccatcttcttattccctcttttctcattcctccaacttcctcccctccttcaattatttttttgtaaagttgatgccttactttttggataaatatttttgaagctggtactgttctatttctctcttggattcttttatgaactgtaaggattgttttggcgggatggagttagaaccttcaatgataatgttttacc

SEQ ID NO: 369020 - DNA, 1233 bp, Homo Sapiens
acgactctagaaggatcccggagggttgagctttgactatacgatttcccactctgaacgcagttcataaggtttctccccaggtatggattctctgatgattaataagccccgaattctggctaaaggctttcccacattcaagacatttgtaaggtttttctccagtgtggactctctggtgttgcacaagaatggaacttcggctgaatgctttcccacactcaacacatccataaggtttctccccactgtgaattctttgatgaagaataagggctgagccctgactgaagtgttttccacattcatcacatatatgtggtttctttcgagaggggattcctcttttctttcaaacctgcccttgggaaaacaggtttctccatattaaaaaatttgaggaacacccatactgagagtgccaggaacttcatgggattctaatgctgaaggaagctcctgctttggagctagtgctccattttcagtcctaccatcatcatcacagtgccttagggaatggagctcccaggatgcccacttgagctggttctccacagcatcaagctcagaacttggtaatccctgagcttcttcttgaagataccatgtcttcttactagtacttcccgttttcgtcgaagggagagaaaccggttgtccagggtcatcaagttcactctccaaatcctccagcactgtcactgcctcctctccattctctggatgatgatctcgaacccaagtctgtagctctttgggtaggatggcaacaaactgctccagcactaccagctccaagatttgttcttttgtgtgcgtctctggcctgagccacagacggcaaagttctcggagctggctcacagcctcacggggcccaggtgaatcctggtatccaaactgcctgaatcgctgtcggaaaatctctgggtctgggagatggttccaggggatacttgatccctcttcgccatcaggatcctcctccaacttcactctcagaattttttcctcttcatctggagttgggatgataagtattgaatcttcttccactgactgtgcagacattctgatttataatatttcaagaaaagacaactgaggcagaatataagcctcagggcaataccccgttttcttcacaggcactcctccggctcaggaaccgcagcagcttcgctgtccacggcagacgcagaaacgccgttcacaagcctttcccag

SEQ ID NO: 369021 - DNA, 429 bp, Homo Sapiens
  misc_feature (11)..(11): n is a, c, g, or t
  misc_feature (37)..(37): n is a, c, g, or t
  misc_feature (209)..(209): n is a, c, g, or t
gtgaacatttncctaacccccggcagaaacagaattncctaaaagcctatttccatttccaaagccagaactgaatgtgacctccatcctaaaggccagccattaggtacctgccatggaaataggtcattaacttgaaactccttatcaaaatatattttacccagtttcccagaatttcccagtacaggaccgcctgaagagagagnccattgttcaattccaattcagtgtgagtgacaaagtgaaatttagaagtgaagttgtctatttgatatttaactctttattaaatctttctttaaatttctgcctgtcagtctatattgctgtttttattatacatcagtttctttgtataacttgtgagttccatgtgttttgtttttattatgtaaatatcattataaataaacttatttataaatc

SEQ ID NO: 369022 - DNA, 1242 bp, Homo Sapiens
  misc_feature (18)..(18): n is a, c, g, or t
tcagcaagaactcaaccntgaatttaaaggtggcattccatatactaacatcccccaggtcctctcaagtacttctgctgaaacaaatttatttggctaggcactaagttgttttccagtgaatagtaactaaagaagcccctaccttgctccatggattaattccttctgttcattttccaactgcactaattgtgcatattactctgcctaatcttgtgcatgttttcattgatttccctctcccggcttttgcttctcttgaaactgttgcccagtcactttctgctccaattctcttcctctctaaatagtagtttattactgccacatctccatgcatcagcaaaatgttggtgacatttttctagcctggcagaacagattacttaaagctatttcacttcaaagcagactgaatgtgacttcatctaaaggcagcattaggtactgcatggaaataggtcattaacttgaaactcttatcaaaatatattttaccagtttccagaatttccagtacaggaccgcctgaagagagagccattgttcaattccaattcagtgtgagtgacaaagtgaaatttagaagtgaagttgtctatttgatatttaactctttattaaatctttctttaaatttctgcctgtcagtctatattgctgtttttattatacatcagtttctttgtataacttgtgagttccatgtgttttgtttttattatgtaaatatcattataaataaacttatttataaatcaaagatttgttaatttttggaaatcatgcttttcaaagcatcctaacttgctaagatgctaggtagtacgaccctctggatttggaaggcaaataaaactcttacagtgattatttagatattaaagactgagaactcacggcttaaccccagtcttgatggtatattgaacagactgaatatattttaccattacagggctaaaaggagtcttcatgtgttaatactacctccttgtacatcactatacccaaatcagttattcaaattgttaggaattttaccttttaaaatctcataatggatatctcatgttttctgtattaatgtattttcaatgataggctgtttctttttttgttgttattgttgttgttgttatatccatacttttatctctaatgaaatgtagttgggttcttcctgtaatgcgctattatgtcttgggcttaataaaaatatttgtgatcataaaaaaa

SEQ ID NO: 369023 - DNA, 1919 bp, Homo Sapiens
  misc_feature (289)..(334): n is a, c, g, or t
  misc_feature (353)..(379): n is a, c, g, or t
ttgcacaaaagaccgaggggctggagagagattcctgggacgcagggctggagtgtctatttcgagctcagcggcagggctcgggcgcgagtcgagaccctgctcgctcctctcgcttctgaaaccgacgttcaggagcggctttttaaaaacgcaaggcacaaggacggtcacccgcgcgactatgtttgctgatttttcgccttgccctctttaaaagcggcctcccattctccaaaagacacttcccctcctccctttgaagtgcattagttgtgatttctgcctnnnnnnnnnnnnnnnnnnnnnnnnnnnnnnnnnnnnnnnnnnnnnngaattatgtgctgctgttnnnnnnnnnnnnnnnnnnnnnnnnnnncagcagctgcggacttgtccccggctggagcccagcgccccgcctggagtggatgagcctctccatgagagatccggtcattcctgggacaagcatggcctaccatccgttcctacctcaccgggcgccggacttcgccatgagcgcggtgctgggtcaccagccgccgttcttccccgcgctgacgctgcctcccaacggcgcggcggcgctctcgctgccgggcgccctggccaagccgatcatggatcaattggtgggggcggccgagaccggcatcccgttctcctcccgggggccccaggcgcatctgaagcctttgaagaccatggagcccgaagaaagaagtggaagacgacccccaaggtgcacctggaggctaaagaactttgggatcagtttcacaagcggggcaccgagatggtcattaccaagtcggggaaggcgaatgtttcctccatttaaagtgagatgttctgggctggataaaaaagccaaatacattttattgatggacattatagctgctgatgactgtcgttataaatttcacaattctcggtggatggtggctggtaaggccgaccccgaaatgccaaagaggatgtacattcacccggacagccccgctactggggaacagtggatgtccaaagtcgtcactttccacaaactgaaactcaccaacaacatttcagacaaacatggatttactttggccttcccaagtgatcacgctacgtggcaggggaattatagttttggtactcagactatattgaactccatgcacaaataccagccccggttccacattgtaagagccaatgacatcttgaaactcccttatagtacatttcggacatacttgttccccgaaactgaattcatcgctgtgactgcataccagaatgataagataacccagttaaaaatagacaacaacccttttgcaaaaggtttccgggacactggaaatggccgaagagaaaaaagaaaacagctcaccctgcagtccatgagggtgtttgatgaaagacacaaaaaggagaatgggacctctgatgagtcctccagtgaacaagcagctttcaactgcttcgcccaggcttcttctccagccgcctccactgtagggacatcgaacctcaaagatttatgtcccagcgagggtgagagcgacgccgaggccgagagcaaagaggagcatggccccgaggcctgcgacgcggccaagatctccaccaccacgtcggaggagccctgccgtgacaagggcagccccgcggtcaaggctcaccttttcgctgctgagcggccccgggacagcgggcggctggacaaagcgtcgcccgactcacgccatagccccgccaccatctcgtccagcactcgcggcctgggcgcggaggagcgcaggagcccggttcgcgagggcacagcgccggccaaggtggaagaggcgcgcgcgctcccgggcaaggaggccttcgcgccgctcacggtgcagacggacgcggccgcaagcttattcccttta

SEQ ID NO: 369024 - DNA, 835 bp, Homo Sapiens
atataaaatggcaacaaactgcacatgatttcacaaatattaaaaagtcttttaaaaagtattgccaaacattaatgttgatttctagttatttattctgggaatgtatagtatttgaaaacagaaattggtaccttgcacacatcatctgtaagctgtttggttttaaaatactgtagataattaaccaaggtagaatgaccttgtaatgtaactgctcttgggcaatattctctgtacatattagcgacaacagattggattttatgttgacatttgtttggttatagtgcaatatattttgtatgcaagcagtttcaataaagtttgatcttcctctgctaaattgatgttgatgcaatccttacaaatgattgcttttaaaattttaagctaggaaaagaaatctatagaaagtgttctgttacaaaatgtaactgttaccattggaaatttcacgtcataggaagttagcctttatctaccaactttcaagaacttgtttaataaagcgaaaaactcaaccaaatggtacaaaaccacagtgtaccattaaaatatgcactaagtctcttttttacaaaggctgtattcagcaaggcgctaacttgcttaaatgtgaattactaacttctaaaactgtactttgattcacatgttttcaaatggagttggagttcattcatattacaatatttgtgtgctaaacgtgtatgtttttcagttcaaagtcatgatgtttttaaaatcttattaaagtttcaaaaatctgaagattgtttatctagatgtaaatttttattaaaaagttgcacttatgaaaaagcaaaaaatt

SEQ ID NO: 369025 - DNA, 1116 bp, Homo Sapiens
  misc_feature (364)..(376): n is a, c, g, or t
  misc_feature (681)..(692): n is a, c, g, or t
ttgatgggcaaacagtgggtttgtgggggccgcgcctgtgggagagaggcaaaaagggctgggtggccaataattacccgtgtgaaagaggggggtgtatcgtgatgaggggaggggtatattgtcgtgtgtaacataatcgcatccacgccgcggcggggaatggtttaccagtccaaggtgtggggtgtgtggagagctattttctcataaatttgagggcgcgccgtggggggtggggcccctccgtgggtattgggcgccacgggggaaaaaaattcctcttacggccgacccccctcctaaaagtgtttctggagggaaccggttggtagtatggcgcggggtgcgattatatttaacnnnnnnnnnnnnnaccttcccacctttttttcaagaagccggtgatatttaattttggaaacagaaattttgagaagaggtttccctgtgcgagggggggaagcccgacccccccagaccaaagttggagaacaaaatttttttaataccaaaaaggggcccccaaaactttcatggtgggtttgttccggaacactgggggttacccccgggggggtttttattggtgggaattcaaggctttggtcttttgcaggattttttttggaagcagtgtatgaccattttcattttctttttggtggccgttcttctaannnnnnnnnnnnggtatattaaacagtttatttcagtaacattgtaaggcaacaattaatcctcagtaagtcagcaaaccagtgacaagaaattgacaaacactccttctacagcttcctgagacagcaggctggcttgtggccccctgggtggtaacatcttaaggaatcctatcatgtttgtttatatatgctaaactgtaaaaacaaacacttcatgcgacaatcattcttaggtcaaacacaagaacgaactattttgaaatcaattcctcacactttttccctgaatatgcagtactgtactactaacatctaattctgtaggaaaataatgcatttgttagtgactttgttaggaggcttggaaaagacccttttaggaaatttatttaaatggatccactcttttaaaaattttttttaaatctcagga

SEQ ID NO: 369026 - DNA, 1348 bp, Homo Sapiens
ggaagcactggtatcacccagagtggcattacggccggggacgctagcatcttctgctgatcctgaaattgtaccagcggcaagatgtggcctggaaggggactttaagttctccacaactgccagcaatccttccaccaggcaaaacacatcatctaaggaaaagaagtgaggtttgcttagggcgtggcagcttcggataaacgcaggactccgcctggcagcccgatttctcccggaacctctgctcagcctggtgaaccacacaggccagcgctctgacatgcagaaggtgaccctgggcctgcttgtgttcctggcaggctttcctgtcctggacgccaatgacctagaagataaaaacagtcctttctactatgactggcacagcctccaggttggcgggctcatctgcgctggggttctgtgcgccatgggcatcatcatcgtcatgagtgcaaaatgcaaatgcaagtttggccagaagtccggtcaccatccaggggagactccacctctcatcaccccaggctcagcccaaagctgatgaggacagaccagctgaaattgggtggaggaccgttctctgtccccaggtcctgtctctgcacagaaacttgaactccaggatggaattcttcctcctctgctgggactcctttgcatggcagggcctcatctcacctctcgcaagagggtctctttgttcaattttttttaatctaaaatgattgtgcctctgcccaatctaacccccatacccctacattattcccccattcctgtttgcccgccttccgccctccaagaatctttcctaaaccatttccgtttgcccgggtcgggccctcctatggtaaagttgaacatgggcccataacttcgctccctaacgaaaccctttggccctgaactagcggctttggcatcctcaccccaataaaaaaaccccccgggagccataacccacgggttctctaaaccaaatcccaacacgggatgttctcgagggtccatccacaggggtttttaacccccccggggatccccctagctggagcccttcaactattaaaatttcctgtcactccgccgctatggccaacctcttttacggcaacccatgggctgtcccatattactttagcacccactatcctccccgtagaacgttccacaattcccctatctcaccaggttgcgccattacccggataactcgtgtaaacacgcgcaacgagcggtgactctcgaccacctctgatgtggtctccacactatgagccgacaataataactattgcgctccaagtggagtggagaaaatcgggccggcggacgcaataca

SEQ ID NO: 369027 - DNA, 830 bp, Homo Sapiens
  misc_feature (594)..(598): n is a, c, g, or t
  misc_feature (601)..(681): n is a, c, g, or t
  misc_feature (697)..(698): n is a, c, g, or t
  misc_feature (702)..(702): n is a, c, g, or t
  misc_feature (706)..(706): n is a, c, g, or t
  misc_feature (710)..(750): n is a, c, g, or t
  misc_feature (754)..(754): n is a, c, g, or t
  misc_feature (768)..(768): n is a, c, g, or t
  misc_feature (774)..(788): n is a, c, g, or t
ggcctgggtggcgattccgagacgagggtgaaccacacaggccagcgctctgacatgcagaaggtgaccctgggcctgcttgtgttcctggcaggctttcctgtcctggacgccaatgacctagaagataaaaacagtcctttctactatgactggcacagcctccaggttggcgggctcatctgcgctggggttctgtgcgccatgggcatcatcatcgtcatgagtgagtggaggagctcgggggagcaggcgggccggggctggggctcccctcccctgaccactcagctctccccaacaggtgcaaaatgcaaatgcaagtttggccagaagtccggtcaccatccaggggagactccacctctcatcaccccaggctcagcccaaagctgatgaggacagaccagctgaaattgggtggaggaccgttctctgtccccaggtcctgtctctgcacagaaacttgaactccaggatggaattcttcctcctctgctgggactcctttgcatggcagggcctcatctcacctctcgcaagagggtctctttgttcaattttttttaatctaaaatgattgtgcctctgccnnnnnccnnnnnnnnnnnnnnnnnnnnnnnnnnnnnnnnnnnnnnnnnnnnnnnnnnnnnnnnnnnnnnnnnnnnnnnnnnnnnnnnncttaaaccatcccccnnaacncaanttannnnnnnnnnnnnnnnnnnnnnnnnnnnnnnnnnnnnnnnnactntttccaaaaattgncggcgnnnnnnnnnnnnnnnaaaaaaatttttatacaacctcttttttgtggcgcggggggc

SEQ ID NO: 369028 - DNA, 873 bp, Homo Sapiens
ggggaggggaagaggatgtgatcatgcgaccgccagcagaagggaaattgtgaaagcgacctgctgtagaaaaggcggcccacagccacctcagcatgcagaggaggcccagctgctgagaggagttgcctgagagtgacctttgcatctgcctgtccagccagcatggaaccaaagcggatcagagagggctaccttgtgaagaaggggagcgtgttcaatacgtggaaacccatgtgggttgtattgttagaagatggaattgaattctataagaagaaaagtgacaacagccccaaaggaatgatcccgctgaaagggagcactctgactagcccttgtcaagactttggcaaaaggatgtttgtgtttaagatcactacgaccaaacagcaggaccacttcttccaggcagccttcctggaggagagagatgcctgggttcgggatatcaagaaggccattaaatgcattgaaggaggccagaaatttgccaggaaatctaccaggaggtccattcgactgccagaaaccattgacttaggtgccttatatttgtccatgaaagacactgaaaaaggaataaaagaactgaatctagagaaggacaagaagatttttaatcactgcttcacaggtaactgcgtcattgattggctggtatccaaccagtctgttaggaatcgccaggaaggcctcatgattgcttcatcgctgctcaatgaggggtatctgcagcctgctggagacatgtccaagaatgcagtggatgggaactgctgaaaaaccctttcctggacaaccctgatgccttctactactttccagacagtggggttccttctggtgaagaaatttccaggaatgatgatg

SEQ ID NO: 369029 - DNA, 498 bp, Homo Sapiens
  misc_feature (437)..(437): n is a, c, g, or t
  misc_feature (480)..(480): n is a, c, g, or t
ccagctaaacgaattagcatcaaccaggccctacagcacgccttcatccaggaaaaaatttaaacaagatgaagaaactccaagggtttgagtaaatacaaagactgaagaaatttcacagcagtttattaatgtatataaacttataaatatttctccagcaaatttgaggaagcatgatatatttgaattaacaccaagggtgatatttcttttagagatgttagttaatctgttttgtgtcttacgtgaaatttcactgtagactgttttaaattgccaagactgcacaaaattacagtgctaatgtatatgggttgcagttcacataaagaccaaaagcatctgttatggaaatgagtaggtaatattggggtgggttggtttgttctttggcagacttgggcttccttttgggtcctgggggttaaatgggncccgccttaatggccgttttatatttcacgtttttcccggggngtgtgtgttgccggggcc

SEQ ID NO: 369030 - DNA, 1232 bp, Homo Sapiens
  misc_feature (360)..(447): n is a, c, g, or t
ggaccctctctacactggctctctccacactggctctctccacactgggacttgcctccaccttgagcttgggggacctcagagagcggtcccgtgggcggcggtgttactcagtggtggtagaagtggagggcgtgtccgggtacttgagttcatgggcatctctcccgccgcctctcagcctatctgcaccaagtcttcacacgttcagtggcagctcttaccgttttgaaggccgcacgtgggcaagaagtcctgggcagcacaagaaagtcaatcacgttgagacagagagagcaggagaggaagtgggcccccagtagaagtgggcgagagagcgttgggtgggaacgtggcacnnnnnnnnnnnnnnnnnnnnnnnnnnnnnnnnnnnnnnnnnnnnnnnnnnnnnnnnnnnnnnnnnnnnnnnnnnnnnnnnnnnnnnnntatgttgtttaaaatgccagcggaaagtccatgggggtgaaagagtccggcaatggccagggagttagcagcttggcgtagtgtcttcccactgttttgtctgtcttgagaatagcattcaacgcgactgtgttcccgcagcagacgttaggccgctgcccacgccttgagtgccggacgaggtcaacataggctttccgtcacagaatatgtttgggcaggaagatcggaacacttggggctgggccatctaccgctcccccacggcacacacgagtcgtcagggaaatgcccgcctctgtgtgtgttgtacgtgcagccttctgggcagagccgtggagagttggacgtaggccaggtgtgaggaggagaggtgtgtttggggtggccactggctcccttcctgcgtgacgtaggctggcgtgggctcttcccccagccccttgccggtgctgccacgtgagaagggcccgggtgccggtcccgctattccggaattgtgggttcacctgaagtttgaggccaaacccccagcggtcagtgggacgccagtcgcctttgacctcttggtcaagctggccttgccgtgacccgtgagaatgcccaagtgccaatgtgtcccggggggcagggcaggggctgggatcctagtgatgtgcccagtctccttctcgtccctgcgggttccaccatcctcccatcctaacgcatcgttagggatgcggataggtcgggtctatccccagggcggtcaaagggatcgctttctggataaatcagcaagg

SEQ ID NO: 369031 - DNA, 516 bp, Homo Sapiens
  misc_feature (269)..(339): n is a, c, g, or t
gcctaatgttgactgctccgggctgagtgctgtggaaggggcgaggagggctgcgctgcgcatgtgggcgttcatctaacctggggtctggctcgggggctgaaagcgggttcaaagagaaccgggaacaaggggcagcgagagcacgagctccaagaatgggttgaattaagcttgagcggcgtgctgggctcgcgaggtcacggggcagaggttgcaaggttgggcttccctagccaaagggtagccccgaagtaggcattccgcgnnnnnnnnnnnnnnnnnnnnnnnnnnnnnnnnnnnnnnnnnnnnnnnnnnnnnnnnnnnnnnnnnnnnnnnaactatgttgtttaaaatgccagcggaaagtccatgggggtgaaagagtccggcaatggccagggagttagcagcttggcgtagtgtcttcccactgtttggtctgtcttgagaatagcattcaacgcgactgtgttcccgcagcagacgttaggccgctgcccacgccttgagtgc

SEQ ID NO: 369032 - DNA, 469 bp, Homo Sapiens
aggctgctaactggaagtctggaacccgtgaaggaaaatatgaaggtttatcgtcttgaacttggttttaaacataacgaaattcaacatatgatcaccagaatcccaaagatgttaactgcaaataaaatgaaacttaccgagacgtttgattttgtgcacaatgtgatgagcattccccaccacatcattgtcaagttcccacaggtatttaatacaaggctgtttaaggtcaaagaaagacacttgtttcttacctatttaggaagagcacagtatgatccagcaaaacctaactacatctctttggacaaactagtatctattcctgatgaaatattttgtgaagagattgccaaagcatcagtacaggactttgaaaaattcttaaaaacgctttagatttttatgtatgttaaaatgcagtattgtaaagtgaatatatatatgaataaatgaatatatttac

SEQ ID NO: 369033 - DNA, 856 bp, Homo Sapiens
  misc_feature (802)..(802): n is a, c, g, or t
ggagattatattgaatcatattaaatgtacagaaataaaatattagatttatatcaaattttccaatttgaaccagtggggaaaatcccacagaaatcagtaagtttacatttcaatttctatcttatttgactaactggaaagagattctttaaaatgtataacctgccattatgtaatttggtttcattttattctacctgttgtgtgagtttagtatatttaatttactttttgttactctttacatactgtttatttttgttagtttttaattgaagatggactgttgaaattgtataggaccagtgtcttattaatatgattaatatatttagaagagccacgtgaaacccatgacaaaatgaatgtgaatattctttctaaaaatttagaaaatgttatctttttgcatttattatgtaaaactgttttacagtatcaaaatttttcacttaaagaaaaaaatgccatgaaacatttgaactgatgagccacagaacttcagttgaaatttttttcactttttagcatgctaaatatacatctgagtttaaatgttctgtttaatggccattcataaattcaagcactaccactggtcagttttgtgtgatagaataaaaatatgttacctgcagtgtaagtacagcacactgtcaaattcttttccttaaggtgcacagtaaatgtacagatagttataggccactgttttgtaatgtagtacatttctaatctattattcctaacctattataactgtttgcagaaagaaaagaatttttctaataatctgtanaattatgctaacttctacaagtaggcttctaaataaaatttttaaaaagacaaa

SEQ ID NO: 369034 - DNA, 357 bp, Homo Sapiens; identical to SEQ ID NO: 1493

SEQ ID NO: 369035 - DNA, 282 bp, Homo Sapiens
actttgaacattagcattaagttggttaccgtacacatccaaaggcccagcatctcagaaaaatcattaggcggcacacctgtaccagagtctcacaagaataaaatatacaatgctacattgagtggttaaaaatacacaaaaaagtagttttaacaatctataaattttttatacttaaaatcatgattgagttgaaataaaaaagtgcatttcaattgctaaaaaaataatatcggtatagttaacacaagggggaaatcagtacattgagggatctcc

SEQ ID NO: 369036 - DNA, 1069 bp, Homo Sapiens; identical to SEQ ID NO: 1559

SEQ ID NO: 369037 - DNA, 857 bp, Homo Sapiens
  misc_feature (39)..(39): n is a, c, g, or t
ggcgtcctcttcataggtgtggccacaccctttattttncactggcttctccattcctccctttgtaatggggcaggtgaagttggtctgacttgggtcacaattatatcttcatccactccttctgttccgtcagcttctctgtcagcttgaagaccaccttgcttctttagttctttcagctgttgtttaaactgtacaaatttttcattattttgaaagtctgcatcagaattcttgctctgtaaagccaaaaatttcttctctaccaataattttaaatctggtattttttctggacgttcttctttcacatgatttattgtagattgaacagcctctacataatggtttagttgccgatccaatgtagcaaattcaaccattgccttgtccatactatattcactactcacttcagtctgactttccacaagatccaaagcaacactagaagccgtgtccataccagagttgatacaggcttggaagtttttcaaggaggagagagcagactctacaccactgaaggagatgaaaccagttgaacctgaatttgaactggacacgtcctggcatcttgaaattagtacctgggccaccaaacacagctggactcaatatatggggaaggtaagtgtcctcagtttttggagagagattaccctcttccaaaagagtgcttgattctgtgaagaagtcaacaatagcacagttcttaaaagcctggtagtccaagctgtctccgtctggtggcaccccaatttcccctgcctagacccacctcctttcctcagcccccttcgcctgccgctgaaaagtgagagcgggctcttgcgtcatcagccgtcgccccc

SEQ ID NO: 369038 - DNA, 1030 bp, Homo Sapiens
  misc_feature (40)..(40): n is a, c, g, or t
  misc_feature (272)..(326): n is a, c, g, or t
agtacagaccggcgcccgcgtgctcgtctccgcactccanctccagccttcctcaatatctactatttaggctcttcgaacttttctcgccatgcagatcctggttctgcaaattcggtccgaacacatccatacgaccgctctgacgtcattcacgtctcccagtaccagttgctccaaagaagaatccattcgattttcggcctaagctattctctgtgtaggtcaccacagttacttatcccttcatctgtgattggcaggactaaacnnnnnnnnnnnnnnnnnnnnnnnnnnnnnnnnnnnnnnnnnnnnnnnnnnnnnnncagctctttctggactgtagagttctttccaggctaccttgtggcagtttaagagtctggcatcattttccgctgggacctaaggatcgaggaggtgcttgtgactagactgccaatggacccatcacaaagtttaacccaaccttgatccccgagtcttcacaaatgctcactgaagaaaattcctggaacaattcagggtcctttcataacctctactctgaggtgttaataaaaaaccttagtaacttaaaaaaaatgagctgtacacaaatactgaacaataatgctacatatgttaagtatgtaagaaaaatatatactttgacataaataagaaacggtgagttgataattggatagaatggtggatagagtgatagatatgtagtaaagcaaatataacaaaatgataattgtacaatctaagtggttggactataaatatgcacttcccacaacatttttatatgtttaaacagttttataataccatattagggaaactgtttgtctcaaggaaatagagattgtgatatgttctagtacaatgaagtgtaatcatgtaaaataaaagcttttacttctggcaattaaagttaatcatgttagaacactgtctaggaatggttggaaaatcatattttattttctaatcaatatatttatgtcatctgtcaattacacttacggtgaacttaaaa

SEQ ID NO: 369039 - DNA, 886 bp, Homo Sapiens
  misc_feature (65)..(65): n is a, c, g, or t
  misc_feature (74)..(74): n is a, c, g, or t
  misc_feature (438)..(524): n is a, c, g, or t
  misc_feature (529)..(556): n is a, c, g, or t
  misc_feature (565)..(581): n is a, c, g, or t
  misc_feature (708)..(716): n is a, c, g, or t
ggttgaatcattttattaaaatactttttaggaaattacctatggaccatctgaatatttaaggntttaaaaangcacataattcatatttcaggtggtatttgcattcagtgccttactggtattctcagaacattttaatgatttctaacatttcttaacagtcatagatatatacattttcattttttgtacttgaatattctaaataaaactgacatttactcttgacaaataaaacatatatttactaaaatgtgtttaattttcctttctgaaaactctcattttaaaaacgttcatttaattatgtatttgaattattttggagatgaggtattttatgagtattttcagacaatgaaacttattagtctgtgtcagattctgagcaatcatagagtcatctaagttgtaaataaaaccttgcatagcacnnnnnnnnnnnnnnnnnnnnnnnnnnnnnnnnnnnnnnnnnnnnnnnnnnnnnnnnnnnnnnnnnnnnnnnnnnnnnnnnnnnnnnnccccnnnnnnnnnnnnnnnnnnnnnnnnnnnnctttggcgnnnnnnnnnnnnnnnnnaaaaaatttttaaaaccattccttgtggggcgggggcccccaaaaggaaagaaaaacgggcccaaagtggtttccccaagaaaaaccggggcccaagaaatagggcgttgggaattccccaccaatnnnnnnnnncccgcggggggggaaccccaaagggtttttaaaaacaatttcccgggtgggggttttcctggaggggtttttattggggaatcttcatctcaagagggaggccccaaggggagccctccatatatacaaaatttaccccccccgcccggggccttttttattggaagaaa

SEQ ID NO: 369040 - DNA, 2020 bp, Homo Sapiens
  misc_feature (59)..(75): n is a, c, g, or t
  misc_feature (80)..(140): n is a, c, g, or t
tggcgaattcggcacgagggcgccgtcttgatactttcagaaagaatgcattccctgtnnnnnnnnnnnnnnnnntactnnnnnnnnnnnnnnnnnnnnnnnnnnnnnnnnnnnnnnnnnnnnnnnnnnnnnnnnnnnnncaacgcaatctgaccgagcaggtcgtacgccgccgcctcctcctcctctctgctcttcgctacccaggtgacccgaggagggactccgcctccgagcggctgaggaccccggtgcagaggagcctggctcgcagaattgcagagtcgtcgcccctttttacaacctggtcccgttttattctgccatacccagtttttggatttttgtcttccccttcttctctttgctaaacgacccctccaagataatttttaaaaaaccttctcctttgctcacctttgcttcccagccttcccatccccccaccgaaagcaaatcattcaacgacccccgaccctccgacggcaggagccccccgacctcccaggcggaccgccctccctccccgcgcgcgggttccgggcccggcgagagggcgcgagcacagccgaggccatggaggtgacggcggaccagccgcgctgggtgagccaccaccaccccgccgtgctcaacgggcagcacccggacacgcaccacccgggcctcagccactcctacatggacgcggcgcagtacccgctgccggaggaggtggatgtgctttttaacatcgacggtcaaggcaaccacgtcccgccctactacggaaactcggtcagggccacggtgcagaggtaccctccgacccaccacgggagccaggtgtgccgcccgcctctgcttcatggatccctaccctggctggacggcggcaaagccctgggcagccaccacaccgcctccccctggaatctcagccccttctccaagacgtccatccaccacggctccccggggcccctctccgtctaccccccggcctcgtcctcctccttgtcggggggccacgccagcccgcacctcttcaccttcccgcccaccccgccgaaggacgtctccccggacccatcgctgtccaccccaggctcggccggctcggcccggcaggacgagaaagagtgcctcaagtaccaggtgcccctgcccgacagcatgaagctggagtcgtcccactcccgtggcagcatgaccgccctgggtggagcctcctcgtcgacccaccaccccatcaccacctacccgccctacgtgcccgagtacagctccggactcttcccccccagcagcctgctgggcggctcccccaccggcttcggatgcaagtccaggcccaaggcccgggccagcacagtctgcagccaggagagcagggacgtcctgtgcgaactgtcagaccaccacaaccacactctggaggaggaatgccaatggggaccctgtctgcaatgcctgtgggctctactacaagcttcacaatattaacagacccctgactatgaagaaggaaggcatccagaccagaaaccgaaaaatgtctagcaaatccaaaaagtgcaaaaaagtgcatgactcactggaggacttccccaagaacagctcgtttaacccggccgccctctccagacacatgtcctccctgagccacatctcgcccttcagccactccagccacatgctgaccacgcccacgccgatgcacccgccatccagcctgtcctttggaccacaccacccctccagcatggtcaccgccatgggttagagccctgctcgatgctcacagggcccccagcgagagtccctgcagtccctttcgacttgcatttttgcaggagcagtatcatgaagcctaaacgcgatggatatatgtttttgaaggcagaaagcaaaattatgtttgccactttgcaaaggagctcactgtggtgtctgtgttccaaccactaaatctcgaccccatctgtgaataagccattctgactcatatcccctatttaacagggtctctagtgctgtg

SEQ ID NO: 369041 - DNA, 1333 bp, Homo Sapiens
  misc_feature (843)..(843): n is a, c, g, or t
  misc_feature (1006)..(1006): n is a, c, g, or t
  misc_feature (1267)..(1267): n is a, c, g, or t
gggaaggtcgccgtggagtcccgaccagaggtcggggttggggtcggtgcagaccgagggctggtttccttgactgtgggagaaacgccgggagccggagtgacccgaggagggactccgcctccgagcggctgaggaccccggtgcagaggagcctggctcgcagaattgcagagtcgtcgcccctttttacaacctggtcccgttttattctgccatacccagtgtttggatttttgtcttccccttcttctctttgctaaacgacccctccaagataatttttaaaaaaccttctcctttgctcacctttgcttcccagccttcccatccccccaccgaaagcaaatcattcaacgacccccgaccctccgacggcaggagccccccgacctcccaggcggaccgccctccctccccgctcgcgggttccgggctcggcgagagggcgcgagcacatccgatgccatggaggtgacggcggaccctccgcgctgggtgagccaccaccaccgcggcgtgctcaacgggcagcatctggagactcgccacccgggcctacagcactcctagatggactccgcgcagtcaccgctgccggaggaggtggcaagtggtttttaagcatcgaaggcccaaggacaaccacggtcccgaccactattaacggtaaactctagtctgggggcacacgggtgccaaaagggtacccccatcaggagggcgaccccacggggaagcaccatggcgagtggccaaccgcccgcccctacttgcctatcgaatgggggaggtgcccctaagacgccggggaggccggggctactagggcgctggaataanaagaagaccctccactgtgagggctataggcgactcagcctaaaaaggccgcagagcggtccaccgaccccccgcgcggagcaacttctcggaagtaaaagccaccccttttgctatcatacaagggcccctgttcaccaattttcccaaccgctcgatcggngctctgccgccgcaagagggagaacacccacgttgcacatccggcgtctcactccgcaccctgacccagagggtgatgctaaaaccgctgccttatacatttttgacggcggatcaccaccacactacagggtatcatctctaacttgaaaccatgccccttattcatcataatttgaaccagcacttgtaacaccatagcgtgaaagatgcgggaccatgacaccgactgacaagagcgcggacaatacctgggtcagcncgcgccggatgctatattcgcaatcaacaaatcaccaataagacgggggtacccagcacatgcaag

SEQ ID NO: 369042 - DNA, 816 bp, Homo Sapiens
  misc_feature (642)..(642): n is a, c, g, or t
  misc_feature (787)..(787): n is a, c, g, or t
aaggtctgagcttgttacagcttatcagatgcttcagagagagaagaaaaagctacaaggtatattaagtcagagtcaggataaatcacttcggagaatagcagaattaagagaggagctccaaatggaccagcaggcaaagaaacatctgcaagaggagtttgatgcatctttagaggagaaagatcagtatatcagtgttctccaaactcaggtttctctactgaaacaacgattacgaaatggcccgatgaatgttgatgtactgaaaccacttcctcagctggaaccacaggctgaagtcttcactaaagaagagaatccagaaagtgatggagagccagtagtggaagatggaacttctgtaaaaacactggaaacactccagcaaagagtgaagcgtcaagagaacctacttaagcgttgtaaggaaacaattcagtcacataaggaacaatgtacactattaactagtgaaaaagaagctctgcaagaacaactggatgaaagacttcaagaactagaaaagataaaggaccttcatatggccgagaagactaaacttatcactcagttgcgtgatgcaaagaacttaattgaacagcttgaacaagataagggaatggtaatcgcagagacaanacgtcagatgcatgaaaccctggaaatgaaagaagaagaaattgctcaactccgtagtcgcatcaaacagatgactacccaggggagaggaattaccgggaacagaaagaaaaagcccgaaagagctgccttttgagggactttnaaaaaagctttgagtacaggccccaaaaa

SEQ ID NO: 369043 - DNA, 831 bp, Homo Sapiens
  misc_feature (17)..(17): n is a, c, g, or t
  misc_feature (32)..(32): n is a, c, g, or t
  misc_feature (52)..(52): n is a, c, g, or t
  misc_feature (61)..(61): n is a, c, g, or t
  misc_feature (64)..(73): n is a, c, g, or t
  misc_feature (140)..(179): n is a, c, g, or t
ccattcctggggaaagncacctgtcatctttnagtggccaaatttggataangttccccgnggnnnnnnnnnncggtatcttatctttgggaacaaaggtaaattaataaatgtgggaagtgtgcatgaatgagagagannnnnnnnnnnnnnnnnnnnnnnnnnnnnnnnnnnnnnnncttttaatagtttatgccagcaatctttgcttgaatgtttaacgatgccttcagtgtgatgctggccaatagatgattgcagtttaaaatgtcattattgtgcaggcttggataactaacattccatgatgtagcttgtttctgatgagatgattgtaggtacatttttctcattatccaatcatctgtgggatacttagttttctaatgtgccattatctatttttattctgcagttatgttcaaaatacagtacatattttaaaatagaataaattgttaaacataaaattttaaaagtagtagatgtgcgtaagaaaactttgtaaaatagttatgagtcctacccagtagcaacttctggcattcaagcaggattccactatgtaaatatctgtaatgcatttataataagttgtgtagtttgtcctgcatccatactacactatttgctaaagtctcagtgccatctcctaatgagactgacattttaaaagtctgtatggaatatcccttgataattcaaggaaattatcccctcctgcctaagttccaaactgggaaacatttcaaattatataaatgacatttcaaggacttttaagtatgaaagataatgggaaattttattggtttttgcctttttaaaatg

SEQ ID NO: 369044 - DNA, 847 bp, Homo Sapiens
  misc_feature (726)..(742): n is a, c, g, or t
gcccaggggaaaacccaggtgtttcttccatccccggttggggtttttattaagggtggaaaggtggatttatccaatttggatggataagccaggcatactctggtaggcaccaggcattccaattagtactttcacaggtccagaggggggatctttttcccaaaagattttttcactaaggaagggtatgctagcagtggcattgctcttgatcccttggtaagggctctttagcaaagaagacaagaacgtccccatcagtactacataataaagtgcaatggtgataggcagtagtccggccgatcttagaagctgttcctgagattttaaactgtccatcaagtaaaaggtcaaatcttttggtagcctgcacatccagctggggttggacagcattcagagctctcacaattaatttcagattttccattctatcatacttttttttggttgtaaagaaagtcaaattgatattacccatatcatggtagactgttcctcctccacttcttctccgagccagttttataccttcttctctcattagattcaggttacattcctgccaaggattttgatgcctaccaattacaacagagggagaattctgccaaaagaatagaattggtttgccttctagattcatatggtcatggatccagtcttccacagccagattttgatagacatcattggaaattgactgtaaaatgagcccannnnnnnnnnnnnnnnnaaagccagctgctgggacctggcagttacaaagtaactggaagcaattcttcattgaaaatgggatcagcatgctgcggcttccggtcgtacccacggcctcccc

SEQ ID NO: 369045 - DNA, 1438 bp, Homo Sapiens; identical to SEQ ID NO: 75704
  misc_feature (49)..(49): n is a, c, g, or t

SEQ ID NO: 369046 - DNA, 516 bp, Homo Sapiens
  misc_feature (114)..(114): n is a, c, g, or t
cgccggagcgtcatctgcgactccaatgccactgcactggagcttcccggccttcctctttccctgccccagcccagcatccccgcggctgtcccgcagagtgctccaccggangcccaccgggaagagaccgtgaccgccaccgccacttcccaggtagcccagcagcctccagccgctgccgcccctggggaacaggccgtcgcgggccctgccccctcgactgtccccagcagtaccagcaaagaccgcccagtgtcccagcctagccttgtggggagcaaagaggagccgccgccggcgagaagtggcagcggcggcgcagcgccaaggagccacaggaggaacggagccagcagcaggatgatatcgaagagctggagaccaaggccgtgggaatgtctaacgatggccgctttctcaagtttgacatcgaaatcggcagaggctcctttaagacggtctacaaaggtctggacactgaaaccaccgtggaagtcgcctggtgtgaactgc

SEQ ID NO: 369047 - DNA, 975 bp, Homo Sapiens
  misc_feature (275)..(284): n is a, c, g, or t
  misc_feature (960)..(960): n is a, c, g, or t
gaagcgaggcctgggtggcgaattcggcacgaggaagagaatgagaggctgctgtggaggctgaggaggcggcggcggagatctggaaacagtatctcacctccctaaactggttaatagtggcatggaagatccatttgaggaagcagaccagcccactacagagccaggcatggtcctggacagtgtggaagcaggagacacaacacctcctaccaaaaggaagagcaagttctcaggctttggcaagatcttcaagccctggaaatggaggnnnnnnnnnngtagtgataaatttaaagagacttcagaagttttagaacggaaaatatctatgcgaaagccaagagaagagctggttaaaagaggggttctgttggaagaccctgagcaaggtggtgaggatccagtaaagccaagcgatgccatgttaaagaatggccataccacccccatagggaatgccagatcatctagtccagtccaagtagaggaagagccagtaagattagcaagtcttaggaaagctattccagaagaggacctaaagaaacgactaggctcaactggaagccagcctaattctgaagcagagtctgttcctgagaatgtacccaaaccacctttacttcctcccaaaagacccttgtcctcttctcatgaagcaagtgaagggcaagcaaaggatgccacttcctctggcggcacggcaaggttcatcatctccacctccatcaccacagcacccgctgccaccactgctgccacaagccttgcaaagactgttaatctctctgtcaccccttccccagcacccaggactctgcctgctgctcctgccagcactaacactactgctaccccaagcctcactcatatggtccctggccagcagccccctatccctccccctaaacagctcacagaaatagcaaccctgttcattgctgaactgtccanagcaataaacagtgg

SEQ ID NO: 369048 - DNA, 716 bp, Homo Sapiens; identical to SEQ ID NO: 2151

SEQ ID NO: 369049 - DNA, 769 bp, Homo Sapiens
ttccacttgtaaaatcattttattggtataaatatacatatgaataaaatacttccagcctgtaatgtaagtgaatatttgtgaaatgtcttataaagagtagtattttgatttttacaggtgtcaaagtattctctcttaaaatcacacattaaaagctaatatgcagacagaaattaaaggccttcaaaaacatgaatattcataaaacctcattccaatcaactatatacattaatctgggcacatggtaaaatcagccatgggcctctctcactctgttcttagctgtgctcgttgatggtatgcaaaggtcaccgaccaagctttaaatgtacaattccacatcaggaaggaagaagttccccatgggagaaggtaaaaaccatacccaagatctaatatatataatctatacaaattattagtgtgctctgttaatataattacaatgtgcaattgcatacatcaagaataaattgctatattgagtcctgtgcggatttgacacaggtacacttagcagtactccgaggtctgctgtggtgttacttgtgtgagtgtgtgtccagttatttcatttatctccaaaaactcatcttgcagggcaatctgtagctgcctcagataaattcaagtagggcccatgggataattgctggctttcattaaaggcatatgaaggaatgtttagaaatcaaatgcaaagggttggaggaagaccaaacaaatgtgctttgattaccaagaaatggatctgtttctatac

SEQ ID NO: 369050 - DNA, 842 bp, Homo Sapiens
  misc_feature (635)..(651): n is a, c, g, or t
  misc_feature (653)..(658): n is a, c, g, or t
  misc_feature (660)..(662): n is a, c, g, or t
  misc_feature (664)..(670): n is a, c, g, or t
cagtactcccggccccagccatttcggactgggagcgagcgcggcgcaggcactgaaggcggcggcggggccagaggctcagcggctcccaggcctgctgaaaatgactgaatataaacttgtggtagttggagctggtggcgtaggcaagagtgccttgacgatacagctaattcagaatcattttgtggacgaatatgatccaacaatagaggattcctacaggaagcaagtagtaattgatggagaaacctgtctcttggatattctcgacacagcaggtcaagaggagtacagtgcaatgagggaccagtacatgaggactggggagggctttctttgtgtatttgccataaataatactaaatcatttgaagatattcaccattatagagaacaaattaaaagagttaaggactctgaagatgtacctatggtcctagtaggaaataaatgtgatttgccttctagaacagtagacacaaaacaggctcaggacttagcaagaagttatggaattccttttattgaaacatcagcaaagacaagacaggggtgttgatgatgcccttctatacattagttcgagaaattcgaaaaacttaaaggaaaaagattgagcaaaagaccggaannnnnnnnnnnnnnnnnannnnnnannnannnnnnncctttggtcggcccgcccctcgggccccttgaaaaaaagctttttctaaaaaccattttcccttttggggccgcccggggggcccccagttaggggtaaaaaggggaaaccctgggggcccaaaaagcccgggttttcccccaaagggaaaatacccccgggggcccccagg

SEQ ID NO: 369051 - DNA, 792 bp, Homo Sapiens; identical to SEQ ID NO: 2200

SEQ ID NO: 369052 - DNA, 1046 bp, Homo Sapiens
ggtgcttttttaccttatgtagagatcttattacaaagtgattttctacattaaaaagagactgaaataaattgtatagttacttaactaatgaagacatttcagaactctgggatgattttaatcttgaagtagtaggtggtatagtcataaaaccattcatccccttcttgattgtatcttaattttctggctttaaggcgacatctgagaggtaatgcattcttttttatattgaaatcataaactatcacccgctgcttctctgagttacttttaattttgccttgtggttatggtttggcgtttccttctgtttggttttcagagccccatgtctatatagtcctgagtgcaagtaattactatacttgtaaatgaagatcagtatttctgcctagatctgataaaaaaattttcttgtcttagttataaaaattcaaagaaatgtgttacaaagatacttagtatagctcctcagccataacctgagaccttgggatgaaatttaaacccagataccatttactttgcagatcataaagctttttatactcttgttatcaaaatggccctatttttccaggcactaaaggattggttaagtagaaaaaacctttttccaaccgaaagggatttgccccttttcctttgcttctccaacaaacagggttcatatgaaaatttttcccacctctctccctttttccaggcgcccttcccaacaaggggcaactggtacatttcccgctggcccccattggcgttcccaccaattttacttcaaaatttccccaccttgaaaattttaattcttggtgctgcggttccgtttaaactcttcttccccagtcaacaaccgaatctaaccttttttcacgcgatcgatgaccaacggtaaacactttttccccacccctggtttattccgcctaaacccacggcatatctttctgttaaatatcaaaccgacatattccccttccgagagggtacacaggggactctttcctaagaccattttttaatgtccgccacataaaaag

SEQ ID NO: 369053 - DNA, 671 bp, Homo Sapiens
ccagcattccaaagtacaggcgtgagccatcatatctggcctctttttaaattaagtcaggcaatacgaatttgacttccttctctcacaactcctaccctcaaccagccatgtccaacctttttttcttctaagtccattttaatttctgtacttttgctgctatcctaattcagtgcctactcaccttttgtttaaatatcttctatggcccactttccctgcctccaatttaatccatccttcaacctgcggccatagtcatcttatttaaatacagatttggccaccttcagtgaatcctcagatcacacagagtaaaggtccttgccagtcaatagtatctttctctgtctcatctctactgcattctatatgcctggcacccaaagctcattccaaggtactttcctttacaccacaggaatatatgagaatctcaatcagggtgtttgtaatttcacaaaggatgtacaatgtgtttattctcttacaaactacaaacagtaaagctcaaccatttttcttttattaaggacaagaagtatgtaagtgcaagtgttagaataaaggttgagaatcactgtctatatagaccacatatataccatatactctcatttagatataatctcccttttaagttaataaattagcatagttttccatcc

SEQ ID NO: 369054 - DNA, 798 bp, Homo Sapiens
cctatctgaaatccaatggtgagaaagtgggtgaagaaataggcgaaggactagttatgcttcccaagctgtattttttgcactagcctgaatagggctagaagaaaactgccccgaacttggtgtctgcaaggggctcctacactttacaggagacaaatctattgaataaaacatctctagtgatgtttgaacaccactgtgaggacttccgggagaagccgaaggtaaggagtcggagatgcttccgttcccatctaaaaacagctttcttctgagggatgaagaactgaggtttccaggagattgatctgcaaattcatcagctctaaaatagtcacctaatatattttctaaattaaaatccacaggaagagacagcaatgtctgacaagcagcatcgcttttctcagaatgaatggtcagcttttttccaactggagagtcactatttatgttagtgcatttactggaatgacattgtgaaagctgtttcccttcatgatcagtccaaggagagggtacgatgacatctttagtgaaaaatggtaattttgttgatttaaaaacagaaggactggcgagagtttgttcatggagattagaataatcactaggactttcaaaaggatttaaaacagggatccttcctggagtttctggtgttatttgcatctttgattccttgacatctcccatagcacagagagaaaacggtgcgtacaaaacgaagcccccagtaccgactccagggagctccgggggccaggccagcttccacgacaggcatagactccc

SEQ ID NO: 369055 - DNA, 909 bp, Homo Sapiens
gtcccttgtcctttcagccgtgtgcgtccacatctttgttgactgtctgatttgcgggatgattctggtgcacgctcttcctcttggtttactaagggggctggactgttgtttaggtggctcggcttttgatctagccaaacttaaaaattcactaatggaatcttctttcttttcgtgttaggaggtatcccatctgaatgtttttcttgatttgtcgggacgtcggtgctgtgatactttttcacttgatgcttgagtggtgggcaaggaagctgtctctgggagcgtcagaaagttgaagactgagtacttgtcacgcttcactcttggtaagccaactaaagttgaatctggataagggtcagggacattaaatctcttacatagaagcttgtcagggtgccactcaaacgtgtctcgggtgagcttcccaaacatcttcatcttcacagccgactgcttatccccgacatcattctcttggtctcgagggacttcaacctgatctgagtcatcctcctccttggcatgagtgaacctggaggacaaggtcgaatgggaagatgcgtacagcagggccgcccgggcaaactcatcccgctcacggcctcgctcccactctgtcaggctggggtccagacagcgttccagagcatctttctgaccctgtttcatgtgtactaagaactcgtcgtatcccttttgcttttccggatctttggcgaaaggcttgaagttgctggcttttaaggtggccgtcccaccacctaatgccatgttccaagagcagtgcccagcagccgctgcaggggagggctgggctctgctgctctgagcgttctgggcccgactcctggccgtgagctgagctgcttatcaaggtcaagatagcctgctctcatttca

SEQ ID NO: 369056 - DNA, 979 bp, Homo Sapiens; identical to SEQ ID NO: 2777
  misc_feature (964)..(964): n is a, c, g, or t

SEQ ID NO: 369057 - DNA, 798 bp, Homo Sapiens; identical to SEQ ID NO: 2783

SEQ ID NO: 369058 - DNA, 1285 bp, Homo Sapiens
  misc_feature (679)..(692): n is a, c, g, or t
  misc_feature (1017)..(1017): n is a, c, g, or t
ccccctgatggaatccgtgacccacagagctagacagataagatgcatagtggaccagtcataaaaggcggtgtttaggtgatcaggatgccgttggtggcatttacgtgctttatatgatttttacctccgtaacaaacacaagaaataaacagaatggtccttaacagagaggcaagatgggttccttggagaagctgatttgccaagatgcacatcgctattaacagccagtcataaatgaaatgaaattgaagaattcatccaaatgctcttttccctataacctcttttctcagcaaaaaggagataaatttgaaaacagataaatgtaacaaccagtcaaagaagcaggggaaaagtaagctcctccaaagttgcttgcagtgctggaaatagatctcatttttaggttttctcttcgttccagataccaaataaatgggacagagaataaaatttttgttaaaatatgtgctcatctcctaagtagctcttcagagtctgaccgtaagtaaaaacacacagaattgtgttgactgggggaggtgaatcacaaaaaagttacgaggagtttaagagttaaatattatttgatcgtggctgtcaaatttagtgaacaacatagattggatttggagttggtagtaggtatggttctcataccagaattctcttnnnnnnnnnnnnnnggacaattggaattgccttatttatttttaaaatcaatgcttactagttggtaggattcccaggtcagcagcagggttgattaaataatcttgacaatgagcagctgccatcttgggggatttcattctgtggttttttaaatgtttcgtctttgatgctaccatccagggcttcttattgtgaccttgtagcctattttgttcctgctgttctctaacatggtgcagttcacgcagactggtttaggtacttcacaactcaccattgtctctctgaccccaagcctagtcccttttacatcaccatctttctcagacttcttgncctattcttaaaatatggttttggttaatggattggaataaggacatccagcttaaccaattccctgtaacgggtttaacgttgttgaaattcaagggcacataaataaaaatcctccctgaaggtgtggcgtaaggtattaaaccaaagtaatggtatccaaagcggtttcacttttattaatgaaaatccatttcatttggggaaaggaaaaacctgccaaagaattatttgggggggacctatagggaattaataaaaatccctg

SEQ ID NO: 369059 - DNA, 1556 bp, Homo Sapiens
ttgccaagtgatagaggaatgcttgttgggcgaagattgaaaaaagccgaagttcaggtttttcttgtgtataagttttgaaggggaattttccaaaggagaaaagccagccaggaatttagttttgaatatttcgggcccaggaaggttcccgggtgggggcttttccaataattctaattcttatccttctccctagtccccccactgctcccttaccccaagatttcaaagtttctattaaatggaaagttgcatcttcccagccccaaagaaactggggagatttagaaatgtataaaacttgattagcaagttgtaggaaacttgacaaagttaaggtgtcagatgggattctggcaagatgtggcaatatttaatttctgttttctttccggaaagtatattcaatgcttttgaaaaattagctacatattacttctccagctcatcattaattgtatagaacctgtgtctggtgactgagacttcaaattttgcaccttaaaaatataagagggcccaagaattaaaggcagttggcttcaatataagcacaggagagccagcgtttctgtgactgaagccaagttttttagagcatgatactcaagtaagaaagaaatttctcattcttctgtaagacatggaattagagaattaagaggaggcagagaagaacttggaaagcaaaaccacacaccatttcacaattctggaacacggacatgaacagtaagtgaaactttctaggtttagatccattaaaagattatccatttacacttcatctgatggattttgtcagaaaagatgttgttaataatatggataaataataactgttcaaaaggattccccacttaaaaaaatgctttggttcttcctttatttcacaatatttaaataagcttctcttattggatctccttgtatctggttccatctcccctcatttttctcagcctcccatgttatagggatgaggtaaaggagggaaattttgtcttgcaatcataggaagggtggacataaaggggaagaattttttttgtccaacttacataaacaatgtcctgattatagatcttttggtaacaagaaatgtccaaaaaattgcttcagccatgaatgtgttattttgctcatctccatttcaaataaaaaaatagagcaagagtaggtaagggaattaaacatttattaagccaggcactgagctgggtattttcaataatgatgtgaatagaaatataactaacatattatattgggatgtctaagattttgtttggcaggcattggttttggcatgcagtaaaaatgaagatgttatgataatagcagttagtgttatctccaatactattgacaaagatttaactacccatgttgtcccctcaaaataggaggagataaatgaataaaaccatggaaaacagagagcacaatgtgccataagcaaagatttacagaatgaaaaatgcaaaataacaaatcagataactatagtcttctataaatctttaagtctaaaaaaatagacattacaatcc

SEQ ID NO: 369060 - DNA, 638 bp, Homo Sapiens
  misc_feature (486)..(575): n is a, c, g, or t
gcggcacgagggtgtcagtcaagaggcaacactaggaggcaaggaatctgcatttctttcagaccttggcagagagcgccctgggaaatgcggatatagaaggtcaggagaacatctctcctggttatacagcattccaggactcctcatctgtttttaagagggaaatctgagttttcaaggaaagccgaatacagttgccaagttgccagtcaaagaaacaatgtcaacacctgctcatagagatggaattcctaacccggaatattgcccttgaattacaacgagaaaaagaacacttcttattcctgtagcacctcttcaagtgagatgggcagaccacctcaggatgggaaatgtatttcttcatccccctctctacttccctgtgacctcctgcaaataagggagagacaaagagaagagcagaagaacagaagaatggagtggcaaagagaagagaaggagtgactgaacattgacaannnnnnnnnnnnnnnnnnnnnnnnnnnnnnnnnnnnnnnnnnnnnnnnnnnnnnnnnnnnnnnnnnnnnnnnnnnnnnnnnnnnnnnnnngctccccatccatctcaccaagagccagctccaccactcaataaaaccttacattcatctttc

SEQ ID NO: 369061 - DNA, 380 bp, Homo Sapiens
  misc_feature (26)..(26): n is a, c, g, or t
ccttaacccggaatattgccccttgnattacaacgagaaaaagaacacttccttattcctgtagcccctcttcaagtgagatggcagaccacctcaggatggaaatgtatttccttcatccccctctcctacttcccctgtgaccctcctgcaaataagggagagacaaagagaagagcagaagaacagaagaatggagtggcaaagagaagagaaggagtgactgaacattgacaagactttggttggggatggtcagagaggagattagctgctagacggccacactgcggagaaagatcattttcccactccatcccccttccagctccccatccatctcaccaagagccagctccaccactcaataaaaccttaaa

SEQ ID NO: 369062 - DNA, 768 bp, Homo Sapiens
gggaatatccaaagagtggtttgaaggagaaagaagcattgtggctttatatcctctgggcctgggtttcctgaagtcaccacacatagaggagagagaaaatggctgagttaaagtacatttctggatttgggaatgagtgttcttcagaggatcctcgctgcccaggttccctgccagaaggacagaataatcctcaggtctgcccctacaatctctatgctgagcagctctcaggatcggctttcacttgtccacggagcaccaataagagaagctggctgtataggattctaccttcagtttctcacaagccctttgaatccattgacgaaggccatgtcactcacaactgggatgaagttgatcctgatcctaaccagcttagatggaaaccatttgagattccaaaagcatctcagaagaaagtagactttgtgagtggcctgcataccttgtgtggagctggagacataaagtctaacaatgggcttgctatccacattttcctctgcaatacctccatggagaacagatgcttttacaattcagatggggaacttcttgattgttccgcagaaagggaaccttctcatttacaccgagttttggcaagatgcttgtacagccccaatgagatctgcgtcatttcaaagaagaatgccgttccaccataaatgtctttgaaggagactagggctacattcttgaagggcctatggtggtccactttgaagttacctgaccttggaaccaattgggggccca

SEQ ID NO: 369063 - DNA, 983 bp, Homo Sapiens
  misc_feature (76)..(76): n is a, c, g, or t
  misc_feature (105)..(105): n is a, c, g, or t
  misc_feature (140)..(148): n is a, c, g, or t
  misc_feature (214)..(255): n is a, c, g, or t
  misc_feature (318)..(339): n is a, c, g, or t
  misc_feature (392)..(519): n is a, c, g, or t
  misc_feature (643)..(651): n is a, c, g, or t
ccccgcccgctgtgttaggggcgggccgtgtttagtggcgacaggaaagaagcgtcatgtaatgtggggtgtgttnggggacaggggggacctagacggcggatntccttggtggtgtggggagagaaggcgccccacgnnnnnnnnngagtatgtgggaggaaatgctcttgtgggggaaggaggagaagaggttttcttttctcccccccannnnnnnnnnnnnnnnnnnnnnnnnnnnnnnnnnnnnnnnnntgtgcccctcccccggcgcggaagggaacaaaaagagggttttgtttgttttggtgtcccgcnnnnnnnnnnnnnnnnnnnnnncacccgccggcggggatggtttttaaaaaatatcgggtaggggccgcgccccnnnnnnnnnnnnnnnnnnnnnnnnnnnnnnnnnnnnnnnnnnnnnnnnnnnnnnnnnnnnnnnnnnnnnnnnnnnnnnnnnnnnnnnnnnnnnnnnnnnnnnnnnnnnnnnnnnnnnnnnnnnnnnnncaaatttccctttacggaagggccaccatttgtgaaaacggagggatattgccctctctatttctcataatttttaaaaccaccccccagtgtataaagagaaataattccgccaaaggggccnnnnnnnnntttaaaaaatggttttattccgctgggggcagggccaagcttgtcctcctctgtccaaagcaacaattgaaccaaccgggccctcttttattttttatcacaccagcaccacaatgggatcgaggccaggttcttgtgcaatttgtgaaccctttggtttgcagagttgttagcgtagtggctcggctcatcagctctgagcatttgaatatctaatgtttcaaactgttagtcctgttctgatttatattcatccctgccattcctattaacttaagttacaccgtgcccacaatcttaatattgatcttgccttgtgttactcacagttt

SEQ ID NO: 369064 - DNA, 789 bp, Homo Sapiens
  misc_feature (421)..(432): n is a, c, g, or t
  misc_feature (538)..(548): n is a, c, g, or t
  misc_feature (572)..(572): n is a, c, g, or t
atcagcatctcactttcttctccattcagccccaaccccctccctgccatgctttccaccccaaggacccaccagacagcgcagcagaccgcagactaattttaggtaccacttaaggagtccccccattctggcccccatcctctccctcaccccaattctttctcgctggacctgttatttcccaagaagccgcatcgcccaaggttggcacctctcctaacctgccacacgacagctctcacctctctaggaattgggggctgtcagtgtcacagggcggatctgggcattctctctctatgaccagtccatttctagatggtttgcctattaaagaagtgggggggaaatactgttttctccttaaccctcaagctaccagtctctcctcttccgcgtagaggaagaggggggcagnnnnnnnnnnnngctgaagtataaaaaccctcctcctcccgttattatttaagctactgccatcaaccccacccccataaagctgtgaaagccccttttgcctccgcttttgacagcnnnnnnnnnnncccccgtggggcaggggacttcgngatttttgcattttctggggttggtttttccctttccactcttgggggtctccgtttcaggcaattgggggtctccctccaccccaaagccacaaggtttccctttaaaaaatccctttgggtccaacccaggaaacctttgaattttttccgggcattttttgggcctgggggaaatatctgggttgggtcctcccccggggcttttgggcttccc

SEQ ID NO: 369065 - DNA, 647 bp, Homo Sapiens
  misc_feature (41)..(56): n is a, c, g, or t
  misc_feature (64)..(218): n is a, c, g, or t
  misc_feature (637)..(637): n is a, c, g, or t
gggccccgccccccaacaaaaggttttaaaaattttttttnnnnnnnnnnnnnnnncccaaaannnnnnnnnnnnnnnnnnnnnnnnnnnnnnnnnnnnnnnnnnnnnnnnnnnnnnnnnnnnnnnnnnnnnnnnnnnnnnnnnnnnnnnnnnnnnnnnnnnnnnnnnnnnnnnnnnnnnnnnnnnnnnnnnnnnnnnnnnnnnnnnnnnnnnnnnnnctaacaaaaaccacttttatttttaaatcaatttactatcaaatacacaacagaactcggtgtggaggcagtgtttgatttcaactggttatctgttaaaaggcttgtgtcccagtgcaacactacctttgtgcagaaaatgttcactgaaaataaatatcctaagaatggataatcttcactgtagcatcttgtcagtggcactacttttaaaaaaatgattccctttacgaaaaagctagtatatttgtattcagagattacaagtgagggaacacactgtgaatattaggtttaccatatgtgaaatttgtttttgacttacaaaaatgcccatgtcacatggttcacctttttatctactaaagtttaaaaccaaatgtcatttggtgttgaactttggttttttaaaaaatgcngtgaataggg

SEQ ID NO: 369066 - DNA, 1627 bp, Homo Sapiens
agcgggaggcggcgggcgggcgaacgggcgagcgagggagggggcagaggagccgagttagctcagccaggcggcgacttcggcggcgccacgagagcgggcagcggaggagattgacgtgagtgaattcagatataactcaagcttgttagagggctttttaaaaataaaaagttgattccgtgcaagagagcaagttactgctgcttaccgttcagagacttacaggtgcttgcctgcattgcaataaaggactcatttattgagcaagacttatatttatctcttcattttggagagcctaataaactgttattacagtttctctactgactttcaaaacgttttgaagtttgaaagacctttgcaattaaaacagcatgagcacggccagaacagagaaccctgttataatgggtctgtccagtcaaaatggtcagctgagaggccctgtgaaacccactggtggccctggaggagggggcacacagacacagcaacagatgaaccagctgaaaaacaccaacacaatcaataatggcactcagcagcaagcacagagtatgaccaccactattaaacctggtgatgactggaaaaagactttaaaactccctccaaaggatctaagaatcaaaacttcggatgtgacctccacaaaaggaaatgagtttgaagattactgtttgaaacgggagttactgatgggaatttttgaaatgggctgggaaaagccatctcctattcaggaggagagcattcccattgctttatctggtagggatatcttagctagagcaaaaaatggaacaggcaagagcggtgcctacctcattcccttacttgaacggctagacctgaagaaggacaatatacaagcaatggtgattgttcccactagagaacttgctctacaggtcagtcaaatttgcatccaggtcagcaaacacatgggaggggccaaagtgatggcaaccacaggaggaaccaatttacgagatgacataatgaggcttgatgatacagtgcacgtggtgattgctacccctgggagaatcctggatcttattaagaaaggagtagaaaaggttgatcatgtccagatgatagtattggatgaagcagataagttgctgtcacaggattttgtgcagataatggaggatattattctcacgctacctaaaaacaggcagaatttactatattcccgctactttccctcttagggtacagaagttcatggtgagtataaatctgtacttggaatcagtgccatcctgtgacctttgagtatgcttttatttgtaattacatcttcatatctgtgaatatactttatgctaattatttcaagcctttggctctttcttcagttgatcaattaaagattcgttttacgtaaattaactgactttttaagaaggttgtaatagtaacttaattaaattcctcatctttcacttagtttttggtgtcatgatgacatagccattggtgctagctgaattgattccggtattattctatatacaaaacagagcttgagtatcctaaactgaaatccaaaatactgcagaatttgaaaccttttgagccacgaacatgatgctaaaaggaaatgttc

SEQ ID NO: 369067 - DNA, 615 bp, Homo Sapiens
gaggaggaaggagcgtccgccattttgggagcttcgagtcaacaataaaggaccgagggtgccgagcgggagtggcctcgttgattgacgtgagtgaattcagatataactcaagcttgttagagggctttttaaaaataaaaagttgattccgtgcaagagagcaagttactgctgcttaccgttcagagacttacaggtgcttgcctgcattgcaataaaggactcatttattgagcaagacttatatttatctcttcattttggagagcctaataaactgttattacagtttctctactgactttcaaaagttttgaagtttgaaagacctttgcaattaaaacagcatgagcacggccagaacagagaaccctgttataatgggtctgtccagtcaaaatggtcagctgagaggccctgtgaaacccactggtggccctggaggagggggcacacagacacagcaacagatgaaccagctgaaaaacaccaacacaatcaataatggcacccagcagcaagcacagagtatgaccaccactattaaacctggtgatgactggaaaaagactttaaaactccctccaaaggatctaagaatcaaaacttcgg

SEQ ID NO: 369068 - DNA, 912 bp, Homo Sapiens
  misc_feature (736)..(736): n is a, c, g, or t
  misc_feature (740)..(740): n is a, c, g, or t
  misc_feature (831)..(839): n is a, c, g, or t
ggccacagccgagattctgaacatacggagtgtaggtcttgctgtgaaggaatgatctgcaatgtagaattacccaccaatcacactaatgcagtgtttgccgtaatgcacgctcagagaacatctggcagcagtgcccccacactctacctaccagtgcttgcctgggtctttgtgcttccattgctgtgatgccaccattcctaggagaggcagagaccagcctctaaagcacaagccaaaaactgtgtgaacggtgaactttggagtgaagatctatcttgcacttggtgaagagtgcacattggacctcaaggcgaaagccagtggtttgcttggataaaatgttcccgcatgaggccacaggactgaggatgggaatttggcagggcctgagaagatggtctgacttccaggcttcctggtcaaagagagctacgtttgggcagttctgcagagaggatcctggcaactagtcccacctgactaggcctttagctgaaaggatttcttgacctccttgactgcctcagaggctgccaggtcaaaccctcttgtttatgtgattagctcagagcatctctatgaaatctaacccttcccctcatgagaaagcagatttccccaccaacagcatagtcaatgagaaaggcaactgtacgaaaaaaacttccagtggaactaatatgaaatctatttgcaaaattatggggggaaataaagcttttaaattatngcanaaacgaaaacgacgtcaaatacaacaccgttaaataattaatacctatcgaaaaccataaaaaataccccaaagaaacaaacactgaacannnnnnnnntatatagtaccccctacgaaccaaagaaatattttggcccccctttctccctttaaaaaattcttttaaaaca

SEQ ID NO: 369069 - DNA, 706 bp, Homo Sapiens
  misc_feature (100)..(119): n is a, c, g, or t
  misc_feature (133)..(133): n is a, c, g, or t
agatcaagtgttcttccagctgagcagaaatttggaaggctattcagtgctgcttagtgtagcagctaataatgttccaacttctatatgatagtttgcnnnnnnnnnnnnnnnnnnnnctagagacacagantcccgttggcccaggctggtctcccaattcctgggttcaagcaatcctcctggactcagcctcctaaatgctgggattacaggcatgaaccactgtgcccagtctatatataatagattttagaagaaatttctgccactcagtgactgctttaaattctagagacagaggctgagagaaacttagtagcctgcctgcgcatactgcaagtacagactatataacaagttgaaagagaatcaccctgggtatataatattttaaaacatgaaaaaggcattactattgttctggtctaagtactctaacaggacgatgatttctaaccctagcatcatgacatgtatatagtgtgttgtaagacatttgccagctaatagttacagtactgaagcttgtgaatacgttaattgagaaaactttaagcaggttcaaagttatcccatgatagtggcattcttatttgtatatatgtgctttccttttttatttgtatcaaggcatttaaaatgaatatatgtaacatgtacctaagttttaaaagcataataaaatgaacacatctgaaaccac

SEQ ID NO: 369070 - DNA, 493 bp, Homo Sapiens
  misc_feature (45)..(45): n is a, c, g, or t
  misc_feature (77)..(77): n is a, c, g, or t
  misc_feature (284)..(313): n is a, c, g, or t
aaagtaaaaatccggttgccctaacagttttggcccgccttgtangcaccaatataaaacaacccccaaattaaggnccctggaccttaccgccatgaccacatggcccccggttacccgtccatggaaatgcctgccagtggtggtttggcccaagccttctgtggatgtttggaagactttatttttgccagtccttaaccttgggcctggaccctaagtgtatgtaaaccatatgatgccctgtattgtttatagatgcctgacaaaagaaaactagaccnnnnnnnnnnnnnnnnnnnnnnnnnnnnnncatgcctatgctcatagtagatagtttgcaaatgaaagttgatttgccatacttttaaataatattgttttagcttgaatattctataatacacttttgtagagtataacatgctaaatcactgttttgttgtaagaagggtgtaaacattttgttaataaaatgtctatgtttacaaat

SEQ ID NO: 369071 - DNA, 1025 bp, Homo Sapiens
  misc_feature (942)..(955): n is a, c, g, or t
ctcggctctaccttgtctaagggatcttgctcagtctctgtcagaggaagatcccttggacaagaggaccctgccttggtgtgagagtgagggaagaggaagctggaacgagggttaaggaaaaccttccagtctggacagtgactggagagctccaaggaaagcccctcggtaacccagccgctggcaccatgaacccagagagcagtatctttattgaggattaccttaagtatttccaggaccaagtgagcagagagaatctgctacaactgctgactgatgatgaagcctggaatggattcgtggctgctgctgaactgcccagggatgaggcagatgagctccgtaaagctctgaacaagcttgcaagtcacatggtcatgaaggacaaaaaccgccacgataaagaccagcagcacaggcagtggtttttgaaagagtttcctcggttgaaaagggagcttgaggatcacataaggaagctccgtgcccttgcagaggaggttgagcaggtccacagaggcaccaccattgccaatgtggtgtccaactctgttggcactacctctggcatcctgaccctcctcggcctgggtctggcacccttcacagaaggaatcagttttgtgctcttggacactggcatgggtctgggagcagcagctgctgtggctgggattacctgcagtgtggtagaactagtaaacaatttgcggcacgagcccaagccccgcacttggaccaaagcggcaccaatgtaccaaaggtgatgaaggaagtttgtgggtggggaacaccacccgatggttcttacccttagttggaaaaattgggtaccacagtcccaccaaggggatttgggaaaggaccattccggtgccccttcagaaccgaggcccagaagcccaacccctccaatttaaggaaggcgttattggnnnnnnnnnnnnnngccatggtccaatttgggagcgaaaatcctccaaaccttgaaaaggacgggcgggaaaaccgggggctcg

SEQ ID NO: 369072 - DNA, 1026 bp, Homo Sapiens
  misc_feature (130)..(130): n is a, c, g, or t
  misc_feature (350)..(350): n is a, c, g, or t
caattaaaaagccatttaacaaaagaccaatttatacattcctttgaattatgtccataaaaaatttaaatatacaaattacattatcaaacccaaaagaatctttctaaacaaatgaaatacagatatngacaaagtcaggatccaaattattttaaaaagtttttaaattattttgtaattacaaatgaaacaacaaactgacagttttatacaattgtaaaagtttcaaaaaagttcaaggatggagcaatagtatcacaatttatttaagtactgttcacaaatgtttatgcttttgtaatatacctattttaattttgttaatgaatttgaagagctaatggttngaaacaaccaaaaaaatagaaatgtatttattcttaaaaatcagtaattttgccccaggtgtctacagttgtgaaatacagggaacaccctccaagaaaaatcaggtatttggtaaagcaaggcacataggaccagattttgataaaggtgcttgttctctgctcctataactactttaaataacctggagattcttaagatgactttcaatatagcataaataacttttataaaccttttttatgtaaagcatacacccatgataattaaatattataatgtgaatgtgtaaatcaaatgagtgatgctaaaccctttaagaaaaaacccaactcagtttaatgactatacaatgaaatttttaaagttcaataatttgatatgtaagaataatcagtattacagtaagtgtagagaacataattagtttcctttcagattatatcttagaatctaaatatcaagctacctttccttccatgaaattatgtgacattcaatataaattgatgtaaacatttaagttttgcatctctatactatatattccacggtaaaagtagcctacaacatctctaaaatcacttactaaagaactgataatataatactactgtgttgaaatatccatttgttgcatttcaaacttttcttcccaaataccatattcttaat

SEQ ID NO: 369073 - DNA, 989 bp, Homo Sapiens
gggcctcagtgacagcgctatttttgtccagtctcccaactgtaaccagcgctatggctggcacccggccaccgtctgcaagatcccaccaggaaaggcccccctctccacaccatctccctatttttggaagccctctttgcagacttctccctgctctgggagtcggagcttgtgggccagccttccatctccccttgcaggatgcaacctgaagatcttcaacaaccaggagttcgctgccctcctggcccagtcggtcaaccagggctttgaggctgtctaccagttgacccgaatgtgcaccatccgcatgagcttcgtcaaaggctggggagcggagtacaggagacagactgtgaccagtaccccctgctggattgagctgcacctgaatgggcctttgcagtggcttgacaaggtcctcacccagatgggctccccaagcatccgctgttccagtgtgtcttagagacatcaagtatggtaggggagggcaggcttggggaaaatggccatgcaggaggtggagaaaattggaactctactcaacccattgttgtcaaggaagaagaaatctttctccctcaactgaaggggtgcacccacctgttttctgaaacacacgagcaaacccagaggtggatgttatgaacagctgtgtctgccaaacacatttaccctttggccccactttgaagggcaagaaatggcgtctgctctggtggcttaagtgagcaaaaccaggtagtattaaaccaccgggccccctccccccagactctttttttgagtgacagctttctgggatgtcacagtccaaccagaaacacccctctgtctaggactgcagtgtggagttcaccttggaagggcgttctaggtaggaagagcccgcagggccatgcagacctcacgcccagctctctgacgcttgtgacagtgcatctaccagtgaacattcccagcccagccccgccgggtgccgc

SEQ ID NO: 369074 - DNA, 655 bp, Homo Sapiens
aatctacaagtctcagtgtaaatcataatagagacttacctgttcaaaatggcagaaaaatacttctttactagaaatcacgtaatacagacgcacttacaaaagcaacagctactttccatctttaggaaaactagatttgctctataccttcatctgtagtataggaaaattgaaagcatatggaagaattgtagataacttagcagcaagaatgtaaaatctaattatctgcacgagggatatacccaatgataaaccaactgattcatcctgcagaatctgagataggcttaggaatcagaaattaggtacttatggaaggtggagtgtgattgtgagggacgagatgatgtgggtggcatcgataaacaccggtgtatcgatgccaccaaaacaatgggtcccaaagcctaaccactttaagagtttatggagggtacttggcattacagacgattcatacacttccagtgctgccttctttacactgccagttttgacaaaacaggtttgttttttattttacaaccacatatgcctaattctgcaggattgcaagtaactttttaatgcattgtgattacttattggtaatgatagggctgatggcagtttactagatcactggttatatttgggaccaaaactgcta

SEQ ID NO: 369075 - DNA, 1632 bp, Homo Sapiens
aatggaaacaagtctttattaagtaacttttaatatcagaaaaataaaactcttataattctctttacagcaaatatataatatcagtgctttggccatcttaagttaaaggccctttatcataaaatatatggttttaaattttactcaaattgaatttataatccctatgacttccctacatatacataacaaaagagtgtagtaaaattagcaaatactaaactatattgataatttatcattcttagtttgtggtttttagaaacagtacacgcacctaatatatgtcgattccttggcttattagttgcagtgtacaatgcaacaaaatacaaaatacatgcttggtgaacattcgttcatatctacaagacggcagctagagattaggattcaatactgaccatttactatcctacaagcaattaacgcattacatcataatatgccatcaaggcaactttttttatactgaaaaaatcaaaataaaaaccgttatttgtaaacttttatacgaaatgtaactcttcaagtggaaataaaaaataaaatttgtctatttactattgaatacacataggatttcaattttcattataccgagaaaaaagctcttttgtgttgggaaaataatgcttcaaaaaataattagtagaaaaacccactagtataatgttttgtcctttcaatgccagcacagatttgggaacatactgaggatgaagttatagacatccacaggtgaaatgtacgagtatattttaaataaatctttccttgtgattggaaatagttttgaaatgaagtaaactgattggaggttgtcacagctgcttttgtgaaatataccaagggcatcattatccctttctccctcctccctcccctaaattactaaaaaataaaaatatatttataatgtgcaagacaaatatggattgaacataaaatgtttcacattttgatctatagtctaaaaattaacagctcgatcacactaatgaatggaatgtttgcatcctcaattatcagccaatataggtgccatcccaaagcccttcctgatatgggaaaacccaggtggccatttccacattcaccaagagaggcaatgggcaggaattcacaattgcattcctgatccactgatcataccagccttgagcactctgggcgagatgaaagttgatgtagcagtttatgtcccaaattataaccagtgatctagtaaactgccatcagccctatcattaccaataagtaatcacaatgcattaaaaagttacttgcaatcctgcagaattaggcatatgttgttgtaaaataaaaaacaaacctgttttgtcaaaactggcagtgtaaagaaggcagcactggaagtgtatgaatcgtctgtaatgccaagtaccctccataaactcctaaagtggttaggctttgggacccattgttttgaaatcttagacgtatacactttttcataggctcacacaaccaatgattatcttcactcagccaagttgaacttcagccttagcaattcttatataaactatgtctctgggtctacaggatagtactaatcattcaaccaactaatagaaagagacactaagttaaagtaacaga

SEQ ID NO: 369076 - DNA, 1305 bp, Homo Sapiens
  misc_feature (1111)..(1111): n is a, c, g, or t
  misc_feature (1122)..(1122): n is a, c, g, or t
gggcctcgttttccagacataactgaagactgctatcttcatcccaacatactgtgtatgaaatacttgatggaagtcaacctccctgatgaaatgcatagcttaacttgccacgtggtaaaaatgactggaatgggagaagtggattttctgacatttgatcctatagccaaaatggcaaaagctgttaagtacgatgtacaagctgtagctatcattgtggtggtattgaaactgctctttctattggatgacagtttcgagtggtctttgtctaatcttgctgaaaagcataatgaaaagaacaaaaaagataagccatggtttgatttcagaaagtggtaccaaattatgaagaaagcttttgatgagaaaaaacaaaaatgggaagaagcaagggccaagtacctgtggaaaagtgaaaagccactctactactcatttgtcgacaaaccagtagcatataaaaaaagagaaatggtggtgaatctacagaaacaatttagcacactggtcgagtcaacagcaactgctggaaaaaaaagcccttcaagttttcagttcaactggactgaagaggacactgatagaatgtgtttccatggacacagccttcagggagtcctgaaagagaaaggccaatcactgctgactaagaattcattatattggcttagtacacagaaattctgcagatgctattgtacacatgtgacaacctatgaagaatcaaattattctctgagttatcagtttatactaaatctcttctccttcctgctcagaataaagacttcccttctccatgaagaagtgagcttagttgagaagaaactttttgagaaaaaatacagtgtaaaaagaaagaaatcaagatccaagaaagtgagacgacattgagaaaatgaaatagaaactttctggaaaaatattttaatagtgataataacatcagattttaatataacattccagagaattgtggaaaatactgcatatatatgtatagactctgacacatatttacatatatatcaagtgtgcttagaaaaatgtatattgtaaagcaggtgagcttcatttgatcttatttttcagagtatgaacattnctaagagaaangttaaaacaatagcaaaattgtataattgtatccagaaatgtatactcatcagtattttaaagctaaaattattttttaaactagatcccttcattattctttatgccccagagtaaatcccagatggatcaaagatctaaacataatctttcatatgtaaaaatataaaagtattagtagaa

SEQ ID NO: 369077 - DNA, 1365 bp, Homo Sapiens
gggattccagtaagaattttcagtacataccaagtacctggaaagttcttcagataagttaatagatccaaggagatacatgcctcagtgagataaactgacctttttactagctaaactatttagccagagcaatactctgtagaactgtgcttttctaaagtaaagattatctgtttctcaattttatgtgcataatacttttcctggtgctagctttgataggcaaaatattttgaaatgttggtcccataatgattgtgctagttcataagctttgttgttatgagtgtaatcataaaaatatttccaagcagtttttgacctttattctacatttctgggcatttgtaatatggtattctactggtatatatttttaaagtttgcgtttagattatggtaaagaaatttcaagcatatttcttctaataaagtattaagacagtgtttcagaatatcaaggcacacctccttagttgttttagattagaactctagaaacaattttgtgaacattgaaagtattttgagttaagcctaagctgattaatcacacaatacatacttttcctgcattttctttcagtgacatttgagaattgggtgacattttaaaatgtgttttataccatttagtttttgcaaacaagttcctaaagttttggagaaaaagtgatgtggtcaagagttgaagtctcatatatctttagtagcactcccatgaattatttccgtgacagtaacaagtgtgtgttccatgtctgatttggggcactggttagactgcattaatagctacttgattagaattcgaacttttaaaattttgaaatgtttaagaatgtattagaaaatgcatgctttatgttgaaaaaatacattgctttaatattcctcattcttgagttaagaaatttatgttaattttgcatgggcacaaacttaatcagaaacattttgtggagttacatttcctcttattatttatcaaggttcagtattgatctttgaaaccttggtcccgttaacttactagtcacattgacccaatgttttatagaaatgcctagaattttgagactaatagtagttatccattaacattccaaaagttttgtgctttttaaaatttgttttggtaattatcacatttttttctcttaccttcctttaaatggccacagtgtgtactgctggaatgttccatccaaaagatgtagcttcagaagcacagtgattgccccagggtccatgagatattgtttgtattatgaagttggagtgctgtctactgaaattatactcttaaataaatatgtatgtagtgtgtaatattttctaataaattcttttgataaacta

SEQ ID NO: 369078 - DNA, 421 bp, Homo Sapiens
  misc_feature (103)..(103): n is a, c, g, or t
  misc_feature (105)..(105): n is a, c, g, or t
gctggcgggatcaagtgcagctgcttcaggctgaggtggcagatagtgagcgctggtggcggagttaaagtcaaagcaggagagtaattatgaatagcgcagngnaattctcacacctagaccgtcgcgagcgggttctcaagttaggggagagtttcgagaagcagccgcgctgcaccttccacactgtgcgctaattgtagagcgggaaggaaacttcaagatcactgaattataacttctcatttttctgtggtaaaactagctccccacgatgagatggtgctgtgctggctctgcagtttctctctcttcagtcccattttccggaagtgtgatatggcgtctttatctggtttttccatgccttttttcttcaaatagtatctactctctccttttctcttccttcttcaggtga

SEQ ID NO: 369079 - DNA, 822 bp, Homo Sapiens
  misc_feature (268)..(280): n is a, c, g, or t
  misc_feature (397)..(441): n is a, c, g, or t
ggggcggtcatcagacttcctcatctgaaaacacagaacatactgaccctttcaagtacttagtcattttcctgaaagtgtggtctgtttcagaatgctgtggcaaccaggtaggtgtggcactggccatgtgccacgtctttgccctttgtagtctgtcagatattaaagtttctaaccctgtttttttaatctccaagaatggggaaagtggaatgtagagatggaagcagaacgtgatgtttggatacaacagctatttaatccnnnnnnnnnnnnnaagcaaaacaactcagttttctaccttattttctaatgttgatttcatgggaatactgacagttggaagtgtttaacataaaaactcattgctaaagagcactgaggaaatgggagnnnnnnnnnnnnnnnnnnnnnnnnnnnnnnnnnnnnnnnnnnnnngcatatatgtgattgggtattttaaaaaccagtatcatctgtcatctccaaaagattacaggagtcagcttgttaatacagtagtgttagtaggttctgtatttttaattcagtacttagaattctaggtcctttattgcccaaagtcagcacagttagtttataccacagactcctgtcttggggcacaattaatgggggcggggggtagtgaactttgccctaaaacatccaccccagcctgggaacaaaaggcctggaaccgggggctttttaggcccctttgcgcaggaagggggatacttgggggttttgcaaccccttccctttgagcatcccctggggtcaatttttttcccttgggtccaacctccctttcct

SEQ ID NO: 369080 - DNA, 247 bp, Homo Sapiens
  misc_feature (189)..(201): n is a, c, g, or t
tacggtctgtttcagaatgctgtggcaaccaggtaggtgtggcactggccatgtgccacgtctttgcccttgtagtctgtcagatattaaagtttctaaccctgtttttttaatctccaagaatggggaaagtggaatgtagagatggaagcagaacgtgatgtttggatacaacagctatttaatccnnnnnnnnnnnnnaagcaaaacactcagttttctaccttattttctaatgttagagata

SEQ ID NO: 369081 - DNA, 264 bp, Homo Sapiens
ggcagctgcatggaggccaccccccaacccccatggagagactgcggcacctgcatccccacgtgggaagaaccctgacctcagctgaccccttctaccagaacacacctcacagcagccgctgcgtggcacacagctgagccctgagcccttggtttgtcaatcctaggggacaggagccaggctactgtctgtacccccactccatcccccaggggaacacccctgcccagctactttcctaatgaaataaagagcattgaa

SEQ ID NO: 369082 - DNA, 1538 bp, Homo Sapiens
  misc_feature (161)..(210): n is a, c, g, or t
  misc_feature (1330)..(1343): n is a, c, g, or t
cctttccaatcctctgggttttgactttttggcttccacttcacccaaaatgttaaaatttttagttaattcatagccttccttggtttcatatttgtttgcatttaattcatgtttgagtctcttaactgatggatgcccacttgccttaaagcagcatnnnnnnnnnnnnnnnnnnnnnnnnnnnnnnnnnnnnnnnnnnnnnnnnnncagcgaaacccttacatgagtaattgaaatgaaattaaatgagattacagcataatgaagaagaaaactagaatctaacaggtatgacacattcagttattctaacagggcacagtactgtgctatatgtagccgcctttacagatgttattaacctatagtagtttactattaactaggaagactggtgtatgaggagggagacattctgtaataagattaaaacctaaagtcagctgtgtaacattccatgaaagatgcattcatttattgaagatgacaaaaaagggagtcagatatattctggaagctattttaattttaggcacacaatctcatacattttgagacccttgggtcatttattactttttacaaactagttcctctctttttttctgccaagtcctgaattgaaaactgtaggcttccttgcacagatgttgcagccagccccaggagtaaagtgcccgctgactgctgccgccaccctatgtctcgcttccctgtcagtgattgctggcacgtgggacgcggcaggtgacagccgttctcagcatgtttttagaagcttgcctcacagacttccatgcctctccattcagccgatgacttcagggtgtcaaactgttttaatttttcaaacaaatggaacagaagccattgtggttcatcctgattacttgaacgttgcacttggtggaccgtgcctgggagcgctcgcatgccccctggcttcagaagtcatgtcagtgtctctgtagacaaactccactgtacatcttggattaatcttctgattcattgttcattttctcaagactttttgtggaattctctgataaaggaagcttttaggatggtatctatcaggccaccagcaggaattgaaaatgttttcacaaaaatccttttccttagaaataaaagctggtgacagagatggtttccttgtaccgataaaaacaaaaccaaatccatattatacatcaaaaccttgtgagacattcacttgctcttttgccatatttagatgtgttagtggaatcagaaacctgttttgatatgtgttctccatgaagtaagtctgatttgtccttttatttcatgatgcatgtcnnnnnnnnnnnnnngtcaggataacgtcatatagcatcttggttagtttttccttatctctatgtacatatctatctacttctgactgtagatgggtatatagatagatgccaaagcttcttatggttctgggggtagtatgcatcatttattggggtctctgccttaaaacacatcaaaattcattttagacaaaaaaacttctgcct

SEQ ID NO: 369083 - DNA, 765 bp, Homo Sapiens
  misc_feature (140)..(189): n is a, c, g, or t
  misc_feature (347)..(371): n is a, c, g, or t
  misc_feature (453)..(541): n is a, c, g, or t
  misc_feature (553)..(566): n is a, c, g, or t
gaccatatctcattttcatcaaagggttatcaccccagtgaaggcaaatgttcctttggatgcagacgcaacaaaacagatttaggtttccaaaccactgtattctgtttgtaatacatgcaaggcagaccttaagttannnnnnnnnnnnnnnnnnnnnnnnnnnnnnnnnnnnnnnnnnnnnnnnnngcatttacaagcacttgaataaggcctttcaatgttaaatcagtgttttaaatcccttcattctcaggtaagggattaagaggccgagagagatatcgtctgcgagggtgaggatactggaggctggcagtgtcagcatcgcaagagtgctctaccannnnnnnnnnnnnnnnnnnnnnnnnctgggcataactggaccatctcgatccagcccgtggggaatccagaggggtaaagaaatacctgaaacaatgaagacaggannnnnnnnnnnnnnnnnnnnnnnnnnnnnnnnnnnnnnnnnnnnnnnnnnnnnnnnnnnnnnnnnnnnnnnnnnnnnnnnnnnnnnnnnacacatgctagnnnnnnnnnnnnnngctttagtatattcatgccaaaactaacagaacataatagcacaaatcaagacccttactcaaatcaagattgcttaagcaagtatagaaacttgaaaggaatacaatctgttaaacttaaaatgttaaaaaatatatataaatgttacaaagaaaaacattaattttataaattcaaaacattttctaatctctcccc

SEQ ID NO: 369084 - DNA, 1284 bp, Homo Sapiens
ggcacgagaagattgtccagttccattgggagaaatatgcatgctcctggcatgaagaagatcaagttagacactccagaggaaattgcacggtggagggaagaacgaaggaaaaactatccaactctggccaatattgaaaggaagaagaagttaaaacttgaaaaggagaagagaggagcagtattgacaacaacacaatatggcaagatgaaggggatgtccagacattcacaaatggcaaagatcagaagtcctggcaagaatcacaaatggaaaaacgacaattctagacagagagcagtcactggatcaggcagtcacttgtgtgatttgaagctagaaggtccaccggaggcaaatgcagatcctcttggtgttttgataaacagtgattctgagtctgataaggaggagaaaccacaacattctgtgatacccaaggaagtgacaccagccctatgctcactaatgagtagctatggcagtctttcagggtcagagagtgagccagaagaaactcccatcaagactgaagcagacgtttttggcagaaaaccaggttcttgatagcagtgctcctaagagtccaagtcaagatgttaaagcaaactggtagaaatttttcagaagccaagagtgagaaccgaaagaaaagctttgaaaaaacaaaccctaagaagaaaaaagattatcacaactatcaaacgttattcgaaccaagaacacaccatccatatctcttggaaatgcttctagctccggacattcgacatgaaagaaatgtgattttgcagtgtgttcggtacatcatcaaaaaagacttttttggactggatactaattctgcgaaaagtaaagatgtataggcatctggtgtttcagcatacataactgaagcatgtgaaacagtatcatcctcgttagtagaggaaaaccaaaacccttttttccgtcaaaattggatttgtaattaaattgtaagcctcgtaggatgtatgttggaattttaagtctttcctttggttctatgcaaataaaaaaataactgatttttttaagactgtgtctgtatggttgggattgaatctagtatttgctggggagaattttttctttgtatttattttaactgtattgtgctcatgtaagaatgactgatgttgtgttaggttaagaattgacgataggtttagcagttaagaagaaagcttttaaaaggattgattcagttaagcaaagttgggcagagaaaatcaggcatttgtatttaatgcagaaaag

SEQ ID NO: 369085 - DNA, 551 bp, Homo Sapiens
  misc_feature (17)..(17): n is a, c, g, or t
aatgcgcccattgcaancccaacccgggcaacagagaaaacaaaaaggaaaacaaatgatgaaggtcctgcagaaactgaaaccccagacatgtgtctgccccctctatgtgggcatggttttgccggtgcttcctaagtgcaggagaacatgtcacctgaggctagttttgcattcaggtccctggcttcgtttcttgttggtatgcctccccagatcgtccttcctgtatccatgtgaccagactgtatttgttgggactgtcgcagatcttggcttcttacagttcttcctgtccaaactccatcctgtccctcaggaacggggggaaaattctccgaatgtttttggttttttggctgcttggaatttacttctgccacctgctggtcatcactgtcctcactaagtggattctgggtcccccgtacctcatggctcaaactaccactcctcagtcgctatattaaagcttatattttgctggattactgctaaatacaaaagaaagtttcaatatgttttcatttcctggaggggaaaatggggat

SEQ ID NO: 369086 - DNA, 802 bp, Homo Sapiens; identical to SEQ ID NO: 4066
  misc_feature (30)..(31): n is a, c, g, or t
  misc_feature (668)..(678): n is a, c, g, or t

SEQ ID NO: 369087 - DNA, 1540 bp, Homo Sapiens
  misc_feature (471)..(471): n is a, c, g, or t
gggccgcgggtcaggggtgagagctggaatctctgcacgggccttggaaaacgactgtcttcttctgccaaaatgtcaggaattggaaataaaagagcagctggagaacctggcacctccatgcctcctgagaagaaggcagctgttgaagattcagggaccacagtggaaacaattaagctaggaggtgtctcttcaacggaggaactagacattagaacactgcaaaccaaaaatcgcaagctggcagaaatgttggatcagcggcaggccattgaagatgaacttcgtgagcacattgaaaaactggaacgacgacaggccactgatgatgcctcactattgattgtcaaccgatactggagtcagtttgatgaaaacatccgtatcatccttaaacgttatgatctggagcaaggcttgggagacctactcacagaacgaaaaagccccttgttgtgcctgaaccangaaccagactctgatagccaatcaggagcgtaaagatgaccgagagagaggggaagggcaagagccagctttctctttccttgctactttggccagcagttccagtgaagagatggagtctcagctgcaggaacgtgtggagtcttcccgccgagccgtgtcccagattgtgactgtttatgaaaaattgcaagaaaaagtgggagctcttatcccggaagctaaacagtggagataatctgatagtggaggaagcagtgcaggagctgaactctttcctcgcacaggagaatatgaggctacaggaattgacagatcttcttcaggaaaagcatcgcaccatgtctcatgagttctccaagttgcagagtaaagtggagacagccgaatcacgagtgtctgtcctggagtccatgattgatgacctgcagtgggatattgacaaaattcgaaagagggaacagcgactcaaccgacacttagcagaagtcctagaacgggtgaattccaaaggttataaggtgtatggagcggggagcagtctgtatggcggcacaatcactatcaatgctcggaagtttgaggaaatgaatgcagagcttgaggagaacaaagagttggctcagaaccgtctctgtgagctggagaaacttcggcaagactttgaggaggtcactacacaaaatgaaaagctgaaggtggaattgcggagtgcagtggagcaagtcgttaaggaaactccagaatatcgctgcatgcagtcacagttctccgtcttgtataatgagagcctacagttgaaagcacacttggatgaggctcggaccctgcttcatggcaccagaggaacccaccagcaccaggttgagcttattgagcgagatgaggttagtcttcataagaagctgaggactgaagtaattcagctagaagatacattggcccaggtccgcaaggagtatgaaatgctgaggatagaatttgagcagacccttgctgccaatgaacaagcagaccctataaacagggagatgcgccacctcatcagtagcctcctgcagactcgagg

SEQ ID NO: 369088 - DNA, 576 bp, Homo Sapiens
  misc_feature (419)..(429): n is a, c, g, or t
  misc_feature (466)..(466): n is a, c, g, or t
  misc_feature (469)..(469): n is a, c, g, or t
  misc_feature (478)..(478): n is a, c, g, or t
  misc_feature (555)..(555): n is a, c, g, or t
gtttgtttgtttgcttcattgttgattgtgtattttcttcattcctggggagcactaacccaaaagcgtctgtctcttgttttctagtccagtttgagattaatttagaagaaaggaatactgtatgtgaaattcatcttgggctttcccctaaattgcaagataaggccatgtgtaagattttccctaaaactagaatatattaatgcatgtttgagaattttaaagcaccatggtcaaaaccagaagctatattttgcatatttggactcagccatccattaagaacccatgttgtcctctggacatatttatcaatataattgggttttaaatagtataaaagaaaacttgtgatctatataatttatgtatcaccttcattgtaaatttagcaggaaatgcatcacaattatgannnnnnnnnnngcaccagtgaaacaataaagatgctattaacaatttnggngcttttttncccctttcatactatctttaattgataaaaggaactagtagtatggctatagagtttaatagtcattctcatatatncacagagctcacttaactcta

SEQ ID NO: 369089 - DNA, 1037 bp, Homo Sapiens
  misc_feature (89)..(328): n is a, c, g, or t
  misc_feature (351)..(368): n is a, c, g, or t
  misc_feature (997)..(997): n is a, c, g, or t
gggtgctggggtcccttactaaggccccaaaatcgggattcttcaaagaaaattgtttttttagggccgagccatggtggctcaccccnnnnnnnnnnnnnnnnnnnnnnnnnnnnnnnnnnnnnnnnnnnnnnnnnnnnnnnnnnnnnnnnnnnnnnnnnnnnnnnnnnnnnnnnnnnnnnnnnnnnnnnnnnnnnnnnnnnnnnnnnnnnnnnnnnnnnnnnnnnnnnnnnnnnnnnnnnnnnnnnnnnnnnnnnnnnnnnnnnnnnnnnnnnnnnnnnnnnnnnnnnnnnnnnnnnnnnnnnnnnnnnnnnnnnnnnnnnnnnnntgacagggcaagactccatctcnnnnnnnnnnnnnnnnnntgtttttaaatactggtgtaattaccccaaaaaaggcctaaggaggcctgcagcccgcctcatgcatgcgacatttagccttaacagcttcaccagccctcggccctgtttgccacagaaaagctgaaaccgcaggtttctgagtcaatttacaccgcccaatccctgacctgccctcttcctgagagagccaaccagaggcctccaaggccctgccaagggaactctgaccggaagagcatctctgaggcctgcgcacaacacaaaacacctaagcaagcccaacttgtgtccttggtctgaagtcccatcctgaaaagcctggttaaaccagaaatgaaacatacatggtttcccaatgcttccccttctgagtctccagtgaggacaagattgccatgaggttttgtctccctctcccagtaacagtaacaagtgaaacaggcaactggatatcaggcaggatcttggctccagcctcgagttggttcacggagcttctgtcttcaccacggaggcctctgccgattcgcagggcaggtccacagctgaccggtttcaccacgactgctccacggccacggtcacccggaaggccctgaggaactgctctttggtgatttcagganggttatttcccgatcccgggaatccggaccggaccagcct

SEQ ID NO: 369090 - DNA, 789 bp, Homo Sapiens
  misc_feature (247)..(247): n is a, c, g, or t
ttcatactccaggagacatctagaacaaaatcaccccaaccccccaaaagaagataaaacaaaagtaaatccaaccatacataccaaactttcaaagtagatgcagaaattttttggatccatgtctgaaaaagccaatgtcttatagtagtatttacagttttatactagtttctacttaaatagtagtagtttaaaatactatttgattctttgggatccattacacacatgtccattaaatctntaagtaatcaaactaatagaaacacattaatgaagataaataataaatatatgcaaatacaggaacatcaaagtaaaaattctcattcaaccaaatcaaggctttaatcgccaaagttgcctttagttctttactgttttgaagaaaatgaaaatagccaaaagcctatgtatcaatatgtctgaagagaggagaggagcagacaatgcaggtatgtaaatgtgaggaacacaggtctgtctgaagccctctcattttatgatgtcacctaaatcacccttgtggaaaagaactagagaccatgctgagaaagcgtgcaagtcatgcagatgaattggggatcaatataagcaatgacaggacaaaggatgtgctctactcaaactgaatgcaatctccaagtactgtaaactggaaacatcggtggctaaatttgcttagaacagatttaaagaaagaatactcttagcccggtgtattatagaacctaatatgtaccaagttcttcaaacaaatgatgtttataaatcccctttttcccc

SEQ ID NO: 369091 - DNA, 981 bp, Homo Sapiens
ggggtggcgcgggccgccgtttccgcaaacagaatcgcgtttggctgtgctggatgtgtgaacctattgggtactgtacaacttcaagcctcgaaatcagataggcaccaccaacctcatttcctgtttcaccttgattttctgtgataccaaaatctcagcttcacaaagtcattgaaagtgttggttcatgaagttttaccatcaattcaagtaatcataaatggcaaattctgcaaaagcagaagaatatgaaaagatgtctcttgaacaggcaaaagcgtcagtgaattctgaaacagagtcttcattcaatattaatgaaaacacaacagcttctgggactgggctttctgaaaagacttctgtctgtaggcaagtagacatagcaagaaagagaaaagagtttgaagatgatcttgtaaaggaaagttctagttgtgggaaagacactccatccaagaagagaaaacttgatcctgaaattgtcccagaggaaaaagattgtggtgatgctgaaggcaattcaaagaaaagaaaaagagaaactgaggatgttccaaaagataaatcttctactggagatggcactcaaaataagagaaaaatagcacttgaggatgttcctgaaaagcagaaaaatctggaagaaggacacagctcaacagtggctgcccattacaatgaacttccaggaagttggtttggagaagcgtagtcaaagtcgtattttttacctaagaaactttaataattggatgaaaagtgttctcattggagaatttttggaaaaagtacgacagaagaaaaaacgtgatatcactgttttggacctgggatgtgggaaaagcggagatttgctgaaatggaaaaaagggagaaattaacagctagtttgtactgatattgccgatgtttctgtcaaacagtgtcagcagcggtatgagggacttgaaaatcgctcgtgaaagtgaattatat

SEQ ID NO: 369092 - DNA, 842 bp, Homo Sapiens
agcgggttccgggtccgccaagctcccggcatgcagcgcggcgatcccggcgagcaccttggcgcgcggagctggcaccttggcgctgttggtggcggcggagacagctgtgaagtgtgaggttctttgtctgctggcagctaggggcgacgaggcgggacgtcatggaagtgaaggatgccaattctgcgcttctcagtaactacgaggtatttcagttactaactgatctgaaagagcagcgtaaagaaagtggaaagaataaacacagctctgggcaacagaacttgaacactatcacctatgaaacgttaaaatacatatcaaaaacaccatgcaggcaccagagtcctgaaattgtcagagaatttctcacagcattgaaaagccacaagttgaccaaagctgagaagctccagctgctgaaccaccggcctgtgactgctgtggagatccagctgatggtggaagagagtgaagagcggctcacggaggagcagattgaagctcttctccacaccgtcaccagcattctgcctgcagagccagaggctgagcagaagaagaatacaaacagcaatgtggcaatggacgaagaggacccagcatagaagagcacagctggccccggcgtttcatgaagtcagaaggcctggcagccatttcctggacgttgagaggattgttaatttgatttttatccatcatcccagcagggctggctttgtggttagttggggaacatcagaaaaaataagttaacaacgaaatatttgtgcctggggagaagaaaacatggtgcaacaaagggtgaaggtggcagggcagagagttgaaagtgg

SEQ ID NO: 369093 - DNA, 1168 bp, Homo Sapiens
ctatgcgcgaagagggcaagaggggtttaacaagtgaccgggatcgagcggggatgacgggggcccatcatgcctgaccggcaatgtgtggggacgccaggccatgaagcgatgggggtcccggggggaaggaggcattaatatgaaccaaggatgcttaaaactgggcctggcaggtgccagagggtatgggatgaagaatttaggaagaaagcccgggtgtaaagtatcaggggtgatataaatgggggtcagtagatctttttctcagaccctcccaggctgaaggaggcccaccctattccagcatctgagagcaaaacctgccggggcagcacagaccctgccctctttacacctcgctaatgtccaggagtccgcacttgtatgggaccaactcccaaggagtacctgagagtttctccctggtctggcccctgttcccaagacataaagatcaggagaaactgatttgtgtgtggacaaaaatagagaagcaagaaaaattcaatgtaactaaagctacccaccacctgacagccatctagaatgtacctgagccctgtgccagccatgaccacctctgtcatctcagcctcactgtcctgacacccccactgctagctagatcagagagagatgcagagagggccgggccccagggctttgagtctctctcctaagtgcaatcgatgaagcaggaggaatccaggctctgcctgccctggcagcagggtgcctcttcctagtctgtaggaggagggtttccccgaagaggccgaggcagagggagaggaggggaagagtctgtcagagaagaaccacaggagaggttgaccacggcagccttgagctcaaagagggacctcaagtcctaggcacagtggggtttttagtcactcacaaggggattgcggtcatcttgttgactctgacccttgagtttcttcttaaagatggaaattgaagtggaaggcttgtaaaaaatgctccagattgccaccgaagtgcctggttgatgacaatccctaaggtcccctgaagcaggaacacgatgggatctgtcaagcagataaatattttttccatagattagaacaacgcaaacacctaccatctcacgagatactgtatctatgaaatggggtgggttagtcatggggatcct

SEQ ID NO: 369094 - DNA, 963 bp, Homo Sapiens
  misc_feature (63)..(63): n is a, c, g, or t
  misc_feature (127)..(127): n is a, c, g, or t
  misc_feature (143)..(143): n is a, c, g, or t
  misc_feature (153)..(153): n is a, c, g, or t
  misc_feature (162)..(162): n is a, c, g, or t
  misc_feature (256)..(256): n is a, c, g, or t
  misc_feature (932)..(932): n is a, c, g, or t
cttattttggaggggccacgtaagcgtttgtttaatgactagccatcttagatcgactcctantcgcatcgcatttattcttcggatcaatctgatcatcctatttcgtcgagactttctctctcanatgtttcggcatactnccggggatcnttctgatangtatctcctttcgatgagtatctcgaccttcacggtccctgtagtcatgggcatcacgagtggaccgagaatctctgggatcacggctctcctntgtatctctgctataatctctcatctcccttgagtcccgcatgtctctggagtctcttagttcccttcggtcccctagtatctctggcatctctccgatcccgaccatctcgaggttctctgtcatctctgtggtctctagaagagctctgatcctgttcatattctcgttcttctcttgagtccttttctctgtctcgtttgcccctagtatcttccctcctttcgtggcgtcgatcatgagactgtgaagttcgttcatgatcatgtctccctttctctcgcattggagagcgatgtcttggaggactctgctttctctggggagacgacaaagaatgtgaaggataaggagaggcagagcgtcgtaaaggtggagttagtgtccgctgataagatggtgaaggagttctttttcgacgaggagaaggagaatgtctttgaatagatgatcctgattgtgaggaagatgagtgatgtctagaagatataggagaatgatgctgtcctgctggggaagtagaccttggcttgtctctcttttctctttgtcgttcaaaatctcgtcctctgtcctttccatctcttgttttttcttctatcctgtcttttactttatatttttctttgtattttttccccagagcgatatcttctggtataggagggggtggacnaggagtacgtggtcctttctttttactttgg

SEQ ID NO: 369095 - DNA, 1095 bp, Homo Sapiens
ggccacttgcctggccctgtacccaggcctagtctgggagccattcctgctatagctaggaccacttgtgaaacggctagttgtgcctaacagacatgctcagattcacaaaatgaattcagaacacttacctgtcccacccgtgaaagtgaccttggaggtgtcattgccccccaccaccccagtttctagtccaagccaacagctggtgctagatagatgcttgatgaatgagcagatttgactgttagttactctgtacctaaaactcctatctttacatcaaagccctgacagatttgcccttgacagactgaaatccggggctgctgcagggttcacctccagggaggcaccatttcacgacactgtcccataaatggtaatgggctcccagggatactgtttacatagactgcactgagaacggtgacccttaggtttgtacaatgaggtaccctgttgaatgaccctaaaccagcctccaaaatgtgcaggatcccacattggtcagcgccaaccctgagcacaggatctaaaactatagatgatatggccaccctggccacagctggaaccaagctggtggcccaagagagagcctcttcttggaattgcatgtcagtttctcatacgcagtttcttcctatttttcccatttcccgttttaaagctagtggcatacctcacagtcaaataaccaagtggtcagtgtctcgacaatgtgcagtaacgaggtgggggctgcaagggtgaggggctcagtcaccttaacaaggcaggagacctcccacaaaaggctgatgtgtcgtccccagggccagctggacaagggcatgcagcgcaggggtagggggatggaaatattttctctcccgtaaactctgacttcatgtgagcaggcatggggtctccctgagagctgataaccgggaaaaccaaaaccaataatattcctaataataatactagaatgtaagaataatcatgtgtttttcactgaccgctgttgctctgcttttgtctttatatacagtagtttttataacaatgtccctaggttttaataaaggagtgtcatgtcaactgttccct

SEQ ID NO: 369096 - DNA, 913 bp, Homo Sapiens
  misc_feature (813)..(813): n is a, c, g, or t
caacatcaggctaggtacgaggccgggtggctgaattcggcacgagggctgatgcaaccaagattttgttaatggctgctgggttggaatacataaagatcccgaacaacttatgaacaccctaaggaaattgagacgtcagatggacatcattgtgtctgaagtttctatgatcagagatattcgagagagggagattcggatctatacggatgcaggccgtatttgtagaccacttctgattgtggaaaaacaaaagctacttttgaagaagaggcatattgaccaattgaaagagagagaatataacaactatagttggcaggatcttgtggccagtggggtagtggagtatattgataccctggaagaagaaacagtgatgcttgcaatgactccagatgatttacaggagaaagaagtagcttattgttccacatatacacactgtgagattcatccctcaatgatccttggtgtctgtgcatctattattccctttcctgatcataaccagtcccctagaaacacataccagtctgctatgggtaagcaggctatgggagtttacatcaccaacttccatgttcgcatggacacattggcccatgttctctattatcctcaaaaagccacttgtgactacacggtctatggaatatctacgatttagagagctgccagcaggcatcaactcaattgtggccattgcatcatacactggatataatcagggaagactctggtatcatgaatcgttcagctgtagaccgcgggcttcttcaggtctgttttctatcgctcatacaaagnaacagggatcctaaaaaaggaatttggatcaagaaagagttttttgagaaagccctacacgtgaaaacttgcccagggcatggaaggcttgcccttttac

SEQ ID NO: 369097 - DNA, 1104 bp, Homo Sapiens
aaaacaggtattttggaattaccattcctttaaacatttttaagggtattcctggaaaaattaatgattgggaaggacttttttacacattttgtaaaaattcaagcaccctctgtctactaagataattttactgatttcactttacatcctgtccttttaatgcaatcactactgttcttatcaggaaaatccccaagatacttccaacagtacctgtataatcccggatctgatacctgcaatcagcccacacaaagtcctagtgttcccaggcttctcactagccaataatacagccctacatctcggcaaagaaaagcatgggttggctttttttccctaatggtttaaataaaatgtagtgcaaatacttttttttcacaactttgctgtacaaagagggccaagtctccagctgcatggctgattatgacacagtagaaattacacttttataactagtaatccaaatgttagtatttttccaaaatatggtgacaagtgttttaaaaaaaacttttaaaacttaagtacctgggttgttgtaggtggcgtttctagttgactattaagtcacagaaacacaacacatattaactacaaaactagttttggtttgagtcaacatcctgtgctttagcaaatcacaaagtagggtttataccaagcccacagaaactgcttttgactaaaacatataattacctcaagttctacttagtaatacatatatactgacttataatttcagccttcattgagcaaataaacttcaacatgctcaaaagaaaagactattgccaaactaagtgatcttactggggaatttggttacattgggtatttcatccccagtatatggggacaatcacctattcctgaaggtctattattatttttaaatttcagttctctttgggatgcctttcttgacagctcccatggcatgaagcttccaatcctgctactgaggtcagactagtggttcgcttcaggatattttgtcatcgtgtgcccatggagagcaaactgctgatggagacactgcaattcggccttttcttgtcatcattcctcagtagctggagggagcagtcttct

SEQ ID NO: 369098 - DNA, 649 bp, Homo Sapiens
  misc_feature (125)..(143): n is a, c, g, or t
aaaaggcccccaagttttttcaacaagctgctacaaaacttgggcttcctgagggggggcttttttgcccagtgcatgtactgtacaaaaatccaggcaggggggggtcagagagttcgccattnnnnnnnnnnnnnnnnnnngccccaggcacttgatgcctggaaatgatgtcagacgcagccactcctctgttagaactacagccaaacaatgcgcaggcaatccacagcagctgcccctgcaaatgtcagcgccagcccagtcaaaagagcttgaaacctaccaagccggaggacttggctgcgcttctaatcaaacgcaacattgttctcagcaaggaggaagaatggaaagtgtccccttgtggccaagcctggaacatcacatctgtacgttgcaatctgtggatcagctacgagactgagagaaaggaatgaaaggatggaagaattacaagatcaggcactgctgtctgtctgttccacggatgtaaccacagcacacgcgtggctcacggtactagtgtgataaatgcttgttacatgaaggcgtgaacagggatgagaagagacttcctggagaaacaaaaggactaacaatcaggaaggggaggtgatcggggcaggagtaaagtggacacctcagc

SEQ ID NO: 369099 - DNA, 680 bp, Homo Sapiens
  misc_feature (71)..(107): n is a, c, g, or t
  misc_feature (110)..(369): n is a, c, g, or t
ggtttccagaagaaatgaaatccaactagacaaataaagtagagcttatgaaatggttcagtaaagatgannnnnnnnnnnnnnnnnnnnnnnnnnnnnnnnnnnnnaannnnnnnnnnnnnnnnnnnnnnnnnnnnnnnnnnnnnnnnnnnnnnnnnnnnnnnnnnnnnnnnnnnnnnnnnnnnnnnnnnnnnnnnnnnnnnnnnnnnnnnnnnnnnnnnnnnnnnnnnnnnnnnnnnnnnnnnnnnnnnnnnnnnnnnnnnnnnnnnnnnnnnnnnnnnnnnnnnnnnnnnnnnnnnnnnnnnnnnnnnnnnnnnnnnnnnnnnnnnnnnnnnnnnnnnnnnnnnnnnnnnnnnnnnnnnnnnnnnntgagccaccgtgcctagccaaggatgagatttttaaagtatgtttcagttctgtgtcatggttggaagacagagtaggaaggatatggaaaaggtcatggggaagcagaggtgattcatggctctgtgaatttgaggtgaatggttccttattgtctaggccacttgtgaagaatatgagtcagttattgccagccttggaatttacttctctagcttacaatggaccttttgaactggaaaacaccttgtctgcattcactttaaaatgtcaaaactaatttttataataaatgtttattttcacattga

SEQ ID NO: 369100 - DNA, 886 bp, Homo Sapiens
  misc_feature (814)..(831): n is a, c, g, or t
agatccaaatcccatacacacgaggagattctatgtgtgcatatgactatgcggagttagacgagttgagtcacggtttgctctgtatattccgtttaattagaactcaagatttcgtccccaggactcttcctgtaagcaagtcacagccagatccaaccttcctaacaggggttattcagaaaatggcctgcagaagcacaggatctggtgcctcacagtttcctccatgctgcaatgctctagttctcatcacgcccatagcatctggcatcaggttaccctgtacagtcaacggccatagaagtcgccagcagggaaattccagaggtttagaattctatcagcacatgtgtcactggaagccatcatgggagtactatgtcagagcgtatgtaactagctgtcaggtctttccccgttgcctcagcctttctacacagactggccttcaacttcccctgagtccagaagtagactctttcagcaactctattcaggaatctgcagcaggaaaactgcttcctctattaacatctatgactgaagcacagatgtgtctagtagaaatcacccttcacccaaaagctgggcgcagaaagggaagcccttagctgactataggaggtgcctcttgtggctccacgtgcttcttacacaccaccccccagcttgagcgatgcctcagccagctcaccctcattcacacaatcgctagaaaacatgcttcaaatattctatctttgaaaagacaccatgcagaaaataagctttcctctgatgtgcggtattttcttcaatgctatttctttcnnnnnnnnnnnnnnnnnnggaaagggagtctcagtcttttgggcaggtgggattccaggtgcgcacgatctac

SEQ ID NO: 369101 - DNA, 732 bp, Homo Sapiens
  misc_feature (559)..(559): n is a, c, g, or t
  misc_feature (632)..(632): n is a, c, g, or t
ggatcttaataagatcctcaggggtctccaagttttcaaatgccatattctcatctgttacctcacccctccctcattaaatgctgtgaagtatgactgaaattgttatggactctttcagaagcttagttattaataaatacagagctaaaaatcaacagtaagatgcctgtaatgaattctgccactaagagaaaatgaatacaatctctttcttcacttctgaaataagattagctgtgatcttataggtgtctataaactcaaggtgatggtggtggttgcagaccatgacctgagccactacagaactggaagttccacttctttacctcaaatttctgtattcttgtatttctatattttgctttttttctaaatgacagataatgtataattgatagatagaatatgtgtagaataagtgccacattaacatggaaactatagaaatgtctgcattttacttggtttattttaccctcattttgttggagaagaaaagatacacattggtttcttcctattttcccagctattgacctgaaaagtgggtctngaaaagtgtacaaaggccttgcaaaaggtgctgctgataacacaatcatactttcaaatgaaaatttcatggnaggttggccttgggcaaatctggaccctcaaaaaggcattccttttatgggcaagccttgaagggcccaaaggaaaacctccttggcttgagccaaaaaa

SEQ ID NO: 369102 - DNA, 821 bp, Homo Sapiens
  misc_feature (63)..(94): n is a, c, g, or t
cgagcaatttgaagagaatcttttggattttaagcagtccgaaataatagcaattcatgggcnnnnnnnnnnnnnnnnnnnnnnnnnnnnnnnncgtatgtttaattatgttaccttttcatcccctttaggagcgttttcagattttggttgctaagacctgaatcccatattgagatctcgagtagaatccttggtgtggtttctggtgtctgctcagctgtcccctcattctactaatgtgatgctttcattatgtccctgtggattagaatagtgtcagttatttcttaagtaactcagtacccagaacagccagttttactgtgattcagagccacagtctaactgagcaccttttaaacccctccctcttctgccccctaccacttttctgctgttgcctctctttgacacctgttttagtcagttgggaggaagggaaaaatcaagtttaattccctttatctgggttaattcatttggttcaaatagttgacggaattgggtttctgaatgtctgtgaatttcagaggtctctgctagccttggtatcattttctagcaataactgagagccagtttaattttaagaatttcacacattttagccaatcttttctaagatgtctcctaaaggtaagaatccttttaatatcctttgaaatgcctaccaaataagttgaatccctggattattttcccggacccaccccccagaagggggattttaatttttcaaaagccagtataacaccaactttttgagttttggccctcttttttcccccttaccaaagtttctaaaatttattatttat

SEQ ID NO: 369103 - DNA, 629 bp, Homo Sapiens
tagaagctgatctctgagcaaaatcaccaatttatttaagtttcaaaaattttttttccataaatatgttctttaacatgcacactctgcttacattgtttagggtgctttttattgtgcctaaaaatttgcaatatggtgaaataaaatatttaaaaatggttgaataccatacggaagatgaaatctcatatttatagcatgtaattcaattctcatgtatgcataattaatcaaaattgtgtctttaaatgacatcttgacattttttgaattgcactaagaaacactagtgtctaccattcattttaacagacttatttatgtttagctttattaacagtataacattttcatgcaatcttaaattttgttttaatttttacaatgtttgatttaattcaaattaacaaatattcaagcctacatgagagacaaatgaaatgagactacctttatatataatcagcaaaattctttttaagagtaaaaagttaatattgggatttaaaaacctaaatttccaatgttactgctgacaatccaatccaactatatgtatattacttaggccacaggactgcccattagtctttcttgtcggagagcaattaatctcttgaaccccc

SEQ ID NO: 369104 - DNA, 716 bp, Homo Sapiens; identical to SEQ ID NO: 861

SEQ ID NO: 369105 - DNA, 919 bp, Homo Sapiens
  misc_feature (36)..(36): n is a, c, g, or t
  misc_feature (884)..(884): n is a, c, g, or t
atgccaaccttaagtttgcctgcatgtgtgtaaccntggccaaggtaaactggtctcttgggtttcttttgagttgaaatgagctgagctgtttgtttcctctgagccatatacagatgctttttgaactatctttgtgtttgagggaattttttttcatggtatcagcacaccacttcctccaagtcattactttgaaacagttttgtagagggagatattcctgctggccaccagcctagccaagcaaagtgatgactgagggatggcagtaaagctttattagtgcacttcatgtttttggatgagttcatgaaatgatttctcatccactaattttggcaaatagagggtgggctgtcatctgagctcagcagtagaaaacagcactttgttaataccaagcattggctcccctgtttgaatgatactcagaatttcagctaaaataatgtcctccgatgacctttgcctgctcttctctttataagaattccacagaactcttttgaatatggatttccacttaatctttgatacttccaggctcttgggtcctgataagttttagaaactgcaagtttaagtgaagctgtttttaacttcccttttattttgctttaaatatttttagcaatgaatgacctttgaatacttttaaatgttgctatacaaacataaacagtgcttttactaacatattttataaatatttccttttccataaattcataaattgcttttgtcataaaaatagtaatattttatagtattttaagagtaaattctaagcccttaagaactttttatgcctacactaaggaaaataggactagagacttaaaatacataaccatgctacatttatagtggattgttatggntctctgattcatacattaaaaactgatgtgattcc

SEQ ID NO: 369106 - DNA, 790 bp, Homo Sapiens; identical to SEQ ID NO: 1362

SEQ ID NO: 369107 - DNA, 212 bp, Homo Sapiens; identical to SEQ ID NO: 1399

SEQ ID NO: 369108 - DNA, 794 bp, Homo Sapiens
gggtactccctttcggtttggcccttattttctgggggggctgtttcccttttttggaggatggcatcccacataaaatgaatttgaagtttccccactttaattgttcaacatttcctgtccacatcccccattggtgttttgcaaataatgtctatgatgtctcctttctagattttgagggagtcagtgtcatagggacttggcgtgaaatccgtatgcactctggcacggccacagaatggtcctgaataggggccatcgtcatccagtcgaaagctgtcccggttacttgtaccatctgaacagcttgttatgccacttgatgagctctgtccactgtagagactatccatggagtcactggctttgagggacaccttctctgtgtgggtcccaatcacagggtcactgtttctatatgggtgggcattctctccatcttcctcatccttttcctcagaaagggctttgatgtactttttacccacttttttcttcattgtccatgaaatagctctcatttttttacccaaaccgcctccattatttgaagttttactttgttctccacttccatttgtgggatctccttcatgtgcctcagttgaatcatctggttttgataaagaattattccgaaaacgatcgaaattcccaaaactgctgcttcgctttggtttttgatgtttctccttctctgaaacattggatggctttctcttgagcattttgaattctgactactcctagtgagtgcactttctgctgttacagaaacaactgaaaacccc

SEQ ID NO: 369109 - DNA, 935 bp, Homo Sapiens
ggggattacaggcttgaggcactgcacctggccctgaccattttttaaaaaggttaggcttagtgcaaagtttaaaattatatgattcttaaaatactgaattagtttctaaactaaactagaggtataggtggacctgcttgaggtatctttgtttttatggaacatttttattacatgcctttataatttttcattgttcacaccctgtactgaaacctttttctcaaataccaactcttggctatgttaaatttgtagactttaaaagatgttatctaaattaatggtttaaatatacaaattgaaaatattttctttttagtggcaattttaaaagcaggccttaatatgggacctgcttttaaagtaaaatatgtggtactatgaattactaaattgctatataccatgtaatagtgagtatagctaatatttagtatgccttttaaaaattttggactgcttttcggttttaacaaattctccacatgtgaactactcaagaaattttccctttttaattgcctctatagcactcataagagctagggcattaggataaactagaatattttatgtttatgaatacttgtataaactaaaaagtgttttgatttcccacaatttcccaaaggaatgtttattttattaagagttgtgttgataatttaactgttacaatttcagcagttgaattcagtgaacactggttgaagagtgccttatttctaagcactgggtgtaagaaagaaaagacacttgcaaagggagaactaaagattaacataatttccttgggtttttcaattgcctggtattattatggaaaaacttgggtgggcagttcacaagggaagatttgttgtaaacagaaggagtgaccaaccattaggtttttttgatcatttaaatcaaattttttgtaaacaggg

SEQ ID NO: 369110 - DNA, 205 bp, Homo Sapiens; identical to SEQ ID NO: 178482

SEQ ID NO: 369111 - DNA, 667 bp, Homo Sapiens
  misc_feature (337)..(445): n is a, c, g, or t
  misc_feature (509)..(509): n is a, c, g, or t
  misc_feature (534)..(534): n is a, c, g, or t
  misc_feature (560)..(560): n is a, c, g, or t
  misc_feature (627)..(627): n is a, c, g, or t
ggatgtgttcaacaaatgaccctagagcgtgtattccttccagggacagagcgaggtactggggacacaggaaggacgaggcagagctccgcgctgacgaaaccaagggccaagcgtgcgagtgaatacgaacatcctggcgttaaaacgtcttgcatgctagtgaaatgagacccattggacacagagaagccccaccacaattgcatctgtgtaaaatcgagagaaagatcgtgaaaacagccatggcaggtgctggactaaggggtgacattgggttttctcttcccacctatcctttagggttgttaaaacagaaatagatctcacgtaggcnnnnnnnnnnnnnnnnnnnnnnnnnnnnnnnnnnnnnnnnnnnnnnnnnnnnnnnnnnnnnnnnnnnnnnnnnnnnnnnnnnnnnnnnnnnnnnnnnnnnnnnnnnnnnctctcctgagaatacacagtgcctcgtgcagggcccagtgcagcagagaggtcacctcctctangaagactttccctgactgggcttgnggttgggcctcccccagggctcctanggcttccccacataccccttcacctttgcaatgggatcatccccctggttactggtcccaaccacancacatttacccaccaaacacccataacaaaacaccatgca

SEQ ID NO: 369112 - DNA, 825 bp, Homo Sapiens
ggggaccagctgtggtggctaaagggaatatgttaattaagcaagaggttcttttctaaaagtggtatctgttatccacaatgtattttagttattcccacaagtcaggggtccagataaaatgagggttatcagctaactgatatgctatcattgaggttcatcaatgaatttgtacatttctagttccctttggtgaagggaaaaatgatgattttgcaagacctagattttggcttggtttcttgcctccttttttggcagccttcatcttctcatctcccaaaccccctgagcccgtagggttttcatagtggacaaagaacttgtggtcttttaaaactgggactgatacttttttgagagagtatcgtgtcgaaagtgtgatgttctaccactttaccaataactaattttaaatacacattgtcctctcgatttttggaccaaacagacgctcacagtggaggcttatcaagggttgcattggggaagaagcctctccctctctgtcagcaccagctggtaaaggtgactgtacagatgtgcattttccttttggtataaatggtccacagcactaactggtaaggcttattgtacagtatattgtcagtattcttctggttcagcataccttatagttcatatataacctgtattaattgtatagattgtgcattaaaagctgttaccaagttgtcagaacataagagcgaaaacaaggtcatatgtaatattttgtttgtaagtatcctttgtatcatagcaaaggaaatgtttaaaaaaatcaactgtaataaagtaattttagtacaaaaaaaa

SEQ ID NO: 369113 - DNA, 616 bp, Homo Sapiens
ggggttttttttcccccttttaaaatcaacaggaaatgtttcaaaggagggatgaaatgcttcttggcttcctcagcacttggcaaggtagacctcatagcaaccttgaatatgactttctttagtctctagctatgcactattaagtgcctcttgggtagaggtagagttaagtattgagtgccagtcttgacgtccgtatgcctcagtttttctcatatataaaaagcagtatacatacctacccttttctacctcatcatttgttgtagggattaaatccgggagagcaattctgaagcctataaatttccttgaagagatctaagaacctattatgctcttggtgtaccaagctctggggtatatattcagaatacctcatgttctggaagctgagcactagctcccctttattgcctgacctggcagagcctgtttgattactgcaggcccttttacccatgcttctagtttaggtattctttctttgatatgaggctcttgaccagaaaagagttctttctctaggtgttctgagagaagtttgtaaatttggatagtacattctatcctgataaaaccaccttgctgtggtcttgatgtacaaaaaaaa

SEQ ID NO: 369114 - DNA, 981 bp, Homo Sapiens
ctttctcgaaaccatttcctcccatattagttccctttggaatagaagcctttttaaaagtccaccttagtatatcttcagggaatcacaaattcactatgctatttataattcatgagtttctctaatggtatcaaggcagcaaatacaggtgaagtaataattatccacctgatagtacttaacacacataccccgtgtaaaaatactgctggtgtacagtgtgtgtgttggtgacgccggaggaagtggccgtgaacaggcttaatgccgcattgagtaacttcaacctcatcttgctcaggttcatatctctcctgaatttcccctggtaagcgcaagattcaggatccgttctcacagtttctttgtttaccagttgatgttggctgcattcaggaacgccttgctctcttaagccacagtgccttcctggtctcttcttcacagggtcttccacaatcgctctttttcctgggcacggtggtttgctgaaagtcggggtggcggccgcggcgttcccaagtttccaggccaattacctacctgccttagagcaattacgcacttctctctggtagtccctgaaatgttctaatcatcagatcgccccagcttctcctgaccgtttcttgcttacggctcagttcagacagtatttgttccgggacgctcagcgggaggcggtttttaccggctcactcgagaccccaattccaggcgccctgcagcttccctcagactccccgggaccgtgtttggccttcccattcgtacgctgcggctgcgctttcctctcgtaacaccacgctggcgaacctggaaaggatcaaatagtcccactcgccaacctagcgcggcgggaccggcccaaaagggcctttgcagcctgcgcatgcggactcggcggccgccaccgactccccgtctgcttccctccgggcggcagccgcggtttggagcttgctgacacctcccgct

SEQ ID NO: 369115 - DNA, 874 bp, Homo Sapiens
  misc_feature (636)..(636): n is a, c, g, or t
  misc_feature (648)..(648): n is a, c, g, or t
  misc_feature (836)..(836): n is a, c, g, or t
ggggtggcggtgggcggaactcctagcggacacctcgtggagtccggccggaagagcaaccgagatgaaggtgaagatgctgagccggaatccggacaattatgtccgcgaaaccaagttggacttacagagagttccaagaaactatgatcctgctttacatccttttgaggtcccacgagaatatataagagctttaaatgctaccaaactggaacgagtatttgcaaaaccattccttgcttcgctggatggtcaccgtgatggagtcaattgcttggcaaagcatccagagaagctggctactgtcctttctggggcgtgtgatggagaggttagaatttggaatctaactcagcggaattgtatccgtacaatacaagcacatgaaggctttgtacgaggaatatgtactcgcttttgtgggacttcttttttcactgttggtgatgacaaaactgtgaagcagtggaaaaatggatgggccaggctatggagacgaggaagagccattacatacaatattaggaaagacagtgtatactgggattgatcatcactggaaagaagctgtttttgccacatgtggacagccagtagacatttgggatgaacaaagaactaatcctatatgtntcatgacctggnggcattgacagtataagtaggggtaaatttaacccaattgagacatttctccttgggaagtgtgcatctgacagggatatagtactgtacgatatgagggcagctactcctttgaaaaaggttatctttaaaatgagaacaaatacaatctgttgggaaccttatgggagcttttccttttttccgcngcaaatggaggatataacttaaataccttttgaaaagg

SEQ ID NO: 369116 - DNA, 677 bp, Homo Sapiens
  misc_feature (336)..(376): n is a, c, g, or t
ttcacaaaggtacaaggaatttcagaaacaacattaaaacaatcattcaaactgtttcaggcacggtttcaattaaaagcatagatttgatttctgacttcctgtttccttctatgatacaatctcaagttttgtttcaggaagcacaattattgtagcgttaaggtggatacctgccaaagctcatctcctagtgctgtcctcattctcagaaagttcctgagtcaacagaaaggggacgcccagggtatggaataaggagatgagagcatgctctgccaactggctgggacctgaatgtgctaggcaagttccactacatcagctcaagaacannnnnnnnnnnnnnnnnnnnnnnnnnnnnnnnnnnnnnnnntatctgataaaaattacctatccctctcccttgctgtgaaataatttaaataatttattctagatgtaaaaataataatacaaaaaagtttgttcaaagacacctgtgtcctgtttgttaagtgtgcagtctgggtcccttggggtggagggagctggccaaggaatggcattgtgcagaggcataccgggaagctctctggatgcaaccccacctctaccgcttggcagtcaatgaccttgggcatgatgtttcttcacttctctgagggctagggctttgattctgaacatggggggct

SEQ ID NO: 369117 - DNA, 718 bp, Homo Sapiens
ggggcatttctctcacccttgtttctcatttgccatccacctcattttctatagacccaaagcttatgaaagaagaacaaatgtcacaggcccagctcttcaccagaagctttgatgatggcctgggctttgaatacgtgatgttctacaatgacattgagaaaaggatggtttgcttatttcaaggaggcccttacctggaaggaccacctggattcattcatggaggtgccattgcaaccatgattgatgctactgttggtatgtgtgcaatgatggctgggggaatcgtcatgactgccaatctcaacatcaattataaaagacctatccctctttgttctgttgttatgataaatagccaacttgataaagttgaaggaaggaaatttttttgtttcctgtaatgttcagagtgttgatgagaagaccctatactcagaggcgacaagcttatttataaagctgaatcctgctaaaagtctgacataaagagctgctggtgaactccatctcattctcgcccctccagaagaagcagttgtcccccaaatactctgctccctcactgctgaatccctgtaaggagaagcctgccaacagtgaccttccgaaacagccttctgaatacaaagaggattcagtttccatcttctcaacttgttaacacagaaacactttcctgcgagcataatcgacactctcgggccaggcgccg

SEQ ID NO: 369118 - DNA, 844 bp, Homo Sapiens
ggggcggcttgaaggagttggtaaataagggggtggttagtgatagggtcactttggcagtaaggaatctcctctcttgccagatggtggcgtgggaatgaagaatgtgatatacatctttggagtctgttctgcagcccctctttcctggagtaaatgaactggaccaaatctcaaaaatccacgatgtcatcggcacacccgctcagaagatcctcaccaagttcaaacagtcgagagctatgaattttgattttccttttaaaaagggatcaggaatacctctactaacaaccaatttgtccccacaatgcctctccctcctgcacgcaatggtggcctatgatcccgatgagagaatcgccgcccaccaggccctgcagcacccctacttccaagaacagagaaacagtccctaaagcaagaggaggaccgtcccaagagacgaggaccggcctatgtcatggaactgcccaaactaaagctttcgggagtggtcagactgtcgtcttactccagccccacgctgcagtccgtgcttggatctggaacaaatggaagagtgccggtgctgagacccttgaaatgcatccctgcgagcaagaaggtagcgcggaaccagcttctctgacggggctgctcttcgacccagcccaggccgccactgaattttggggctggaattttttctttgacagacagatccgagaaaggacctttaagcctgccgcacccgcgggcccgcgcaagctgcctaagatggttcggggctaataatacttgtaaaaccaccgcatttctagggtttttctttcattttcggttaaaaattttggggcaagga

SEQ ID NO: 369119 - DNA, 881 bp, Homo Sapiens
  misc_feature (572)..(572): n is a, c, g, or t
  misc_feature (815)..(815): n is a, c, g, or t
tggactttagctgctgaacagtatgatgatttggggattttctgaatcatttgtacttagatactggagttcagaagatgtgatttttgttgcttttcagaaaaaggaacgtggtagggagtgttttttcccacgcttttccagtaactttgcaaaagcattaattgttcactggcaattactaaatgtattttgttgctctgagaaactcagcagtgtactgagatgtggctggctgtgccatcgtcatagtgcacagtgacttttctgtttcttatcactaaagactgaggtgaggttatgaaactttcattggtcccatcgttgtgcgcagggtgcaactggctacctagaagctgatggcaggagactgtttcacacacaggagattgtgagctgtgtaagtagtcatcgccactcaagtaggacaagggtcctacccaaggctaggaccgcactgcggaaacagaaacatagactgagaacaaacctcaagactatcagtgtgacctccccataacaagagaaccccatatatagtttgagactttcccttgagaaacttatactanaactattactcatcagtcattcactgatcagcagctaaagtccatgagaccaaatggttttatatggaaccaacaaagtgggagctaaaactgcacagtggtcattctttggcctctccttggctttatggcttaaccaactacaacttccctatagcttctaagcagtttcatcagcattacttggggaaaacgtgttgcaagtcaaccagtcactaggatattttctacccatgcaacggnaagaaaacccctttactcagaagagtatatctaaggtaactaaaaatggagggcagaaaatgtttt

SEQ ID NO: 369120 - DNA, 649 bp, Homo Sapiens
  misc_feature (347)..(356): n is a, c, g, or t
gggcaaagggaaggaaaactttttgtatgtgttgtggacaccccaggggggaaagggtgaaccccacctttttccatccctgaatggaggcccaggaaagtttttctcaactccttttttaaccgtttcaagggagccactttacccttggggcaagggcactttaccattaggggggctcccgggaccaccaaaggtataaaaccaattccttgcccttggaggaggtttccaaattcttaggtaatggaaaaaactaaggtcccattatattccattggagagaaagtcaccaactttttctggatggggggatattccaagcaaaaatgcattgttatcaaacnnnnnnnnnncaacaccaaaaagtctataaaacattccacctaatcagatggtaagaattgaaaaagcatctcctttccaaaaccttatgtttttagatgactgttctgtttatttcaaaaaaaagtcataggtaaacacatatataattcaaagccaagcacaagatttagtacaggcattgggtaaacataaaacatgtatcactatacacaacacagacttatttttatatagtcttttctataaacaagtttgatattcactttcatacatcaaagtacaaatctgagtcaaagccttg

SEQ ID NO: 369121 - DNA, 942 bp, Homo Sapiens
  misc_feature (764)..(773): n is a, c, g, or t
  misc_feature (818)..(818): n is a, c, g, or t
tgatcttgaccctgatatcattaatatccttcctgcttctccaactggttctcctgtacattctccaggatctcattacccccatggaggtgatgcgggcaagggtcagagtactgatcggctactatcaacagaacctcatgaggaagtacctaatattcttcagcaaccattggcccttggttactttgtatcaactgccaaagcaggtccattacctgactggttctggtcagcatgtcctcaagcacaatatcagtgtcccctttttcttaaggcctctttgcacctccacgtgccttcagtgcaatctgacgagctgcttcacagtaaacactcccacccacttgactcaaatcagacttcagatgtcctcaggtttgttaaagaacagtacaatgcactctcctggctaacctgtgaccctgcaacccaggacagacgctcatgtctcccaattcattttgtggtgctgaatcagttatataactttattatgaatatgctgtgatcttcatttgatggaactgtgcaagaaaagaacaaggaaaaatggatgtttcgctgcaggattaagttacaattatcttctcagtgaaggtcatttgtgatggggtctaattcttattacttcaacaaatattgttttgacttgggggggaggggctataaccctgctatttttcattgactctattgaactctttaggatgatgactgatcatacaaaacgtattataacattttcgtagcaaaattaaccnnnnnnnnnncccggccccagtatttgtgaaaagtaatgaaccatagtaccccgntcatgttaaatggatattaaaagcctggaaaagaaacatgaggaacaatgaatttcaacatatggctccagaacatgaaaaagttcctggtatggattatagaacctagaaattcaaaaatgct

SEQ ID NO: 369122 - DNA, 865 bp, Homo Sapiens
  misc_feature (344)..(345): n is a, c, g, or t
  misc_feature (446)..(461): n is a, c, g, or t
  misc_feature (463)..(463): n is a, c, g, or t
  misc_feature (487)..(496): n is a, c, g, or t
  misc_feature (510)..(510): n is a, c, g, or t
  misc_feature (539)..(566): n is a, c, g, or t
  misc_feature (728)..(729): n is a, c, g, or t
  misc_feature (778)..(778): n is a, c, g, or t
  misc_feature (808)..(808): n is a, c, g, or t
  misc_feature (837)..(837): n is a, c, g, or t
  misc_feature (846)..(846): n is a, c, g, or t
gggacccacgaagcaggcgaagttcattgttctcaacattctagctgctcttgctgcatttgctccggaattcttgtagagatattacttgtccttccaggctgttctttctgtagctcccttgttttctttttgtgatcatgttgcagatggctgggcagtgctcccaaaatgaatattttgacagtttgttgcatgcttgcataccttgtcaacttcgatgttcttctaatactcctcctctaacatgtcagcgttattgtaatgcaagtgtgaccaattcagtgaaaggaacgaatgcgattctctggacctgtttgggactgagcttaataatttctttnnggcagttttcgtgcctaatggtttttttgccttaaagggaaaaaaataaaccccttgaaacccctttttaaaggggggcccacaaattttttttttttttnnnnnnnnnnnnnnnncncggcccccgcgcgcctcgtgcgtnnnnnnnnnntgggcggggcgctntcgctggtgccccgccgtttgccgcggcnnnnnnnnnnnnnnnnnnnnnnnnnnnnctgtgtccctatatatcctccccaacttgacactttggggtttgtcgacggggcgaacagtctttagcgtcccgaggttgctacccgcaagcgaagaaggcgcaaggagagagaccaccccccatcagaacccgggacacggaggtgtacgagccacataannaaaagcgcatgccctgggcgcaaaggacgccccaggaaagagcacccanaactaactaaagactaagtagtatccaaanggatagcaacgagtctatatcacccctancgcgccaangaacgcctgttcgcccctg

SEQ ID NO: 369123 - DNA, 276 bp, Homo Sapiens; identical to SEQ ID NO: 72659

SEQ ID NO: 369124 - DNA, 522 bp, Homo Sapiens
ggagatcacttggtgccttaaagacacgcattccaaagtggaatgtggttgaagaaagtgggccaggtggttgaagaaagccatgtgggagatcagcaaatcccaagggcttattatgacactccagatggtctccttagcatctcagctcttctgcaaggaagagcttgggtgttaggcctcagaggctgtagggtccttgggttacagagccggggagaacgaagttctgtgacccaggggtggagaatacactctaggtttgcgggctggtgggctttcaaattggtacttccagaggaaagccaagctgcttctgttgtgagcgaatcagccaagagcctgaggctgaagggaaaagtacacagaggaagatattttacaaaccaggtcagtgtaggccaagacttatggtctacagattttggcgggggaggggggaccttttcaaagacaatagggggtcttgacatgtttgttgtatgtaaagatgataagattaaaatttttgattttcctaaa

SEQ ID NO: 369125 - DNA, 457 bp, Homo Sapiens
cgtagaggatcccccgggggccttaaccctgcaaaatctgtagaccataagtcttggctacactgacctggttgtaaaatatcttcctctgtgtactttccccttcagcctcaggctcttggctgattcgctcacaacagaagcagcttggctttccgtctggaagtaccaatttgaaagcccaccagccgcgcaaacctagtagtgtattctccacccctgggtcacagaacttcgttctccccggctctgtaacccaaggaccctacagcctctgaggcctaacacccaagctcttccttgcagaagagctgagatgctaaggagaccatctggagtgtcataataagcccttgggatttgctgagctcccacatggctttcttcaaccacctggcccactttcttcaaccacattccactttggaatgcgtgtctttaaggcaccaagtgatct

SEQ ID NO: 369126 - DNA, 1088 bp, Homo Sapiens
  misc_feature (899)..(942): n is a, c, g, or t
gtatgacccaagtaaaagatcccctaaaattttaaaaacaggttttctatggggatggcatgaaattccaatggttcatcctttaaaaactgctgggagaaatgggctgccaaggtctttttgtatcaacataatatgaacgagggaagtataattgttcccatgtgctcaaaaatatagtttcccccatgacagacttttaatttgatcaaattctggctaaagtggttgaacccagaagaaaaactatctagtgagggcacacagagcctctgaaatagctctgtcttctgattcagagctagtaaaggtcacgctacagggaccatacatgtggatgcataataaggcatagcttcagctgttaaggttgaaatatgggccagtgtattccacatctgttccttaaaaagttaaaaaaattatcagaacctcttccatgaaattcagccggtggtgtgaagtgtgggattccttgttacgagagatatgctcaggactctaaagcagcagcaacttaagaagttagcaatgaaactttggcttaaaataaaaacaaagaaaagaaaaggtcaaactggtgcaagttgtctcctgaaagaggtatgtgggactgaccctccataaatgtcatcccaacgtaagtttccccctgcccttcttttaactgttatcaccttccattgcacaggagttatatcattctgtatggttaagtttcataaataatgagaaaactatgtgtaacaaatacatcatatttcccacccacccagcaacccttcccaaaataagaaaagttacatcaaattaaaaagtagcttcatgaatgaaggtactgctttaagttgcacttttcctgcaagtgcggccagtgcctttgcgctgggtatgaaggnnnnnnnnnnnnnnnnnnnnnnnnnnnnnnnnnnnnnnnnnnnncaatgtccggtttcaaccagtcaaaaccgggctgagcggaagccgagatatctcagtaccgtcccatcagagggtccttgcaatgcctgttcttcatcctgataggtatctatgtccttgtgattgtaaacaatccataagatact

SEQ ID NO: 369127 - DNA, 872 bp, Homo Sapiens; identical to SEQ ID NO: 178509

SEQ ID NO: 369128 - DNA, 792 bp, Homo Sapiens; identical to SEQ ID NO: 14924

SEQ ID NO: 369129 - DNA, 1088 bp, Homo Sapiens
  misc_feature (61)..(116): n is a, c, g, or t
  misc_feature (1068)..(1068): n is a, c, g, or t
gggttcgctctgcacttcttctcgctgctgccacgtgagaaaggatgtgtttgcttccccnnnnnnnnnnnnnnnnnnnnnnnnnnnnnnnnnnnnnnnnnnnnnnnnnnnnnnnnccagctgccattgaagaaatgcgcggtggtgggaaatggtgggattctgaagaagagtggctgtggccgtcaaatagatgaagcaaattttgtcatgcgatgcaatctccctcctttgtcaagtgaatacactaaggatgttggatccaaaagtcagttagtgacagctaatcccagcataattcggcaaaggtttcagaaccttctgtggtccagaaagacatttgtggacgacatgaaaatctataaccacagttacatctacatgcctgccttttctatgaagacaggaacagagccatctttgagggtttattatacactgtcagatgttggtgccaatcaaacagtgctgtttgccaaccccaactttctgcgtagcattggaaagttctggaaaagtagaggaatccatgccaagcgcctgtccacaggactttttctggtgagcgcagctctgggtctctgtgaagaggtggccatctatggcttctggcccttctctgtgaatatgcatgagcagcccatcagccaccactactatgacaacgtcttacccttttctggcttccatgccatgcccgaggaatttctcccaactctggtatcttcataaaatcggtgcactgagaatgcagctggacccatgtgaagatacctcactccagcccacttcctaggaacaatggaagaagaaaggactgaaccagggtatttttgttaggttttctatgtgactccaagagggaatggtcaagttgtttcatgagtttgcatgggcccttggaaaaacaggaaaggagcaatgaagtccaagcaaaactttactttcagcgttggctggaggacaaataagaaatgaaacatccatggaatactttatagcacattgcagatttgcaactggtaaaatgctggtgaaatgctgttggtaagcacatggttcaatttngagatgccgttcaaaaacag

SEQ ID NO: 369130 - DNA, 847 bp, Homo Sapiens
agcgggccgcgcgtggggcagcggggagcgagtccctccgtccccgcgagtcggcgcttttggccccgcgggaggggccgggctcgatgagaaaagcatcattcaagctcagattcgtgttgaagcctgccacaaggtccacctgttgttgtgggtttttgggtgaccaggggttacccccagcagtgtgtgagaatgaagagtgtgggccactgtgtctctgttgacctgccagataggaaatagcgccagagttgctgcaatccacgtctccctggaattcaggagcagcttggctggaaggctctggctggaaacttgcagaaggctgtcagctgggtctgcatcatctgaaggctcaacgggtaccgggggccactccatggcctgcgagtcagagctggccgtcggtgggaggcctcagttcctctccacataggcctctccacagggccacttgagcatcttcccaccatggcaactggtgtcctctagagcaacatccaggagaccaaggcggaagcagctgtagtgccttccaagacctggtcctgaaaagtcacccctgaacccacccccgctgtctcctcagccatattctgctggtcaccacagagcgctgcgggataaaggaggagcgtcctgcttcccggctggcctgttgctgtcggagtcacaggatggcggctggcaatcccttgcccttcgaatgctgctcccgtcttccctgttcccaggctctcagcaaaaaaggacacacacagggcggaaaactggttaatgaagtcctgaacaagctgggtacggggcttggaaacctcgaggatgtggccgggagttccccaga

SEQ ID NO: 369131 - DNA, 1387 bp, Homo Sapiens
  misc_feature (77)..(77): n is a, c, g, or t
  misc_feature (222)..(222): n is a, c, g, or t
  misc_feature (623)..(644): n is a, c, g, or t
  misc_feature (872)..(872): n is a, c, g, or t
  misc_feature (1060)..(1060): n is a, c, g, or t
  misc_feature (1178)..(1178): n is a, c, g, or t
ttgtttggagtatgaattaaatttgttaaagaattgtgttggtttccaagaaatatgccagataatcaatagttttnaaatgatttggattaaattgcacagatataccaagaaatgaaaaggaataggagaaagaccatttatctgcgaattatgtggaaattcttacacagatattaaaaatttaaagaagcacaaaacaaaagtcccattctggtgcangataaaactctagactccagtgcagaggatcatactttgagtgaacaggattccatacaaaaaagtcctttatcagaaactatggatgtgaagccttctgatatgactttaccattagctcttccacttgggactgaggaccatcacatgcttctgcctgtcacggatactcagtctcctacatcagatacattgttgaggtcaactgtgaatgggtattcagaaccacagttgatttttttacaacaattatactgactttgtaaggaatatggaattgctaagatatcattggtagcaaacatctctggtaaggtgcatatattcatattaaattcccattcatttgagttgtgaccattatttttcattcactgaagtaaaagcacctgatgctgagnnnnnnnnnnnnnnnnnnnnnncagaaacttgtcgggccgcctcggcccatcgaaaaaaacttttctaagacacttccgttttggggccgcccggggcccccagtagggttaattgggaacccctgggggccataagcttggttttccctaaagggaaaaataccttgggatgccattggcaccctaatgggggctcttgtggaatatttccctcccacaccccccattttaatagagagaaaacccccncccaccccggcgttacgaggtctcaaaaaccaccccaaaaaaaagaccggggttatgtctttgtgatagccccaccagacgtctcccccgggacaaaaaagtgggggaaagggctttacccccgtgggaggggggtgcaataacattcctcccctgtgggcggcacacaccccatcctccccacccangacggcgcggtgagtgttcccccccacacaagccttcaaaaaccctttcaccgatactatattcctatgctctctattttatctggttcttctcgcacggttctccttcttggctggncaactctattgttctcccgccccccgcgcaacagtcggtgatggtggcgtccaaatttttcccctttattaagtaaaggaaatttttctcttggcacctggatacagggtaaagggacaaagggtccctaaattatacataagacacgggggtccatgtctcacgccgaaaaacccttccatgatacatcacggccgcagcgaggcgcg

SEQ ID NO: 369132 - DNA, 462 bp, Homo Sapiens
aaaaaaaagccccaatccgggtgccagataaaaactcctagaacacccagtgccagaggagtccaaaccttggagtgaaacaggattccccaaacaaaaaagtccctttaatccagaaacctatggatgtgaaagcccttcctgaatatgaactttaacccattagcctccttcccacttgggaactgaggacccatcacatgccttcctgccctgtcacggatacctcagtctccctacatcagatacattgttgaggtcaactgtgaatgggtattcagaaccacagttgatttttttacaacaattatactgactttgtaaggaatatggaattgctaagatatcattggtagcaaacatctctggtaaggtgcatatattcatattaaattcccattcatttgagttgtgaccattatttttcattcactgaagtaaaagcacctgatgctgcatcac

SEQ ID NO: 369133 - DNA, 1426 bp, Homo Sapiens
  misc_feature (201)..(247): n is a, c, g, or t
  misc_feature (306)..(306): n is a, c, g, or t
  misc_feature (345)..(365): n is a, c, g, or t
  misc_feature (395)..(395): n is a, c, g, or t
  misc_feature (421)..(421): n is a, c, g, or t
  misc_feature (966)..(992): n is a, c, g, or t
  misc_feature (1190)..(1190): n is a, c, g, or t
  misc_feature (1214)..(1214): n is a, c, g, or t
  misc_feature (1298)..(1298): n is a, c, g, or t
  misc_feature (1335)..(1335): n is a, c, g, or t
  misc_feature (1348)..(1348): n is a, c, g, or t
  misc_feature (1359)..(1359): n is a, c, g, or t
  misc_feature (1410)..(1410): n is a, c, g, or t
agcagactcgtgtcgcccatagcgggggagaagaggcgctcagttgtgtggggtgcgtgcgctcgcggaatgggtcgtctctttggttttatttttctgctcccagcgcagtatctaatttctactagttcacctgtctcaacggttttattttttctaaaagtacattagactccagcgatgcaagaccatctgtgtatnnnnnnnnnnnnnnnnnnnnnnnnnnnnnnnnnnnnnnnnnnnnnnnggccggtcggagggagcgagagggagggtggcgcacgtgggcggtggtgcggcgtagcnagattggtggtgataagcgactggagccaggagagaaannnnnnnnnnnnnnnnnnnnnagagtgcttcacgataatatcacatacacnaagccagttgggccgttgatgacgcntgtggggttggtttgctcacaggtgtggtgctatatatctctttatatgtttcgctttgagtgagcgagcgacgtgaaagaaaagaacgagggagggtgagacggaggaggctagagcgggaggatggacgaggaaggatatcatggagcaggacagggagtgggggcgggaagacaggcgtccagacacagagtgcatgtcgtgggcaggggtgtgtgttggcgcggacgaccgagtaggtctgtgcgacgagcacaaaacacacccttccaccccgccccagccctctaccccaccgtaattggtgaggtgagagggcggaggagggttgcgtggtgtgggctaggggccggggcgccgcccggcatcgtgcactcccttatccgagtagaaagagtattttcacaggcgcaggcgggatggggtgtgttggaggggcgggcggggtggagaggggtctagttgggtgcgaggacgtgcgtgccgaggggcggtcgggggagagggtggggcgggagttgttgttgggagggccattcattcnnnnnnnnnnnnnnnnnnnnnnnnnnnattcattcagcaaatactaagctcccactatgcacataagagatgttcaatcaatgttagatgaagggaaaatattcagaaattcacaagtcactccagcactccaaaaacatacaactcttcatgctcctcccttctccgttcttggcctcatctctgcccacatcacaggttgttaaatgctcacatgcaacaagnaacttaagcacagtatgacatggncctgtgacttatacaaatgtctgtcccaccaagagggccatcttttaaagtagggtactagttccaaggcctaaaaacaccctnaacgggttctttcaggctttcatctggagggatatgnccacaggtggatncatggcctgtntattaggagggaccacaaggaccttccaagttccattggttgccggggttngggttttttaggattt

SEQ ID NO: 369134 - DNA, 600 bp, Homo Sapiens
acccgtgtttatcgatgccaccagttctgttaatattgttgctgatatttgcataattggctgcaattatttaatgtttaattgggttgatcaaatgagattcagcaattcacaagtgcattaatataaacagaactggtggcacttaaaatgataatgattaacttatattgcatgttctcttcctttcacttttttcagtttctacatttcagaccgagcttgtcagcttttttgaaaacacatcagtagaaaccaagattttaaaatgaagtgtcaagacaaaggcaaaacctgagcagttcctaaaaagatttgctgttagaaattttctttgtggcagtcatttattaaggattcaactcgtgatacaccaaaagaagagttgacttcagagatgtgttccatgctctctagcacaggaatgaataaatttataacacctgctttagcctttgttttcaaaagcacaaaggaaaagtgaaagggaaagagaaacaagtgactgagaagtcttgttaaggaatcaggttttttctacctggtaaacattctctattcttttctcaaaagattgctgtaagaaaaaatgtaagacaa

SEQ ID NO: 369135 - DNA, 1107 bp, Homo Sapiens
  misc_feature (597)..(606): n is a, c, g, or t
aaaactaaaacaaacactgaagtagagttttgtaaatacaactgattttgtccttgtagataattagtgaacgtacaaatagaaattttgcttagactgcttccaagaaagctaggtagactcggcgactgtgaattcaagtcagcaatgcaggtaggaggcgaacttgggctcttttgtgagcagcactgtagaaaggatttttcaagggggtacagcctgcataaaagcagttatcttggcatgtgcaaacaagaagggggaaagttgtattgaaggaggggtgaattaaagtccctaaaattcaagtcccttctttagggaggtgagaacctccttggcatatgccctaccttaatctgagctgtgttatagaaaagtacagactctggtgtttgggactgacatctccaaaccaagaaaattaaataaataaaaaaggcaagggaagtttaaaaaaatggttctttcactagtggaatagagtctgaataccagaattcactgagaatctatttacaccacagtttgattgcgcgcacacacacacacccatacatatgcatactctcacatacattcccaatctttaatttnnnnnnnnnngtcaaacaatcaagaatgactgcttgaaaaataatttgtaaaatgcctagagctgggctaaatttcaaccttatagcagatcctgaaaataaatttcataataatatttccatgcctaaatatgccactgttaaaactgaaaaaaatttaagcatgtaacattaaacactaaaattagtttaagcattcagtagcaaatggtttttcttgtaaaactaagtttctttcaccggaaatggcctgaaatattagtcatagccctaaaccatagtacaaaatataactgaagaattctcattttattctaagttaaaccacctaacaataccacttgtatattgccatcatgttattctgtaaagatgtgatatataaaatgctgtaagacctggtaccttttcaatttataaacacagtgaacttcattactgtacatgtactctgcaactacagcttagctgtaaatcctccacacacaatggtatggacactattccgctc

SEQ ID NO: 369136 - DNA, 1034 bp, Homo Sapiens; identical to SEQ ID NO: 2754

SEQ ID NO: 369137 - DNA, 1492 bp, Homo Sapiens
  misc_feature (1122)..(1122): n is a, c, g, or t
  misc_feature (1307)..(1316): n is a, c, g, or t
tttataggtagcgaggcctgggtggcgaattcggcacgaggggtgagtgggagctggcgctccaagggtggtcccggcatccttccctgtggcaaactaaccctaaccctttggctactgcagcgctagtcttgcagtggcagaattggaacactgggagatgcaaatgaagctgcttcctctctggccctggtgcttcgtatgtttcgtttttccctgccttcattttttctggcttttagagccgatggagcagcacatctgtggacaaccttgtccccaatgaccagtttccccctgtgccttattaggaaaggcctcatcaccccagaggagcttatgcaatgactcagagccaattcctgtaagaaacactgtggacagagctggggcttgaggacttcattcctggtgatgggtgtccctgtgagctcgagctctgcagagaatcatgcagcttccctaaccatcggcccagcagcttcccagacagaggagacttctgctgttgctctaaacagacctagtcatcagtgagaacagcacagaatcctccaggatcactgtactgcagcctccctggaggctcacctcctgccagcacagtacttacagaaaccctagggggcagagggtggcatggtgctgtcaatcagagaaacagcccctgtgtggtgggctgaaaacacagggcctggctgcctggggcccacttggatggctgcacctttgtctcctgctgcaagtcctctctgagtgtttagccagtgctaagacaattcagggaaggggatgtgttcagggacgggacagggccttgctgaggctggcaggcagaaatctgctgctggggtttgcctgttaaggaatgtgaacaaagctgtctggcggcagcgccctcctggcctgcatctctggtggcctccctgctgatgtaggaaaccagacggtaaaagggacccagatctcagcctgctgaccccagcatccttttcttacaagtctgtgctagaaatgaccatggtagcttttgtaaaattgttgcctgtatttacttcagacaggatgtagagagtgagctagtttagttattcagctagatgattataaagtagtaatcanaataggggccttagaagttatttttaaaacatttctaagagtttgcttagggatcatattgatggacagtatagcatgacttttgaaatctaccagcccctaagtggtttccagctaaaacactctattagcctggatgggaacctgggagaaattgttttgactttctggagcctccagtggtnnnnnnnnnnttggaaaataagggaatgaattaccttggccttttggcctgggtggggtttaccccgggttattccaatggaagggcaatttgaatgggggccttaacctttaagggtccaaggtggcttttaaggcctctaaaacacctggggcccaccatgaaaggaaaggggcggtcccagaa

SEQ ID NO: 369138 - DNA, 1490 bp, Homo Sapiens
  misc_feature (494)..(510): n is a, c, g, or t
  misc_feature (554)..(600): n is a, c, g, or t
  misc_feature (633)..(845): n is a, c, g, or t
  misc_feature (848)..(851): n is a, c, g, or t
  misc_feature (854)..(856): n is a, c, g, or t
  misc_feature (1296)..(1296): n is a, c, g, or t
gggcgccccacatcatgtaaaacgctgtgttttttgtgcttgcccccccctgttgtttctcgctgcggggtgcgcaggtgttttaattgtgaatgtatagggggcgcgacaaacaaagtatcggagaggcgctcgtccccagcgcgggggtgctgacatattatttatttgctccctcgcacattgttggacaaataaatgtgtttcgcatttgtgtcgggcgggagatatctatgtatagagagtttaaatacacacccgccctctgttactcggcatgaggtgttatcccgccccgggggggcggggcgggcgatattatttgatttattaatgaggggcgcgccacacgcggtgggacggaacaccttttcgtcattagtaatagccccccggagagaaaaaccgctcttcaagaagagttcccaccgctcggctggagggtgatttttactacacagcggatgtggttggtgtctaccgcggcggggggnnnnnnnnnnnnnnnnnggtgggggggtccggacgaagggtgttgtttggggtaaacaggnnnnnnnnnnnnnnnnnnnnnnnnnnnnnnnnnnnnnnnnnnnnnnnctggggggcccgccgcgccccccccgacggggnnnnnnnnnnnnnnnnnnnnnnnnnnnnnnnnnnnnnnnnnnnnnnnnnnnnnnnnnnnnnnnnnnnnnnnnnnnnnnnnnnnnnnnnnnnnnnnnnnnnnnnnnnnnnnnnnnnnnnnnnnnnnnnnnnnnnnnnnnnnnnnnnnnnnnnnnnnnnnnnnnnnnnnnnnnnnnnnnnnnnnnnnnnnnnnnnnnnnnnnnnnnnnnnnnnnnttnnnnggnnntaacattgtttattatataattcagggactaaaaggataggagaaaatttaaagcagtattaaatttgtgtctgtggactggcattccctgttggaaatattaacagaaaaagtaagaaacaggaatagagaatgatctaggcaatatttttctaaaattagatgaatatgaatattttcaatcagtatgtattgcattgtaatcagcatgtattaaaatcactttaatacatgttggctaaagtattagcaaatccactacagcctaataacttgaccaataacaacaatgcttttatacagtaataaacaaatggcatcttttggatttcttaatttgtccaaattcagctcctactgatgagattccatttaagacaccttgcaggggcagacctttgctatccatgaatgatgccttggctcacctggactctcangactcttccaaggcacatctgtcaggcatgtcctccacgtcttggaagtttgccgagtttgagttgctgtcatgcttgaccgggctgactggagctggctcggagggtcctacggcccacggaggtctcgctgattgctagcacagcaggtctgagattcaaactgcaaaggcaggcagccagggctgggggag

SEQ ID NO: 369139 - DNA, 1080 bp, Homo Sapiens
ggattattcccaccctgggggattggttgggtattttttggaccaaaggttcaagttagggggggttgtttgtccccagtggggtaacgattcaggggaccgtgtacaggtttatgccattcggagcaacaagcttcccacagtgtctcaccacagtttccagatttgagtgaaattcagactcacagctgccaaaatgaagaggaggctggaagccgtagggcgtgcggctctcccaatataaagcatgccacccactccgcaccagttacgctcgtactctgtccccaaaggagtgtgtggccatttgccagggttgtgtcaccaacatagaggggtacagagaggctttttgaggacgggaacatggtgtgtatccggacactgacattgacgccaggactttgtcaagatcaccacacccctctgtttattgaagtcatggaaggcactgtggcccaagtccatctatagtgggtccagtgggtctgtaggtctgccctgtttattgggatacacattcttagctgccagctgaatgctcacattggctccttggccggaggagtaagggttgttacggcagaaagaaccaagtgagagcctgtggaacttcctccctccagcaagacagtgagcctgatagaaggagtgctttgcttgaggaattgcagaggttaacaccaacatcagagaccagggaagcaggtgtggtggtttccatctccattagattcacctgcctggcctttgcaaaaacaaattaataatgaccgtgggtgatggactgcagtcaacttgaagaggcagcagggccagtgagagctgccacgccgcgagtggtctttttgctgcagccgaccaacatagcctctgtacttggtgtgtgactagcatcttggcaaattctttcttctcaatatcctcgctcgggagggtcagaagcaggtcatatacaccggcacgacttcagacactccttccctgcctcgtcttggcactccgccagctcccgtgtgttttcatgatggacaggaatcataggtccaccacaaagatgtccacatccagtactgcccg

SEQ ID NO: 369140 - DNA, 1276 bp, Homo Sapiens
  misc_feature (1194)..(1203): n is a, c, g, or t
ggctcactctgcgcttcaccatggctttcattgccaagtccttctatgacctcagtgccatcagcctggatggggagaaggtagatttcaatacgttccggggcagggccgtgctgattgagaatgtggcttcgctctgaggcacaaccacccgggacttcacccagctcaacgagctgcaatgccgctttcccaggcgcctggtggtccttggcttcccttgcaaccaatttggacatcaggagaactgtcagaatgaggagatcctgaacagtctcaagtatgtccgtcctgggggtggataccagcccaccttcacccttgtccaaaaatgtgaggtgaatgggcagaacgagcatcctgtcttcgcctacctgaaggacaagctcccctacccttatgatgacccattttccctcatgaccgatcccaagctcatcatttggagccctgtgcgccgctcagatgtggcctggaactttgagaagttcctcatagggccggagggagagcccttccgacgctacagccgcaccttcccaaccatcaacattgagcctgacatcaagcgcctccttaaagttgccatatagatgtgaactgctcaacacacagatctcctactccatccagtcctgaggagccttaggatgcagcatgccttcaggagacactgctggacctcagcattcccttgatatcagtccccttcactgcagagccttgcctttcccctctgcctgtttccttttcctctcccaaccctctggttggtgactcaacttgggctccaagacttgggtaagctctgggccttcacagaatgatggcaccttcctaaaccctcatgggtggtgtctgagaggcgtgaagggcctggagccactctgctagaagagaccaataaagggcaggtgtggaaacggccccctggcaaacttgcccgagcaatataatgagccatacgcaccactgcgctcgaggcatctttgtcgggtgggggaaaaaaggtattgaaatggcccctggcgcatagctgtttcccgacccccttttcttggtacaagggggcaaatctgcggggctccctataggggatcggattaatttccaaaaagccgggttaaccctgcccttaatgaaatgggcctgcagtaccccggggaattttacccccccctaatggagggggcnnnnnnnnnngggaatcccaagggactttcctcggagatcccttttttttccggaaaagaaatctgccgggcttggccgaaag

SEQ ID NO: 369141 - DNA, 1229 bp, Homo Sapiens
aatcgtgcggctcctctactgaggaagacctactttggaggagggacagcctctgcgtacctagcaggagaagacttctacatcccgaggcagtcggtagctcagaggtttgaagatggcaccatctcattccttgatgttatcgcgctaaaacatggatttgacaccctagagcgcctcacaggtggaatggagaatataaagcagcacaccttcaccttggctcagtatacctacatggccctgtcctctctccagtaccccaatggagcccctgtggtgcggatttacagcgattctgagttcagcagccctgaggttcagggcccgatcatcaattttaatgtgctggatgacaaagggaacatcattggttactcccaggtggacaaaatggccagtctttacaacatccacctgcgaactggctgcttctgtaacactggggcctgccagaggcacctgggcataagcaacgagatggtcaggaagcattttcaggctggtcatgtctgtggggacaatatggacctcatagatgggcagcccacaggatctgtgaggatttcatttggatacatgtcgacgctggatgatgtccaggcctttcttaggttcatcatagacactcgcctgcactcatcaggggactggcctgtccctcaggcccatgctgacaccgggggagactggagccccatcagcagacagccaggctgatgttatacctgctgtcatgggcagacgtagcctctcgcctcaggaagatgccctcacaggctccagggtttggaacaactcgtctactgggaatgctgtgcctgtggccccacctgtgtgtgatgtcgccagaaaccagccgactccttcagagaaagctgcaggaaatcctggagggggcccttgggccacatgttgtcactaacctttatctctatccaatcaaatcctgtgctgcatttgaggtgaccaggtggcctgtaggaaaccaagggctgctatatgaccggagctggatggttgtgaatcacaatggtgtttgcctgagtcagaagcaggaaccccggctctgcctgatccagcccttcatcgacttgcggcaaaggatcatggtcatcaaagccaaagggatggagcctatagaggtgcctcttgaggaaaatagtgaacggactcagattcgccaaaagcagggtctgtgctgaccgagtaagtacttatgattgtgg

SEQ ID NO: 369142 - DNA, 846 bp, Homo Sapiens
  misc_feature (457)..(458): n is a, c, g, or t
  misc_feature (460)..(460): n is a, c, g, or t
gggtccagagagaggaacctgccccagaagaagaggagcccctgttgctacagagaccagagagagtacaaacgctggaagagctagaagagctgggaaaagaagaatgttttcaaaataaggagcttcccagacctgtgttagaaggacagcagtcagagaggaccccaaataatcgccctgatgcccctaaggagaagaaaaagaaggagcaaatgatcgacctacagaacctcctaaccacacaatctccctccgtgaagtctttggcagttcccacaatagaggagctggaagatgaagaggagagaaaccataggcagatgataaaggaagcttttgctggggatgatgtcatcagagatttcttgaaagagaagagggaagctgtggaggcgagtaagccaaaggacgtggacctgacactacctggctggggcgagtgggggtggtgtgnncntagacgccaccgggggaaaaacaggaaggtggcacgcaaagggcgcacgcgaggaccaaacgcacagagaggccagacggaagaagaggccaggggcccgcaccgcggcgcctggtgagtctggccaggtgatggcagagggggacgggcgcaagctgccatttgagcacaggggccgcgaggtgacccagccgagaagaagggcagagaaaaagcgacaagtgacagacaagaagggaacaaaggcgggaccactactgcagcagagaaaggaagacaagagaggagagaatgacagccgcaacgacaaatgacgcggaataaacaaagctatgcacagagttcagaaagatgcaagacaggaagagggagacaagaacaacaaa

SEQ ID NO: 369143 - DNA, 927 bp, Homo Sapiens
  misc_feature (769)..(769): n is a, c, g, or t
gggtccttctccaagatggcggcgatcggcggcgttgaggcgggatccgggcgagccgagtgaagattgttttgatggtgatcatacctttgaggacataggacttgcagctggccgaagccaacgagagaaaaaacgttcttacaaagattttttaagggaagaggaagaaattgctgctcaggtcaggaattcttccaagaagaagttgaaggatagtgaactttacttcttggggacggacacacacaagaagaagaggaagcactcctctgatgattactactatggaggacagtggttcttgttctgagtgccgataaaccagtgtgaaggaggagagaggtggagggctggtattttggaggattcagcatagaagaacagtctgcatttgtgatacaccagatatttcgtctttggaatcgtcacagaagaaaaagaaaaagtccagcccacagtctactgatacagctatggacctgttgaaagctatcacttccccactggcagcaggctccaagccctccaaaaagactggggagaaatcctctggctcttcaagccattcggagagtaaaaaggagcaccacaggaagaaagtcagtggaaagcagtggggaactacccctagaggatggtggctccacacaaatcgaaaaaaatgaaacctctctatgtgaacacagagacactgacccttcggggagcctgatggtttaaaaatgaaacttattctgtcaccaaaggagaaaggaaagcagctctnggtgatgaggagtctttttcaatatcccttcccaacaagcgactgtgaaaaaaatcctcaaagaaatccgcttcgggaataaaccaggtggcttttacttcctaaggaacttgggtttaccggagcttttccgaaaaacagcccgggaaaaaaaccac

SEQ ID NO: 369144 - DNA, 1040 bp, Homo Sapiens
  misc_feature (481)..(481): n is a, c, g, or t
  misc_feature (650)..(658): n is a, c, g, or t
  misc_feature (810)..(822): n is a, c, g, or t
gctggtactcgggtccggaattcctcgggatcaaaaccaagatggcagcccttcctcagcgtgcctcactgccactcccagagccagggagccccataaaacccacatcatgtcttaagagtatatctggctccttgaccagcaatcggccctgggagccaccaggtgggaaaagcgcctctgccagagtccaggccttgggatgacagacagcttgcccgcacactcgggccccactcaaggatgtagggccttttctggcccctgacccctccctggcatgggagcgtggggacggggctggccttgggaggagcggcaggggcatcacctccttctgctgcttctccctgctcctaccctcaagggcctgggggctgcccagctgcctctatgcccttctgggggtctcagcccactgctgacacttctgcaatccagagaaacactaaataaagcaatacgtgtttgccaaaaaccncaccataaattaaacacaaaaaaatttaaaattcaaccttcacccctctactaaaaaacgaacccattgatcatgccgtggatagtttccttagccaacaaacaaggggggggcccgcccttaaaaaatttccctctggggggggccaacgctttaaggcggcaccccnnnnnnnnnggagaaaaagggggccccccaaaagggggggccccttttataaaactaagggcccttgggcccctccttttttttaacaccccctggacggggggaaaaaccctgccacctttggggggtatttttgttgaaagggaacccctcccctctcnnnnnnnnnnnnnaaaaaaagttggggaacaaaattttccctaccggaggatttttttaaagcctcttccggggggaaaaaaataaacaatttctttacacaggtgtaaaaaagggggggttaaacaaaaacgccgcgccttaatgctttcctcctgctctgagaaagaattttttcctcttcgggtgggctggagtatttcttgagaaaattttttttaccccggcgggg

SEQ ID NO: 369145 - DNA, 1198 bp, Homo Sapiens
  misc_feature (306)..(306): n is a, c, g, or t
  misc_feature (318)..(318): n is a, c, g, or t
  misc_feature (436)..(436): n is a, c, g, or t
  misc_feature (440)..(440): n is a, c, g, or t
  misc_feature (451)..(453): n is a, c, g, or t
  misc_feature (455)..(455): n is a, c, g, or t
  misc_feature (457)..(457): n is a, c, g, or t
  misc_feature (693)..(751): n is a, c, g, or t
gttgtttgttgtttcgtttgtgccgtactcggagtgttgaggggcttgtgggagtggtaggcgcgctatatccgtgcgtggtgttcatatcggtcggcctgtgggcggaggcacgaatggtgcggcgcttttgttgccctcttatttaaatctccgctgctcttggtcataccggtgtgttgccctcttgcttcgtgcgcggtgtggtgttaggttgccgtgtacgccttggtgggcggcggctacgcgtcgggcaaagcgtagggtggtgggaggatagggggcggcgggctcatcatctggttngtggcgaggcgngccatgtgatctgagctgtgctactgatcgatggtttctcgctgacgcttatactatgggtgtggatctgtgcgacattgcatcatttcttagcttatgtcttctgattgctttgatntcgntggtgtggtcnnngngngaaaaggaagggattctctgtcttgagcgggagatgtggtgtgcttgctgtaggtactcggggtcgcgctgtgtgggcggctggtatttatttactaccatgcgcgaagtgtcggatggaaatagccgacgacgcagtttgcgtcacatgttttacggtggtgtgagtgggacggcgggaagggaaggacaatctttcgcatttttgcgaatgacgggttgggcgaggccaaattnnnnnnnnnnnnnnnnnnnnnnnnnnnnnnnnnnnnnnnnnnnnnnnnnnnnnnnnnnnaatcggataggggctgcgatggaagattagtttggattcgcggaaagggttgtgtttgcgacggttggggggggcgcatggtctcaacgtggattcgagtgggggcagaaggaaacaaaaccaaatctctgctcagagtggtcatagtgaagaacactgagatttgcatatgtttttctactttcccatccatctagaccctgaaatctaaataaatatttcagttaaaactttttttccatttgcatgaagtctgggtcactatatctcctaccctgaatgggggaagatgggacagctatatctcatactgaagcggtggcagctaaaacctggcaactgctgccagtgtccccaatgtgtcttgcttattattttttaaaatgtgacaaagacaaaagctacagctggaaactcacacaatttagaaatatgttgaaaactttt

SEQ ID NO: 369146 - DNA, 702 bp, Homo Sapiens
  misc_feature (324)..(324): n is a, c, g, or t
  misc_feature (587)..(587): n is a, c, g, or t
  misc_feature (627)..(627): n is a, c, g, or t
  misc_feature (641)..(641): n is a, c, g, or t
  misc_feature (651)..(651): n is a, c, g, or t
ggatagtcaacgttggactatttgggaaaaggaaaagagttgggaaaattggttttaaggtaagttttagtcaaaagaattctttcttgaaactagctggtttgtggattcagatactctgatccttacagaatccaagaggaagctttcataaaaacaattcagcaaatatttccaatataatttgaatggctaattttcagttgctaattaattagcagctttgtaatacttgatttgggagcatttacttggaaatcctaaggactataataaaagttttcaacatatttctaaattgtgtgagtttccagctgtagcttnttgtctttgtcacattttaaaaaataataagcaagacacattggggacactggcagcagttgccaggttttagctgccaccgcttcagtatgagatatagctgtcccatcttcccccattcagggtaggagatatagtgacccagacttcatgcaaatgggaaaaaaagttttaactgaaatatttatttaggatttcagggtctaggatgggatggggaaagtaggaaaaacattatggcaaatcttcagtgttcttcactnatggaccactctggagcaggaggtttgggttttgtttccnttttgttaaccaangtggaaaacngggtgaggaccatgtggcccccaaaccaagggggcggaggagcacccttct

SEQ ID NO: 369147 - DNA, 971 bp, Homo Sapiens
  misc_feature (14)..(14): n is a, c, g, or t
  misc_feature (23)..(23): n is a, c, g, or t
  misc_feature (37)..(37): n is a, c, g, or t
  misc_feature (54)..(54): n is a, c, g, or t
  misc_feature (79)..(79): n is a, c, g, or t
  misc_feature (84)..(84): n is a, c, g, or t
  misc_feature (100)..(100): n is a, c, g, or t
  misc_feature (105)..(105): n is a, c, g, or t
  misc_feature (153)..(153): n is a, c, g, or t
  misc_feature (162)..(162): n is a, c, g, or t
  misc_feature (674)..(674): n is a, c, g, or t
  misc_feature (724)..(724): n is a, c, g, or t
aaaactgggccccnccggaaaangggttaagaggttnagcccaggttttatggncactcggtaaaagtccctagaaaangtttnaaccctggtgagaaanggttnccggtccctttcactcaacacacataggccatatacctttttttggtnccgtttgtncccttagaagagtcaagtacccattggcccaggatcaaacgccttatggaacgtgatacagagggtggtgcagcagaaattaattgcaatggagtgattgaagtcattaattatactcagaacagtaataatgaaacattgagacataaagaggatctacataatgctaatgactgtgatgtccaaaatttgaatcaggaatctagtttcctaagctcccaaaatggagacagcagcacatctcaagaaacagactcttgtacacctataacatctgaggtgtcagacaccatggtgtgccagtcttcctcaactgtaggtcagtcattcagtgaacaacacattagccaacttcaagaaagcattcgggcagagataccctgtgaagatgaacaagagcaagaacataacggaccactggacaacaaaggaaaatccacggctggaaattttcttgttaatccccttgagccaaaaaatgcagaaaagctcaagggtgaagattgctgacncttggaaatgcttgttgggtgcacaaacatttcactgaagatattcaaancaagcaatatcgttccctggaaagtctaatcggatctggctataatacccctgctgacatttggagcacggcatgcatgggctttgaactggccacaagtgactatttgtttgaacctccttccgggggaagagtcccctcaagatgaaaaatccctttggcatttgatccaaaaacttctggggaaaagggccctcccaagctcattggtgggcgggaaaaaatttccaaggaaattttttccccc

SEQ ID NO: 369148 - DNA, 933 bp, Homo Sapiens
  misc_feature (352)..(352): n is a, c, g, or t
  misc_feature (672)..(695): n is a, c, g, or t
  misc_feature (897)..(897): n is a, c, g, or t
acccattccccccatgtttccccttttccagccccttttccaagggcggaaggtttttacccccccaaatggtttttttcctttttgcccccatggctaggaaacggtttaagggaaatggggagggagcccccattttggttaggggcttttgcggaatgaccctaccagtgggacagtgggggccaggaatagaacttctggacatgagaaaaaggcaaattttcatgttcctccagaattcaggtcttacatgcctttcgttattttgttatcacaaaattaaaaacctgaggcttagtcactattttatatagataatggagagttgactgtaatcatgttatgactntagctctttaacatgaaaaaattcacaagaaagcatatgataaaaagattaaaaagactgccatgacatctagaagcatttattttatgcaaaaaacttaaatatgattatgtgtacacataaagtgcacacattacctatgctgaacaatgccaagaaacataatatattgatgcaacagttttctaaaataaacataaaaatgagcccagaccatcagacaaaagcaaaacacttatttccaaatagcacaatgctgaaaattgatagcaatcctaaaacacctccaactttccttaaaagctgccaaagtccaactnnnnnnnnnnnnnnnnnnnnnnnnacattaataaaaatctggtgacaaacattataaaaccaaatgctggacagtctttactcctttaaaattccaaatattccaacataatcacaggagtaaaaaccattttaaaagtgatatgctttatgaaacaaacaacaatatgtacatttattgcaaattatattaaactaaaatggggggggaatccaaatgtggaccnggttaccacctggcaatccaataattttgaatttcc

SEQ ID NO: 369149 - DNA, 530 bp, Homo Sapiens
  misc_feature (323)..(323): n is a, c, g, or t
  misc_feature (419)..(419): n is a, c, g, or t
  misc_feature (430)..(430): n is a, c, g, or t
  misc_feature (447)..(447): n is a, c, g, or t
tcccccatggggtttccacccaggatacagggtattccggatctagaattatctttctatttgcaggatttccgaagagaccgttaagcatctacgcgccccttcctggatcccatgcttcttggggcaggaaatttcttttggtccgtcgctttcgtcgtgaaatacacaactaattttcctttcatgttataaggcaccatatttatgattttgttaactgaagaaaaaacccgagataaaccatcttaagtacttttaaaagtccagtggctgaattcggtgtttaatctgatacccttctggattcgctgacactgganagaataatttccaagtcttagtatagccaaaacaaaaaactaccgtcgctaagctacatctaccactggattttaaaatgacaaaacagcctgagnaaaatcacaanagcagctaactcgaagnaaaatccttttctttactcagccgaacctaagaccacagttacttcgaaagcaacttctaataaccgtctcacatcctgtcac

SEQ ID NO: 369150 - DNA, 1048 bp, Homo Sapiens
  misc_feature (301)..(590): n is a, c, g, or t
  misc_feature (592)..(646): n is a, c, g, or t
ggtaaaaaagaatttgattgacaatatatccagtccaatataagtatgaaggattctctctcctgagattgtagcaggcagccaaacattttcaaatgatgcccaaggttttagctgtcttgtgtgcatccacagtctgcgaagaagacatgataaggacatcagggagccaacaagactcctaatagcctcactacattcatccagtgcctattctgcatgcctaagcttagagttcttttatatacctctacggccagcaaaatgctcaggtctgctcttggtagggtaaacataaagnnnnnnnnnnnnnnnnnnnnnnnnnnnnnnnnnnnnnnnnnnnnnnnnnnnnnnnnnnnnnnnnnnnnnnnnnnnnnnnnnnnnnnnnnnnnnnnnnnnnnnnnnnnnnnnnnnnnnnnnnnnnnnnnnnnnnnnnnnnnnnnnnnnnnnnnnnnnnnnnnnnnnnnnnnnnnnnnnnnnnnnnnnnnnnnnnnnnnnnnnnnnnnnnnnnnnnnnnnnnnnnnnnnnnnnnnnnnnnnnnnnnnnnnnnnnnnnnnnnnnnnnnnnnnnnnnnnnnnnnnnnnnnnnnntnnnnnnnnnnnnnnnnnnnnnnnnnnnnnnnnnnnnnnnnnnnnnnnnnnnnnnntaattcggcattcttaagggaaatgtagccccttccaaccagcgaattgaagcctggtccctaatgtttactcctcacaaagaaaagtttttttcaaagaaaagttgggaaaggccctggttccctgggtaaaaattttttaacccatttaggatctgcccgaataaaatggtttgaaaattctggcctcctctccctcaattaaatccccggagatagttttttgaaaaggggtaagcgccttttggggtaaaaattgttgttattcccaattacccacaattttttgtaatttttaaaaaagccacacagggccttctttaaaaaaacacatggctttctttggcacggatcaaaaaatggatttcaagcatggttggagcgccacatttcacggggacc

SEQ ID NO: 369151 - DNA, 1153 bp, Homo Sapiens
  misc_feature (237)..(237): n is a, c, g, or t
  misc_feature (981)..(1026): n is a, c, g, or t
attatactaatagtggactaataattggtaattgtgagaacttaggtatgataacattgtttgaagtaaaatatgatttgggggcagcagctttctaaataccaactctgtttgacaaatgttttgaaaattaaaatttcaagtgagcaacaccctgttaagagttttcactatagttgaggcagctactttatgaataagaccactttgggttatttaagcagaagcgtttctctnttttttttggaatggggtgggatgaggagtgagttgccagacctttgattagtttgctggtttagaaacagccagtggctgaaattagtgagtaaatgaatgaaagtataaaggacttgttttttatgatagattttctgtaagaatcttaaatgttccttttcaaattagatgtgttgatgcacacatgactattctgtttttctcactgactatataacattaaaaaggggttaaaggaaaacaaaactctgaccttttgtgctatgaaatatttttagtccagaggtttttaacctgggtgtccattccctactctgaaaatgcatagctttgttctggatgtcatctcttgaaagtagaaaactcctatgtgtttatcacattgcagggctttcttatgtatttctggcagacttgcccaaatctttagatgggctgggttatacagcatgccctcccccaaataagggatctgaaataaatactacactattgatagtgggagatatattaattttttaaaactgtaaagtaaatgtggtcctctacgtcttgtggtggtgtacctcttgtgttaatgtgctagggaagaagacagtgactttgattggttatggggggagtgtatccttgaaggtgtgttataagggggtaagtaattggcttaaattaattttacacccttttttattccaagggtggaactccatggtggaatgaaaatggggccccacaatcccnnnnnnnnnnnnnnnnnnnnnnnnnnnnnnnnnnnnnnnnnnnnnntccctttgtccccaacaaataggtatagggaaaaaacgtggaaaccaacaaacgaactattttttcgggacaaccccctcataattttcttcttgtttaatcaccacccggggggtgctctattgtc

SEQ ID NO: 369152 - DNA, 1861 bp, Homo Sapiens
  misc_feature (1016)..(1016): n is a, c, g, or t
  misc_feature (1056)..(1056): n is a, c, g, or t
agcggaggggggggcgggcccaggtagcaggtttggctgcgcgggggccgcgcgtcggagtttccccatttctagggtgaggatggttctacacagccacccggagttccttagttgaaaggtgcgccctgctgtgacagcatggacaccacgttgctgaaaacatgctttgggactgccactgaatttatcttttgcggttttatgacaaagttattagtagtttcccttttttgaattagtattgtgaagttaatatcacaatgagttcaggcttatggagccaagaaaaagtcacttcaccctactgggaagagcggattttttacttgcttcttcaagaatgcagcgttacagacaaacaaacacgaaaagctccttaaagtaccgaagggaagtataggacagtatattcaagatcgttctgtggggcattcaaggattccttctgcaaaaggcaagaaaaatcagattggattaaaaattctagagcaacctcatgcagttctctttgttgatgaaaaggatgttgtagagataaatgaaaagttcacagagttacttttggcaattaccaattgtgaggagaggttcagcctgtttaaaaacagaaacagactaagtaaaggcctccaaatagacgtgggctgtcctgtgaaagtacagctgagatctggggaagaaaaatttcctggagttgtacgcttcagaggacccctgttagcagagaggacagtctccggaatattctttggagttgaattgctggaagaaggtcgtggtcaaggtttcactgacggggtgtaccaagggaaacagctttttcagtgtgatgaagattgtggcgtgtttgttgcattggacaagctagaactcatagaagatgatgacactgcattggaaagtgattacgcaggtcctggggacacaatgcaggtcgaacttcctcctttggaaataaactccagagtttctttgaaggttggagaaacaatagaatctggaacagttatatntctgtgatgttttgccaggaaaagaaagcttaggatattnttgttggtgtggacatggataaccctattggcaactgggatggaagatttgatggagtgcagctttgtagttttgcgtgtgttgaaagtacaattctattgcacatcaatgatatcatcccagagagtgtgacgcaggaaaggaggcctcccaaacttgcctttatgtcaagaggtgttggggacaaaggttcatccagtcataataaaccaaaggctacaggatctacctcagaccctggaaatagaaacagatctgaattattttataccttaaatgggtcttctgttgactcacaaccacaatccaaatcaaaaaatacatggtacattgatgaagttgcagaagaccctgcaaaagctcttacagagatatctacagactttgaccgttcttcaccaccactccagcctcctcctgtgaactcactgaccaccgagaacagattccactcctttaccattcagtctcaccaagatgcccaataccaatgggaagtatcggccacaggcccactttctctgtcaaccccagtctgtaatggaagagctaaacactgcacccgtccaagagagtccacccttggccatgcctcctgggaactcacatggtctagaagtgggctcattggctgaagtcaaggagaaccctcctttctatggggtaatccgtcggatcggtcagccaccaggactgaatgaagtgctcgctggactggaactggaagatgagtgtgccggctgtacggatggaaccttcagaggcacctcgagatttagcctgagccctgcagaaagcgcagaag

SEQ ID NO: 369153 - DNA, 934 bp, Homo Sapiens
cggggaaaaaggcaattgaaaatcccagctatttcacctagatggaatagccaccctgagcagaactttgtgatgcttcattctgtggaattttgtgcttactactgtatagtgcatgtggtgtaggttactctaactggttttgtcgacgtaaacatttaaagtgttatattttttataaaaatgtttatttttaatgatatgagaaaaattttgttaggccacaaaaacactgcactgtgaacattttagaaaaggtatgtcagactgggattaatgacagcatgattttcaatgactgtaaattgcgataaggaaatgtactgattgccaatacaccccaccctcattacatcatcaggacttgaagccaagggttaacccagcaagctacaaagagggtgtgtcacactgaaactcaatagttgagtttggctgttgttgcaggaaaatgattataactaaaagctctctgatagtgcagagacttaccagaagacacaaggaattgtactgaagagctattacaatccaaatattgccgttttcataaatgtaataagtaatactaattccacagagtattgtaaatggtggatgaacaaaagaaaatctgctctgtggaaagaaagaactgtctctaccagggtcaagagcatgaacgcatcaatagaaagaactcggggaaacatcccatcaacaggactacacacttgtatatacattcttgagaacactgcaatgtgaaaatcacgtttgctatttataaacttgtccttagattaatgtgtctggacagattgtgggagtaagtgattcttctaagaattagatacttgtcactgcctatacctgcagctgaactgaatggtcttcgtatgttaatagttgttctgataaatcatgcaattaaagtaaagtgatgcaaaaaaaa

SEQ ID NO: 369154 - DNA, 791 bp, Homo Sapiens; identical to SEQ ID NO: 3458
  misc_feature (175)..(223): n is a, c, g, or t
  misc_feature (692)..(700): n is a, c, g, or t

SEQ ID NO: 369155 - DNA, 989 bp, Homo Sapiens
gattagggagggtggcgccttagagggtatcaaccccttttaaaagaggttttcccaaagggggaggaaaagggaaaattctcgcatttttcacgtcccaaaactggcctccccggggaaaaaggggggggcgcaatccggaatttaagtgtgaaggtgattttttccaccacaggggggggccacaattaaggccccttttcaaaaaaggagggtgtgtaaaaaggcaatggttcacgggagaccccctttttaagtagtggtggctttcttggggagggaattcccaaagagagggttccgccattcttttttggcgataagcttttgggggccccaggggagggttcccccaaattacccagtcggttagccccaaaaccgggaagttaaggtaaaatttccccaattaggggaagaggttaaattttgtgggattcaccatgggcccaccaggcccaaaagtgccccgaggcagagggagggctggtttgggggcttcctcccggaaagtggaaaggctaatccagagctaatttttggaagatcacaaggagttggcggaatggacggaaggagaaagcatggaagcagggagtccagagaaggtgactatgtgcctaagcagtaagtaaagagagccccaaccagaagtaccaatgtgggaagagaaaagaggttaaggcaaaacacattaggaactgtgttaggcttcaggggattagagattaggaaggaaggactgatgaagctaaagaaaaatcaaagatgaaaagaacttagtactaggtacagtattcttctgcacacaatgatgttccgtgatcaaggctctaactctggaaagcatgaagaaatacagtccaaaggacagctctgcagccttagcttcagagctaggaggacttgacccagttagagccatggttccactagactctatctctaaaaagcaggaaatgggtggtttgaggcttcttccttctccc

SEQ ID NO: 369156 - DNA, 802 bp, Homo Sapiens
  misc_feature (154)..(154): n is a, c, g, or t
acagaccactgcccccacctgccctgcgccatctacccaagaaggctcggcacgggcaccaaccactgcctccaactgccccatgctgcctgagaaggactgcacggccacccccaactgccccgcactgtccctacccgggcagccatgcgangcggctggaactctgctggccttctgctgcctggtcttgagcaccactgggggcccttccccagatacttgttcccaggaccttaactcacgtgtgaagccaggatttcctaaaacaataaagaccaatgacccaggagtcctccaagcagccagatacagtgttgaaaagttcaacaactgcacgaacgacatgttcttgttcaaggagtcccgcatcacaagggccctagttcagatagtgaaaggcctgaaatatatgctcgaggtggaaattggcagaactacctgcaagaaaaaccagcacctgcgtctggatgactgtgacttccaaaccaaccacaccttgaagcagactctgagctgctactctgaagtctgggtcgtgccctggctccagcacttcgaggtgcctgttctccgttgtcactgacccccgcctcttcagcaagaccacagccatgacaaacaccaggatgcatgctccttgtcccctcccacccgcctcatgacccagcctcacagaccctctcaggcctctgacgagtgagcgggtgaagtgccactggggtcaccgcagggcagctggaatggcagcatggtagcgccctcctaacagattaaatagatcacatttgcttctaaaatt

SEQ ID NO: 369157 - DNA, 823 bp, Homo Sapiens; identical to SEQ ID NO: 3896
  misc_feature (414)..(471): n is a, c, g, or t

SEQ ID NO: 369158 - DNA, 792 bp, Homo Sapiens; identical to SEQ ID NO: 3915

SEQ ID NO: 369159 - DNA, 991 bp, Homo Sapiens
  misc_feature (750)..(750): n is a, c, g, or t
cagaatgacagccaactgcagcccattcagtaccaataccaggataacataaaagagctagaattagaagtcatcaatctgcaaaaggaaaaggaagaattggttcttgaacttcagacagcaaagaaggatgccaaccaagccaagttgagtgagcgccgccgcaaacgtctccaggagctggagggtcaaattgctgatctgaagaagaaactgaatgagcagtccaaacttctgaaactaaaggaatccacagagcgtactgtctccaaactgaaccaggagatacggatgatgaaaaaccagcgggtacagttaatgcgtcaaatgaaagaagatgctgagaagtttagacagtggaagcagaaaaaaagacaaagaagtaatacagttaaaagaacgagaccgtaagaggcaatatgagctgctgaaacttgaaagaaacttccagaaacaatccaatgtgctcagacgtaaaacggaggaggcagcagctgccaacaagcgtctcaaggatgctctccagaaacaacgggaggttgcagataagcggaaagagactcagagccgtggaatggaaggcactgcagctcgagtgaagaattggcttggaaacgaaattgaggttatggtcagtactgaggaagccaaacgccatctgaatgacctccttgaagatagaaagatcctggctcaagatgtggctcaactcaaagaaaaaaaggaatctggggagaatccacctcctanactccggaggcgtacattctcccttactgaagtgcgtggtcaagtttccggagtcagaagattctattacaaagcagattgaaagcctagagactgaaatggaaatcaggagtgctcagattgctgacctacagcaaaagctgctggatgcagaaagtgaagacggacccaaaacaacgctggggagaatattgcccacatttctggaagcccagtgttgccctggaaaaatttggattgg

SEQ ID NO: 369160 - DNA, 669 bp, Homo Sapiens
  misc_feature (112)..(141): n is a, c, g, or t
gccaccaggcaccaggtgtgatctaccacacctgtctaaaaagtatgtatttttaaatttttttgtagagacaggatctcactatgttctccagctggtctcaagctcctgnnnnnnnnnnnnnnnnnnnnnnnnnnnnnnagtgtgagccactgtgcctagtcactttaattgagatattggcaagtcaactgccatgcagagcccagggcactggttatattcagtaggaaactgaactcagcactcagaattttaaattaaatcaatgatcttcaagtatttgccactttcgagtacagcctaattggataatctcaaaccctttagtgaaaatatcttaaatgcattgagaatattttcctaattacctgtgtatgcctacagtacagacattaattctataaacatgttcataggtcttccccctcgccccgcccgtcttctaagggcattttctgtttcctttttagtgagttcatgaatgtttaacggttctggcgcaaagctttcttgcattctgagcataaaaataataaaacccacttatatttgcttgagtgtgtttacaagtcaatttccttttatgtagcttgctttttcatttgctataattgatcctgcaggtgtgtgaattattaaactaacgctcttttaaaccaaaaaaaa

SEQ ID NO: 369161 - DNA, 871 bp, Homo Sapiens
  misc_feature (629)..(629): n is a, c, g, or t
ggaacatgaacaagaccatgtccagcgtttttactgtgaatgtaaatggaacagcagcccaaagctgttgtctgtgccccagaggtgctacctgtagacagggaccaactccatgtgtgtgtgttaagtgtttgactccaattaagactcccaagcaaatcctgcatattccaaatgtaaagagtactcagtgggaaaaaggttgttacctcaaagtcattgcttctttcctgggctgggtcacagggtgaagagatgaaggtgtctgatgtatatagacaattagggaaaaatgagcgggcaaaggagctttccccttcagctgcactctaaaggggaacattttaaggaagtactagcagctttgactcttctatgctcctgttggttttacaagccaccaagaatgtcagtgttgagaatacggcctggtaaaatgggagatgtaaaatgactaaatgaaaggaagggtagtttttaatgttggaaccacccgtgctgggcactgggagctacccagaaggaatgcacaacgcttccccttcagggagctcccagtcctaaccctactccctggcctggaaaacctccaggaaagacgtggctaattttattgggggaattgggtnagttggctttttcatgccccctggccttccctttcccatggaccattttcccccctttttcggcccgggccttggcattaattggattttccacagaacccaaggccccgggctttccctccctggcccttcccctgaagagaaattggtccggcctccaggggaccaaaatggaaggggggcgaaacccgggatgtttctcccaccgacaggcgccgggcccacaaaaaaacaggccgccc

SEQ ID NO: 369162 - DNA, 814 bp, Homo Sapiens
  misc_feature (301)..(310): n is a, c, g, or t
  misc_feature (670)..(671): n is a, c, g, or t
  misc_feature (743)..(743): n is a, c, g, or t
ggaagagggaagggtatgggatgtagtattgctaggttcctttccctgcaacttcaggttggttacatcacttgctgagttgtatgacggccacctaggaggcagttcaaacaaggacagcaaaagaatacagactaagaagaaagagaggaaagtcttaccagttaacatcaggagctgaactgaaattgaaatgaaatgcaactggacatgtttagactcattttctttcatttacagggtaagatttgagttatgatacttttgttttgtcgttggtagtaggcttgatcctgggtgnnnnnnnnnnggcgggagggtgttgggggaaaaagagaaatcctccatcctgttaatggcttagaagtgcgttttactgagtctttcttcataaaaacgatattctgaatgttggtgacattccttggccaatccacataaagacagtcttataaaaatcttaatttatctttgtacattttcatattatagctactgtcttaggtttattgaaataggtacataagaatggtataaaatgtcataatctctaggttagtctcaaaaatctcattacttcgttttcgttctcaccaaagcaagcatatttttctggacagtttatggtaatgagccaaaatggtgcccagcaacttccttgggacagaannatcaaactctaatacaaagtatgaagtttcgagaagggagatagtctttaaaagaaaattgtttcaggtggnaagaaataagtcaaagaggagcattttataaaacaaaggcattaccttgagatgtggggccattaaaaaga

SEQ ID NO: 369163 - DNA, 817 bp, Homo Sapiens
ggggggagacattcctcaattgcttagacatattctgagcctacagcagaggaacctccagtctcagcaccatgaatcaaactgccattctgatttgctgccttatctttctgactctaagtggcattcaaggagtacctctctctagaactgtacgctgtacctgcatcagcattagtaatcaacctgttaatccaaggtctttagaaaaacttgaaattattcctgcaagccaattttgtccacgtgttgagatcattgctacaatgaaaaagaagggtgagaagagatgtctgaatccagaatcgaaggccatcaagaatttactgaaagcagttagcaaggaaaggtctaaaagatctccttaaaaccagaggggagcaaaatcgatgcagtgcttccaaggatggaccacacagaggctgcctctcccatcacttccctacatggagtatatgtcaagccataattgttcttagtttgcagttacactaaaaggtgaccaatcatggtcaccaaatcagctgctactactcctgtaggaaggttaatgttcatcatcctaagctattcagtaataactctaccctggcactataatgtaagctctactgaggtgctatgttcttagtggatgttctgaccctgcttcaaatatttccctcacctttcccatcttccaaggggtataaggaatctttctgctttggggtttatcagaattctcagaatctcaaataactaaaaggtatgcaatcaaatctgcttttttaaagaatgcctctttacttcatgggactttcacctggccatccta

SEQ ID NO: 369164 - DNA, 577 bp, Homo Sapiens
ttttttgccggaaaagatgtttttatgttcacttacatggaaaaaaaatccaattatacaacatgtagatatatgtttctcagaaaattcatctctatgaacctgtttgtttcagtcgcagttataattcaacaattgccaaatggaagtcataaaattgtggggtgggggttggggaggagagccgccaaggggaaggtagtaattatgtgctatttcttttctagtttcagattatttggagtttcaacttttccagcaagtcagagttacataaacagacaccatactaaaatatgattgtgtaaaaatataaaattcctaaagcatgatggcaataatattttagggaaaaaaacattagagtctgatagcatcagaaaatacaaataggatcatttgagcagtcctgtttctgtgtacgaacagcagttgcaaatgatgcatgtacgtgaaagaaaaaagcatttgatctgtatataacttagaaagggtaacatttctaaacactgactttataagaaaacatgaaggacatcttacactcaacaacaatggtttaaaaggaggatataac

SEQ ID NO: 369165 - DNA, 1060 bp, Homo Sapiens
  misc_feature (661)..(931): n is a, c, g, or t
  misc_feature (998)..(1015): n is a, c, g, or t
gcaggccctttaggtgatggcagtttgactcaggatgtccaagtccagtgtattttcaataaaatgacttgacagctactgctctgggtgtaagagcagttgactgtgaggaaaagtaaatggttctacagattctttatgatctacctcccaccagaggactgcagtactccctggtaatttaaattttctgcccccaatttttgccttctccacaaatttttataccttttgtagctgcctactccagattacttcacctttccagactatcagttcttccacttttattcttcataaagaaaattccaataacctgtttcacttaggtttttctattactcttcaagcatgaatcctaatttccctgactatatcttacctctgatctccataactgatggattcctatcctagactatgttactctaatattacccaagattttctccagcctggtttttactcttactttgaaacagctgtttaaaatgactcgtaatctgcttaaatctacatgctttttgtggttctcaatccagttacctaccttccaggataattccctcactgtcctgtcctctccattcctctgatgtttaagccctgtgagccacctttcccccatcctttgtgcatagttaccattttactctttctnnnnnnnnnnnnnnnnnnnnnnnnnnnnnnnnnnnnnnnnnnnnnnnnnnnnnnnnnnnnnnnnnnnnnnnnnnnnnnnnnnnnnnnnnnnnnnnnnnnnnnnnnnnnnnnnnnnnnnnnnnnnnnnnnnnnnnnnnnnnnnnnnnnnnnnnnnnnnnnnnnnnnnnnnnnnnnnnnnnnnnnnnnnnnnnnnnnnnnnnnnnnnnnnnnnnnnnnnnnnnnnnnnnnnnnnnnnnnnnnnnnnnnnnnnnnnnnnnnnnnnnnnnnnnnnactctttttaggtacagtaatctaatatccaaagtcttggactcagctaaagagggtatttaccttnnnnnnnnnnnnnnnnnnctcgagactagttctctccctcgtgccgaattcgccacccaggcc

SEQ ID NO: 369166 - DNA, 977 bp, Homo Sapiens
  misc_feature (65)..(66): n is a, c, g, or t
  misc_feature (145)..(145): n is a, c, g, or t
  misc_feature (223)..(223): n is a, c, g, or t
gtcccttagggggcgaatgacccgcccgggtccagggtattgcaagctggccccccagccttagnncccatgttttcgagatgcttgctacttgagaataaggcgagatcccagattcaaagtgctagcagcattctgccccctncagatgcgccggcaggctccactggctccaaaggacgcccttggatgggtcagcaattccacgaacatccaactaaanccaacacttagcactgctcagtggggtcaacagtgcccggtggtccgcggcaatgaatccaaacacatcgtgtgcccagagctacaaggccatgtgccgcagtcaactgtcccgactcgcaggcaatgcacgcagccctgcaccacttccctcctgcccaccacggagcaggggacagttctgtgagtgaacagaagcaggacatcggcagagccagctgacgatggaggatgagatgctgccgagatgctggagggcagatcactgaggatgaacacgcgttccttccgccaacagtcgtgcaccacctgctggggctctgcgtccccaccggccaagggctgcctcgctctaatgaaggcagctcactcagcacagggccaagtggcctttccagctgcaggtgaccagaaaaagccactgccgctatcacagggggaagaacgccccaaagacaaaaggtcatttgagatgattaacatcttttagaggccattttggtcattcttgaaatcaaagagaaacctttattttcaacaaaactgcccagaagagatggttcattgatccactaggaacaagtctcttaccacacacagcaccaaaatatatatttaaaaaattaaaaaacacatagccccctcacacgcatcccccaaaagccacacaacccagaccaaagggaaaacaaatcaaactcaatgccctcacacatgagccatctttgcctcgtgccgaattcgccacccaggcc

SEQ ID NO: 369167 - DNA, 674 bp, Homo Sapiens
  misc_feature (20)..(20): n is a, c, g, or t
  misc_feature (27)..(27): n is a, c, g, or t
  misc_feature (39)..(39): n is a, c, g, or t
  misc_feature (594)..(594): n is a, c, g, or t
  misc_feature (610)..(610): n is a, c, g, or t
  misc_feature (616)..(616): n is a, c, g, or t
  misc_feature (636)..(636): n is a, c, g, or t
  misc_feature (642)..(642): n is a, c, g, or t
agtggaagtatgtcaacagncttaagntcattgccagantcataaaatatttaagtatttgaaaaagaaacaaaatgtcttcatactttagggaaacgaataccctgtataccttctgtacaaatgtttgtgttttcattgttacactttggggttttaattttgcaatgtgacccatgttgggcatttttatataatcaacaactaaatcttttgccaaatgcatgcttgccttttattttctaatatatgataataacgagcaaaactggttagattttgcatgaaatggttctgaaaggtaagaggaaaacagactttggaggttgtttagttttgaatttctgacagagataaagtagtttaaaatctctcgtacactgataactcaagcttttcattttctcatacagttgtacagatttaactgggaccatcagttttaaactgttgtcaagctaactaataatcatctgctttaagacgcaagattctgaattaaactttatataggtatagatacatctgttgtttctttgtattttcaggaaaggtgatagtagttttatttgatactgataaatattgaattgnatttttagttattttntaacantttttccaatggagtagtanaggacngggccttggcccttttatggatggaaaaattt

SEQ ID NO: 369168 - DNA, 859 bp, Homo Sapiens
ccttaaatggagaatacccccctggcataacttccttagaaatggcctgtaatggaatagggattagtccccatggtgacaaagaatggagggatcatctggaactctcatacactgacgataggaatgtgaaatggatcaactactttggaagacaattgggcagtttctttcaaagtaaatgtgaagatgccatacgattcatccattccatttctaattattcaagagaaatgaaactgtatatccacaaaaaagacttgtacacaaacattcacagcagctattatttattggtaatagctaaaaactgtaaacagctcccatatccatcaagtgtatggataaacaaatttggtgtatttatacaatggaatactactcggcaataaaaagaacagttgatactctcaacaacctagatggacctcaaaataattcggtttaatgaatgaagccaaacttaagaagagtacattgtatgtacttggagaactaacttcttgcaatagatttttaagcactattaggagcatatgacttaaacagtttttaaaagtcagggagtaagtatgcttaaataaaatacaatctgtgaaacaaatctctgaattattatcacttcactggacactctaacttgaccatatttctgactttaatgtaactcactcttattccgtagtcacatgtttgcttgctcattggttcacattacatttattcagcatctgcttgagccaaggcactgtaactacatgttttttttagttacctacttttgtaaggtcctgtttctttggctacatctgattacagtaaacataggaagtttaataaaacaattttcatgaccgag

SEQ ID NO: 369169 - DNA, 790 bp, Homo Sapiens
  misc_feature (561)..(580): n is a, c, g, or t
  misc_feature (632)..(670): n is a, c, g, or t
  misc_feature (715)..(715): n is a, c, g, or t
ggggagcgagcccagcaggaggatgcattacgcacaacagtgcctttgaagaggctcggagaaggacacgcgaatttgaagatagagacaggtctcatcgggaggaaatggaggcaagaagacaacaagaccctagtcctggttccaatttaggtggtggtgatgacctcaaactttgttaattaatagcacagcagatgtgtgctgcccatctttacatacacattgcttctagttggcagaaataattgattaaaagaccagaaactgtgataactggaggtactacggtctatttctcaaccttaggcagtaatagacatcacaaactgccatggttttgcactatgattataatacctgcatttctaattttttaagcatgtagccagtaataatttgaagttttttttctatgcaagcttaccttgttggcattattttagggagttgaaactatcaactgtaaagctccttttcttccactttaatttaaaagttcatgtcatttaaaaacaagtcaagaaattaaaattgtatcagagggttttctctaatcannnnnnnnnnnnnnnnnnnngtacttctagatgttttggttatacagcttcattttagatgagcattcttannnnnnnnnnnnnnnnnnnnnnnnnnnnnnnnnnnnnnnataggcctatagcattttaaaactggctgatggttgtttgcattnatttacagggctaaaaaactttagtagcatagaaggctggtctgcccacagccctttctggacaaaagttttacc

SEQ ID NO: 369170 - DNA, 654 bp, Homo Sapiens
ggggccttagttgccgagcacttgcgtggctggtaccagcgggcctctgggcagaaggatcagggacacagcccgcagaccagctttgactcagacaggggatcacagagatgcctggggtttgcggggctgcaagtaccttgttctccaagcagtcgtgcatccttgtactcttcagtgtcttctacaaatgcttctgggaactggaggacccagttaaccatagggctgtcggattacgagactccagcacattcttcttacaccagctgctatggcaatgtctataatcctttaccctctccaagcagacaatacacagaaatcagtcaactggatggtacagatggaaaccagctggaagacaacctggagagtagtgagcagagactcttttggcatgaagattcaaagcctggaacattagtctgaactgcagttgtacctcctgaccaagcactgcgttctcacactagtgtgccttgcaaattgtatttgtcttccgagaggatgttcgttttagaaacctaaagacatcaaaggttgaagagaagacttagttgccctggaagtgaatcagtgaatcacacaccaagccccacaaagccctaaaggaggatttgcctttcaactctgcactctctgagtggaccg

SEQ ID NO: 369171 - DNA, 473 bp, Homo Sapiens
agcggggggatgctgcggctccgcagcgggctgaggcaccttcgggcaacacccaatactcggggctccgctcggcttcttcgcgccgagatgcctaagaaggctggtgcgacgaccaagggtaaaagccagagcaaggaaccagagagaccacttcctcccttaggtcctgtggcagttgatcctaaaggatgcgtcaccatagccatccatgcaaaacctggctccaaacaaaatgctgtaacagatttgacagcagaggctgtaaatgtagctattgcagcacctccatcagagggagaggctaatgctgagctctgtcggtatctttccaaggtcctagaactcaggaagagtgatgtggtttttggataagggtggtaaatctcgtgaaacaggtggtgaagctttttggcttctacaactccagaaaaaatcttggagaaacttaaaacaaggaagccaaaaaaaca

SEQ ID NO: 369172 - DNA, 1373 bp, Homo Sapiens
  misc_feature (1132)..(1132): n is a, c, g, or t
gggattgtcttccaggaaacagctccctcagtttggaatcagctctcccgctgcggccgcagtagccggagccggagccgcagccaccggtgccttcctttcccgccgccgcccagccgccgtccggcctccctcgggcccgagcgcagaccaggctccagccgcgcggcgccggcagcctcgcgctccctctcgggtctctctcgggcctcgggcaccgcgtcctgtggggcggccgcctgcctgcccgcccgcccgcagccccttcgctgcgcggcccctgggcggccgctgccatgggcaccgacagccgcgcggccaaggcgctcctggcgcgggcccgcaccctgcacctgcagacggggaacctgctgaactggggccgcctgcggaagaagtgcccgtccacgcacagcgaggagcttcatgattgtatccaaaaaaaccttgaatgaatggagttcccaaatcaacccagatttggtcagggagtttccagatgtcttggaatgcactgtatctcatgcagtagaaaagataaatcctgatgaaagagaagaaatgaaagtttctgcaaaactgttcattgtagaatcaaactcttcatcatcaactagaagtgcagttgacatggcctgttcagtccttggagttgcacagctggattctgtgatcattgcttcacctcctattgaagatggagttaatctttccttggagcatttacagccttactgggaggaattagaaaacttagttcagagcaaaaagattgttgccataggtacctctgatctagacaaaacacagttggaacagctgtatcagtgggcacaggtaaaaccaaatagtaaccaagttaatcttgcctcctgctgtgtgatgccaccagatttgactgcatttgctaaacaatttgacatacagctgttgactcacaatgatccaaaagaactgctttctgaagcaagtttccaagaagctcttcaggaaagcattcctgacattcaagcgcacgagtgggtgccgctgtggctactgcggtattcggtcattgtgaaaagtagaggaattatcaaatcaaaaggctaccattttacaagctaaaagaaggggttcttaactgacttangagcataacttacctgtaatttccttcaatatgagagaaaattgagatgtgtaaaaatctaattactgcctggaaatgggtgccattgaggcaaaaattctttccccatatttgaaagtatggtgcctggccagtttttaaatactttatcctggcctccaaaatcaatccctttctccatgaaccctcgggaattggctttcccttaaaacaattgttttttcaaattgaaaaattgcct

SEQ ID NO: 369173 - DNA, 558 bp, Homo Sapiens
  misc_feature (283)..(291): n is a, c, g, or t
  misc_feature (410)..(410): n is a, c, g, or t
  misc_feature (536)..(536): n is a, c, g, or t
  misc_feature (541)..(541): n is a, c, g, or t
ggaaacattgaatcaaatcaataaagcttcaccaagaaggttgcccaggaaacgggcacagaagagatcagtgggatctgatgagtaaatgttcctttgtgcaacaattcggtctttacttaacctgccctaatatttttcggcctgatgggaattagtgcagagaagccatgtcaccatagaaggcaactcctacttgtgtgtggactgagcaatcagagtctgtggcgataatattgctgaaaatgcactgcattcatttttctaaagtaacaaatttggnnnnnnnnnaaaccattaaaatctatgtgtgtgcgtgtgtatgtatgtgagcagttggtcttaccagaatcattgttgaactacctgaaacaagtcctttagaatactaaatataatgccggttggcncttccttttttgacattttccggattttttcccccaaaactcagttaatatttacccccaatgattattgaggcctgccttggacagttttaaggaaacatttttgggatagcccaattccaatgntgggncaatcacatttgggggt

SEQ ID NO: 369174 - DNA, 790 bp, Homo Sapiens
  misc_feature (546)..(546): n is a, c, g, or t
ggggaaagaagtccggcatgataacaaggttacttggctggtttcctggacagagaacatccaaggttccattaaatacatcatgcttaaccctagttcacgaatcaagggtgagaaggactggcagaaatacgagactgctcggcggctgaaaaaatgtgtggacaagatccggaaccagtatcgagaagactggaagtccaaagagatgaaagtccggcagagagctgtagccctgtacttcatcgacaagcttgctctgagagcaggcaatgaaaaggaggaaggagaaacagcggacactgtgggctgctgctcacttcgtgtggagcacatcaatctacacccagagttggatggtcaggaatatgtggtagagtttgacttcctcgggaaggactccatcagatactataacaaggtccctgttgagaaacgagtttttaagaacctacaactatttatggagaacaagcagcccgaggatgatctttttgatagactcaatactggtattctgaataagcatcttcaggatctcatggnagggcttgacagccaaaggtattcccgtacatacaatgccctccatcacggctacaggcagccagctaaaaagaactggacaggcccccgggatgaaaaacattccccagcgaaaggatcccttttccttaataacccgtggcccaaattccgagcctggtttgcaaatttcctttggtaaaccccttcaacaagggggcacccaccccacaaaaaccttttttgaagaaaaatctttaattgt

SEQ ID NO: 369175 - DNA, 1244 bp, Homo Sapiens
gggggccactcgagtatttgctgccgattgcctgtgtcgaatcatcaattggtgtgagaatgcagaccaggctcactttgatcttgccttggcacgttctgctaaacttcgaaaccctacaaatgacctcttggtacttcatctctctgacctcattcgcatggcattcatggctgcaactgatcatagcaaccagctgcgaatggctgggctccaggcgcttgaagacattatcaagaagtttgcgtctgtgcctgagccagaatttccaggtcatgtgatactggagcagtatcaggctaatgtgggagctgctctaagaccagccttttcacaagatacaccatcagatataatagcgaaagcttgccaggtatgtagtacatggataggaagtggagttgtcagtgatctcaatgatctccgtcgagtacacaatcttcttgtttcttctctggacaaagttcaggctggaaaaggatcttccagccagctgtaccgagagagtgccacgaccatggaaaaactggctgttctcaaagcttgggcagaggtatatgtggtcgctatgaatattaaaaaggaagcagagtcaaaaccaaaaagagcaattaaaaatactgacgatgatgatgacgactgtggtaccatcgatgaactgccaccagatagtttaataacactggtacaacctgaactaccaacactcagtcgcctgtggttagcagcattaaaagattatgcactcttgactttaccagccgaattttctagtcagcttcctccagatggtgagtattacattctgagttttacttttatggagttcaaagtagtagttaaacaaaatagagacggtatagactagcaacaacagttgctatagtaacagtttaaatttctgtggcttaagtttgatgttgtctcagttagaatatgtactctatattgaatttgtagatagaagatatagagcttttttgttggctgaagcaaacatattagcaagcactgttacaataatagctgtatgagctagggtattctaaatagctatgggtaacaagtcattatgcataaccatagatgtatattgctgtactgttcaatgtttgtattttcatattctaattcagattccctagtgtggccaataaattaatgttcctaaagtgcttttgccaaattggaccttttagttttttcttaatcaaaattcaattggtagaaaatacattcaacca

SEQ ID NO: 369176 - DNA, 666 bp, Homo Sapiens
  misc_feature (29)..(30): n is a, c, g, or t
  misc_feature (55)..(55): n is a, c, g, or t
  misc_feature (61)..(61): n is a, c, g, or t
  misc_feature (81)..(81): n is a, c, g, or t
  misc_feature (109)..(109): n is a, c, g, or t
  misc_feature (561)..(561): n is a, c, g, or t
  misc_feature (582)..(582): n is a, c, g, or t
  misc_feature (599)..(599): n is a, c, g, or t
  misc_feature (620)..(620): n is a, c, g, or t
ccgaggacgtggggtttgacatcggccanncgatgctggccaaagccaatgacgntactgnaaacttccgacccaactttnatgtttctattcccctcttttctaaggntcatcccaggacaggaggggagagggggtttttgaagttcaacaccatccctcctctcaggaagtacatgctggtattcaaggggaagaggtacctgacagggataggatcagacaccaggaatgccttatatcacgtccataacggggaggacgttgtgctcctcaccacctgcaagcatggcaaagactggcaaaagcacaaggattctcgctgtgacagagacaacaccgagtatgagaagtatgattatcgggaaatgctgcacaatgccactttctgtctggttcctcgtggtcgcaggcttgggtcctttcagattcctggggaggctttgcaggctgcctgcgttccctgttgatgcttcagcaatgggatggggagtttgccattctcttgaagtgaattaatttgggaaccaagcctgccgtcattagggcgatggaggaggnttgtttatttacagatttccnttctaacaattcaggtnttttttcattcagggttaaantcctaggcatttaggacagcaggacacatttttttgttggggaagg

SEQ ID NO: 369177 - DNA, 830 bp, Homo Sapiens
  misc_feature (598)..(598): n is a, c, g, or t
gggtgagacataagcttgtaggaataataaacgttctacaataaacgttttggctatcttaagccattgtatgggggggattaggaagtaggagggattgtcctacaacaggcccttatacttcaacagcccaaatattttggtttattcctttttatccataaagtctttattcttcaagtttgggtattatagattaccattgttagcctcccttaatgggaccatatgagccaggcttttaagacggactcattttgaattgagtttcaaactttgaaagtgcaaggatttaatttttaagttgaatcccatgaaaggtgtcatcatcactaggaataacaccctttgtaactacatatagaactgttacaatggtagcagaaaatcctattgatttcatctcacccatttcagataccttcagtgaaattaagggtagtgtgatgtcccatgtaataaaacaggcttagaacatcaattcctctgctgccatttatgtgcttttattcccccttcaaaaattttttattggatatatatatttttcagtattcagactctgaaatctgtcattacaatcaagtgcttgtcacangctgaaagatttctggtggcttaaagtttactagcagtaaatttatgatatggtacagttcttggtacagaaaggcaccattatgttagaataaatttccagaacttagtgggaaagaatcaggttttaacctggtgtgtctgttacttctgagtgcatttctataatataaatgtagattggcgtcaacattataaaagagcacttctgtggcatcgaaaacacgggtacc

SEQ ID NO: 369178 - DNA, 768 bp, Homo Sapiens
ggtacccagaggctcctacacctcttactggatgacatgccagtgaaaccatactcagatggtgaaggaggaatagaagatgaaaacaggtctgtttctgggttccttcactttgacactgctacaaaagtacgtcgaaaaattctaaatattcttgactcgattgacttcagttcaggagatccctgagcctttgcagttggatttttttgatcgggcccagattgaacaagttattgctaactgtgaacacaagaatttacggggacagacagtctgcaatgtcaagcttcttcatagggttcttgtagctgaagtaaatgcccttcagggtatggcagccataggacagagacctctactaatggaggaaatcagcactgtacttcagtatgtggtaggaaaaaataaattgctgcagtgtcttcatgcaaaacgtcatgctctggagtcgtgggagcaactagcaaaaattatactgacagcttgtccccaggacctccttcagggaaaaagatccacaacggattattcgtgaaattttccaaaaggggcatggaaagaatactgggatgaagaaacctgccccaagagttaatggctggtggcccccccggggcaagggttccccactgacctgcccccccaaatacaggccggtccttccctggaatagaaagcaaaccattagtccttggggaaccaccctcagggcccctttacgacttttaggcatggataagttggttttaacttaccctcctatct

SEQ ID NO: 369179 - DNA, 744 bp, Homo Sapiens
gggagtccatacagtggcaactcattagaaaggagtgagccagcattgaaattctcataagaacagaaaagtggaattgagatggtctgagtactctaaatgaggatgggaaagtgataccaagaagaagcaggggatgaagaagaggagcaacagtgaagtggaagacgtgggaccaacaagtcataacagaaagaaggccaggtgggacactttagagcctttggataccggcctgtctttagcagaggatgaagagctggtgttacatctgctaagaagtcaaagctaaatacttcctgcgcctgccttctccttgaaaccttggttatgactgcgtaggcaagaagttgaaaaacagttgatttgggggcacttaggtaccatatgccccattcccaaagggcacatttctggatagaagcgatcgtatctccaagtccctctcacaggacatgctttgtgccatcactgagcatactcagatcgagggtggatgataccatttcctgaccccgttttccagcatgtgttctgttagatttttatccatgggttcctacgccttgtcattggaaacactgcctttgtcttactggcaagttctggagctcttgtgtcattgttagaaatccctgtcttgcttactggacagaaagtttctggtgctgttaaaattgctcatgaatttccacgtaatttaataattttcaaagagaaaaaatcggccggcctgagaaagaa

SEQ ID NO: 369180 - DNA, 804 bp, Homo Sapiens
gggtttcaagctggcaatagaatgaatgcaatgttatggtttaagcatttgagtgcagcctgccaaagtaacaaacaacaggttcctacaaacttgatgacttttgagtagaagcctgagaaaaaaagagaggtgaactgttgcttctacgtgagcatgaggacctgataaaagagcgccagctataaaccatcctgtgccaggaagagcccagaggctctgtctcagtcgttggagttctcaaccaaaaaagcactaatttcagggaatgatttgagatattcccagagaacaaattggagttgcaaaacaaactgccatgaaccatgcttcttatctcagaactgacctgtggaaaccactgccttaaaagaatgaaaggaaaaccaacatgaaacaccaaatagtgtgtgtgaatcttctggcggtgctgtgcttggaatagatcgtagctaatttgcatttcttttaactttgtaataattttagaggggggaattgccttttttagatatgctttaaaaaggaaaaacatactcttgtggattccatcaggagctggttttgaaccgaggtgaagagacttagcagggattgtaccagcagcccacctgcaaggtttgttctccctctagtagtctgcaacctcactggctttctcacatcaagagtgtaggaatgagaaatgtgagtcatgtgagttctggggtagcagggatcgggtgggggtgtcagaaaggtatggatgaggggagaatttttctaacactaaacttctggaaatgtagtactgtaacgggaaca

SEQ ID NO: 369181 - DNA, 1134 bp, Homo Sapiens
ggagggaagagccccagtctgctgctgaacaggatgttgttgttcaggaaacattcaacaaaaactttgtttgcaaccgtctgtgaatccaccttttccttcccattaaagacctaaccaaacattttatctattccatgctgaagaatggcccctcaaaatgtgaattttgtgtgcagctttttaaggataaaacggacttgtcagaacatcgctttttgcttcatggagttgggaatatctttgtgtgctctgtttgtaaaaaagaatttgcttttttgtgcaatttgcagcagcaccagcgagatctccacccagataaggtgtgcacacatcacgagtttgaaagcgggactctgaggccccagaactttacagatcccagcaaggcccatgtagagcatatgcagagcttgccagaagatcctttagaaacttctaaagaagaagaggagttaaatgattcctctgaagagctttacacgactataaaaataatggcttctggaataaagacaaaagatccagatgttcgattgggcctcaatcagcattacccaagctttaaaccacctccatttcagtaccatcaccgtaaccccatggggatctggtgtgacagcccacaaatttcactacacacaatattccacagactttcactaccgccattcgctgcacaaagtgtggaaaaggtgtcgacaatatgccggagttgcacaaacatatcctggcttgtgcttctgcaagtgacaagaagaggtacacgcctaagaaaaacccagtaccattaaaacaaactgtgcaacccaaaaatggcgtggtggttttagataactctgggaaaaatgccttccgacgaatgggacagcccaaaaggcttaactttagtgttgagctcagcaaaatgtcgtcgaataagctcaaattaaatgcattgaagaaaaaaaatcagctagtacagaaagcaattcttcagaaaaacaaatctgcaaagcagaaggccgacttgaaaaatgcttgtgagtcatcctctcacatctgcccttactgtaatcgagagttcacttacattggaagcctgaataaactacgctgccttcagctgtcccaaaaaacccctttctcctccca

SEQ ID NO: 369182 - DNA, 849 bp, Homo Sapiens; identical to SEQ ID NO: 97783
  misc_feature (526)..(526): n is a, c, g, or t
  misc_feature (779)..(779): n is a, c, g, or t

SEQ ID NO: 369183 - DNA, 603 bp, Homo Sapiens
gggggtggttctgttgtgttaagaaagcattcattatgtccggagtgtctttttactcatctgatacaggtaattaaaagaactcagattcttgaagccaccgttttcatattgtaatgttaggtgttctcagaggggaggtacctttgtctaatcaacgtttccacttagatcttttatttttaataagcaggcccataaaaattgttgacaagaattaatgaaattattaaaggcaacaatttagaagaaaaagtgcctttcactttcgattgcttttgtagcacgtccattgtgaaatattccttccaggctactcaaaggatagcaagagaacaggtaaatgatacataaagaacaccttcctttttctatgccttttctaatctttcaattctttctatggagtaaaggctcatctgccaaatctgccccctggggaaactctttcactactttgtcagttataagtgaagagcttacttgttgcttttatcttttgtatattggactgagatgtaattacactgtattataaaactctgtgaatagccagaactgagctggatctttgcaacacctattcctagccctgtgaaagta

SEQ ID NO: 369184 - DNA, 634 bp, Homo Sapiens
aacaccttacggctaggtagcgaggcctgggtgttgaactcggcacgagggtacactgcagttgtctccgaggtgaacctccggagccttggcacagctcgcttctaaagcttggaaatgacccgccacacctgaagcctgcaggtgctgaggccacattcgatcagacccaagctttgggagaccgctggggaaatttcccacttcctctcctgagaccaggaactcagcagagaaactttgtggaaaatgaactgaaggatgccacccagggagagtatctcctgagatcccatcatgcaggccttcccacaagggcccggcagcatgacaaggtgaaggcagagtatgtgcatctcaaccacccgctcaccctcgtgaccagagagcgcgatttggccgtgaaggagaaacaccagctccaagccaagctggagaacctagaacaggtcctgaagcatatgcgagaggcggctgaacggcggcagcagctgcagttggagcatgaccaggccctggctgttctcagtgccaagcagcaggaaattgaccttctgcagaagcctcagaaaaccaacctccagtgtccgcactttaggaagtgtcccatgctttcacagttgacgatgacgtc

SEQ ID NO: 369185 - DNA, 1240 bp, Homo Sapiens
ccagccgaccggaatgttgaaaattcgatccgcttcgttcccagctggcttccaacgcgactcgttgtcgggcacaaagtccacgaagtttggaggcaacaagacccctcgggccatcgaggagctctccgtcatagaacccatcctcatccatgtctccatagacgtagaggtattttcccgccgtgaggggcagctcagcttcggggttctcgttcggtccatcgaaggggttgtaacttatagcgggcaacacagaggtggaccttccccgagtatctctgcttggaggtattggaattccgttcattctccatgtctgactcagatctgcatcttgcgctaccggatctcgacaggaaggtgggcttggcggacagaggctccggcctgtcaccaggctgcggaaggggccggatatattcaccgatcgcagagctgcctccaatagcgctctcctgacctttgccgagggaggtggctaggccattcatgaactgtgggaaaggcttgctgggggccgtggagatgtccaggggggccaccgcgctgccacccagcaggtcaatcttgccagcgtgctgccggaacttctccaggtcccgggacagcaggttgaactgctcactttgagtccggcatttctcttccagctctcgaaccttggactctagcagccgcactgcgccttcatgctccttcttagcctcaacctgagccttctgcagaaggtcaatttcctgctgcttggcactgagaacagccagggcctggtcatgctccaactgcagctgctgccgccgttcagccgcctctcgcatatgcttcaggacctgttctaggttctccagcttggcttggagctggtgtttctccttcacggccaaatcgcgctctctggtcacgagggtgagcgggtggttgagatgcacatactctgccttcaccttgtcatgctgccgggcccttgtgggaaggcctgcatgatgggatctcaggagatactctccctgggtggcatccttcagttcattttccacaaagtttctctgctgagttcctggtctcaggagaggaagtgggaaatttccccagcggtctcccaaagcttgggtctgatcgaatgtggcctcagcacctgcaggcttcaggtgtggcgggtcatttccaagctttagaagcgagctgtgccaaggctccggaggttcacctcggagacaactgcagtgtactgtccgct

SEQ ID NO: 369186 - DNA, 842 bp, Homo Sapiens
  misc_feature (144)..(152): n is a, c, g, or t
agaccataggttgaaggggaggagtatagtagcggtatttagcggaaatttaaggggagacattcgaatccgacgtggtagacaaccagtggtcaagatacacgggagaggaatgggaacaacggtatggggaataggatgaannnnnnnnnatgacggaaaggatatggtaaggggggccacaagggaacggtccgccggggcaaatagaggggaaaaaagggggcgaagatcggagaattctgaggggaaaggagggacgaagaggatggggggacaaaagagcaaggagagaagcataaggaggatgcaaggtgtataataagcactggaagttagataacgggcaaaggggagagctcacttggacgacaggggtagaattgtcctcaggttccaacttcccgggtaactgttaaattaaaattaaatccctggggtttggttccaacattttctgccaaatgtagtccaaattgggtctcagcatattcaagaaatcaagccacagaaatgtgtacttgtattgctaggctccctgcaatattaaagattttgctttctctgaagatattctgaaccatgatcatctttaaggcacttcaaatacatttctgaccactaaatttaagtagatactaattaattactgccatattaacaattcatcacgtaagccacaggaggcaagagtctcataaggaattgccttcacaaccacagagattccagaggtgatctgaatgaaacacgcaccaatggccagatccaaaaggaaaactacctagacttcctcagataaaagtcaggatctttaggaattaaaacaggaagggacaccc

SEQ ID NO: 369187 - DNA, 1268 bp, Homo Sapiens
  misc_feature (680)..(680): n is a, c, g, or t
  misc_feature (988)..(1176): n is a, c, g, or t
ggactgcctgttagtgtggctgtttattataacacccaccagtgactcactgctttcttaaagtgatttcactaggagatagtcatccctgtgaacagactgttactcaagattattaaaatcctttgtaatattatgtgctgcttgactgtaagattgctatcaactgaaatacttttgttctgaagtttggagcaccattggaggcatgtggttcttttataaggaaaggaaaaataaaagaattaactgcaaaatagtccaggagcactggccctaaagaatgtcccaaaggcggcaacatggtgccagttggaaaggtagcaaagcagcgtgtcaccctgatccggaacggttcacttaaagtgtttctcacatgacttcatggaaaattagtgattcagaatattatctgcttggctttaaagttcaaagtcatgatagagtgccaatataaattaaaaggaattattaggcagaaagagccaagcaccactatagacacactggcatgcagatcaacatgaagcaggaaatggcaactagaacaattgcattgtttcctgttgtaagaaaggaaaaagaacttgagctagaaagggatggtggaaaaccagtgttgtaagtgaaatagtctgggagatcccatcagaaatgtttttaaaatctgtaaatttggntgaggggagaaatctggtcatttctttgtttacagtaagtttatatagggaatgtcctccaaaaaagtacgcagagttaacaagtcaaggtcaatcataattatctcagactcaaagggacaagttccaaagtttaaactgtaaaaagaggtgaaagtggtaaccgtaacctcatcctttttgaaaaactctgtgagtttctggcaaaagtttcctgaaggaaaaatgaataaatgtacattcttaaaatagatcatctaaaaatattgtcaaatggatcatctagttaaaaattattagaatagggnnnnnnnnnnnnnnnnnnnnnnnnnnnnnnnnnnnnnnnnnnnnnnnnnnnnnnnnnnnnnnnnnnnnnnnnnnnnnnnnnnnnnnnnnnnnnnnnnnnnnnnnnnnnnnnnnnnnnnnnnnnnnnnnnnnnnnnnnnnnnnnnnnnnnnnnnnnnnnnnnnnnnnnnnnnnnnnnnnnnnnnnnnnnnagatcgcttgacaggaagtggagtgcatgagccagtccgccctgcctcatctggcacaagtagatcgtccaaatatatataatactatgata

SEQ ID NO: 369188 - DNA, 898 bp, Homo Sapiens; identical to SEQ ID NO: 4953
  misc_feature (361)..(369): n is a, c, g, or t
  misc_feature (411)..(426): n is a, c, g, or t
  misc_feature (571)..(737): n is a, c, g, or t

SEQ ID NO: 369189 - DNA, 926 bp, Homo Sapiens
  misc_feature (122)..(122): n is a, c, g, or t
  misc_feature (124)..(124): n is a, c, g, or t
ctggccagagtttctgccgaagccccaccaggctggtctttggtaaaagtttaggctgggctgccaacacagaggggctggcttccagttgccacatgtcagaaaaggctgagagagctttntngtgggcaccgcaacgggcaaacatgagccccgctggctcatacatgtgctcctgcatcaggtgctccccataagcaatgctgatatcctggtactgttgtgagcttggtgaatataacttcagagcttcgttatacaagtttttatcttttatcaagtttaagcattctgggaagtactcaggtccacatttgctgaggtggccaatggctttttcatatcgtttcaagtatttgtctatagtaaaccgcgaataataagtttccattttcttaaggggtaataaaaaagggaagatattcttggggatccttctgtgacttctcagctaccatgaggaccaaatcaaagtcataggtgccaagagaaatgatcatataattcattaacattctaccagatgcagcaaatagtgcaaggcctcttcagcactcacagcatcaggatcagagggagcatttccttgaagctcgtgtactttttgcagtacaatttccagttctggggttgtcttctttacatgagatgtaagtatggataggcagtatttatgaggatttatgctctccatgactgctctcatagcatcgcagacaaggtctagtctattcccgtcaggatccctggacaggtagacactgctggtaactggtgcagggtacatggtcttcgtgacatcttcttctttcaattccagagtcggctccgaattgcgcacgcgtctctgtccgcggctcccgctctctctccgacggcactaggcctccaaggatggaggcgccctccaggggaaaacgctgaag

SEQ ID NO: 369190 - DNA, 635 bp, Homo Sapiens
  misc_feature (33)..(33): n is a, c, g, or t
  misc_feature (58)..(58): n is a, c, g, or t
aatcctttgggaacccttctgtgacttcctcancctacccaggaggaccaaatccaangtccataggtgcccaagagaatggatcatataattcattaacacctaccagatgcagcaaatatttcaaggcctcttcagcactcacagcatcaggatcagagggagcatttccttgaagctcgtgtactttttgcagtacaatttccagttctggggttgtcttctttacatgagatgtaagtatggataggcagtatttatgaggatttatgctctccatgactgctctcatagcatcgcagacaaggtctattttattcccgtcaggatccctggacaggtagacactgctggtaactggtgcagggtacatggtcttcgtgacatcttcttctttcaattctgtaaaaaacaagttaatatgattcacagaatctatctgtttaatgaaggtttccacatttccaagaaacaccttagggttatgatcataaatcagattgagattgattctcagctttctcatgcattcaaatgcctcatttatacataaggttggtccaaccacttccgtatctgagctataccagggctcgatgtgatgtctcatagggagggacctctaagatccacct

SEQ ID NO: 369191 - DNA, 393 bp, Homo Sapiens
ggacaagatttaggttaagttggccgggggttgcgtggaaagtattttacttcagattgaaaaatgaacagcttccacactgttcactgcaagatacacagtattcacgaatacaatgctggtcatttgaggaaatgtatacacacctcaatttctccttcatgcttttttcttttagaaagatactgtttaccaaaaagaaacttcagcagtacaggaaaaactattttcccaataaatttacgaaaacctaagatttcccaatggaatcagaattatcttccccgctaccaccaccttaatataatcacatgcttattggaacactaatattcgcaccctaaggagtacatttactttcaacaatggagggtgattctttaaaaaccaacc

SEQ ID NO: 369192 - DNA, 814 bp, Homo Sapiens
agcgggagtgtaactatggccggcctgcggaacgaaagtgaacaggagccgctcttaggcgacacacctggaagcagagaatgggacattttagagactgaagagcattataagagccgatggagatctattaggattttatatcttactatgtttctcagcagtgtagggttttctgtagtgatgatgtccatatggccatatctccaaaagattgatccgacagctgatacaagttttttgggctgggttattgcttcatatagtcttggccaaatggtagcttcacctatatttggtttatggtctaattatagaccaagaaaagagcctcttattgtctccatcttgatttccgtggcagccaactgcctctatgcatatctccacatcccagcttctcataataaatactacatgctggttgctcgtggattgttgggaattggagcaggaaatgtagcagttgttagatcatatactgctggtgctacttcccttcaggaaagaacaagttccatggcaaacataagcatgtgtcaagcattaggttttattctaggtccagtttttcagacttgttttacattccttggagaaaaaggtgtgacatgggaatgtgattaaactgcagataaacatgtatacaacaccagttttacttagcgccttcccggggaattttaaatattattctgatccttgccatactaagagaacatcgtggtggatgactcaggaaagacagtggtaaaaggtattaattttgaaagaaccaagtaccgatggaagctccggttcccccaagggaaaa

SEQ ID NO: 369193 - DNA, 1291 bp, Homo Sapiens
  misc_feature (190)..(206): n is a, c, g, or t
  misc_feature (1207)..(1207): n is a, c, g, or t
  misc_feature (1226)..(1226): n is a, c, g, or t
  misc_feature (1247)..(1247): n is a, c, g, or t
  misc_feature (1270)..(1270): n is a, c, g, or t
gggaggctttgcaagttaactgctggggttataggatcaataccatacttgctagacaaagctacccagatttgtcttatattataatttttgagttaaccgtagtatacctattatgattatagtaaacagactagtgggtagtaatgctaaattaccatcacagttatgtgccatctccccaccccannnnnnnnnnnnnnnnngatcagcaaagaaatacaggagaccagtctcgagtggtgctgtacttgttatgagtggggcagcagcacagtgtgtggcatttacatggtacccaggctccacagagtaccaagatgttgccctctgggaccacacttagctcagagaatatggggtccttacttgtattctgttatcagctgattttgaaacatataataatgattttcttgttcccttctttaactagctgcctttagattttgataatcacagtcttaaaatactaggaaagaagtggatgggaattgtaggcatagatttcatatcaagggcatttcaagacagaatttttatttcctgtaataggcttgctggagcaaaggaaatgtgctgctaaaaatcaacttatgccattttaaaattagataaaatatggagtgccatcctgctaggtgagtacagaccagaagaaaatttagttgggaaaatacttgtttttccaaattccggtgttttattacaatcaaagaagaggaaagcaaggtattttttcacctcagattctaatatattctagatttgtttctgttttatagatttaattcaatacctccacatagatgtttttatattacatgaatttaataataaactaaacttttttttgtctcccgttattgaaaagtaccaaagcttctttctgttgtgtttgattttactataggggttttgctttttctagagatacttttcatttaacagcttttgttaagtgtcaggctgcactttgctccatataattattgttttcagatttcaacttgtatgtgtttgtctcttaaagcattggtgaaatcacatattttatattcagcataaaggagaataaattccagaaaacacatattctgaaaatggagtgtttgttccctgccatttttcacacctctcttaattttagttctgtttagttgagagggctgtggattttactcttgccctgtggaacctcaggccnggaaggcgggcacattaantggttaaaaatacaaacggtncgtggtggatccatccggggggnccggacaggggggtccggccg

SEQ ID NO: 369194 - DNA, 614 bp, Homo Sapiens
atattatttttagttaagaacatagatatataaagatactgtagtttacaggtaggccttgaaatatctttatttaggatctgttaggaataagattgatattgtattgtgtgtaacctgcacaatgtggaaagctgatatacctgtgcaaaatcttagcctctgtgctgtcagtgtgatgtgctttctgcatggttatatactactagtgattttatcaaaacttctaaaatttaaattacgtggtaaaagatctgtaaaaggctgcataaatgttagttggcacataaagacaatggtagaagttgaaaaatgattgctatatttcaatggtttattcccactcaaaatactgccttctaagcttcccttttttggtccaaagcatgatcttaaagatatgtttaagttaatggatgtaatgcagggttcctacactgtattttggcgcatgttggtgccctctgtgccctagatatatgcacacagggtgcaagttaaaagctacagagtgaaagttggtttggatcctcttcatttcatttgtttagcttttctgttatttttctctacttacatgtattcctgtgaataaatccttgttaagttaaaaa

SEQ ID NO: 369195 - DNA, 1319 bp, Homo Sapiens
  misc_feature (33)..(33): n is a, c, g, or t
gatggagtgctggacatcaaccatgactatganaatacaccaagcacgagtggacagagatctttgatgggttcttttagccacgaggaagaccttgctagagtttttgagctccaagaaatcataagtaagcagtcaagggaacagagccaaatgaaagaacgcctggcttccctttccagtcatgtgacagaactggaagaggatctggacccggctagaaaagatctcatcaaatctgaagaaatgaacacaaaattgcaacgagatgtccgtgaagccatggcccaaaaggaagatatggaagagagaatcactactcttgaaaaacgctacctcgctgcacagcgtgaagccacatctgtgcatgacctcaatgataaacttgaaaatgaaattgcaaataaagattctatgcatcgacagactgaagataaaaaccgccagttacaggagcgcttggaattggcagagcaaaagctgcaacagacactgaggaaggcagagacgctcccggaggtggaggcggagctggcccagagggtggcagcgctttccaaggctgaagagagacacggcaacattgaagaaaggttacgacagatggaagcacagttggaggagaagaatcaagaactgcagcgggcaaggcaaagagaaaaaatgaacgaagaacataataaacgtttatcagacactgttgacaagctgctttcagaatctaatgagaggcttcaacttcatcttaaagagagaatggctgctttggaagataagaactctcttttaagagaagttgaaagtgcaaaaaagcagttagaagaaacacaacacgataaggatcagcttgtcctaaacattgaagcactgagggctgaactagaccacatgagactaagaggtgcttcacttcatcatggccgaccccacttgggcagtgtcccagatttcaggttccccatggcagacggccacacagactcctacagcaccagtgcagtgctgcggcgcccacagaaaggccggctggcagccctgcgagatgagccttccaaggtacaaactcttaatgagcaggattgggaacgtgcccagcaagctagtgtcttggcaaatgtagcacaagcattcgagagtgatgctgacgtgtctgatggggaagatgacagggacactctccctcagctcagttgaccctgctatcgccccagcggggcaggcccgacgcgcaccacacctagcccatgaatgcttccaagaagccaacctggaacggcccatcaaaccaaaggaggaatccgggttttggatttcccggc

SEQ ID NO: 369196 - DNA, 956 bp, Homo Sapiens
  misc_feature (358)..(367): n is a, c, g, or t
  misc_feature (606)..(606): n is a, c, g, or t
  misc_feature (852)..(852): n is a, c, g, or t
ggtaattacctataggctcaaaagtcattcgttgctgttctagtataattagtagttccgtgattgaaagtttattgtaattctactatcttcaaactagatacattttcaaaaggaaaagataattttttagaaacatcttaatattcactatttcctgaaaaaatccaagcagttaacgctttctggatggtaacaaagtaccttctaaaagataagtgctatgacaccatgtatgaatgtaattctcttagtaatttacctctgactatttggtgtcttaacgctttggtttatataatctcaggggttgtctgcaaaccaaaactgacatattctgtggttagcttttattacnnnnnnnnnnaacagaatgctttgctttggttatatttcttctttcttcttttgtcttatatggattaataactagtctccatgaacttcacttgaaagagcctgtaaaagttagatgagtctaaaagtgctctttgaagtagcaacaaattgggagtatatgctctgttatatagaaataaattgcccttgctattttcctacatttagcctttgctagattgaatatacattgagctaagaccttangaaattcactttctgcatgataaaatgacccaataaatattccactttgcttaataatgtacatacagtgcattattttttctatttgtagatgaatttaatgacagataattgtctgttccccgctgaaactgaagaaatctagtttttttgtgaacatttttgtggtcttatggataaagtacatgaagatttttgcagcagtattaggtggttcagtgggctgcactttaataatcagggtgnttaattttttgaccagggattgggactagaccctttttcaaataagaggcctgaaggggtatcaggacagtggaaaaaggtggcctggaaactctaaagtagcc

SEQ ID NO: 369197 - DNA, 1027 bp, Homo Sapiens
  misc_feature (211)..(271): n is a, c, g, or t
  misc_feature (313)..(331): n is a, c, g, or t
  misc_feature (494)..(530): n is a, c, g, or t
gggaattatcttccgtaggatttttttgtgtattcacaaggtgatatttgtattgtaaaacaataatggtgaaggaaataaaaaggcttttaaaattttgtttgttttaaatctttgtaaagttattattccagagagtatactggtatcttacagcttacctagatcataaattaatcaaaatgcactttttaataaaaactgatacttnnnnnnnnnnnnnnnnnnnnnnnnnnnnnnnnnnnnnnnnnnnnnnnnnnnnnnnnnnnnncacacctaacacacataaaaccacacaatccttccaattttnnnnnnnnnnnnnnnnnnnccttgtggggcccccccgccccccccaaaaaattttcctaaaaccttccttttggggggcggggcgccccacagtgtattggaaccttgggctcaatactggtttcccaaagaaaaaaccctgggcacataaaccaaggggttggggatattttaacaaattnnnnnnnnnnnnnnnnnnnnnnnnnnnnnnnnnnnnntaaacacattttcccaaatggggagttcttgcggaggccattcaccgggggtctctccacacacaagggcgcggcccccccagtggggactcctctatacttcccaaattatagccccccccgccgtcgtgcccccctctttttttaaaacatcgtgttctattacacccccctattaagactttttcttccgcccgcaattgggcgcatatccctctcacacaaaacgcggggatttgtataacaaccctcgaaacctcctccccaatggtgcaacatcacacacacctttctggctcgctcctgttgcgcaaaatataactattttctcccacccccgtgggaacgacacaaccgcgggggcggcacacaaaaaatattttgctcccccatcacttctgccgccccaccgctacttataatcacacaaaaaaccgggcgcggaataaacctaccccctccgcgtggcacatctggttggtttctaatacaacaaa

SEQ ID NO: 369198 - DNA, 156 bp, Homo Sapiens; identical to SEQ ID NO: 5451

SEQ ID NO: 369199 - DNA, 785 bp, Homo Sapiens
  misc_feature (750)..(751): n is a, c, g, or t
ggatttgaatgttgaagagcgattagttctaattgagaaaagtgttgactcaacagccacagctgatgacactcacaaattagatcatatcaatatgaatcttaataaacttataactaatgatacatttcaaccagagatcatggaaagatcaaaaacacaggatattgtgcttggaacaagctttttaagcattaattctaaagaggaaactgagcacttggaaaatggaaacaagtatcctaatttggaatccgtaaataaggtaaatggacattctgaggaaacttcccagtctcctaataggactgaaccacatgacagtgattgttctgttgacttaggtatttccaaaagcactgaagatctctcccctcagaaaagtggtccagttggatctgttgtgaaatctcatagcataactaatatggagattggagggctaaaaatctatgatattcttagtgataatggacctcagcagccaagtacaaccgttaaaatcacatctggctgttgatggaaaaaatatagtcaggagcaagtctgccacactgttgtatgatcaaccattgcagggtatttactggttcttcctcatcttctgatttaatatcaggaacaaaggcaatttttcaagtttgattcaaatcataatcccgaagagcccaaatataataagagggccccacaagtgggcccacaatctgcaccctcaaatatatggggtcctccacagtataatatccnnattaccggttaccagtggctggcagtcaaaagaa

SEQ ID NO: 369200 - DNA, 690 bp, Homo Sapiens
ctccctccgaagagaaaatttttatactaaaatctataatttaattcaagagaatgcttttatttccgtttaaacatattttgtatatatgtgatataaattaatgtgtgcaaattgtttaaaaattagatgtgttgcagttttgcatgtaatcggttatacctttattggacttttatagacattttttatttgcatgaaaaaaactcactaaatttacatcactaaacaaaggttaacccttgtgtgaaatgaaggaactgtcaataattgacagccaactaatacagtaaactgttatactagttttgagctttagacctcagccttttgtgtggaagaagtcacagctttcttaggctttaaaggaaaagaaggaaggacttaaatagcttttcttcctaccgggattacctatgtttttccttgcttgcaatctcatctgattttgctagaaatcacaaccatattggttatgcatattgcatgagtattaccaagaaaaatcttaaaagttgtgatgtgacatgatataaaggatctctttatgttaaatgtctttccatgtacctctggtgtgtcagggattttgtgcctcaaaaaatgtttccaaggttgtgtgtttatactgtgtattttttttaaattcacggtgaacagcacttttattatttccagttcagaagagcc

SEQ ID NO: 369201 - DNA, 2033 bp, Homo Sapiens
  misc_feature (591)..(627): n is a, c, g, or t
  misc_feature (1945)..(1945): n is a, c, g, or t
ggagctgaagaatgatgcattggagctatgcaacaggataagcaatgccattgaccgcgtggaccacatgttcacatcagaatttgatgctgaggttgatgaatctgaatctgtcaccttgcaacagtactaccgagaagcaatgattcaggggtacaattttggatttgagtatcataaagaagttgttcgtttgatgtctggggagtttagacagaagataggagacaaatatataagctttgcccggaagtggatgaattatgtcctgactaaatgtgagagtggtagaggtacaagacccaggtgggcgactcaaggatttgattttctacaagcaattgaacctgcctttatttcagctttaccagaagatgacttcttgagtttacaagccttgatgaatgaatgcattggccatgtcataggaaaaccacacagtcctgttacagccattcatcggaacagcccccgtcctatgaaggtacctcgatgccatagtgaccctcctaacccacacctcattatccccactccagagggattcagcactcggagcatgccttccgacgcgcggagccatggcagccnnnnnnnnnnnnnnnnnnnnnnnnnnnnnnnnnnnnncagtcggcccagccccctctggtggtgactctgtgctgcccaaatccatcagcagtgcccatgataccaggggttccagcgttcctgaaaatgatcgattggcttccataactgctgaaatgcagtttaggtccctgagtcgtcactcaaaccccacggaagagcgagatgaaccagcatatccaagaggagattcaagtgggtccacaagaagaagttgggaacttcggacactaatcagccagagtaaagatactgcttctaaactaggacccatagaagctatccagaagtcagtccgattgtttgaagaaaagaggtaccgagtaatgaggagaaagaatatcattggtcaagtttgtgatacgcctaagtcctatgataatgttatgcacgttggcttgaggaaggtgaccttcaaatggcaaagaggaaacaaaattggagaaggccagtatgggaaggtgtacacctgcatcagcgtcgacaccggggagctgatggccatgaaagagattcgatttcaacctaatgaccataagactatcaaggaaactgcagacgaattgaaaatattcgaaggcatcaaacaccccaatctggttcggtattttggtgtggagctccatagagaagaaatgtacatcttcatggagtactgcgatgaggggactttagaagaggtgtcaaggctgggacttcaggaacatgtgattaggctgtattcaaagcagatcaccattgcgatcaacgtcctccatgagcatggcatagtccaccgtgacattaaaggtgccaatatcttccttacctcatctggattaatcaaactgggagattttggatgttcagtaaagctcaaaaacaatgcccagaccatgcctggtgaagtgaacagcaccctggggacagcagcatacatggcacctgaagtcatcactcgtgccaaaggagagggccatgggcgtgcggccgacatctggagtctggggtgtgttgtcatagagatggtgactggcaagaggccttggcatgagtatgagcacaactttcaaattatgtataaagtggggatgggacataagccaccaatccctgaaagattaagccctgaaggaaaggacttcctttctcactgccttgagagtgacccaaagatgagatggaccgccagccagctcctcgaccattcgtttgtcaaggtttgcacagatgaagaatgaagcctagtagaatatggacttggaaattctcttatcactactgtatgtaatattacataagactgtgctgagagcagtataagctttttaccttncagactgagactgcacagtgacagcgtcactctctgcgctctgttgtcgagtgcaaaggctctgagggctgtgcacagtaagactgct

SEQ ID NO: 369202 - DNA, 666 bp, Homo Sapiens
gtagaaaaaatttttaataggaaatattcagagattccagctgtggtatggttagcccttttctgtatggaagaaagggtgttgatctggatggcttatggacagctatttaaataacctctccaggggagagtaaaccctgttggtgatgacagctcccactatggggaggaaagcacagtgaatgtgtgaagatgaagatggtatgtggagacacaaatatttatagttttgtaaactctaaagaggaaaaagaacaccctttattacaattggggttaaaaacaaaaagcccctgtctaaaagagaagactcccatctgctgtagacagaggaaataaacatattgacaggagttcaatagaaattactcctaaagtccagttttgatgcaacagcttttgtctgtgtcctctgaaacagtgaatccccaaatcagattagctgtccaaccagaaccagtcttggttgatcagtggaataaattattgttttgtatggaccttggtatttgcatgttttctgaaaggacaagagggccagagtggggtttttaaactagtagatgaataccctgaaaaattccttctcacaatgtcctattgcactccatgtgcttctatcagatagatgcttgtctctacctactgacctacatgcatggta

SEQ ID NO: 369203 - DNA, 822 bp, Homo Sapiens; identical to SEQ ID NO: 5530

SEQ ID NO: 369204 - DNA, 694 bp, Homo Sapiens
ggggcccgacggagacgcagtcccagctatctgacttcatgtgaaagatggctaatgcagaagtgagtgtcccagtgggggatgtggctgtggtacctactgaaggaaatgaaggggagaatcctgaagacactaaaacccaagtgattttgcagttacagcctgtgcaacaagggatttatgaagctgggtcggagaacaacacggcagttgtagcagtagaaactcacacgatacacaaaattgaagaagggattgatacaggcactatagaagcaaatgaggatatggaaattgcttaccccataacttgtggggagagcaaagccatcctcctctggaagaagtttgtatgtccaggaataaacgtgaagtgtgtcaagttcaatgatcagttgatcagccccaagcactttgttcatctggctggcaagtccactctgaaggactggaagagagctattcggtctgggtgggatcatgccccggaaaatgatggactccgggaagattggttttttaccaacatgacaaagtttgctcccattacctgcagaaaccacccattttggttctcccggattaaccgggccaagaactttccgtcgcccaggaacagcaaacaacctgtcggtgggaaaccccccactttcccttggccggtaatccaccccggccctattgccccccctct

SEQ ID NO: 369205 - DNA, 308 bp, Homo Sapiens
ggtcggtaccttcatttaggcaatgacttaagtttagataaagcttcagtcttgataactgaatattcaaagctctgcgggaaatctgtgcctccagacactgctccctgtgaaattctgaagatgtttcttagtggattatcgtaaatcactgaacctttttttcaagaaggacaagaattttggagtctgctattaatggaccatatttattacagtttttaaattgtacaatctctgtattatagctatttgcctaacattaccccacatgtaataaataaaacaatatgagcataattgccccc

SEQ ID NO: 369206 - DNA, 832 bp, Homo Sapiens
  misc_feature (1)..(1): n is a, c, g, or t
  misc_feature (33)..(41): n is a, c, g, or t
ngatttcattttatgtgaggaattattttaatnnnnnnnnngagggtttatgctctatagtaataaaatttaccagtaacacccaatcagaaaattttggttccttagtatttagggaagacttttgtttaaatctcttatggaattttacatgttttgatttagaaaagtagatgcaatataatatatttcaagttttatacgtattagatgaattgcatggtattttaggcaacttaactataaacaaatttattcatagaagcattgttgccaacaatttagatgacctcgatgaaaaaacacaccaattgacaaaactggcctcaaaaggaaataaaaaaatccaaacacaacctggaacaagtaaagagatttgaacccacacatcaaaaactctcccaatcaaagaaagtccaggcattaaatgaacttttactggggcaaactaatgccaaaccctctaaagaaaagacttcaaccactaactcctctctaggaactcccccccaaataaatggaaaaagaaaaaggaggcaccccatgccgaacatttctattcacgcgccgcgaattttacctttcaacatcccccaggcccggaaccaacacaccccttcccagggaaacacccacccaacacccacaatcctcctttatggaacctatagcaatgccccacagaaaactttctcaaatatcctaacccaaggccccaatactcaccgacggctttttattataacactccgttccccactatactctgatacccaacgcggcgggattctttactccaagcaaaaccgcgatggcggaaagggcatctcta

SEQ ID NO: 369207 - DNA, 873 bp, Homo Sapiens
gggctttttccagtggttatcgcggcgcccaccggcctctgatctctgagtcttctccaacccacagacgttttttgttgctctggttccaggaccttctccacaactaggccattttccctgcccaggtgtctttttgacctcttgacctctgactcaaaggtcagctcaaaggttccgaactcgggcctgggatgtgagggggtactgaacctaagttatccgaatctttagccctgggtccctaagtcgcatccttaaggcacctcactctagatctgagccttcatatcccaaactcactcatgagtttccacatccagccccaaagaatgagttaactcctactaactctccacctaagactcccgaggtaacccaaccggtaccacagatccggttccggatttaaggaccccaccctgttaaccgtcaggtgccttatgacttgagtcagcctcgcaattcctgctcccgtggtttcaaatattagccctgggccttttcccacccactgctcagtccccagattctggaactcagctcttaaaccttttgaaatcccccatccctgaaaaccggttctccgcttggaggatcctttccctcccccgcttttttggaaccttctcaaaaccctcccgggaagaccccgttttgatttcccgctacctgaatgatagtaaccctggtgggccccccctggcccttcgagaaagacttttctaaaaccatttctttgggggggccggggccccataggggtaaggagaacgtggggtccaaagatggtgtgcccaggggacaaacctgtgccactgaatcaacgggccgtgagcattcgctcccacataaaaacccccctggccgggt

SEQ ID NO: 369208 - DNA, 941 bp, Homo Sapiens; identical to SEQ ID NO: 5922
  misc_feature (840)..(840): n is a, c, g, or t
  misc_feature (880)..(880): n is a, c, g, or t

SEQ ID NO: 369209 - DNA, 931 bp, Homo Sapiens
  misc_feature (905)..(905): n is a, c, g, or t
gggtctcctcccctgctttgtactcgagaagatgttgaagtggcagagtctcccctccgtgttctggctgaaaccccagattcctttgaaaagcatattagaagcattttgcaacgtagtgttgccaatccagcatttttgaaagcttctgaaaaggacatagcccctcctcctgaagaatgccttcagctcctcagcagagccacccaggtgttcagagagcagtacattctcaaacaggacttggcaaaggaggagattcagcggagggtcaaattattatgtgaccaaaaaaagaaacaactagaagatctcagttattgtcgagaagagaggaaaagtctgcgggaaatggctgagcgtttagctgacaaatatgaggaagctaaagaaaaacaagaggatatcatgaacaggatgaaaaaaactacttcacagttttcactctgagctcccagttctctctgatagtgagcgagacatgaagaaagaattacagctgatacctgatcaacttcgacatttgggcaatgccatcaaacaggttactatgaaaaaggattatcaacagcaaaagatggagaaggtgttgagtcttccaaaacccaccattattctcagtgcctaccagcgaaagtgcattcagtccatcctgaaagaggagggtgaacatataagggaaatggtgaagcaaatcaatgatatccgcaatcatgtaaacttctgacaccaccaggagctgactcacacctgaactgaacaccattgaaggcttaaacccatattgtaaaacagcatcaacagcagaccgggcaattgcgcttttgatctaaagggaaaggtggaaagcctgggatcctggcaatacactgaggattattggaaaactggcaaagcaaaccaantccggggttgctcttaactttaattt

SEQ ID NO: 369210 - DNA, 1454 bp, Homo Sapiens
  misc_feature (91)..(91): n is a, c, g, or t
  misc_feature (383)..(391): n is a, c, g, or t
cgcccggaccagtgtgtatttcgcgttggtttgcggtcatgtgtttcaccctcgttgtggcgggggcgggttatgtggcgtgcttcttcgnaaaggtttttaataccctgggctttaaaggattttttcaaggttaagaaaccaaattcaaattgggttggagcttcaattccgtaattacaattcccatggcatctttgaaaggccctgcattggagggcagagtaatctgcaaagatgatagttttaccatatgtcctgttacctacaccaatataattactacattatcttataaagacaaacagttgcttcaaactctttaaaaaaatatatatataatgagtttcccaaagactcgagtctatattcaaagatgagtnnnnnnnnntccattacttccctagggtcactttcttcctttactcctgcttaaatgcaaaagctgatagtttctgatttgtagaaaaatctaaaggtttctgctttttagacaaattcaggttctcttttgctttttcttcctggttttctgtttcatcactttcatcaaccacacgttttcgcttctttgcttcagttccttcacttgccgtttctcctttggctttgttagcccacacctttctttcttcagttgacaatactctaaatcgaatcattccttcttttattatgtctgcttcatctgaaaagtcaggattgtcagacaaaatattacttctattttcttctaaccacatctggaacccggtctttggccttttggtttttcagtgttttgaggaggacatatagctggggtttcagataatacatttttaagattttcttctttcacttcctcagttttattagtttgagaatttcttttctggaaataggatgctgcagatgcctgcttaggcttcggctttggaatcagaggctttataatgggagacttttcattatttgtagttcgactaagtgcagtggacttcttggatgatttgcccatattgtctaaaatattagttgaacgtgctgaattcattgacatggctggttctttggaactggctgataccttaaagggatttactcgtccttggctgctaaaggtaactgcacctgacttagctgaaacatcagaggaatttgtacttttggaaaacgagttctgtccaggcttatgtatttctggtttttcttcatcatcagcttctccactgtcctcagcatcttcttcaacttgatttctgaaccttggttggctccactctgtagcagtattgctgtaaccagcattcagcttttttctgaaatcttcttcttcttcttcctcttccacctgggttgctgtcaattcggctgccttctctacagccagttcacttagtttttgagccagtattaatttccgagagcgagcccggccgtaatggcgactctgggttgataccactgcttcc

SEQ ID NO: 369211 - DNA, 929 bp, Homo Sapiens
  misc_feature (536)..(536): n is a, c, g, or t
tctttgtaaaccagtggcagatcaaccatgaccagaagctatgggtcaacccatctgagttcctacctgaacggtttctcacccctgatggtgctatcgacaaggtgttaagtgagaaggtgattatctttggcatgggcaagcggaagtgtatcggtgagaccattgcccgctgggaggtctttctcttcctgggctatcctgctgcaaccggtgggaattcagcgtgccactgggcgtgaaggtggacatgacccccatctatgggctaaccatgaagcatgcctgctgtgagcacttccaaatgcagctgcgctcttaggtgcttgagagccctgaggcctagactctgtctacctggtctggttgggcagccagaccagcaggctggcctatgtggtctaaggttcagcctgaaactcatagacactgatctggctgcagttttgctatctgggctgtgggcaagcctaagggatcctgcctgcccctaccctggacttgcctctgcacaccctccagagacaacaggtaanacagggccacatagatgctgatggagccttcccaagttgtgcttgagccaggaggcctgctagggttaggaggtccttaggcctctgagaagctctgaagaactctctggaagcccctgggcccagtacctagctggctctgtgagggtgctgactggcttcagcaagttagaactagccaaaccaggaccctgtcccaatctttgacaattggggagctgccaagagtgaaagggaaagagacagcccaggatactggcaccaaaggtagtctccctgcctggaactagggctgagcaaatctggaccctatggggcctagggacccagtttccggggaaacatcacatttcctctgcccccttcttggcaggcaaggaaacaaacaggggc

SEQ ID NO: 369212 - DNA, 1035 bp, Homo Sapiens; identical to SEQ ID NO: 6047
  misc_feature (19)..(19): n is a, c, g, or t
  misc_feature (722)..(722): n is a, c, g, or t
  misc_feature (941)..(941): n is a, c, g, or t
  misc_feature (986)..(986): n is a, c, g, or t

SEQ ID NO: 369213 - DNA, 573 bp, Homo Sapiens
gagcggccgcccgggcaggtacgcgggggaaaattctaaagaattaaactggaaaagtatttcatttacttagtgctctgaatttacttttacagttttctgcagtcagtatcattaaaatggttaagtttacatttgaactgaaaatatgtataaaatctagcaattcacaaaaatgccctagaaatatagattttaatcaccattacataatgacaaaccttgttaaatgcttccacttccagggcaaatgccactagggaaagtaagttgcactcatgtaagtatcaaactatataaaaggaggccttgtgcatttcaagtttgcaaagtacctgtgtacttaaaatatgtgtggagacctactgtacagtagttttgcccctttaattggggcacattcatcttaaatcttatagtatttatccacccaaaccccagactgagatactgctcccaggggcctaggtagctgccagtccgtgattttaattgctgtcttgaagttaacaagtgttataatgaaataatctacctgatgctaaataaaggctttagcaatgttaaaaaaaa

SEQ ID NO: 369214 - DNA, 810 bp, Homo Sapiens
cccaaattaaaaggaaggaggcagagaggggggaataacccaaggcaaaataacaggcaggtaccatttttaatcttcattcccccaggtattttcctgtttccaatgtagaattctcccacattccataaaatgatatccttcaacctactgccttacagtcagatatgcccagtatcagttcaataagggcaagtcacaccttttagctattctcttaagtcctacagagatagtttcacttcaatttcacagggacacttcatgatttatctaataaaggtgataagacaatcctagtgaaggattcctttaagttgttgcttttctagatggaaccaaataattaaactttctcttctccatactggagtttgtttctttcattatgttttagtatcatggagtcgaacaatgccttggcagggcatgaactatataactcagaagtcaataaacagttgaagatgatcttttctaaagtaaaaatcaactgtttagacaacacttaaatacacattacctgtttaaagacacacacacaaaagcaaaatttaaaaaccaaatcaaggaataacgttttgtgacaatttcagtagcacaattactggtctaacagttttgcattgtgggaatttaaatagcggcttacaatgaaagaactatgcacaatgcttccaggattgcagaggagagaggtaagcccagaggatgaaaagcatacatttgcctaatgtgtgtagaaaattccctgatcaaatggccaactaacttttaaatacaaaatttaaccttagaagaacttttccc

SEQ ID NO: 369215 - DNA, 382 bp, Homo Sapiens
gggagttctactgggcgctataggaagggcgcacgcacgaaacttcctccgtcccttgcatcctcagggcccgcccagcaggacgactgagcaggccttggaagaccggagagattggagcgcagaatggggaggaattgaggggaaaatggagatagaacctgaaagagccccaaacgccagaacctgtagctccccaagaataagatcttccagaagaactagacccaaaactagccgttggggaacaccgaaatccttggaggagcaacatccgcatgaccctctgtgttcctttaggcaaaaggacttgcttccattgtttgttcaattgtttgtgtttgttaaataaataaaacgattttcatgtatctttgaaatt

SEQ ID NO: 369216 - DNA, 1015 bp, Homo Sapiens
  misc_feature (88)..(88): n is a, c, g, or t
  misc_feature (95)..(95): n is a, c, g, or t
  misc_feature (216)..(216): n is a, c, g, or t
gccaaaaaacttaggaaccaaaaatccatggtgaaaaccggagttattccagcctgggcatttgatgaaactggtcctgtaagtttgntggggtnacatcataaaatggggatgtttcacatctcaggcacagacgacttggaggttgctctcagagggcagactttttgtagaggaagtccggcttgcttggtgacctccttcctctgcttatgnaatcttccctttccaaatctgtattgtctctgagctcccatggcccagggactcactgtctgccagtcttctaccggatctctcttcgggagcttcagagctacatgcagaaagtgaaaggttctgttaggagtcagcccaaaagtcaagtcagtttctactgcagttcgtcccctgacatgggctggaccggtactagcattttctggggctgccaaaggaaagtctgaccgctggggaggttgctcaacgacatccaggtgtatcggctcattcttttgtctgtgtagatgcccgtcaggggaaatgtggatattctctcctagcttcttcctgttttttaggagacgtctgaccaggtaggtaggctgactttaagccacttggtgatgccttattgtggctgtacagatcgggaccaaaatatccaccttgcgaaggggaaggggtgcgtctgctgagagcaggagtagaaggtctgcaagcagcatttgagaagtcatagaaatccggatattcctgtggattttctctggtgtctgttttttgctctagtgtgtgttttttccgagaagtgtgtgtatgtctctgtggaatacacgacagatgctggggaggccctggtcctgcttcagaaactgactggcttaattctgtgtctacagcaagctctggaagcctcctgtccttgagtgacagtgtggacacacccaccgcgatgtctggcatcagatcattcagcacaggttgtgttcgcacttgcttctcagatgctgctgccgctgctgctgttgctgtt

SEQ ID NO: 369217 - DNA, 1334 bp, Homo Sapiens; identical to SEQ ID NO: 7569
  misc_feature (467)..(512): n is a, c, g, or t
  misc_feature (574)..(612): n is a, c, g, or t
  misc_feature (690)..(728): n is a, c, g, or t
  misc_feature (782)..(963): n is a, c, g, or t
  misc_feature (1071)..(1082): n is a, c, g, or t
  misc_feature (1218)..(1293): n is a, c, g, or t

SEQ ID NO: 369218 - DNA, 894 bp, Homo Sapiens
  misc_feature (189)..(198): n is a, c, g, or t
  misc_feature (285)..(447): n is a, c, g, or t
  misc_feature (884)..(884): n is a, c, g, or t
ggaagaaaatgaacaggaaatcatggggaggagaagatatttgcagttcatgtatgtgacaacagcaccgagtatagcaaaagtgttggcaaactttataaagcaaggcaccagatggtgaaaattttcagctttgtcacaactgctcatctttgctattgtgtgaaagcatccgtacaccatgcattnnnnnnnnnntgagcatggctgcttcccagtaaaaccattcacaatcccaggtggcagtctggatttggtctgcactcatagttttctggtccctgnnnnnnnnnnnnnnnnnnnnnnnnnnnnnnnnnnnnnnnnnnnnnnnnnnnnnnnnnnnnnnnnnnnnnnnnnnnnnnnnnnnnnnnnnnnnnnnnnnnnnnnnnnnnnnnnnnnnnnnnnnnnnnnnnnnnnnnnnnnnnnnnnnnnnnnnnnnnnnnnnnnatgtagcactgctacccatccatggaaatggttaaaatgaaaagcatgaaaaagcatcacgttttggcaaggatgtaagcaagaggaactgtacactactggtggaattgctcatcgataaaaccattttgaaagctggcactaaaagccaagcatatgtatactgttttacccaaacccagcaaaaatgcatgtgtctgtccaccaaaggacatgcactagaatatttatagcctaaaactgcacaaaacagaactatcttaaggcacatgtgcaatgggaatgaataaagaagtgggcatatgtccatgggaatactgttaaaacagtgaggcatggaatggaacttaggaagtccgtgttaataacggcagctggaattttaacaaaccttggctggaatggaaaggattccaggacacaaaaggccaactgcngtatggattc

SEQ ID NO: 369219 - DNA, 700 bp, Homo Sapiens
  misc_feature (43)..(43): n is a, c, g, or t
  misc_feature (57)..(57): n is a, c, g, or t
  misc_feature (515)..(515): n is a, c, g, or t
  misc_feature (549)..(549): n is a, c, g, or t
aggccgaaaagggggccattaaccgggtgctgggaaaaaaccngttccctaacccgnggtgcctaagtatttgaagtgtgttttgaagctgtgcaccttaagatatgtgtattttcctgccatgtgtgttaaactttcccataaaagttttcctaaaatcacaaatggctaacatttgtgtcgctcatcactctaatcatatttttctagatgtgtatgaatatgctgcacaacaggaattaaatggcagattttgcataattctgtgcaggaaatacatatttatagtaattttgatggcaactactaagatttcctacgctgtccttaaagcttagcataatgtatattttaagtgaaatatttgagaaggttaaagaatcattacatactttgtcatcctatacttttgcatatataaataggtctgagctgcctcttcaataaagaagctaatgtgtaacatttcatatttccctaaacaaattgttttttgcatttctgaattcgggatncatcttaacttttactgtaggggtgacctttctnggcagtgaatgaatataatgctgagttggatttgatggaaaattattttaaaagtattcagctaaatatttgagcaaatctcagatacacagttaacagcccagatgtaagtgagtgaaagaaacaggtcagcaaaactttgcaccattga

SEQ ID NO: 369220 - DNA, 962 bp, Homo Sapiens
  misc_feature (952)..(952): n is a, c, g, or t
gaaactttagccccactgactattatcattcagaaattccaaacacaagaccacatgaaattctggaaaaaccttcccctccacagccaccacctcctccttcggtaccacaaactgtgattccaaagaagactggctcacctgaaattaaactaaaaataaccaaaactatccagaatggcagggaattgtttgagtcttccctttgtggagaccttttaaatgaagtacaggcaagtgagcacacgaaatcaaagcatgaaagcagaaaagaaaagaggaaaaaaagcaacaagcatgactcatcaagatctgaagagcgcaagtcacacaaaatccccaaattagaaccagaggaacaaaatagaccaaatgagagggttgacactgtatcagaaaaaccaagggaagaaccagtactaaaagaggaagccccagttcagccaatactatcttctgttccaacaacggaagtgtccactggtgttaagtttcaggttggcgatcttgtgtggtccaaggtgggaacctatccttggtggccttgtatggtttcaagtgatccaccagcttgaggttcatactaaaattaacacaagaggtgcccgagaatatcatgtccagttttttagcaaccagccagagagggcgtgggttcatgaaaaacgggtacgagagtataaaggtcataaacagtatgaagaattactggctgaggcaaccaaacaagccagcaatcactctgagaaacaaaagattcggaaaccccgacctcagagagaacgtgctcagtgggatattggcattgcccatgcagagaaagcattgaaaatgactcgagaagaaagaatagaacagtatacttttatttacattgataaacagcctgaagaggctttatcccaagcaaaaaaagagtgttgcctccaaaaccgaagttaaaaaaacccgncgaccaagat

SEQ ID NO: 369221 - DNA, 343 bp, Homo Sapiens
agagctggcacagccagcagtttcaaggcctacgaccccagatctttagactgagtggtgtggcttccttaaaaacaaatttcatctaaaataagttacttctgggtgctaatatatctgaggtttttaaaaagggtgataaggaagcccacagaaccacacttttctgacattttagttactagaactgctgaggccaccaaaaatgttgtgatatgtaaagggagtgggcagctgaatgcatatacctgcgtccttacctaatatatatcctttacactacttattaactgctttgtgggaaaccaaaataaaagccttcagcccagccaaaaaataaatc

SEQ ID NO: 369222 - DNA, 1120 bp, Homo Sapiens
  misc_feature (404)..(443): n is a, c, g, or t
  misc_feature (549)..(609): n is a, c, g, or t
  misc_feature (630)..(820): n is a, c, g, or t
ggagagcctgttagtattaatgaagaaaatgagggatttgaacataacacacaagttagaaatcaaggaattatagctttgagttaccgtgactgggaggagattgtgaagacctttgagatttcagagcctgtgattactccaagtcagaggcagcagaagccaagtgcttgatgctagctgaaggactcaaatggatagtgaagtccaaaacggaaagcggcatgtattgtacatattgtatgattcaacatttttaaaggcagattgtttttagtaaaatgtagcttttgatagctaataaatttggcatgggtgtctttgattaaaggaaactcaccgccatattcgcggggaagaggaccgggggacgggcggcggacccgctgagtgggtcggcggannnnnnnnnnnnnnnnnnnnnnnnnnnnnnnnnnnnnnnnaaatgtatcttgtggcggcccggcgttggggcctcaggaaggtttttgcaagagcctcccggtgtgggggggcggccgggccccggtgaggggagaggggaaacannnnnnnnnnnnnnnnnnnnnnnnnnnnnnnnnnnnnnnnnnnnnnnnnnnnnnnnnnnnnggattccgccgccgacggtannnnnnnnnnnnnnnnnnnnnnnnnnnnnnnnnnnnnnnnnnnnnnnnnnnnnnnnnnnnnnnnnnnnnnnnnnnnnnnnnnnnnnnnnnnnnnnnnnnnnnnnnnnnnnnnnnnnnnnnnnnnnnnnnnnnnnnnnnnnnnnnnnnnnnnnnnnnnnnnnnnnnnnnnnnnnnnnnnnnnnnnnnnnnnntggtgggcaggtgggccgggagggcatctccggccgccacgagggtgaggggtagagtcgggcggggggcgcgcgggaggcggagggcgggatggtgtgtgtcgctcggaggccgcgcccacccctctggtgcgcgcggacgggaagcctagggtgttgacggggtacaggctgccgagaggagaggcgtgcgcggcacgacgaatatctcgtatggcgtgcgacgcgcgcaccgtgggcgatggcgcgaggtgcgggcgggctagtagattctcccgccggtcgcgtccgtcggctctc

SEQ ID NO: 369223 - DNA, 928 bp, Homo Sapiens
  misc_feature (513)..(515): n is a, c, g, or t
  misc_feature (527)..(583): n is a, c, g, or t
  misc_feature (596)..(655): n is a, c, g, or t
  misc_feature (677)..(677): n is a, c, g, or t
  misc_feature (688)..(701): n is a, c, g, or t
ggcctgggtggcgaattcggcacgaggcaacccggtcccagccatgtccaacgtcccccacaagtcctcgctgcccgagggcatccgccctggcacggtgctgagaattcgcggcttggttcctcccaatgccagcaggttccatgtaaacctgctgtgcggggaggagcagggctccgatgccgccctgcatttcaacccccggctggacacgtcggaggtggtcttcaacagcaaggagcaaggctcctggggccgcgaggagcgcgggccgggcgttcctttccagcgcgggcagcccttcgaggtgctcatcatcgcgtcagacgacggcttcaaggccgtggttggggacgcccagtaccaccacttccgccaccgcctgccgctggcgcgcgtgcgcctggtggaggtgggcggggacgtgcagctggactccgtgaggatcttctgagcagaagcccaggcgggcccggggccttggctggcaaataaagcgttagcccgcagccnnntcaaccaaactnnnnnnnnnnnnnnnnnnnnnnnnnnnnnnnnnnnnnnnnnnnnnnnnnnnnnnnnnactcctaatcaannnnnnnnnnnnnnnnnnnnnnnnnnnnnnnnnnnnnnnnnnnnnnnnnnnnnnnnnnnncattcttttagcgatttctttncttttgccctnnnnnnnnnnnnnngaaaattttttaaaacacttctttggggcgcggtgcgcccccctagaaacagaaaaacgggccaaatagtgtctctccaaaaaagcaacatggcgcttcataacggcggtttggaactcccccccaaagaaataacctcgctggcgcactaagcgccgtttttataaataactcccgcgcgctcctcctaggcgctccttctcgccctttttccaacaggcgcgccc

SEQ ID NO: 369224 - DNA, 870 bp, Homo Sapiens
  misc_feature (596)..(627): n is a, c, g, or t
aggaataactcaagtcacctgtactggaaatcagtttgctgaaattaatcaacgattcttgaagttgaagaaaaggaggttccagccttggcaagaggagtgtggcccttcctggaatccctctggacacaccctcctagcatcctctaggaaagatgcggcagctcaaagggaagcccaagaaggagacctccaaggacaagaaggagcggaagaaagccatgcaggaggcccggcagcagatcactacagtggtactgcccacactggccgtggtcgtgctcttgatcgtggtgtttgtgtacgtggccacgcgccccaccatcaccgagtgagccccgcagccggccgcggaccccatcggcagggagaggaggcgcgggagggggacgcaaacaaaaaatggctttcatattcagagatgttcatgttgctgagctgtaaacaggagcaccctgtcttctctggtctttgacttgatttaaagtatctccgcctttccttgggagggaataggggatgttttatcagtgaatgtgcccatacatcttatggtccacttcatgtgcctttcagacttcaaaacgcgcgcgaannnnnnnnnnnnnnnnnnnnnnnnnnnnnnnncttctttttctctcctaaaaatcgataagtagctccacctgaagagggatggaacctctgggtcaggaaacagctggaatccacactcacctcattcccattgtttggatcatgcctctttccaacacgtgttcacaatctccaaagggactgtatttcttctctgtgcttaatgtgatttgaaatatgttgaatcaaagtgaaatatttattttttgaataaaggagataatagccttaaaa

SEQ ID NO: 369225 - DNA, 574 bp, Homo Sapiens
  misc_feature (359)..(359): n is a, c, g, or t
  misc_feature (376)..(376): n is a, c, g, or t
  misc_feature (433)..(433): n is a, c, g, or t
  misc_feature (466)..(466): n is a, c, g, or t
  misc_feature (506)..(506): n is a, c, g, or t
  misc_feature (530)..(530): n is a, c, g, or t
  misc_feature (558)..(558): n is a, c, g, or t
ggggcctgggatccggaagtcggagcctagctgcgcgagagtttctgctcgctcaaccgagttgtcgtgttgccctcgcttctcagatccccgccggaagtgaagagagcaagcagatttgaacctatctgctttcaagctggtcatcatgatgaaacttagacacaaaaataaaaagccaggtgaaggttccaagggccacaagaagataagttggccctaccctcagcctgcaaagcaaaatgggaagaaagcaacctccaaagtgccctctgcacctcattttgttcaccccaatgatcatgccaatcgagaggctgaattaaagaagaagtgggttgaggagatgaagggagaancagcaagcccgcccggnagcaagaaagacaaaaacgcaggaccatttgagagctacttgtcaggatgtccttangacgcccaggaggagtttgagcataaggagggnagtttttgcaggaatttaattatgttttcctcagcttggnttgacgaggccacgagggaaggcnttttaccaaggagtttccgtaagttggnttggaatccctgatgt

SEQ ID NO: 369226 - DNA, 758 bp, Homo Sapiens
acacaatcttacggctaggtacgaggctgggtgtcgaattcggcacgaggctcgctcaaccgagtttgtcgtgttgccctcgcttctcagatccccgccggaagtgtaagtaagaaacttctctcctcttttctcacaatgtgcgctcacctagacggccgggcagttaggatcgtctattggatgtgaaaccagagatgcccgccaacctggaatagagaggaagagagcaagcagatttgaacctatctgctttcaagctggtcatcatgatgaaacttagacacaaaaataaaaagccaggtgaaggttccaagggccacaagaagataagtcggccctaccctcagcctgcaaagcaaaatgggaagaaagcaacctccaaagtgccctctgcacctcatttggttcaccccaatgatcatgccaatcgagaggctgaattaaagaagaacgtgggttgaggagatgagggagacagcagcaagccgcccgggagcaagaaagacaaaaacgcaggaccattgagagctacgtgtcaggatgtcctaagagcgccaggaggagttgcagcataaggaggaagtttcgcaggaattaaactatgtttcctcagctggatgacgaggccacgaggaaggcttattacaaggagtccgtaaggtggtggcatactctgatgtgattctggaagtctggtgccgagaccattaagctgcgtgctcccctgggggggcggcgggagcccaggccaaagc

SEQ ID NO: 369227 - DNA, 1036 bp, Homo Sapiens
  misc_feature (228)..(287): n is a, c, g, or t
aaggagcgaggcctgggtggcgaattcggcacgaggccccgccggaagtgtaagtaagaaacttctctcctcttttctcacaatgtgcgctcacctagacggccgggcagttaggatcgtctattggatgtgaaaccagagatgcccgccaacctggaatagagaggaagagagcaagcagatttgaacctatctgctttcaagctggtcatcatgatgaaacttagnnnnnnnnnnnnnnnnnnnnnnnnnnnnnnnnnnnnnnnnnnnnnnnnnnnnnnnnnnnntgaattcctgggatcaaccagtcctcccgcctcagcttcctgagagctaggactacagaaaataaaaagccaggtgaaggttccaagggccacaagaagataagttggccctaccctcagcctgcaaagcaaaatgggaagaaagcaacctccaaagtgccctctgcacctcattttgttcacccaaatgatcatgccaatcaagaggctgaattaaagaagaagtgggttgaggagatgaggaagaagcagcaagccgcccgggagcaagaaagacaaaaacgcaggaccattgagagctactgtcaggatgtcctaagacgccaggaggagtttgagcataaggaggaagttttgcaggaattaaatatgtttcctcagctggatgacgaggccacgaggaaggcttattacaaggagttccgtaaggtggtggaatactctgatgtgattctggaagtcctggatgccagagacccattaggctgccgctgcttccaaatggaggaggctgtcctgcgagcacaaggcaacaagaagctggtcctggtcttgaacaagattgacctggtccccaaggaggttgtggagaaatggctggattaccttcggaatgagttgccaaccgtggctttcaaggccagtacccagcatcaggtcaaaaacctgaatcgttgcagtgtgccagtagatcaggcctctgagtcactcctgaaaagcaaagcctgctttggagctgaaaacctcat

SEQ ID NO: 369228 - DNA, 1509 bp, Homo Sapiens
  misc_feature (64)..(64): n is a, c, g, or t
  misc_feature (218)..(218): n is a, c, g, or t
  misc_feature (362)..(420): n is a, c, g, or t
  misc_feature (425)..(425): n is a, c, g, or t
  misc_feature (570)..(570): n is a, c, g, or t
  misc_feature (660)..(660): n is a, c, g, or t
  misc_feature (678)..(737): n is a, c, g, or t
  misc_feature (842)..(860): n is a, c, g, or t
  misc_feature (996)..(1006): n is a, c, g, or t
ctcaagctgggtgcgggtcaccaacacgtacacgaaatatatcgaccccgacagtccggggggnagcagaagaggggtgagtgtgtatccatgctgacgcctgcagcggctccgggccgctggtagatacctctgggggtacgctagcagtctccccaaactttgccatgctcgcgctccccctacctctcgtaggagcgggatgtgtatttaccagnatatttctgcgctcgccggggggtccacaacaaccacccccctcgcatccgattaccgagctgcgggagtataggccttccctttacactgccggcgcttgttttgagtcgtcggtctgtttgtgaggggggatggtgtgctcnnnnnnnnnnnnnnnnnnnnnnnnnnnnnnnnnnnnnnnnnnnnnnnnnnnnnnnnnnnggtgnactatgggaaaggactgttttacgcgcggcaagaggcctgttccccggctccgctaggggcgtgggggcggggaggggttcggtcctgtcgcgggttgtcgtagtgggcgggaagtgaggaggtggtgtgtggcggcccccgggnggagataaggtgctggaccgcttctgcggcgcgggaagaggcgcgcgccgtgactcgtgtggaggtgtgatgttgggttgtctgtgctgnggaggcggtggtcctgcnnnnnnnnnnnnnnnnnnnnnnnnnnnnnnnnnnnnnnnnnnnnnnnnnnnnnnnnnnnnagagaggcgggaggccgggcgtgtaccgctatctgtgcccgggggggtgttgcccgtgtgggaaaaccaatctttttagggccagcagttgctcttttttccttnnnnnnnnnnnnnnnnnnnccgaaacggagagtgggggttgggaaaggttgttgagggggcggaggggggcgcgccagagtatatagcgtcggttattggaggggttgggccgagaggggtggtggtctgagggcgggaggagggtgtggcagtnnnnnnnnnnntattgttgtacaagcagagcctctggctttcttctatgaatcaaaagctcaagtcactgccatgagaccaggaggttaagcttagaatgcagcaacatccaggagcctagagaagcaatcatccccatggcgggtcccaagaacacctcattgttggtcctttcaggctctctgacagcgatggagaggcagtcttcctcccagagtcagctggtcccaacatgagcccactccatgaatccataaaaacagtctggaaagagctttcttcatttaccatgcatattggcacaaaagatcttcaccagtctccgtattaatcaagcaattccaactgcgcaagcgtgagtctctactgaagacgccctctacacccagatcttacacccagtgtgttcctccttggggaacagcaaaccccacgacccaggactccagaactttcataaaggtggacataaacattccacttgctaccaagtgtgtatgtgtcaggagaagag

SEQ ID NO: 369229 - DNA, 820 bp, Homo Sapiens
  misc_feature (28)..(28): n is a, c, g, or t
  misc_feature (51)..(51): n is a, c, g, or t
gaaagaaacgacgaatatgacctagtantgggcgacccctggaggctttanccggccgtgtggcggcgatacttcgttacatacattattacgaagtatggctcaggcaatcggcgagctcgaatcgtcgagagcggggggacttcggggccaagatggcgacgggaacgggcaaacacaagctgctaagcactggccccacagagccatggtccatccgagagaagctatgtttagcatcttctgtcatgagaagtggcgatcaaaattgggtatcagttagcagagcaatcaagccctttgcagaacctggccgccctccagactggttctctcaaaaacattgtgcttcccagtactcggagcttttagagaccactgagacaccaaaacggaaacgaggtgaaaagggagaagtggtggaaactgttgaagatgttattgttcggaaattgactgctgagcgagttgaagaactaaagaaagtgataaaggaaacccaggagagatatagacggctaaagagagatgcagaactaattcaagctggacacatggacagcagactggatgagctttgcaatgacattgcaacgaaaaagaaattggaagaagaggaggctgaagtaaagaggaaggctacagatgctgcataccaggctcgtcaagcagtaaaaacacccccccggaagttacccacttgtgatggttcgctctcctatagattctgcctccccaggaggtgattatccactcggggacttgatccaaccactatggaagaagctacctctggggtcaatgagagtgaaatggtgtg

SEQ ID NO: 369230 - DNA, 1324 bp, Homo Sapiens; identical to SEQ ID NO: 7694
  misc_feature (313)..(364): n is a, c, g, or t
  misc_feature (1092)..(1092): n is a, c, g, or t
  misc_feature (1158)..(1158): n is a, c, g, or t
  misc_feature (1161)..(1220): n is a, c, g, or t

SEQ ID NO: 369231 - DNA, 1506 bp, Homo Sapiens
  misc_feature (686)..(695): n is a, c, g, or t
  misc_feature (748)..(810): n is a, c, g, or t
  misc_feature (865)..(894): n is a, c, g, or t
  misc_feature (1018)..(1067): n is a, c, g, or t
  misc_feature (1069)..(1069): n is a, c, g, or t
  misc_feature (1163)..(1163): n is a, c, g, or t
  misc_feature (1220)..(1220): n is a, c, g, or t
  misc_feature (1253)..(1253): n is a, c, g, or t
  misc_feature (1277)..(1277): n is a, c, g, or t
  misc_feature (1416)..(1416): n is a, c, g, or t
  misc_feature (1457)..(1457): n is a, c, g, or t
aaatgaggaaaagtggtgctggcattcgtcttcagccaccggcctccttatggctgtgactcggtctgcttttgatgaatggccaggaggtatggaggatagttagatttcctgttgtggattttcaggcatcaccgagactcctgtcaagcctgcagtcatttactagttttcatatcgactgcaggttctctttgagcagttcagtttttggtgcttaagggcaggtgcacaacggggtctggggttagaccaggcggtggatagtcttgatgctaggcagatgcagttatccctaccaggcccagagggtgactctgtttaacttcaccacgcacgcagattcaggattctctgatttccccaactttcctttattcttcttttagtgggagaaggggcaaaagtagaaacctaaaaaatcctgggaaaaggagccttttctgaggaaacttcagcagatgaaatatttaagacttgaactgggatctctagggggaacgttggaacatctattgattgatgtgtcaaagtccggaatttcactgtaattagtgaacgattataacttgtaactttgtctgttatgtaagaaattacattttggtctcttagatccaagagttcttgtctgttacgatttgtaactgcttgttaaaattaaacatttacatatttcattctcnnnnnnnnnnggggaaccacaaactcaccaaacaacccacacccatacacattgaccaaaccnnnnnnnnnnnnnnnnnnnnnnnnnnnnnnnnnnnnnnnnnnnnnnnnnnnnnnnnnnnnnnntataaactaacaaaacgcgccccaacaaatataatccttatttaaccacacctgnnnnnnnnnnnnnnnnnnnnnnnnnnnnnnggagcaggtgaagaggcaaataacaaggcattttctcctacaccacacacgcccaccgggtgcggcgacaggaacggaaggagggagatcactgatatatttcggttaggtcactctcataggnnnnnnnnnnnnnnnnnnnnnnnnnnnnnnnnnnnnnnnnnnnnnnnnnncncctcgataaaacaactctcttctttccctccccacaatattctgtttcccctcccctctccccacatacgcactaatatatatctcaccccccntgcgcgcggtcctagcacaaccaccgggagcccgaccccgggtgccggggagacacnactccctccacatattgcacagcgccccgagcntcgcgcgcctccgccgacgacccnatatctaacgccacccccgtccctcactacctcttcccaatattcttcacacctcgcccgtttacatcccacgtgatccagaatggtgcgtcctggcgaagagcgactatcaccggtcatacagggcgcatcacaaatnctgcccacccaaggtatagtggagagaggtccgcccgtttntatccacgcgccgccccccggcacgagcacaccacgcccaatcaccgtg

SEQ ID NO: 369232 - DNA, 604 bp, Homo Sapiens
gggttcctatcaatattttgctttttataacaagggtttgttcatattgatgccatttttgcaggatttcttcgtgatttctgtccatatgaaaaggctgacattaaacattaacacagggagaccgtgccctgtggccctgccgtggctgccagcatggtctgtgttcccttgtggattcaccctgtggccctgctgtggccaccagcatggtctgtgtcctcgtggattcactgcagctgtcggatgcgagtttctgtcataatcatttgtctcctgatacaattgttcttattcttttccaaaactgtaaaataatctcctccctcaaatgcaaaggttgcttttgctctgcttctgctttctttgaaataaaattataacgctaacggggcccccctcctatatttacccgcctcccactgttcggctcgccctcgggccctcgaaaaagcttctcccagaccattccggtttgcggcgcgcgccgccccattcaggccaatttggaaccatggggcccatcagcctggtttcccctaggaacaaaccctcgggtccatggaacctagggcggctttgggactctcctcccacccaaatc

SEQ ID NO: 369233 - DNA, 457 bp, Homo Sapiens; identical to SEQ ID NO: 7996

SEQ ID NO: 369234 - DNA, 794 bp, Homo Sapiens
  misc_feature (229)..(284): n is a, c, g, or t
ggcacctcagtgtatgatttgacaccaggagaaaaaatgaagatactccatactctctgtggaaagctactgaccctagtttcaactagggattttattgaagattatgttgatatattacgacaggcaaagcaggagttccgggaattaaaagcagaacaacatcgaaaagagagggaagaagcagctgccagaattcgtaaaaggaaggaagaaaaacttaaggagnnnnnnnnnnnnnnnnnnnnnnnnnnnnnnnnnnnnnnnnnnnnnnnnnnnnnnnnttcaacggcagatatatctattggggaggaagaaagggaagattttgatactagcattgagagcaaagacacagagcaaaaggaattagatcaagatatggtcactgaagatgaagatgacccaggatcacataaaagaggcagaaggggtaatactgaaatttctttagggcattcttgtgtatttgtttttaaccaataaagcactttattaattcagctcctctgaaatatattgattgcttttctttgggattccaggctgggtttgttttttttaaatgcccacctcatagctgtgaatgagttgctacaaatgcggttatggaagccctaattattcccatttatgaattggggtccttaatttacaaccccattctatactttttggacatgacgaatcccctttttttcccctatgttccgtttaaatagggaacagtcttccttccctaaattttccaacctttttggggtgtaattccactcccaggcctttccccttgg

SEQ ID NO: 369235 - DNA, 1398 bp, Homo Sapiens; identical to SEQ ID NO: 8007
  misc_feature (108)..(206): n is a, c, g, or t
  misc_feature (395)..(403): n is a, c, g, or t
  misc_feature (556)..(556): n is a, c, g, or t
  misc_feature (678)..(678): n is a, c, g, or t
  misc_feature (683)..(683): n is a, c, g, or t
  misc_feature (822)..(822): n is a, c, g, or t
  misc_feature (953)..(953): n is a, c, g, or t
  misc_feature (962)..(963): n is a, c, g, or t
  misc_feature (965)..(965): n is a, c, g, or t
  misc_feature (982)..(982): n is a, c, g, or t
  misc_feature (1009)..(1009): n is a, c, g, or t
  misc_feature (1032)..(1032): n is a, c, g, or t
  misc_feature (1159)..(1159): n is a, c, g, or t
  misc_feature (1247)..(1247): n is a, c, g, or t
  misc_feature (1261)..(1261): n is a, c, g, or t
  misc_feature (1302)..(1302): n is a, c, g, or t
  misc_feature (1307)..(1307): n is a, c, g, or t
  misc_feature (1358)..(1358): n is a, c, g, or t

SEQ ID NO: 369236 - DNA, 453 bp, Homo Sapiens; identical to SEQ ID NO: 178660

SEQ ID NO: 369237 - DNA, 464 bp, Homo Sapiens
  misc_feature (447)..(447): n is a, c, g, or t
gaaatgttgaatccatactatggcctcttccagtattcaagagatgatatttatacattgcagatcaatcctgattctgcagttaatccggaacatttatcctatttccactttgttggacgaataatgggaatggctgtgtttcatggacattatattgatggtggtttcacattgcctttttataagcaattgcttgggaagtcaattaccttggatgacatggagttagtagatccggatcttcacaacagtttagtgtggatacttgagaatgatattacaggtgttttggaccataccttctgtgttgaacataatgcatatgggtgaaattattcaggcatggaacttaaaccaaatggccaaaagtatccctgttaatggaaggaaaattaaaaaaggattatgtccagggctctatgtggaactgggaggtttttacgnggccttgaggctcattc

SEQ ID NO: 369238 - DNA, 461 bp, Homo Sapiens
  misc_feature (329)..(338): n is a, c, g, or t
aatgacctttcgttttaatctcattcatgatgttgattttttttcaatgtggtgcaatatatacaataaaatttgtcataactattttaagtgtacagttcagtatattacatatgttcataagttgtacaaccatcaccaccatccatcttcagaattattttcatcttatacaattgaaactgtattcattaaacaataactgtctattccctcttttccccagcctctggcaaccaccattctgcttcatgacattgattttattcacttaacatcagattttggggggatgccctctctcctatgtatggtctacacattctgannnnnnnnnnagattgaataaaatttgtaaatcattattttcatttcataagtaaacacctgttggactgcctattatgttcttgggattggggaaggtgctagacattggcctaagtgccaagtgcatctca

SEQ ID NO: 369239 - DNA, 750 bp, Homo Sapiens
  misc_feature (204)..(215): n is a, c, g, or t
  misc_feature (231)..(247): n is a, c, g, or t
  misc_feature (682)..(709): n is a, c, g, or t
gggtacgaatcaaagcacttacatgagggggcaaagtcagagacagctgaggagctgaagaaggtggctcaggagctggaggagaagctaaacattctcaacaataattataagattctgcaggcggaccaagaactgtgaccacagggcagggcagccaccaggagagatatgcctggcaggggccaggacaaaatgcaaacnnnnnnnnnnnnccgagactccatctcnnnnnnnnnnnnnnnnngaatatattgacggaagaatagagaggaagcttgaaggaaccagcaatgagaaggccaggaaaagaaagagctgaaaatggagaaaacccaagagttagaacagttggatacaggagaagaaacagcagctccactacagacccacccccaggttcaattgtcctcccaaaaataaagtctttccctggtgatggtcccctgcccctgtctttccagcatccactcctcccttgtcctcctggggggcatatctcaatcaggcagcggccttcctgatgaagggtcgttggggggggttgtcatgggaaggggtccccccccgggttacccaaagggggggatgttcccctgcttggaaacactgaaagggccaggtggtggagcccctgggcccctgggtccccccaccttaaggacacagggggtcccctcgnnnnnnnnnnnnnnnnnnnnnnnnnnnnggtattgtttgagtaaccccaccccattggaaaaacaggcc

SEQ ID NO: 369240 - DNA, 265 bp, Homo Sapiens
ggatcacgggcagtcccacccagaagatatagatatgtacagcactagaagctgaagtagactgcatgcagagactacacagaaaactacaagatgtgtggcgttgcaaataatgatgaaaataaatcatgtaatgggtaactgatacatagagtattacctaaaccaagtttctcccttacatttccaaatatgccatttgataaattacataagtggttaacacacaaactgtgaatgcagtgtaaacaatattaaatgattg

SEQ ID NO: 369241 - DNA, 809 bp, Homo Sapiens
  misc_feature (66)..(74): n is a, c, g, or t
  misc_feature (346)..(354): n is a, c, g, or t
  misc_feature (511)..(529): n is a, c, g, or t
gggaaatgcagatgtgtaactgagaagtgatttgtgtgtgtgtcttggttgtgattggattctttnnnnnnnnnaactgaaacatttgtcatatactgaacttatatacatcaaaagggattaatacagcgatgccaaaaagtttaatcacggacacacgtccgtttctgtagtccgtatgctctttcattcttggtagagctggtatgtggaatgccatacctctgaccctactacttacctttttactgacagactgcccacactgaaagcttcagtgaatgttcttagtcctgttttcttctgttactgtcaggaaactgagtgatctaatggttctctcacnnnnnnnnngttcttttagtgtactttgaagtatcaaatcttaacttggtttaaacaatacatattcctaacctttgtaaaaaagcaaagattcttcaaaatgacattgaaataaaaagtaagccatacgtattttcttagaagtatagatgtatgtgcgtgtatnnnnnnnnnnnnnnnnnnngagataaacacaatattccttatttcaaattagtatgattcctatttaaagtgatttatatttgagtaaaaagttcaattcttttttgcttttttaaaaatctgatgcttcataattttcattatattattccacatatttttccctgaaagtcttagcataatgtatccattacttagtatatatctaggcaacaacacttagaaatttatgcagtggttaaacctaaaaaaataaagattccctggtgtactggtttaacattttggggttgaatggg

SEQ ID NO: 369242 - DNA, 506 bp, Homo Sapiens
  misc_feature (30)..(30): n is a, c, g, or t
tcccccctatttatgccactaggtttctgngcttttccttggagttctctggagtagatattaattggataccttcatggtaatgaaattatgatggagctgtgttataaattccttatgtccagaggccagtgcggtagcctttgtcccttcatgcctttcaattctgagtgggaggaaaagcaaacatcaaaacagtgcttcagccaaattccatatgtaatgccattgggagagtattgactaaaatatcattcgtcagggaaatatagttgtaatatttttacaggatattcctaggtaaatgaaggagccttcagttgtaaatttcaattaccccaaaatgtatttgctacattttgttgtttgaagtattacctcttaaccttctttgttaatttttttcattttgtcttatatagtccagttttccaagataagctcagtcctttttcaaatgtcacctttttaccaatactttttcattaaattatgaaaactgctcc

SEQ ID NO: 369243 - DNA, 582 bp, Homo Sapiens; identical to SEQ ID NO: 44997

SEQ ID NO: 369244 - DNA, 858 bp, Homo Sapiens; identical to SEQ ID NO: 8140
  misc_feature (705)..(705): n is a, c, g, or t
  misc_feature (825)..(825): n is a, c, g, or t

SEQ ID NO: 369245 - DNA, 138 bp, Homo Sapiens
tagttcacagcctgcggggtgaatgaacccatgtgtgaactgcacagagcaattcatagaaaatgcatagaaatttgtaacactttggtcacatctgtctctagatggtcattgaatttgtttaaagatggatgaaag

SEQ ID NO: 369246 - DNA, 811 bp, Homo Sapiens
agcgggggggcgtcaatccgcagccgccgagtgtgaaagcgacgcacacgcaaggagcgaacgcggccgcccgcagtctcctgagctccccgcgggccgccgcagagccgcggagaaggagccagcgcccggccagacagtctcagcccgccgtcggcgcccgccgcgctcgcgcccggctgctccgaggggattagtgggccgtccgcgcggctcgtcggcgcgggagccatgttgaccgagggacttggcaacgcgtgagacacccgcggcccctcccgaggctccggacccgcggcgagagccggaaggcggctgtggcggcggaggcctgcgctcggaagcgcctcacgtctgccggccgctgagacccggacttgcatccggtcgccgcgggcgtccgcggagcagcttccccccgcgcctctcttcgcctcgcctcgggacccgcggtccccgctcttgctggatttttcaagccacattcaattgataggatgaaaaaatttaagagaaggctatccctcacactccgaggaagtcagactattgatgaatcattgtctgaattggctgaacaaatgactattgaagaaaacagcagcaaggataatgagcctattgtgaagaatggcaggcctccaacgtctcacagtatgcattccttcctccaccagtacacaggatctttcaagaagcccccattgcggagaccacacagtgttattggagggagccttggctccttcattggcaatgcccagaaatggaagcagatagatattggtcattgaacatctacaatgggatc

SEQ ID NO: 369247 - DNA, 154 bp, Homo Sapiens; identical to SEQ ID NO: 8277

SEQ ID NO: 369248 - DNA, 1182 bp, Homo Sapiens
  misc_feature (106)..(118): n is a, c, g, or t
  misc_feature (993)..(993): n is a, c, g, or t
  misc_feature (1013)..(1013): n is a, c, g, or t
aattaggctaggtacgaggctgggtgtcgaatcggcacgagggctttggggcacagtctgatggcgcctttgctggcgccttagtatggttgactccggatggacnnnnnnnnnnnnntttgttttcttgaatgaaatagcaggaagctcctcgggagcatgtgttttgattaaccgcaggtgatggatgctacgagtataatggattaactacctcaatccttacagtaagattggaactaagggcagggactcatgcataagggtatgaatcccagccaggacaagtgagttgaggcttgtgccacaaaaggtttgtccttggggaacaggcaggcctgccaggatcccccccatatcgattgggctgggagggctggccatgaggtccccactttctgctttccttgcccatgtgtcacccctttggcctccagcttgtccctctctcactttctatagctttgttggaccagatggtgaggaaaggaatggcctcttcccttctagagggggctggctggagtgagacctggggcttggcctggaacccaccacacagccccaaagtcaggaagcctggggaaaccagagctgagacctcttcaacagggtttctttgagatcctacacctccattgggccctttttcagtcttcaatgggggcccagttggctctagaaggagaagaggtgaagcaggatcccctgccctgggggagtctgaaggcgcggtccttggactcattcaggccgtctttgtagttgggggagttccactgggcgatcccagcccctccccacccaccctctaatggacctcctcatagaagccccatttcacttttgttttatctacctcttagcaaaacaatagataaattaggtagtggcagctccacttgcttaggttaggggggggaaaaagatttcttttttccaaaggaaaaaaatatttaccttgagaatacttttccaaaaagccgggggggnggaaagggaaaaagaaaaangaaacatgttcggcccgcccttcggccctccaagaaagcttttctaaaacccattcgttttgggcgcgcggggccccagttagggaaagggaaacctggggccatagcttgttttccctaaggaaatccctgggccatgaaataagggcttgggatttcctcccccaat

SEQ ID NO: 369249 - DNA, 743 bp, Homo Sapiens
  misc_feature (642)..(650): n is a, c, g, or t
caagaataaaccatcaaagtcaaataaaggtagtatagatcaatcagtgttaaaagaattaccccctgaactcctggcagaaattgagtccaccatgccactttgtgaacgtgtgaaaatgaacaaacgcaagcgtagcacagttaatgaaaagccaaaatatgctgaaatcagttcagatgaagataatgatagtgatgaagcttttgaatagctggcttcttcactacacagctacctctctacaacactgtgatcacctgtctttgcactagacttgctatacctcgcctgtcttcctactggtccactgaaaaagttcttctcttttatccctatcttccttcttctggagcaagagaattgagcctagccaagaggggtcagcaaccttgtttgacttaaacggcattcagtggaaacagactatgggagatcttcacttgtgtgccaactgacttagtcataatgaccaaaagaagtgggaagaccaccagtgttctactttttccacctagtgtccatagattgaggtgtgacaagcaagggcaggaaggacagatgcatgctgccatttttaaatgtatattgctgatggaagcccttcacctactccaaagtttttaatgttaatttactgannnnnnnnnaattgcgagctcttgagctatgagcagtagactatgaatactgaacaaatctgaaaaaagctttaaaattgaaataaaatatacagcaaactt

SEQ ID NO: 369250 - DNA, 876 bp, Homo Sapiens
agcggggcagtaccggtagctcagtcgagatggaggaagatgcgaccggcagacggcattcgctgggaacgacggatagactgggggctgcggcctagaggtccgggcttggagttcgcctcagacgcggtggagccgccggagtctgagaaggtcttcaggcaccatggaggacaaacgcaacatccagatcatcgagtgggaacacctggacaagaagaagttctacgtgtttggtgtggcaatgacaatgatgatccgtgtcagtgtctacccattcaccctcatccgcacccggttgcaagttcagaaggggaagagcctctaccatgggaccttcgatgccttcatcaagatcctgcgagcagatggtatcactggcctctaccgagggttcctggtcaataccttcaccctcatctctggccagtgttatgtcaccacttatgagctcacccggaagtttgtagctgactacagccagagtaacacagtcaaatcactggtggctggtggctcagcctcccttgtggcccagagcatcacagtgcccattgatgtagtctcccagcacctgatgatgcaacgcaagggtgagaaaatgggccgctttcaggtgcgggggaacccagagggacaaggggtagttgcctttggccaaaccaaggacatcatcaggcagatcctgcaggctgatggacttcgcggcttctatcgaggctatgtggcttcactgcttacctatatcccaaacagtgctgtctggctggcccttctatcacttctatgcaggtaaacagggccaggacagtgggggaggaaggtggatttctaatgggctagagatactgttgcttgtccgtgagagaggaagat

SEQ ID NO: 369251 - DNA, 453 bp, Homo Sapiens
  misc_feature (340)..(340): n is a, c, g, or t
  misc_feature (361)..(361): n is a, c, g, or t
  misc_feature (409)..(409): n is a, c, g, or t
gccgagggcggccagacaaggggtggttcgggtggtggcggtgtcttttttagcgggagacagagcatttaatgagagcaagagctggacagtgtggtcaggaatcgtcccacccaaggaaccagacacatactcggtccttgatggggtttcctgaggctctcatactttctcctgccctggaaaatgccatccaggagctcatctctttgctactgcctctcttccagagcagcacaagaaggaaataaaatggacttgcgggggaaagaagatgcttgtctctcatgtctgtctcttacaggggggcttctgaagattcccacagcctctctggganttgttgccccactttggggtntttgtccgagtaacttcaagtaggattgggcccacgggcagggggttntttgctgagagatcaccaagcgttgttcaatttcaacgatcctt

SEQ ID NO: 369252 - DNA, 834 bp, Homo Sapiens
ggggaggctttcgggacggcggcgggaagatggcggcctccaggaatgggtttgaagccgtggaggcagagggcagcgcagggtgccggggaagctcgggaatggaggtggtgcttcctttggatcctgccgtccccgccccgctgtgccctcacggacccactcttctgtttgtaaaggtgacccaagggaaagaagaaactcggaggttttatgcctgttcagcctgtagagatagaaaagactgtaatttttttcagtgggaagatgaaaagttgtcaggagctagacttgctgcccgagaagctcataaccgaagatgtcagcctcccctgtcccgaacgcagtgtgtggaaaggtacttgaagtttattgagttgcccttgactcagagaaagttttgtcaaacatgtcagcagttgttgttaccagatgactgggggcaacatagtgagcatcaggttctgggtaatgtgtccattacccagttaagaaggcccagtcaactcctttatccactggaaaacaagaagacaaatgcccagtatctgtttgctgatcggagctgtcagttcttggtagacttactttctgccatcggattcagaagagtactgtcgtgttggaacaccaaggttgcatgagctgatcaagttgacagcatcaggtgacaagaagtctaagcattaaaagccttttattggatattggattttccgtattcacagtttttatatgggaagataagcttttgcccttaatataatggtttaaccatcattttcttttaatgggaaagacatgccccttgaaggtatggcagagcactttttt

SEQ ID NO: 369253 - DNA, 927 bp, Homo Sapiens
agatttccatgtattttctgccatttttcatggtctaagattggtcatacattcccaatttactctcagttccagtcaagctggttgctctgaaagtaacccagcttgttgctctaaaatacctcagtagcctgagtgttatactagagatctaaagggttaacaggatagggataagcaaacttgaatggggggtggaattggcagaatggataccagttcctacattcctgaccccactaccataaaacaggatgtttcctgttgcaaagctaatgagaccccacccttcttgtctcagagcaggcaggagctcatctgtcttgttctgccttcctaattaccctggaagggccagaacgaagaacacctgagaatactgaaagtgcctaaaaacccctgctcctacgttgttttcccatttaaagcagactcttcagccagggggcagtgggacctggtcttcagacaaaactccctgagtctaatgtgtgtctaggactagggcacagaaatagagcttaaaatttggggaggataaggagtgtatctactgcttctctctcccctttccccaatcctaccataccctgttcatatctctacactgcaggaaccacttctccagagggcaagaatggaggagggggacctgtccatcatagcaacatgcaaacacaagcaaaacactgaataaagaattgtttggtgattatgtgcagccctactgagcctcatttatatgggctcctagttgatccatggctcgggcttaagatgagtaagatgatgagggtagcgtgccaagcagaaatcacttcagagaaaaatatcttgactttagagttgtggttctcaaatggaggcgattttgccccctaggagaaatctggcaatgtatagagacatttttggttgtcataacta

SEQ ID NO: 369254 - DNA, 821 bp, Homo Sapiens
  misc_feature (174)..(182): n is a, c, g, or t
ggccagggagatccgcgggggctgccaggtttgaagcccgggttccccgccagggggggaccaagcgggagggcccaacccctttaaactccaagcggggggtggccggggccaatggggtagtgccaagcccatcgggcttccgggggatgcccgaaatgggaggtcggggtnnnnnnnnngtggcccggattcctgggatgccccttcaggggaattgttccctcagggatccggagtctctttccgtgccttaatggggatttgaggtctggaggtactcctgcgggggtctgagatctcggggtccaccctgggggggtcggaagcctcggggtccccgcgtgggggtctgagggtatcagagtcccctccgtggggtctgaggtctcgggggtcccccatccccgggatcggaggtccggctccccggagcaggcagggcggtgcgtctggccctgaacagtaacgtggcgcgccagccccaggtggtgtcgggctagggcggcataacggtgccgaaagtccgcacaaagccgtccgctggggtcccgccgcgcccgcgaggcaatgactgtgccccctccccttcctgatcctcagctcaggtgagcccagatgaggcgccgggtagcttctaagtcactaatagaaatagaaggctaattcaggggttaggggccgtcgtcctccttactcccaggacaagagaaaaacccacggcccagcagccagaggcgcggcgaggcgaaatcgggccccctccccgggggctcagctccctccagcctcccgcctcacctacagagaaatcccccgct

SEQ ID NO: 369255 - DNA, 1181 bp, Homo Sapiens
  misc_feature (35)..(35): n is a, c, g, or t
  misc_feature (41)..(41): n is a, c, g, or t
  misc_feature (50)..(50): n is a, c, g, or t
  misc_feature (83)..(83): n is a, c, g, or t
  misc_feature (98)..(98): n is a, c, g, or t
  misc_feature (506)..(663): n is a, c, g, or t
  misc_feature (666)..(667): n is a, c, g, or t
  misc_feature (678)..(690): n is a, c, g, or t
  misc_feature (733)..(825): n is a, c, g, or t
  misc_feature (872)..(903): n is a, c, g, or t
  misc_feature (986)..(1000): n is a, c, g, or t
  misc_feature (1020)..(1051): n is a, c, g, or t
  misc_feature (1058)..(1066): n is a, c, g, or t
gattcaacacccacagccagctgcagggactcganacccanggcttcttnccatcacaaaaacgggtagaaacacattcactngcttccaggggttcntaatctgtgtgtctccttatgactccatttctggtaagctactctgtaactttgatatatgctgtattttctttctttaaaagatttagatgttttttcagcaagctagccatacaaccattgtatctctttctcttcagtatggtttagagcccagatcagttagtaggctttcgttgtcttctctttcaatacatgtacatctttactgtttgaaaagtgttacagctgtcaaagaatcttcatggacctgaagataatttcttgtgaagttgaatgcaagtgtactgtcattcatagtgtttatatcaaaataccaggaatcttcacttttgctaccttgatatagcattgggctatcatgttacaacattgaaatacattgatttattaaaaaatacttttatnnnnnnnnnnnnnnnnnnnnnnnnnnnnnnnnnnnnnnnnnnnnnnnnnnnnnnnnnnnnnnnnnnnnnnnnnnnnnnnnnnnnnnnnnnnnnnnnnnnnnnnnnnnnnnnnnnnnnnnnnnnnnnnnnnnnnnnnnnnnnnnnnnnnnnnnnnnnnnaannggggagggggnnnnnnnnnnnnnaaaaaaaattcttaaaacctttttgggggcgggggcccccccnnnnnnnnnnnnnnnnnnnnnnnnnnnnnnnnnnnnnnnnnnnnnnnnnnnnnnnnnnnnnnnnnnnnnnnnnnnnnnnnnnnnnnnnnnnnncgccccgggggggcccaaccgccgttttttctaaaaaaccccccccnnnnnnnnnnnnnnnnnnnnnnnnnnnnnnnntgtctttaaaccaagggggcccccccgggggtttttttaaaatatatatccccccccgcggcccgccgttggtttttttaaannnnnnnnnnnnnnnaaaaaaatacaccaaaactnnnnnnnnnnnnnnnnnnnnnnnnnnnnnnnnacaaaannnnnnnnntgggaagacatcgtgtttcccccgcgggggggttaacacaacccacctctttgaaacccgggttggaaaataataatctctctccccccccggggggaaaaaacacggcgccaac

SEQ ID NO: 369256 - DNA, 503 bp, Homo Sapiens
  misc_feature (24)..(24): n is a, c, g, or t
  misc_feature (36)..(36): n is a, c, g, or t
  misc_feature (47)..(47): n is a, c, g, or t
  misc_feature (62)..(62): n is a, c, g, or t
  misc_feature (69)..(88): n is a, c, g, or t
ccccaacaacaaaaacggggtagnaaaccacaatcnaccgccctccngggtcccctaaaccngtgtgtnnnnnnnnnnnnnnnnnnnnattcctgtaaagccctacccctgtaaaccttgaataatatgcctgtattttcctttcctttaaaaagatttagatgttttttccagcaagcctagcccatacaacccattgtatcctcctttcctccttcagtatggtttagagccccagatcagttaagtaggctttccgttgtccttcctctttcaatacatgtacatctttactgtttgaaaagtgttacagctgtcaaagaatcttcatggacctgaagataatttcttgtgaagttgaatgcaagtgtactgtcattcatagtgtttatatcaaaataccaggaatcttcacttttgctaccttgatatagcattgggctatcatgttacaacattgaaatacattgatttattaaaaaatacttttataagaaaaaaaa

SEQ ID NO: 369257 - DNA, 473 bp, Homo Sapiens
gcggctttgtcttggatcttgcccttctccatcgctgatgtgatacagctctagaatttcgtgaagttgcatgcaaagttgcatgcagcccgtgggtatgactgtctcaggcccccagctcatttgccaagaggaaaccttaacccccctgagagggtctgcgtttcttctagagctcctacctcagtggtgtgcacagagttggagacacctgagggctggtccacgtctcacctttgccatacgggtcatttcttgatcaaatatatgactggggtcctggtttactcccgcccaccctttcttttaaagtattcttaacatgaaatccacaaaagcggaaacaatgaaccattcttgcactttacagaatcattgtccttagctttagaggttgttaatttcttgtttttaacatgaacagaatgtgtggttctgaaggtgtgtgggggtctcaagaaattgtcctttgg

SEQ ID NO: 369258 - DNA, 397 bp, Homo Sapiens
aaaggcaattctgttttcaaaattggttgctctggaaaggaaggctggggtgagggggcattttacttgcacagaggctgaccctgcctccccctcttcactgacccccatctcccaaggtagaccctcagcccatgtcagtccctgttctgggaggtgctgggctgggccacagcccagggttatgtaggtaattaacctgtccaaccctgagcctcgcctccccacaccagcaacacagtggtctctctgtggtgaccattcacagcataacattctgcttagcctcaaactgaaagcattgcaactgatgtcaaaaccagatgagatcttacagggagagagattgggtgcaatttgcctctttctttgaataaaaagctctttgctcaccctc

SEQ ID NO: 369259 - DNA, 166 bp, Homo Sapiens
aaaaatgaccaatgatgttaataaataactatttatatacacataagctcgggaagtggttcccaagggtggcgcggcagcagcagcaggggcagcgctagccaggcggggactcacagcgggctggacttccgtagaaaattgccgaaccttacaaaaaaagtct

SEQ ID NO: 369260 - DNA, 587 bp, Homo Sapiens
  misc_feature (463)..(472): n is a, c, g, or t
tgacttacggcaggtacgaggctgggtgtcgaattcggcacgaggaggcgcacagaaggcccagttctcaggcgtttttattcttgctgcagttggttaccaaggaagaccccaaagcactggctgttgccttgaactgggacataaagaagacggagactgttcaggaggcctgtgagcgggagctcgccctgcgcctgcagcagacgcagagcttgcattctctccggagcatctcagcaagcaaggcctcaccacctggtgacctgcagaatcctaagcgagccagacaggatcccacatagcagcagcgggaagtgtgccaaggaagctctgtggcgttgtgttattggtagacaccctcagcctcatcatttgactacctatgtactactctaccccctgccttagagcaccttccagagaagctattccaggtctcaacatacgccgttccaccaannnnnnnnnnagccccaccagcttcaggacttctgccaattttgaatgatatagctgcaccaacaatatcccgcctcctctaattacatatgatgttctctgttcaaaagtaattggcagtgatt

SEQ ID NO: 369261 - DNA, 144 bp, Homo Sapiens
actgcgcccggccaatcactgccaattacttttgaacagagaacatcatatgtaattagaggaggcgggatattgttggtgcagctatatcattcaaaattggcagatgagaagctgggaaagaaaagggctccataaccctga

SEQ ID NO: 369262 - DNA, 498 bp, Homo Sapiens
ggctgcgacagccgcgttaacagcgactacgagacggacggcgagggcggcgcgtacacggatggcgagggctacacagacggcgagggggggccctacacggatgtggatgatgagcccccggctccagccctggcccggtcctcggagcccgtgcaggcagatgagtcccagagccctgagggatcgtgggagaatctcggctcatcagggggcccaggtggacagccgccacccccagggacagtggcgacaggacagcatgcgaacctatgaacgggaagccctgaagaaaaagtttacgcgagtccatgatgcggagtcctccgatgaagacggctatgactggggtccggccactgacctgtgacctctcgcaggctgccagctggtccgtcctccttctccctccctggggctgggactcagtttcccatacagaacccacaaccttacctccctccgcctggtctttaataaacagagtattttcgcaaa

SEQ ID NO: 369263 - DNA, 747 bp, Homo Sapiens
  misc_feature (515)..(675): n is a, c, g, or t
  misc_feature (683)..(700): n is a, c, g, or t
tgctgtgtagtgaagtggaaccaggctcaggctgctggtcccaacctcagagccccaccgcagcccagtagggatgcagcacgccccaaagggctcatgtgggccccagatggcaatgccaccattgttgatgtgactccagagccagttattaggaagagcaagctcaccacagaggagtggaactgaggccccccagatgttgcctccggtgtccaagccacagcggtctggctgttgggaagatggcccaggaatggactcataccattggcacattaggctaatcctggttttatgtgaagtcagcaattaagtgttcccactagaactgacctaagccactgattaatatttaatgagggaaggtaggggagaatctagccattttataatgccagaaatctatatatgttatctgatgccatttttctgaagtagcctcacatgtggtccccctgcagttcagcagttaacagatgacttttttagtgtaataaaatgtttatcatctnnnnnnnnnnnnnnnnnnnnnnnnnnnnnnnnnnnnnnnnnnnnnnnnnnnnnnnnnnnnnnnnnnnnnnnnnnnnnnnnnnnnnnnnnnnnnnnnnnnnnnnnnnnnnnnnnnnnnnnnnnnnnnnnnnnnnnnnnnnnnnnnnnnnnnnnnnnnnnnnncctgtggnnnnnnnnnnnnnnnnnnaaaaaaatttttaaacacttttttgtggggcgggggccccccaagga

SEQ ID NO: 369264 - DNA, 462 bp, Homo Sapiens
ggtgtttgatggtgatgtcatatatctgatagattagtttcagtggttctcatttcacttttatacgtaatttcttaaactatattaagatagttgccaggcagtgtacctcaggttgactctgtacatctgaatagtgagtcactagtattttgcttcaagccttctgaaaatataaccatagttacctaagcacacagtgaatagtcacatggtagtacttgtgattagagcatgtaaaacaatgtaattgaaaagtcagcttccatattttgtaggggaaatagaacaccctactttttatctagtgtgaaatatttaatcgaatttttgttgatttatattatgttacctgtgctgaattaggtttggtacttgtgttttgtttgacatattagtaagttgcttttgcttctttctgtcaacttattttttaaataaaattgatctggaaaaattgtt

SEQ ID NO: 369265 - DNA, 321 bp, Homo Sapiens
  misc_feature (30)..(30): n is a, c, g, or t
  misc_feature (42)..(129): n is a, c, g, or t
tcagcccgggcttggtggccataccatagntccccagctacnnnnnnnnnnnnnnnnnnnnnnnnnnnnnnnnnnnnnnnnnnnnnnnnnnnnnnnnnnnnnnnnnnnnnnnnnnnnnnnnnnnnnnnntgacagagccagaccctgtctcaaaaataaagaggattctgagtttgtatagtgagggcttgcagaaattttgaaacttattttgtaagtttacaatgaatttgtacatgatgtgctcatgtcttgggttgagtatcctagacatgattttttcatttgctgcatattaaacatttgttggttgtaaaaaaa

SEQ ID NO: 369266 - DNA, 185 bp, Homo Sapiens; identical to SEQ ID NO: 8780

SEQ ID NO: 369267 - DNA, 1234 bp, Homo Sapiens
  misc_feature (1203)..(1203): n is a, c, g, or t
ggaaagataccataaagcacataagctagatcactacaaggagctgttatcttttttctaatcaagtgtttaaaacactgatggtttttaaagactcacctttttaaatggtacttggagctcctgattcaaattacctagaccccctagagaaataaatggaatatacataaataatcattttcagtggtttatggtgggcaatattgcaatatttgaaatggtaaaaatggaaagaagaacaaaatatgatgagaggtggctgtgaattataaacctcataaaagtgtcataattccattaaggtttaattatattttttcagaaaacagtgatgaattctgtagtccagtgcttgccaatgcaaattgcctattggaatcttcttcctatattttacaaacatcagtggctgaaatagctcagagtaagagctcagcctggtttgaatttaatcatctctttagatcttataaggccagcattaggaaacttgttcacttttcattttcaaaggagcctagttgaagtgctattatgagtgtgggctatggaaagacagcttttcctacactgataaagaaaaaaaatgaggaaattatttcatccccttgtgacatctgtgactttttggatttaataatcttgctgtttttcctctttatgacaaagaatataattgggaggatgaagtgtcttaaaaattgtagagaccagctcactggaatgtttttccatccctgtattcatggcttgactttgtgactgctctacactgcatgtctgacattgcagagtgagttatgttgaggtaaactggttggttgtcattattttgcaatcagcctggtctctcccatgaagatgtcggtgtgcataagcaccaatcatcactgattagaagatcacagcagaatacccttggattagagagaagttcgtaccttgcatttctctgaattctagtctctcataagcactgctttgctggatgattttcactgctttgtgttaatgactttgagcgatctctcacatgatggggttctttagtacatggtaacagccatgtcatcttacacacctagcattgtgaatgctgtagtgacatcctttataggcaccttacagctcaaaacttttgtttcatttcatgccttacttatcaaaaaggcaggaaagtaggtatgatctctaaagaanaacaaacacccctcccaaatacaaaacttgt

SEQ ID NO: 369268 - DNA, 587 bp, Homo Sapiens
agttcatcagaaacaagtttaattcgggaactgtagtttatccaggttccgtgaaggcaattagcactgggcaaagggctgtttgatcagcctagagagagaccgcctttacgcctaaagctccagtcatttgtctctactcccgccgactcgcagcggccacagaagacatcagaactggatgaaaatggccctgcccctgcgacagagcagggcgcttctggcttgcgccttgttatttgtccctccagtggttcctagctgttgtgacgtcaaggctgccattcagagcagagaaaaaggaaaccatggcctctcttcgcatcagtagcccggacaagctgttgtttctcaggcatccaaagcgctttctgtctggcagagctgtgcattccatgcctgggtgacctccagggctgctgtgaagattaaacgaatggacggatgtgtagctcgtggtagcgcctgagctggccctgcatgtcagtgtgctgttctcgctgattatgaaactggcttagcgaggttgggtgatatgcataagagcaaattagcaaaaaagatgagccagaactcaaacacggcct

SEQ ID NO: 369269 - DNA, 1160 bp, Homo Sapiens
  misc_feature (159)..(159): n is a, c, g, or t
  misc_feature (225)..(225): n is a, c, g, or t
  misc_feature (439)..(439): n is a, c, g, or t
  misc_feature (637)..(645): n is a, c, g, or t
  misc_feature (766)..(774): n is a, c, g, or t
  misc_feature (813)..(821): n is a, c, g, or t
aaggacgagagaagatatctgtgctgcccccgggtttttccgctctcggtgggcgggaagttatttcatacgtgcgagaagtgcggcagcagagtggcgcttacaggcgtgcccccggacgggcatggtttcgcgaagtattgtcgttaaaacagccgngtgtgcgggggagatgaggttcttccacatgtggggcgcgcgcggaaaacaactgggccggacatntaaatatgcggccaacaccactgcgcgttggattaaaacggcagcggaacaccgcgggggcgggggcggggagaaactggttgacaagataatgggggcgcttctgggcacgggtggcgcgcacccccctgcatgggcgggcgagcagagggccgcccccagtgtgacgcgaggccaggccccgctgagagaatactctccctccatcattgangagggggtgtatttgtgttctctcaaagaccaggcgaccgcgggtttttgtcccacccccgcggggccgctgtattttgtctgttgcggggggggaagatggtcaccgggcgcgcctgcatttgcggtgaaaaccggggggggttccctttagggagcggcagcgacaattgccccaacttggtcctcttgccctacnnnnnnnnncgcggggcgcgccagaacgggaggtgttctaaaaaaatatctttctaagaagccggagggcggccccacacagggggggcgtgtctattagttgtcgggctgggatcaagcggggtacgannnnnnnnnctaccggtagttcacgtaatattgacatatgttgctccnnnnnnnnncgttctggtcatcttagttttattgtagtgagtagtatttttaattttcttgaaaggcacccaagaataattacttttgtgaaccaaaactatataaaactgtacagaataaatatttcatagaaatctaactatgccttcttgtaaaataaagctacattgtccctctcttgaggcaacttaaaccacttacctttagaagtgccttttgctactgatttatggcatctatcaatgtacatcaataaaaataaaataatttttcctatttactttacaactgtgaattacttgccacaagaaatgtatttctattatggtcattcagatttacaaaga

SEQ ID NO: 369270 - DNA, 432 bp, Homo Sapiens
  misc_feature (27)..(27): n is a, c, g, or t
  misc_feature (46)..(46): n is a, c, g, or t
  misc_feature (87)..(87): n is a, c, g, or t
accctttaaaggccaaaaaaatgtggnaaaaacctttagatacagntccagccccttaaagtgcacctgagaaaacatatgcagtgntatacccctaagagtcctgaggagtgtgggaagtgccttcgtgtgtggctcaaacattgttgaacatcggggaatttatgctggtaggaaactttcaaatgtgaagaatattggcaggtctattctcatcttataattcataatataactcagaaaacataagaatattcctttgtcatttataggtttgtaataccaatatttatactggtggaccattcagaaaaagtgggaaacgttattacttaatggttacagcactgacagcatgaacttttatatgatgcatttattctaatgtgattgtatgaacaagtgaataaaaaaccttggacctcctaaacc

SEQ ID NO: 369271 - DNA, 922 bp, Homo Sapiens; identical to SEQ ID NO: 8859
  misc_feature (49)..(49): n is a, c, g, or t
  misc_feature (266)..(267): n is a, c, g, or t
  misc_feature (483)..(733): n is a, c, g, or t

SEQ ID NO: 369272 - DNA, 812 bp, Homo Sapiens; identical to SEQ ID NO: 264031

SEQ ID NO: 369273 - DNA, 438 bp, Homo Sapiens; identical to SEQ ID NO: 262111
  misc_feature (54)..(94): n is a, c, g, or t

SEQ ID NO: 369274 - DNA, 728 bp, Homo Sapiens
ggatggttgtaaagtagatagatcattggttcaaccattttagtgtttttgccagattgtcaatgaaaccatcatactgaccttttcctccaaaattgccaaattgactgaactggttgggtgtttgtaaagatgacgttaactgtgtgactaaaaagtcagatggttgccatattgtttggaatatgttgaatgtcagtgtatgccttatgtctttaattgggtatgcaaaaaaaatttttacttaagtagattaaaattttaacctctagcatgaaaacccagcaccaacactgaaagactccattcacgttgaagtagcctcaaacagtaatttactttttgataataggctgttgtttttcttaaataagcttaaaacaattctatctgaaattggtagcatgggttcacttggctacaactgagcaaaatagatgcaactttcttttaatggggtgctgcctctttaggactgactgtactatccactgacactggtttggcagttggtactgctgaacatttttatacatgctaccatgaagctatatatgttagtattgaagaagctaacgggtatactatcatttttgatgtgtgggctgattataatttcctgtatttcctgtacattgggatgaaactactttagcaaagtccacagattcagaaaaccagacggtagtgtttcgaagtcgaaaccagcaaacaacacacaacatcta

SEQ ID NO: 369275 - DNA, 279 bp, Homo Sapiens; identical to SEQ ID NO: 8952

SEQ ID NO: 369276 - DNA, 950 bp, Homo Sapiens
ggcctgggtggcgaattccgcacgaggctcccttcccccactcctgccactccaacgacaccaactggccaacagccaaccaccccgcagacgccccagcccacttctcagcctcagcctacccctcccaatagcatgccaccctacttgcccaggactcaagctgctggccctgtgtcccagggtaaggcagcaggccaggtgacccctccaacccctcctcagactgctcagccaccccttccagggcccccacctgcagcagtggaaatggcaatgcagattcagagagcagcggagacgcagcgccagatggcccacgtgcaaatttttcaaaggccaatccaacaccagatgcccccgatgactcccatggcccccatgggtatgaaacccaactcccatgaccagaggccccagtgggcatttggagccagggaagggaccgacagggatgcagcaacagccaccctggagccaaggaggattgcctcagccccagcaactacagtctgggatgccaaggccagccatgatgtcagtggcccagcatggtcaacctttgaacatggctccacaaccaggattgggccaggtaggtatcagcccactcaaaccaggcactggggctcaacaagccttaccaaaaccttttgccggatctcagggcctcccactctcccctggagcaccaacaggtggttagaatccttcccgccaccccccaactggtgggcggcattcatccaggaaggggctgcccaagtaatggccacttctaatcccccaaccccattctcgggggcacccctggtcatgccccacgggggacgccaggggttacagccccccccaacccgtggccgggctcccaggggggggtcccattcccagctgcgggccatgtgcccaaaaatgaaattcccactggcaaggcggggcgcgttcca

SEQ ID NO: 369277 - DNA, 1320 bp, Homo Sapiens
ggcctgggtggcgaattcggcacgaggcttccattgccatcctcctgaccagaagatacccaagcccaagcgactgcaggaatggtacaaaaaaatgcttgacaaggctgtatcagagcgtattgtccatgactacaaggatatttttaaacaagctactgaagatagattaacaagtgcaaaggaattgccttatttcgagggtgatttctggcccaatgttctggaagaaagcattaaggaactggaacaggaggaagaagagagaaaacgagaggaaaacaccagcaatgaaagcacagatgtgaccaagggagacagcaaaaatgctaaaaagaagaataataagaaaaccagcaaaaataagagcagcctgagtaggggcaacaagaagaaacccgggatgcccaatgtatctaacgacctctcacagaaactatatgccaccatggagaagcataaagaggtcttctttgtgatccgcctcattgctggccctgctgccaactccctgcctcccattgttgatcctgatcctctcatcccctgcgatctgatggatggtcgggatgcgtttctcacgctggcaagggacaagcacctggagttctcttcactccgaagagcccagtggtccaccatgtgcatgctggtggagctgcacacgcagagccaggaccgctttgtctacacctgcaatgaatgcaagcaccatgtggagacacgctggcactgtactgtctgtgaggattatgacttgtgtatcacctgctataacactaaaaaccatgaccacaaaatggagaaactaggccttggcttagatgatgagagcaacaaccagcaggctgcagccacccagaagcccaggcgattctcgccgcctgagtatccagcgctgcatccagtctctggtccatgcttgccagtgtcggaatgccaattgctcactgccatcctgccagaagatgaagcgggttgtgcagcataccaagggttgcaaacggaaaaccaatggcgggtgccccatctgcaagcagctcattgccctctgctgctaccatgccaagcactgccaggagaacaaatgcccggtgccgttctgcctaaacatcaagcagaagctccggcagcaacagctgcagcaccgactacagcaggcccaaatgcttcgcaggaggatggccagcatgcagcggactggtgtggttgggcagcaacagggcctcccttcccccactcctgccactccaacgacaccaactgaacaacagccaaccaccccgcagacgccacagcccacttctcagcaggctgctt

SEQ ID NO: 369278 - DNA, 459 bp, Homo Sapiens; identical to SEQ ID NO: 92642

SEQ ID NO: 369279 - DNA, 1358 bp, Homo Sapiens
  misc_feature (44)..(61): n is a, c, g, or t
  misc_feature (1263)..(1263): n is a, c, g, or t
ggcctgggtggcgaattcggcacgaggagagaactagtctcgannnnnnnnnnnnnnnnnngttttcaagttctgctttattattaaagtggtaatcccttgatatttacagagcaggcacctcggtgccaaggaccaggccatgcccgttctggtctgggaggcagaacctggggttgggtgagccacggggtctgcaggttgcatccgagacccccaggtcctattcttccaccccgtaacaaaaccagaaacctccccaaggcagaacgccaaaggccaggtgtcacccacaccccagcagttccccttagcgccagatggggctccctgagccctgtggctgaagtggggaacacggccatggggcttgtgtggactgaattctcatgtggctgcagccctttctgtagtacagactggggttgttaacataactcatggtgcctgcagccccttcatggggggggcccctgtctcctcacctccacaaccaccattatgctcccccatgatgtactcgcgccccacaaccacctcgggacttccctctcccaactagtggcctcacaatcacttattacctcccccaccttcccaacctatataacgccacccctatctatctgcttacctccctttcgcatatcaaccttacaactcccacactacgcttcatactattatatctatcctaccacacttactcaccaaccctcttcccccctactaccaatcagtaacaggacccaattaacacctctactataagccattccgtagcaccgcccctctcctaccttataagtgccacccctctcctcacttacatcatccctacacatactaacaaacatcgattacgctaatcccaattacgatgtatcactcacaagacccctcgtcctatatactgtccggaaatcccactaccctcgcacgcatcaaccgctccccggatcacccgccaccaccccatccggtcttctaactcaacctctagttctccataagtacccacactgacccctctaccttaagcttcatttcgcatctccagaccccagtacattctactcaccctccgatcccatctactacaatctaccatatccccccctcacaaccctccacaatctctagcattactcagttacacacactacagacattgacgtgacgtgtatgagcagcacgactgaatataacatatacgataacaacgaacgcggatagatcgtagtccgcgacccactcatgggncacacttagtccgcgcacgcggcttagcgatactcgccccgtcggaacgatagcgcgccccgacgagccggcgattcagcccctcaccctatgca

SEQ ID NO: 369280 - DNA, 1234 bp, Homo Sapiens
  misc_feature (766)..(774): n is a, c, g, or t
  misc_feature (859)..(859): n is a, c, g, or t
  misc_feature (960)..(960): n is a, c, g, or t
  misc_feature (1080)..(1080): n is a, c, g, or t
  misc_feature (1127)..(1127): n is a, c, g, or t
ggggggcaccagcaggacccgaggccaggagccaggggcccagaagattgagcttctagagcctcagagatggaattcgccgttttgccgcgatttggcgttaacttattgacccatggggaggagggtcacttcccgtgaaaagaaggcagagatgttttgctgtgcccagtgtgaggaagcgaaggaaaagaaagatctttggaaaaggtgcacatctacttgcagcttgaaaattccaagcgccagacatttttctctggaggaaacaaatggcttcaatttattcgccttacgcgcgcgacgggccactgaacgcgggggggcactgggtcgtgaacactctcacccccgcaattgtccgcgggccgggttggttgcggcactcccccggccgtcgcgaaccgctagcgcctattctccagtggtcttagtggcggagcccgcaggccccacctcagtctgacgatgcggcgctggctgctacactgccgcctggacccccccaccggaccaaggaggggcgtgtccgtgaggggagcgcgggggagcgataagggggctctccgcgccggtggcgcgaagccgctgctgccgggccgtgctcgcgcgtctctatcgcgcgcctcgggcgggcgtgttccgccccgcccccctcttgtatctagtgcctcaccttctagtctcctgcttgccgcatcatgggagcgcgcgccctgcgaaggtctcggagtgtggttgccgaaccctctcccttccgcggggnnnnnnnnngcgcgggatatgccccctgcgagcggcgcgcgcagggcacccgagctcgctgacagcgacagccgccatgtgtggtagagccganacagtgcccggcacgagcgtgagagagatgatgccgcgtcacgccgatcttctgcgggcgaaacgtggtcctacacacacgcgcggatgccggctgtgcgncggcgctccaccagacgtccggccactgacgtcgccgcccgtctcgtgcgcttccggcgccacaccacgcggcgagtgaccgacggtcactacggcgcccggctctggcgtcgggtactnctgcggagtgactcgcgcgccccgcgcgactcgtgcgcgtgtgcctnggccgacgcgcgaccagagcgcagatccgctgtcacgctacacgtaacgctgctcgttcacccctcgctgcccgtaacgagttagaatcgactgcgctccgaccacc

SEQ ID NO: 369281 - DNA, 523 bp, Homo Sapiens
  misc_feature (413)..(413): n is a, c, g, or t
  misc_feature (438)..(438): n is a, c, g, or t
  misc_feature (450)..(450): n is a, c, g, or t
  misc_feature (482)..(482): n is a, c, g, or t
  misc_feature (496)..(496): n is a, c, g, or t
  misc_feature (505)..(505): n is a, c, g, or t
tcatttctactgcaataggagtaacttcttcactatattcacagatcattttctgaattacattggtaaggtcatcattttctgtttctcttataatgtgaagaagagcctgcattacaggtctgatgaatggtgtgatatattctttagctttttcttgattgctgatcaatacttgaagggcaatgacagcttccactttcacaggcatttctctatcatcaatcagacatcttcttgttagctctaaggctgtttgaaggttctgatcacttttgaacttcacttcacaaaaatagtgaagtacccagcaagcccttgctctcatgtaggcctagttcactgctggaagagaggggaatacatggattctggcaacatgtattccatctgatctttataggatctttttncttcagaaggtattttcaggctaangagcccatcctntggcggggttccatcttttttttcgaggggtncggctttggggtcngtaggaatnggggtaaccaaaatccca

SEQ ID NO: 369282 - DNA, 329 bp, Homo Sapiens
  misc_feature (49)..(49): n is a, c, g, or t
  misc_feature (54)..(54): n is a, c, g, or t
agcccacttgggagccagacagcagccgttgttaggtactgaagggttnttccntccctactgttaacccattgaagctgctagtcattggcaatcattttaaaccaaaaagctgctggataacatttgtcattcatattctttgcaagcattactttagcattttagcatgtttggggtcataaacagaggaagtatcagttattgatatctacttctattggagtccatgttgcatttcttgtgaactataaatggtgcttctcattttctgataatttttctcttgctaaataaatgtattaaaagatattttcataatgccaacc

SEQ ID NO: 369283 - DNA, 471 bp, Homo Sapiens
gaaaatcttcactttcttaagcaacaatggatattgcctgtgtttgccactgtgtttccctgcctctcaattcgctgaaaaaggaactacctatccttacatttcacctactaatgtctcttctaacatcttagaggtccatggagaaggcatatggagaacatgttttatactgctctataaatagtattccaatcactgtgcttaatttaaatagcattatcttatcatttatcagccttttatgtattttccaagtaaaatattaacatattacttcattggtcttcttttttatctggttctatatgaaagctattttttcccttctcttctaacatgaaatataatttctcttttagatcttgtgctatgaaacaatcttccaaagaactgtataaggtggtcataagtgaatattttaattaaaattggtaaaaataaataataacagtaataatcatgcactat

SEQ ID NO: 369284 - DNA, 422 bp, Homo Sapiens
  misc_feature (72)..(72): n is a, c, g, or t
  misc_feature (94)..(94): n is a, c, g, or t
acggggccttggaagcatgagaccagtgacccccgaagttttgccccatatcaggacaagtggctccttctnactcccctttctcaaggcccanggaagggcgagggccaaacgggtgccacagccccaggtcgggagtggcccagccggcaggcttgttcttcagcatccgacgggaacatctccaacagaagcaaaacggaaagtgcctcccggacccccagagggccacccaacctcaccagtcaccagccccagaccacccacagcccctcccagacaccccgcctcatctggaaatagttccgtttgtttctctaaaaagacttgtaggtgggaaaaaaaatcttttgttctcatggaattgcctattggcaagatcgcatgtttttttaataaacgttgtattttagaataatctt

SEQ ID NO: 369285 - DNA, 286 bp, Homo Sapiens
catgggagaagattgcgcattgaagcaaaggaacgagtgaagtctgtatttcatgccagagagtttggaaaaataattaacttcaagaccccagaggatgccaggtggatcctcacaaagctacaagaagcaagagaaccttctccgagcctctgacagagaacactgcctgaagacacacagcaataagtgattacagctcctagactaccttccaaaacctgtttgggaagcatattacagaaatgatttcaagtaccctgtattctggatgctaaaaaacaaa

SEQ ID NO: 369286 - DNA, 858 bp, Homo Sapiens
cggtccggaattcccgcggatctaaattccaaagggatccgctgctccctgcagccagggtcccagggtgggaatgccattcacttcctccctccaggaatggaccactccctgagtccctgaaatcctgagtgggaaaagggaggaactctgccctcaggggaaatcagcccctacccccggagaagcacaaacaaaattctaccaagagtggggtggtgggtgggaggaagtgagagccatgactcaggacaaggcagtcacgagggccgggaggggttggccctggctctagcctcagagtcagggctctggagttccactgtcttcaccatctgcggagtcctggtgaaaggacctcggctttcccagctgagtgccacggcttccgatgtctatgccctgtgactcttgtgtggctgtcacagtcagccccacctgaaaaactaagccctcctgagtgagcagcctgtgaccatgctgtacccagtgaagctgaagcttgccgtctctcagggcccaggcaagcgcctttgggaaactctcaagcgtgagcaccgggaaacacacaggagtgttcactgcggtgggatttgtgataagaaaaacgtccgacagaagagcagataaacaagctttggcatacttgctccgctccagtgaaaatgaataaacagcatctacatgtatcaacaggaataaatttcaaaaacacagtgctgagcgaaagggcaatgtgtagaagcggacacccatattatataaccacttagagacttttttaagtatgcaaagcattatcatttctttgtcacttgggggaaatgtaaatgtggaagtaaaatattaaggacgtgc

SEQ ID NO: 369287 - DNA, 417 bp, Homo Sapiens
  misc_feature (46)..(46): n is a, c, g, or t
  misc_feature (104)..(104): n is a, c, g, or t
aaaataaaaggcccaggaaagcccccaaggaataaaacctccccantttaattacatcagcctggcctgtgatcatgtagccctaaggtaggcccagagttaanttttgtgttatcctataccacgttattgaagcgaattataaaatgttttagcatgttaattacttgtaaattaatatctacatataaaaatgtgagcatatattctatttagtatattaatccttcataaacaagtaatgcaagttagtattaatgatatcttaagacttaacattccttttttagtttgtgttgaataaatgaacatctaagagttcatgatgatgcttaaggaaagaagcctcatgtttacctttggaagttgtaaggcactgactcataaaaattggcaaataaaaggaaagaatcgggc

SEQ ID NO: 369288 - DNA, 733 bp, Homo Sapiens
  misc_feature (195)..(278): n is a, c, g, or t
  misc_feature (303)..(316): n is a, c, g, or t
  misc_feature (349)..(358): n is a, c, g, or t
agtgctgacaaaataaaatactcatttttgcataaaaaggttcctaatccttttgcagaataagttttgtttactctttataccaaaattcagtgaaggcattctacaagttttgagttagcattacattttaatatttactattgctacattgtataattgagtttgaaataaaacccagcttatgacaatgcnnnnnnnnnnnnnnnnnnnnnnnnnnnnnnnnnnnnnnnnnnnnnnnnnnnnnnnnnnnnnnnnnnnnnnnnnnnnnnnnnnnngaaagtgaacatgcgtcaaacctgnnnnnnnnnnnnnncctggtcctgactagccgcttggattaataacnnnnnnnnnncgccctggtggcaaccgacccggtgaagaacaagtccaggatggagttctggaggtccttactgagatctatcaaccggagtccatgcgaggctccaaaacaaataacgccggggggctgacactcatcttctgaactgtatgcacatgggttaccacgtaggtgccgaaaatggaatattcatccccaaacccggccgaatgaaacctggaatcgtgtagagagtctcctacacccttgcttgcccttgcggaataatattctcccccctggaagaaaaacaccgcggatatagacaattgtccccatatgggcccttgggcgccaaatggaaaaccgggagggggcctccagccccgggaattcggccggcgg

SEQ ID NO: 369289 - DNA, 665 bp, Homo Sapiens
  misc_feature (88)..(105): n is a, c, g, or t
  misc_feature (114)..(165): n is a, c, g, or t
  misc_feature (172)..(192): n is a, c, g, or t
  misc_feature (219)..(219): n is a, c, g, or t
  misc_feature (222)..(222): n is a, c, g, or t
  misc_feature (250)..(250): n is a, c, g, or t
  misc_feature (260)..(267): n is a, c, g, or t
  misc_feature (275)..(275): n is a, c, g, or t
  misc_feature (279)..(280): n is a, c, g, or t
  misc_feature (284)..(284): n is a, c, g, or t
  misc_feature (286)..(418): n is a, c, g, or t
aaacccagacgggaagtccggcgccccgcgcggcgatattttcgtagggggggagggtggaacaaaagacaaaaaagatggcatattnnnnnnnnnnnnnnnnnnaaaagggannnnnnnnnnnnnnnnnnnnnnnnnnnnnnnnnnnnnnnnnnnnnnnnnnnnttatggnnnnnnnnnnnnnnnnnnnnntggggagcgccgccccgcaccgcgcgnttnggggtttgtgttttggtttttggggttntggggttttnnnnnnnntttttttntttnntttntnnnnnnnnnnnnnnnnnnnnnnnnnnnnnnnnnnnnnnnnnnnnnnnnnnnnnnnnnnnnnnnnnnnnnnnnnnnnnnnnnnnnnnnnnnnnnnnnnnnnnnnnnnnnnnnnnnnnnnnnnnnnnnnnnnnnncaaagtacaacaacttttaatacaccattaatactaatgattaaaaattattgcatagtcttatgcatttaccctaaaacattttctgaaagcaaacgaattatataaaagacaaataaccctttaaaatgtggatggcctttactacctcgatcttctatccttttttgtcttttcagtacttttgtccattgttttctcattatctcccctgcactttgggcaataccatttccccttggtttat

SEQ ID NO: 369290 - DNA, 653 bp, Homo Sapiens
  misc_feature (28)..(28): n is a, c, g, or t
  misc_feature (44)..(44): n is a, c, g, or t
  misc_feature (123)..(123): n is a, c, g, or t
  misc_feature (159)..(159): n is a, c, g, or t
  misc_feature (169)..(169): n is a, c, g, or t
  misc_feature (177)..(177): n is a, c, g, or t
agctcacccgtgtaaaatgtagacgttncccaagaagcaaccancctagctcccactgccccttgagggatggaactggggtaagggcaggagcccagttattattgcccacagtgttttccnaatgaacccatttggcctgtagaagaggaatagtantttttttaanagttgtanttgaatgattccagcttatcgtaaatactaaactgaatggcttttatatttttaactgctgttaaatgttattttagcatttattagttgtttattatttaattcttcaaatagtcatatgaaaacatatatttgataaaggtcaattgttagatgataatgtgccattcattatcataggaatgtccttgcccatatataaaacatgctggcatgtattttacttgttaataaagttgtatagatgtggaagtgtgaacctgtgatgcatccttttcaaaatcagtttaagattcgcatattatcatgactgtgacctcactaaactgtttatgtgacaaacctttcaagattggagatgaaaacaacacttgtgaaattaggttggggttgcaacatcttttaacttctcagttatttgtatgtcaggagacagattgtggtttaattttaataaacaaaatatcatctttttg

SEQ ID NO: 369291 - DNA, 420 bp, Homo Sapiens
gtggtttaataatttaaaatcccctccaaaaaagtccatatgaaaaaccatatatttgaataaagggtccaattggttaagatgaataatgtgccccattccattatccataggaatgtccctggcccccatatataaaacatgctggcatgtattttaccttgttaataaagttgtatagatgtggaagtgtgaacctgtgatgcatcccttttccaaaatcagtttaagattcgcatattatcatgactgtgacctcactaaactgtttatgtgacaaacctttcaagattggagatgaaaacaacacttgtgaaattaggttggggttgcaacatcttttaacttctcagttatttgtatgtcaggagacagattgtggtttaattttaataaacaaaatatcatctttttgaaaat

SEQ ID NO: 369292 - DNA, 525 bp, Homo Sapiens
tgtgagccactgcacccggccgggaatttatcaaaggggggactacttagatttggggcttcaaacctgagtctagcacaatgcagctggaggccagggctactcctacaaacccaagttctgactccttccagggaagtatcagcttaagaaacttgatcaggaaagtgacactggtctttcaaagagccctctttaccctcccatccctgccctccacactgcaagctgcattccagccacaacgcccttttctaaatctattttcattcatctcctattctggtctgtagccttgattccaaccattgaatgcacggagacagcccagtggcttgtcagattggtaaataatgacacctggtggataaatgttacattctagaagactattctggtcagcctaggtctgaaacactaaggagacttggcctgagatagggccatccaacttgcctacaggcactctgcttttattattaaaaatagtcactttgttactataataaaatttaacagaaaaaa

SEQ ID NO: 369293 - DNA, 512 bp, Homo Sapiens
tatattaaaaagctatttattttggtgagttattccaagagttgtatacagctttattttttggaattgcaatattaaagttgcacgttggatttaactctcatggactttagtaataccctacagaggtgagcctaatggatggtaacatggagtagggactgccagagacccctagttttgtcccccactcccatccttcaaataattttggtccccttaggtcctgtgatacaaaggcataaaacaattccctatcttgaagcccttgagaaaagctgttacatatacgcagatagtagcaagacagaaaatgcaaatatgtaaatgtcttctgatatcttgaaataaagataaatttcagttaaacttgtataagttcagatttctgttaatgagaaattacaaccctacaaggtaaggtctttacattttagttattaagcagaatcaatgcttaaaactatagttaatacttagtggaaagaaaatttaatccatgtatcagcata

SEQ ID NO: 369294 - DNA, 835 bp, Homo Sapiens
  misc_feature (274)..(361): n is a, c, g, or t
  misc_feature (370)..(382): n is a, c, g, or t
  misc_feature (496)..(504): n is a, c, g, or t
cattaaatgtattgtatatattttccttaaaatgtcttcattggctgaatgattcctatccgtagtaatattttaggtacttgttggatttttaaaggaagattatttattttcagatttgctgctataattgaaaacctagtaactggtcctgttgattgtgccttcatcactgtttctctgtgccacgaccgttcatgtgtatttgaaataaagaagtttaaaaagccatgttgaattcaagattccttctaataaaaataggtgaaacttnnnnnnnnnnnnnnnnnnnnnnnnnnnnnnnnnnnnnnnnnnnnnnnnnnnnnnnnnnnnnnnnnnnnnnnnnnnnnnnnnnnnnnnnctttgccgnnnnnnnnnnnnntcaaaaatttttcaaaaccatccttgggggcggcggccccagaaagaaagggaacttggccatagttgttcccaagaaaaccccggcgctagataagggctgggcttcccaccnnnnnnnnncgccggggggaaccggagctcttgaaaaaaccccatagggtgttccgaggggccgtccggggcatctaccaacgggaagccaggcggcgccgcaattactatttacccccgcccctgggacattaagccaaagagtggggttgacactctctccaaaccatttttgccagaaataggaaacccccctcctaaaaaccgtgtcttcacgccaccccctctttttcccgcacgcgcggttatcccggcacgctcccttgcccggcccctgcggccactgcctacgcgttgtctgggaccccacgtgggatacaaaaaaacgtggcggcactcc

SEQ ID NO: 369295 - DNA, 231 bp, Homo Sapiens
gggattgttcaggtctctacttgaatgtttaccacttctgagtgtatctcatgattgacttcacagaagtaaattcttgtgggatgttttattgagacagcagatcactaaatctcagttagtcactgtgtgcccagtattctgcagacaaacgagaagatgagaagatgtgtgatcatttgataagagcagcaaaatatcgtgaccacgtgacagcaactcaactaatcc

SEQ ID NO: 369296 - DNA, 284 bp, Homo Sapiens
ggtaggaatagatctatagttgtacatgaattcctgttaggaatactctgaatgagcttaacccacttgccaaatatccttgtcccttccatcattttatttttgagatggggtccttgcagtgttgccccaggctggacctcaaactctggggcttaatcatccttcctgagtagcctgggactacataaaggcccaaagtataattgcttttgatttttaaaatcttcttgcccatcatttttataaaaataaagctgtttgtccaacacggtgaaacctca

SEQ ID NO: 369297 - DNA, 432 bp, Homo Sapiens
  misc_feature (16)..(16): n is a, c, g, or t
  misc_feature (70)..(70): n is a, c, g, or t
agaaagtgtgaaaaancctaattgtgggaatgcaccaggtttcacccagatcagatgatgtctggttatnctgtaaattatagttcttatcccagaaattactgcctccaccatccctaatatcttctaattggtatcatataatgacccactcttcttatgttatccaaacagttatgtggcatttagtaatggaatgtacatggaatttcccactgacttacctttctgtccttgggaagcttaaactctgaatcttctcatctgtaaaatgtgaattaaagtatctacctaactgagttgtgattgtagtgaaagaaaggcaatatatttaaatcttgaatttagcaagcccacgctcgatttttatgtcctttcctcttgccttgtattgagtttaagatctctactgattaaaactcttttgctatc

SEQ ID NO: 369298 - DNA, 713 bp, Homo Sapiens; identical to SEQ ID NO: 178746
  misc_feature (185)..(346): n is a, c, g, or t
  misc_feature (352)..(367): n is a, c, g, or t
  misc_feature (392)..(402): n is a, c, g, or t
  misc_feature (406)..(572): n is a, c, g, or t
  misc_feature (587)..(607): n is a, c, g, or t
  misc_feature (638)..(668): n is a, c, g, or t

SEQ ID NO: 369299 - DNA, 617 bp, Homo Sapiens
  misc_feature (586)..(586): n is a, c, g, or t
cagcgtctggcagaagtgtgatggagaattccagcatttcttcacattctttttccaggtgtacaaaggtagcatcatggagatatatcgtcaagagttggtctaagacacgaactacaatgcaaacctttttcctggtacctagagaatatatatcctgattctcaaattccacgtcactatttctcattgggagagatacgaaatgtggaaacgaatcagtgtctagataacatggctagaaaagagaatgaaaaagttggaatttttaattgccatggtatggggggtaatcaggttttctcttatactgccaacaaagaaattagaacagatgacctttgcttggatgtttccaaacttaatggcccagttacaatgctcaaatgccaccacctaaaaggcaaccaactctgggagtatgacccagtgaaattaaccctgcagcatgtgaacagtaatcagtgcctggataaagccacagaagaggatagccaggtgcccagcattagagactgcaatggaagtcggtcccagcagtggcttcttcgaaacgtcaccctgccagaaatattctgagaccacnacattttatatggaataaatccaaaacctgt

SEQ ID NO: 369300 - DNA, 446 bp, Homo Sapiens
  misc_feature (24)..(24): n is a, c, g, or t
  misc_feature (50)..(50): n is a, c, g, or t
ggggaaccgaactcccaatggcantctcctaaagctggggcaccctggcnaaccctcctctgtggctttaaccccaggcactgaataactgttccacatgctgccagggttaaatttccactgggtccatactccccagagttggttgcccttttaaggtggtggcatttgagcattgtaactgggccattaagtttggaaacatcccaagcaaaggtcatctgttcctaatttctttgttggcagtataagagaaaacctgattaccccccataccatggcaattaaaaattccaactttttcattctcttttctagccatgttatctagacactgattcgtttccacatttcgtatctctcccaatgagaaatagtgacgtggaatttgagaatcaggatatatattctctaggtaccaggaaaaaggtttgcattgtagtttg

SEQ ID NO: 369301 - DNA, 1433 bp, Homo Sapiens
ggcctacttccctcctgggatcatgactcaatatggaagggtgattcgtcaacccgtgggcaggattttctttgcgggcacagagactgccacaaagtggagcggctacatggaaggggcagttgaggctggagaacgagcagctagggaggtcttaaatggtctcgggaaggtgaccgagaaagacatctgggtacaagaacctgaatcaaaggacgttccagcggtagaaatcacccacaccttctgggaaaggaacctgccctctgtttctggcctgctgaagatcattggattttccacatcagtaactgccctggggtttgtgctgtacaaatacaagctcctgccacggtcttgaagttctgttcttatgctctctgctcactggttttcaataccaccaagaggaaaatattgacaagtttaaaggctgtgtcattgggccatgtttaagtgtactggacttaactacctttggcgttaattccaatcattgttaaagtaaaaacaattcaaagaatcacctaattaatttcagtaagatcaagctccatcttatttgtcagtgtagatcaactcatgttaattgatagaataaagccttgtgatcactttctgaaattcacaaagttaaacgtgatgtgctcatcagaaacaatttctgtgtcctgtttttattcccttcaatgcaaaatacatgatgatttcagaaacaaagcatttgactttctgtctgtggaggtggagtagcgtgaaggcccagaactgtaactgtccgtatttcttcccttaggcaatggtgaactgtcattacaagagcctagaggctcacagcctcctggaaggaagcagcctccactttggatcaggaaatagtaaaggaaagcagtgttgggggtagcggcatgcagaccctcagaccagaatggggacatcttgtggtctgctgcctcaggaatctcctgaccacttgtagtccctccgacttctctagacatctagtctcagtgctagcttatttgtatttttcctctttcacttcttatggaggagagtgtttaactgagttagaatgttgaaactgacttgctgtgacttatgtgcagctttccagttgagcagaggaaaatagtggcaggactgtcccccaaggagggactccctgcttagccctgtggggagaccaactacgactgggcatcttctcttcccccctggaagggcacttacaacaccaatggatcccttgctcagttgtaaaatttctattttcaaccttccggaaaaacccgccagttttcctttcaaaattttttcccctttgaaccctaaaatattcaaacctaacccttcccaaattttaacaaactgttctttccaaacagtggattacccctccggccttaaacttacttacaccccaagccatt

SEQ ID NO: 369302 - DNA, 467 bp, Homo Sapiens
  misc_feature (35)..(35): n is a, c, g, or t
  misc_feature (44)..(44): n is a, c, g, or t
  misc_feature (61)..(61): n is a, c, g, or t
  misc_feature (74)..(74): n is a, c, g, or t
  misc_feature (103)..(103): n is a, c, g, or t
aacggaagattggtaggttggggttctaacagtancccctagangttggatgtctaaaacncaggtaatggaantgggaggccaatttagatagtgtaaagcnttgtaactgagatgatttttttagaagtgtatagaacctatttaatgccaagatagttaccagtgctgtgggttttaagactttgtggacatcaagaaagactaaatctataattaattgggccaacttttaaaatgaagatgctttttaaaactaatgaactaagatgtataaatcttagtttttttgtattttaaagataggcatatggcatattgattaacgagtcaaatttcctaactttgctgtgcaaaggttgagagctattgctgattagttaccacagttctgatgatcgtcccatcacagtgttgttaatgtttgctgtatttattaattttcttaaagtgaaatctgaaaaatg

SEQ ID NO: 369303 - DNA, 441 bp, Homo Sapiens
  misc_feature (288)..(368): n is a, c, g, or t
  misc_feature (410)..(410): n is a, c, g, or t
  misc_feature (422)..(422): n is a, c, g, or t
aagataatcatcttttcctattgaatccttgctcttctgactgcctgttcctatctcatggtattggccaaaccctgtgatgccgtgttgaataggagtactttctcaccacacttgtcttccttccgcctctatgggaatccttccaaaacggcaccattaagtgttatactcgctgtagctcctccttatgaagttctcttctcattgtagtctgttaagtgtttatgattaaagagtgttatattttgttaaatgctttcgcagtatctttggagatgatcatgnnnnnnnnnnnnnnnnnnnnnnnnnnnnnnnnnnnnnnnnnnnnnnnnnnnnnnnnnnnnnnnnnnnnnnnnnnnnnnnnngaggagggaatctcgctctgtctcccgggctgggagtgcagnggccccggatcnaaggctcattacaacctct

SEQ ID NO: 369304 - DNA, 505 bp, Homo Sapiens
agcggattggaggtggggaactggaaagtgtgcgaattcatcacaagcatgtcctactgagcactggccgtctgactgaagcccaggatggaaaaccttgtttgcactaaccagaaagatccttgtctgattttggcagaattaaacggtgacttactaatgatagaactggtacaagtagcatcaactacaaagtgaaactcactttagcctacatggatctcactgtacatacatatcaatccctaaattgaatggtggaaggttggcagaagaagctacttttgacacaattccataaaatacaattacaaaggtcttgcaggtataattaaccaacatgtactaattcccttttcattattctcatagtcgcactatatactcggtaacccattacaaacccctaatcatagatgaatacaaaaataaaacgatacaaattcatttccacccaaacgtttaacaacaaagtccaatattcacaatatagatccaagtagtc

SEQ ID NO: 369305 - DNA, 554 bp, Homo Sapiens; identical to SEQ ID NO: 9782

SEQ ID NO: 369306 - DNA, 635 bp, Homo Sapiens
gggacaccacgaaagatccatcccggaagtgcttactcgtcgtctccatgcgccggttcctgggcgtcttagagccaaggcgcgaggctcggagtgagaggtagagctggaggggaccctaagcgccctccgcccgggacgtgagccgctgcgcccaccgggctagacccggcgccatcatgctgcttctgccaagcgccgcggacggccggggcaccgccatcacccacgctctgacctctgcctctacactctgtcaagttgaacctgtgggaagatggtttgaagcttttgttaagaggagaaacagaaatgcttctgcctcttttcaggaactggaggataagaaagagttatccgaggaatcagaagatgaagaattgcagttggaagagtttcccatgctgaaaacacttgatcccaaagactggaagaaccaagatcattatgcagttcttggacttggccatgtgagatacaaggctacacagagacagatcaaagcagctcataaagcaatggttgtaaaacatcacccagacaaacggaaagcagctggtgaaccaatagaagaaggagatgatgactacttcacttgcgtaacttaagcttattgaattttatctgatgcagtg

SEQ ID NO: 369307 - DNA, 428 bp, Homo Sapiens
  misc_feature (17)..(17): n is a, c, g, or t
  misc_feature (57)..(57): n is a, c, g, or t
  misc_feature (128)..(128): n is a, c, g, or t
  misc_feature (141)..(141): n is a, c, g, or t
aaaaagctgtgtcctgnaagaaaagtcccaaagctgttcgggggccagagggaaagngggaactcctaaacaaggggaagcttttggttgggggcgaaaagctgcccccctggcctacatagcccccnggcctatggaacncccatatggtttacagcacagctgcccctgcctatggtttacccaagagaatggttctgttacccgttatgaaatttccaacatatcctgttccccactactcattcttttagcaaatgacagaagctaattcctattgaacaacaatacagtacaacacagaatgttagagaaaaagcctttttatcctgctttctttgaacacatacttgatcaaaattatttgtaaagaacatctttcctactttttgattttaacaaatgcaaatttagttctctaaaacttg

SEQ ID NO: 369308 - DNA, 365 bp, Homo Sapiens
  misc_feature (175)..(288): n is a, c, g, or t
aaacaacataaccattatggtccacttgatatgagacaagtaagaatcaatcatgaaatactctgtaagagttaaatgaatgtcagctttgtatatcatataacttgaaggaggtgggggacttcctcaaaaacttgatttagaaatgtgtctctgctgggtacagctgctcatnnnnnnnnnnnnnnnnnnnnnnnnnnnnnnnnnnnnnnnnnnnnnnnnnnnnnnnnnnnnnnnnnnnnnnnnnnnnnnnnnnnnnnnnnnnnnnnnnnnnnnnnnnnnnnnnnntgtgctgagtgtggtagtgtgcacctctcttcccacctactggggaggctgaggtgggaggatcactggagcccagt

SEQ ID NO: 369309 - DNA, 523 bp, Homo Sapiens
  misc_feature (46)..(46): n is a, c, g, or t
  misc_feature (66)..(66): n is a, c, g, or t
  misc_feature (81)..(81): n is a, c, g, or t
  misc_feature (169)..(169): n is a, c, g, or t
acagggagggcacccagctagatcctcccttgtggtgtgagatgtncctggaactcagccaggccntcctcctccctgggnttgcccagagcccccaccctattcccagcattgcccgaaggaccaaccagtttgggtgaacagtggcctcctcagcttcctccccatnctgggtgccccaccggcggcggagggagctgtggcgatggtggggtgtggggagggacgaggagggaagcctctgtgctgctcacctgcccaaagcccagctcagcgggtacgcagtggaggcgacaaggaaccaatcacaactacagaggtttctctgatcctcctccactcccgctgcttccacttgactaagcttaaaaaaactgcttttgccatggctcatcggagtttatacttatttcttacaaaatgtttcctgttatttgctggaccagtcccaaagaacaggcagatgttcttattagaagatcagccgaaaagaaaaacaaaacacgtccgacgacacccttgg

SEQ ID NO: 369310 - DNA, 431 bp, Homo Sapiens
  misc_feature (23)..(23): n is a, c, g, or t
caaggggctgctggggcatgtgntcctgtggcagaaaagtggagaccctggaattcagcacccgggtgccattcccagcgtttagtttctagaggcctcagtttctccatcagcttatgggatccttgtctttactgacaagaatggaatagaaatgtaaaagtactctgaaaagcaattgccctgtaacttatctagaaagaaaagaccctgagactccagaatctgctgttgccatagccccatatgtgtgaattctgcaactagccaaggctagttcctttcaattccatttaaaaaacaaaaaccagcaggtgtggtggctcatggcgtaatgacctgcccaatgctatgagaggacaaggcaaatagatcgatagaacccaggaatttgagacatacaatggcaacatagtgaaaacacaattcta

SEQ ID NO: 369311 - DNA, 925 bp, Homo Sapiens
gcctgggtggcgaattcggcacgaggggcattccgctcttgctcagaaatccggagcgcctggcaggcattggaacagggacagctggcccggccaggcttcccagagccactgctgatcctggaggattcggatctgggtggagacagcgggagcgggaaggcaggagccccgagttcagaaaggacggcgtcccgagtgcgagagctggcccggctttacagcgagcggatccagcagatgcagcgggcggagactcgggcatcttccaatgccccgcgccgccggcctcgggttctggcccaaccccagccatccccctgtctgccccaggagcaggcagagccagggctcctgcctgcctttggacacgtgctggtatgtgagctggccttcccactgacatgtgcccaggagtctgtccccctgggtcctgctgtctgggttcaagctgccatacctttgtcaaagcagggaggcagcccggatggccagggtctacatgtttccaatttgcctaagcaagaccttccgggcatccacgtttcagctgctacccttttgcctgagcaaggaggttcccggcatgtccaggctccagccgccacacctttgcccaagcaagaaggccccctgcacctccaggtgccggctcttacactttctctgatcaggccacccagaaatcaagttccagccaccactcctttgcctgagcataaaagtcacatggttataccagctcccatcaccgccttttgtcctgagcagggacactgtgcggacatccacgttcccaccactccagctttgccccaggagatttgtttctgatttcccagtttcggtccccaccccttgtgcccaagcaagaaggcaccctagaaagggagaaccccaccccatattcccctggacaaaggca

SEQ ID NO: 369312 - DNA, 1590 bp, Homo Sapiens
ggatggtcttcatcccaaggaactcagagctgaaagagagtcctgtttccagagcgactggcaggggggtagtcacgcagggaggagctgtccagcacactcatagatgcagaacttaccacggatgtgccaggcctgcggctgctgctgccgccttctggaatatctaaagtgctttcactgggctcatcagggtctgagggattactgagtagactgtgaacatctcctcgacgacgttgtctgtgcctcctccgatactgaaattcagcatattcctgcgccttggagcttctggtgagtctgcaggagctactccccgagccacagatgccaggaattcttgcctcttctgctgtacaaggcatgctgctttgatgatcttgtggcggggtgtgcgaaggtaaggcctattgactttctgggcaaggtcttcagtgaccatttctaggtctgtttgcattagttcaaaaatttctttctttgtgcttttaggttccaagaaaaatccatatggataagaacacttgagaatgcgccgagtttttaagagcacatgaactgcatcttcaatgaaagtggtatctggacagcctccttcagtttctttgagagctctgctcaattgctccatcttttctttggctgttttaagaaggcgttgttctagctgataactatgctcatggtttttaaatcttgtataatagtgcataaatctgtcaagttcctgaaatcgtttgtgttttttctcagcctccacagtcatttccttggattgctcctccacgtgttgaatgacttcatagcgagtacatctgtaataacctccagtggacgaactatgttttttccactcttcaaggcaaatccagcaaaagtcatacttgcacttagcacactgcatgtgattgcagccttcattcttctgtattggagacttacagttggcacaaggcttggagttagttaataaccagagacaattggcggcatcctcgtaggcttcactaactcccacaagttcttctggtttcatttcggttattttttgcagccaattcttccatgtttggcagtcacaaggctcatgtgcttcaccaaggcactcccagcagaagaggtgtcctgtttccacaatcaacagcaggagctctcagcaatgggaagctgagtgtatcagatccagatgtatttgacccttgtttcgttagtcttactgctctgtcacagcctggagtaggacaccatttaatggcaggattattttcaacaaaggccttaatatcaaactgtaggtatcgtttgtccatctcctttgaaactacactttctatgatatccacaggtacaagttggaagcaatcatatgcagggcaaaaaatgttgtgagcttcaccttcttgaattttcagattcaaaaacgactcccaacatcctctacaaaagtcatgtccacagggcatatccacagggtcttcaaatacagagatactgcacatacaaatgtcacacaacctggtgtctaaatccccaggagataagctgatttcatctggggaggtgacagaagtgcgcctgatgcgggga

SEQ ID NO: 369313 - DNA, 483 bp, Homo Sapiens; identical to SEQ ID NO: 9853

SEQ ID NO: 369314 - DNA, 967 bp, Homo Sapiens
  misc_feature (821)..(921): n is a, c, g, or t
ggtcttaatctgaataaaccagaatgatactctcagcacagaagaataaagggagcgagtcattaacgttttctttttaaacctttatgatgacttccttatgaattactgaacgaacactggaatgggactcaggtatcctgaggacatctctcaactctggccttagttccccctctgtaaaattagggtgccaactaaatgatctacaaggtcccttccagcgccgccattctgtaattacatcatgtgtaactgtattaaacatacacaagtgactgccaggcatgggaatgtaacttccgagtaaatgctttggtttgttcagaatacactatgaacttctttccaaagacgggttgtggtaaatagtggatattttgattataagaaatagagtttccttgaagctttagctggagatacagcaatagtgtggtgttcctacaaatatcacagtgtattcaaacatatttttctatcaaaaatcatttttgtaaaagctgtgtgtttttatccaacttgtgataataaatgttctttattttagaataaaaactggcctttttgtatgtattgaatacagttaatagaatttataattttaattaacaatttgctctttcatgtgtgaatatgtgatagtctagtcctttcaaaagattgagacggactggctttcattgtttgaaggctggtgagagaaggggttacctgctgcacaccagtggggagtgacatactcctaacacatggccagaaacaaaaagtttgggtcataaaacagttctaataagaaatctgcctggcctgctcacacnnnnnnnnnnnnnnnnnnnnnnnnnnnnnnnnnnnnnnnnnnnnnnnnnnnnnnnnnnnnnnnnnnnnnnnnnnnnnnnnnnnnnnnnnnnnnnnnnnnnnttagccaagcatagcgatgtacgcctctagtcccagctacttgggc

SEQ ID NO: 369315 - DNA, 1253 bp, Homo Sapiens
ttacctcaattgtgatcagccctcttccacttaaataattaactagatatcgatatgaaggctaaaattccttccagtataagaagcaaatgttgaaaaagttcacagtttaagataatatacttctcagtaaaaactagcagcacttcattctactaggacatataaatttggcttcattgattggtcaaaaacaaaggaaaatgtatgtaggtccaaaagagctctttgcacaaggggaatgtgaggctacaagaagttttctttaacaattaactatttccccattaagtggtgtgtgaaactactggaatgtcaattgtcaatggcagagaggcgagagcgtgctgaatagggctgtgagtaagtatgcatactgggtggatgggagtacaatggttgccagaaaggagaaggcaaagatttgcatgtacaataccaaataaatagtataagggaagtcataaacaggcccccagcactagcaatagtgacatacactgcatagtcaaatgaaaagactggctcaaacttcttgttcagatggatgttataaaagatgacccagatagatggggagaggctcacagtacctgccaggaaaaatagcagcccagccaccaggtggcaacctgcactattgaccagacacttggccagtttgatgttgggcaccgaggacctgaaggcagtgttgcacattccaatcaggcagagcagcagggcacccatggcgatcagcatgctgaggggtagggcaaactggaggacacgcaggtccagctggtcaactgatgagtaccaagtagtgtcgtacatcaggcagtcactgctcccgtcataccgggcacatttcacccacaggcctgtgtaaacagtcaggttcttctcgtttctgttgaatgtgatcaatcgtaattttctccagttgggaagcagagtccctgcaaagaggcctgctactgaggcgattccacacaggaaggaaaggactgtggctgcgtggacatcccgacagcccatggcaggcaagcttgtggagtactgtcagtcagagctttgaggtacctgacagttccaaaacagctttattcagcttagaagagacacatgaagatctgaatacagagtagcaataatctgagcctgcttctcacacgcagggcattttactcgcccacactgaggagcctcttggagcgtctccctctcagcgtcccaggaagtgcgttcccagcgaggtacaccccgct

SEQ ID NO: 369316 - DNA, 453 bp, Homo Sapiens
gggaaatcctaaagcctagaaataaagttttaaatgggaaactgctattttcttgttcccatcttcaaatgctaattgccagttccagtgtattcatggtactctaagaaaaatctctttggttttgatttcttgcatattttatatattttacaatgctttctacctgaaatgtgtagctttatattttatggcattctagtatttttgtgtactgtattttgtgcatttcatgtcttcatcaaaatcctctcagtccttgttcttttgaagcttgtgctgaggttttagcttttctatgttttatatgccgctgctttgaaagagaacctagattctatagttgtattattgttgtttcatactttaaatttatatggctgtggaaaaacgaattaaaatgttttgaggagagagaactcccccgcaacaagaccgggatgaggggcctgg

SEQ ID NO: 369317 - DNA, 450 bp, Homo Sapiens
ggtccttaaatgggcacttcatttctgatgagtgcacaccaattattgctattttaatatcattgagaatactacagaagctaaggctatgtttctttggtaactacttcaaatttctctagaattatgtagcatacttacattttgctgcatgaacaatgaaaattaacctctgcctttaaatggaaaaataactttctgtagattgttatacagctactatgaagagctcttaatgaagaggaagtggcagtggtctatatgtagactgaaaaaatatcattaataaagttcaaagactgatggaatttcattgcccttaaagatatgaaccagatctgttttatgcttttctccaattatactaactagcagttgaaaagaatttgttttgaagagtgttattttcttaccaaaagaccagatcaaaaatccctatacttttccacc

SEQ ID NO: 369318 - DNA, 954 bp, Homo Sapiens
gtagcgaggcctgggtggcgaattcggcacgaggattcagtttaccaaacccgctgagactttgagtaaaatctggagtcatgtgcattctcacctgagacatccacacaactgggtgtggctcacagcagcccagatttttggattactctttgcctcttgccagccagaggagcttattcaaaaatggaataccaaaaagaccaaaaaacacctcccagaacctgtagcaatcaagttcctagccagtgaccttgaccaaaagatgaaaagtatctctctcgcctcttgccatcaattgcattccaaattcttggatcagtctctaggagaacaggttgttaagaatttgttgttcgcagccaaagtcttgtatttactggaactttattgtgaggataagcaaagtaagataaaagaagacctggaagaacaagaagctttagaagatggtgtggcctgtgcagatgagaaggcggagtctgacggagaagagaaggaagaggtgaaggaacagctcggcaggccggccacgctgctgtggttgatccagaagctgtcccggattgcaaaactggaagctgcttattcgccgagaaaccccttaaagagaacatgcatctttaagttcctcggcgccgtagcaatggatcttgggatagacaaggtaaagccgtatctcccaatgatcatagctcctttgtttcgggaactcaacagcacctattcagagcaagatcctttgctgaagaatctatcccaggaaatcatagaattactcaaaaagctggttgggcttgagagcttctcattagcctttgcctctgtacagaaacaggctaatgagaaaagggcactccggaaaaagaggaaggccctggagtttgtaactaatcctgatattgctgccaagaaaaaaatgaagaaacacaaaaataaaagtgaagcaaagaa

SEQ ID NO: 369319 - DNA, 244 bp, Homo Sapiens
agactttatcactgtataaaaatgtacagtggttttattgacatgtacattccaatatgtttacagctgcaagataatgaggcacactcagtattgcacttcattaaaatttcaggctcaaacttaacctagaagtttaaatgaaattgcatttgtaatttagtaattcttatacaggacaaacattgatatgtttatatacagtgtgatacttattacatttatatgctgtcctaacacaatg

SEQ ID NO: 369320 - DNA, 521 bp, Homo Sapiens
ggtgttggccactgtccccatttacattttccccactctgtctgcctgcatctcctctgttgcgggtaggccttgatatcacctctgggactgtgccttgctcaccgaaacccgcgcccaggagtatggctgaggccttgcccacccacctgcctgggaagtgcagagtggatggacgggtttagaggggaggggcgaaggtgctgtaaacaggtttgggcagtggtgggggagggggccagagaggcggctcaggttgcccagctctgtggcctcaggactctctgcctcacccgcttcagcccagggcccctggagactgatcccctctgagtcctctgccccttccaaggacactaatgagcctgggagggtggcagggaggaggggacagcttcacccttggaagtcctggggtttttcctcttccttctttgtggtttctgttttgtaatttaagaagagctattcatcactgtaattattattattttctacaataaatgggacctgtgcacagg

SEQ ID NO: 369321 - DNA, 436 bp, Homo Sapiens
  misc_feature (72)..(72): n is a, c, g, or t
gcaaatgtgagtgatttccagtgctttgaaagggattacagtaccacacaatgtccaagcctagagttaaancacagtattagcccaaataggcacttatgtgtattttctttttcatgattatcggtgactggtcagtgtactcatcaatttccaaaatttgtataaatatcacaattagaaaaatgcctgaggtactaaagttatgttggctttttgtgtcttaacacacataaatactattgttattgcagcagatgccttttgaatccattttccataattgcggatagtcataaattgcttgctcaatttttagtaattattgctgttgacaccagcgttgtagatttttggtgttgttgaatgcagtagagagaccaagacactattctgtaagatcaataaaagtaattggaaaataaatatgaaccct

SEQ ID NO: 369322 - DNA, 1212 bp, Homo Sapiens
  misc_feature (544)..(594): n is a, c, g, or t
  misc_feature (615)..(665): n is a, c, g, or t
gcaaactctctctgctctcggagcctgtgacactggctatgtgctccacagtttcagtcccaggtcatactctccaacagttttcagagctccatatatatgtagatgccatcctttctaaaaacttctcacgacctcccggaatattcctattggatctcattttatttagcatcagctcaagaaactaagtcttagtgcacagtatcacaacaaagaaaaagctttgtttttataactggtaaaaacaagaaaagattctcatcaaaatgaaaatataaaattaatcatttctcaccaaagagtatgcctgggagcctccagctgttaaaagacaatgctattactacttcttatcaaaaatctgtaatgccctgtgatttttatgatacttcttcaatacaaagtgttaatatgtgtcatcagtataataacaaccaacaaaatgccactttcagaaaactgtatgtaaattttttgtaacaatgtaaaaaagaaatggggagtaagtgttcacatcattaaaaggctttgaattcatggnnnnnnnnnnnnnnnnnnnnnnnnnnnnnnnnnnnnnnnnnnnnnnnnnnngaagaccgcaaacaacccacnnnnnnnnnnnnnnnnnnnnnnnnnnnnnnnnnnnnnnnnnnnnnnnnnnnggaaaatggccataagctgtttccaaagaaaatcctggggcatgaactaaggcattggattcctcaccaataacaaagggcccgggcgccaacgcgggcgtgtaaagaaattattccaaaatgtgtttttgtggggggcggtcactgcaataatataagaaaggaaaggcaaattctaggcttcaaataataaaattaacgccccccgcccgggcccgttcttccccatccaccgaaagaaaaatacctcccggggttcctgcccaaaattggaaaacaaataccaaaaaggggggtggattgaaccttggaattcccgcgggggcaatacaagagcccttcgccggccttttgcattaaaaaaatatttcccccccggccgccaaaacgggggtttaaagaaaagttgtcccataatttgtgccccggtttaacctcccggagggggagagaaccttcccccacagggttttggggtaaaaacacaaacaccgctgttttccaaaaaccaccccttttaggcgagaataggaaaaaatattcccct

SEQ ID NO: 369323 - DNA, 939 bp, Homo Sapiens
agcgggaggaggaggaaggagggcgagcgaggaggatggcggagtcggggctcctgacggaaacctgtccagtttaagtcgtcttggtctgagatataacagactgtcagcaatacccagatcattagcaaaatgcagtgcacttgaagaattaaatttagagaacaataacatttctactttaccagagagtcttttatcaagtcttgtgaaactgaatagtttgaccttagctagaaattgcttccagttgtatccagtgggtggtccatctcagttttctaccatctattccctcaacatggaacacaatcgaatcaacaaaattccatttggaattttctccagagcaaaagtattaagtaagctgaatatgaaggacaatcagttaacatcacttcccttggattttggaacttggaccagtatggtagaattgaatttagccactaatcagctcacaaagatccctgaggatgtgtatggtctcgtttctcttgaggttcttatcttatcaaacaatcttctaaagaagcttccccatggtcttggaaaccttaggaagttaagagagttggatctagaagagaacaaattggaatccttgccaaatgaaattgcatatcttaaggatttacagaaattagtcttgacaaacaaccagttgaccactcttcccagaggcattggtcaccttactaatctcacacatctgggccttggagagaacctacttactcaccttcctgaagaaattggtacactggagaacctagaagaactgtatttgaatgacaaccccaacctgcatagccttccctgtgagctggcactctgcagcaagctttcaatcatgagtattgagaactgtccactcagtcacctgccacctcccctcttgctggccggctttcatttcatcattcagttacaacagag

SEQ ID NO: 369324 - DNA, 724 bp, Homo Sapiens
gggggatgaggaggaaggagggcgagcgaggaggatggcggagtcggggctcctgacggaactctaatgaatcattgattgaccagcactattttaccagttggaatgaatgatcagaaatgggcatagtgcttttagatccaacatgtaacagatggatgttactccatgctgattacttcttcaagccagtacttttttgattgtgtaggatctttgtctcttcatctttgaattcaattactggaaaataaaaggagttcatgtagtttttgtccaggcttgagtcaccatgagtagtagtttaggaaaagaaaaagactctaaagaaaaagatcccaaagtaccatcagccaaggaaagagaaaaggaggcaaaagcctctggaggttttgggaaagagagcaaagaaaaagaacctaagaccaaagggaaagatgccaaagatggaaagaaggactccagtgctgcccaaccaggggtggcattttcagttgacaatacgatcaaacggccaaacccagcacctgggactagaaaaaaatccagcaatgcagaggtgattaaagagctcaacaaatgccgggaagagaattcaatgcgtttggacttatccaagagatctatacacatattgccatcatcaatcaaagagttgactcaattaacagaactttatttatacagtaacaaattgcagtcactcccagcagaggtgggatgc

SEQ ID NO: 369325 - DNA, 1103 bp, Homo Sapiens
  misc_feature (355)..(444): n is a, c, g, or t
  misc_feature (497)..(533): n is a, c, g, or t
aaatctgaaaatgttacaagcacagactatgttgtatgttttgaaattttagaacagtaatgttctttttaaaattgaacttctgcagagtaagaaaatgaatacatttattactttaaatttgtaaaattttccaaagtaaaaccatacaaagctagtgtcagtctctctcattgttcacaaataaaggacttttgttaattgattaaatcacttactatattcgatatgaaatatataaaacatacaaccattatctaatacatttcagaatgtttcactggttacaggagccagtaaataaagttgactctaaacaggaattttaaataaactaaacattttttcatcaccnnnnnnnnnnnnnnnnnnnnnnnnnnnnnnnnnnnnnnnnnnnnnnnnnnnnnnnnnnnnnnnnnnnnnnnnnnnnnnnnnnnnnnnnnngcagggggggcacgacttggacccccaaaaaatttttaaaaccattccttgtnnnnnnnnnnnnnnnnnnnnnnnnnnnnnnnnnnnnnataacgttgttccgcaggaagagccggggcctgcgcatagggcttgggattcccccccaagaaaaaacgcgccgggggggaaacccggagcggtgcggaaccaaaccccagaggggagccttggagggtccttcgggggggcgtccaataaggagggggcaccagggaggcgctcgtgattctcggatttcggcgcccccccggcgggggcctttttctgtcgcagggaacgcgcgggggaggcgcccccataaaacaccgttctcgcgccgccgtgggggaagccccgttccacaaaaggcggggggtgaaggacaagcttaactccccgcccggggggatatcaaaacccactggtccccctctgccgtaacataaattttgccccccgcggggaagaaaagggggggcgcaaaaaacgggggccccatgtggggcccgcggataaaagcacaacagtgggggggaaacctcccccgagggagtgggttgtaacgcgtaaaactttttttgtggagaaacgccccttgagggaaagaaggggcagggtttttacccgcaaaaggttca

SEQ ID NO: 369326 - DNA, 574 bp, Homo Sapiens
gggggaagaccatcactgtcactttctttaatggtgacgtgaagcaggtcatgccagaccaaagagtgatctactactatgcagctgcccagaccactcacacgacatacccggagggactggaagtcttacatttctcaagtggacaaatagaaaaacattacccagatggaagaaaagaaatcacgtttcctgaccagactgttaaaaacttatttcctgatggacaagaagaaagcattttcccagatggtacaattgtcagagtacaacgtgatggcaacaaactcatagagtttaataatggccaaagagaactacatactgcccagttcaagagacgggaatacccagatggcactgttaaaaccgtatatgcaaacggtcatcaagaaacgaagtacagatccggtcggataagagttaaggacaaggagggtaatgtgctaatggacacggagctgtgacgatcctcatgtgatcatgaagtaacagtaactgactttttatgttaaaaaatgtacatttacagtggattctgtttaatttattgtgtacgtcggtaatagcatga

SEQ ID NO: 369327 - DNA, 1383 bp, Homo Sapiens
  misc_feature (666)..(666): n is a, c, g, or t
  misc_feature (699)..(699): n is a, c, g, or t
  misc_feature (701)..(701): n is a, c, g, or t
  misc_feature (865)..(865): n is a, c, g, or t
  misc_feature (913)..(947): n is a, c, g, or t
  misc_feature (994)..(994): n is a, c, g, or t
  misc_feature (1092)..(1092): n is a, c, g, or t
  misc_feature (1122)..(1122): n is a, c, g, or t
  misc_feature (1244)..(1244): n is a, c, g, or t
  misc_feature (1261)..(1261): n is a, c, g, or t
  misc_feature (1304)..(1304): n is a, c, g, or t
tgttgaggaaaaaaatggcccaatatgctcatcactgataaatgctccctggccttaaaaactaccaacatataatatatatgctgtcttaaaagttaatgatccaagtggcacctctctgaacctactttggcttgggaggctgcccagttaaaacaaaaataagttaatggtacagaaagagaatgaaaaatgaaagcctccttttatcctatcatcctaattccttttcccagtaataatgactgctgtgttggattccttctgcaaataaaagtgtatacatatatgtagcaaatcttacttacgcgaaggacactgccgcgccggaaccgcaatggccgaaaggggtaggaacgagagcacgggccgccccctccggtctcggcccgccaccggcgcgagcgcggcctttgttgggcccggcctcgggcccctccagaaaaagtcttttcgcaaacccatgccggtgtgcgggggccggtgcggcccccaggggtgcggtacgcgggcagaacagggggaccgcgggcataggtgcgttgtcgcgtaacgagacgaatacccgcgtgggtggcacggaggggcgcgcaaagcggcgtcgccgggaatcgcccgcctcgcacccatcaactacaataaacgacccgcgcgccgcgcccgtgngtagcacaccaaacccgtgtgatggtacggggntngcgcaggacacaaaaagagagcagctcgtctcacccagcggagtgactgccgaacaccccatgctttcgtgttcagacgcgccggttaacgccccacctccacccgtcttgccgggggaggagaaagaatttacgttatacaagctcacgagacactcgcccgnttgggtttgtttctgttccgcccccacacactgttggcccgaggcggnnnnnnnnnnnnnnnnnnnnnnnnnnnnnnnnnnngcactttgtttgattcggcgtcgtggttctctccgcccctcgctgtnttgtctgggccgacccccgccttcgttattgtgggccggcggtatacaaccatgcaccaccgctgtcgagactgtgggtatcacccaccccccccgcngtgtgccaaaatcccccctctatttgtatntcgtactgtgccaaaaacgtggggatggggaaacgagcccacgccccccacgcgcatcaaccgacggagcaatgtcgacgatcgtaacaacgctcgcgtgatacgaacgacgcggccgcgtnaccgggtggtgtgtctnctcaccgcacctcccgtagtggcaccacgcgggctccgcccgngtagatggacgcgctatcctggttggcgccgctccgggtgagaaataagcagccccggctgctcacaagacgtaccact

SEQ ID NO: 369328 - DNA, 494 bp, Homo Sapiens
atactaagtgtggcaggacaaggttgaaccaggagcagacatccagaaccatgaacttcatagcctcccctgtgttagaggtgctgcagtttcttgacggcggatattctgacctggcctctcctcagctctgagagccttcatctttggttgtttctgtgccccttccaggctgcagatccttgctgcagaaggccaaggatggttcaaccacagtgttctatttacttcctctgggcccgcttgtgagtggtttagcttgttgctggtggaatctccattacatacccacaaaaagtgctcccaagtcccactgctctctctcccggccaccagcccctgccacccatctatgagaagacatcacttcttgctacaggccattcagcactttcaaggttttatccatatttttgcacatacactcacactcacaccctttattcatatctctaagaaaaacctccagctctctatatttttggggagagacc

SEQ ID NO: 369329 - DNA, 594 bp, Homo Sapiens
  misc_feature (122)..(122): n is a, c, g, or t
cacagctggctgctcactaaagtgttcccctgatctctaaatatggaggtcattaccaagaaatgctttggtatgaatgagagccagatctccactgtgtgagccagtgaattatggctaanttcggctgttacagccactggttggctggattttaaaccataaaacttgaagattacctacaaaagtaacagtgtggctataagcctgagctttaatggatatacatcctcacagaaaagttggaaataaccaaaactgaagtcttaatttaccttcagtttaatctgtggatttgttcaaatactaaagatcctcaggtccagaattccagcatcatttattcttttaaaatttttaagaacttgatccattgtatcagtacctcacaatcagagttggcaaatgatggatgagtgattcaagcagtgcacccggtggaagctgaaatccatctgtgaatggaactgaagtgaacgtgaatatgctgactatatcctggaagcatttttataccatcttgaaatttcaacgaaatggcttttgccagttaatccagctgtctttcaagaataaaagttggggttttcaagg

SEQ ID NO: 369330 - DNA, 710 bp, Homo Sapiens
  misc_feature (685)..(685): n is a, c, g, or t
ggggcagccgagcggccgtgggcccgggcggcgggcggagacgtgggcgccctccccgccaaggcccgtgcgaggagtccatagaggccactgtattctattgaagaacatgtctaacagtaacactactcaagagaccctggaaataatgaaagaatcagaaaaaaaactggtggaagaatctgtaaacaaaaacaagtttatatctaagactccaagtaaggaagaaattgagaaagaatgtgaagataccagtttgcgtcaggagacacagaggcggacatctaaccatggtcatgccaggaaaagagccaagtctaattccaagctaaagttggtgcgtagcctggcagtgtgtgaggagtcctccaccccatttgctgatgggccattagaaacccaggatataattcaattgcacatcagttgcccttctgacaaggaggaagaaaagtccacaaaagatgtctctgaaaaggaagacaaggacaaaaacaaagaaaagatcccaaggaagatgctgtccagagactccagccaggaatatacggactccactggaatagacctacatgaatttcttgtaaatacactgaaaaagaacccaaggtaataacatgatgggtataagaggaaaaggggttagggggatacagattccagaggccaaaggttcccagaattntcattttagaatctagatgccattc

SEQ ID NO: 369331 - DNA, 1125 bp, Homo Sapiens
  misc_feature (16)..(16): n is a, c, g, or t
  misc_feature (115)..(115): n is a, c, g, or t
  misc_feature (189)..(265): n is a, c, g, or t
tatgtaagatcctttnttttttcataatatgtattcttggctgctatgcgtggtttttcaggaaatttaattatcttactgagatgtgaaagcaaaactagtaacagaacttacnttttatttcatgctttcttaaacccgtgcatattctggtgaaacatgtaaaatactttaagtaaaattgaacannnnnnnnnnnnnnnnnnnnnnnnnnnnnnnnnnnnnnnnnnnnnnnnnnnnnnnnnnnnnnnnnnnnnnnnnnnnnggactgaggtttaggaagtttgttactggttaaaaacctcaaatgaaatgcgaaagaatttgaatttttcctgcatatgtcaactttggacagctttcaagaaaaatgagaaaagtttcaacttctggcggttaaaatattaatgcagaatttactaagattttattcatttgcattagcaaatattcatgcagcagcagttgactgaaaatttattcttatgagacgtatagtattcatttttaaatgcatgattgtacattatgtatagacgacaatgtttttaatttataaatttcattctttgttaattgcatgggtttttctgcagcttattgtgaataccttggttctgttcaatagaaacattttgtatatattaaatactgaaatatcagtatcgacggtggaagtgcttcatgggcttgctgcacatatttgtaggatactgtatctgcaaatgcaacaacaaatagttttgtactcggttaacagtcttagttaaaacatgagtttattttctaaaagtatccagaataagtaaaattatagaaataagaaaatgttacacaactttgctgttcataccccttaccttcttactacttttggttttggaggaagggtatcacccactagaaaatgtgcctccttaagatttcttaaaggaaagttagtttcagtatttcacagcaagttggactacaaaatctagagttgatctgctttttaaaccttcatttaaaagcaaacttggaagaaatttgaaactgatgtttttaatatatgtctgtgttgcctaggttttctttttttaaagaggtatgtaattaaaacctttgtaaaatttgccaactgaa

SEQ ID NO: 369332 - DNA, 349 bp, Homo Sapiens
  misc_feature (157)..(166): n is a, c, g, or t
gggagcttttaaacagaagtgctttatgggtatcagatctcttctgacatcaattgtttcaaatcattgttgggctctgtcgtgttctgcaatcttccccattcccctcatgatctctggcttatcttttatccaatctgtatggactttttaggannnnnnnnnncttatagtacaaataattttcagatcccagctttggtaaatgtgttaattctactttgtgaataaataaatgagtgatctgctaaaaatggcaattgtagaattatgttgtatgtaatgtacatatggagaaagaatgtattttgttcattttcttaataaaatgttatatatggatgctaac

SEQ ID NO: 369333 - DNA, 366 bp, Homo Sapiens
  misc_feature (198)..(198): n is a, c, g, or t
  misc_feature (284)..(284): n is a, c, g, or t
  misc_feature (292)..(292): n is a, c, g, or t
  misc_feature (314)..(314): n is a, c, g, or t
  misc_feature (327)..(327): n is a, c, g, or t
  misc_feature (337)..(337): n is a, c, g, or t
cagtgtggagcgcagtcggttttagtggttttctttaatcctgctctgcacttctttctcatttactacacgggatattataaagaataaatagcagatactcttaatttacaatgattagtcattccatttgttctctatatttacaataactgtaaaataacattgaactctatagcttcttcgaggtccaagganaaccaaaacactttccgaagaatggaaaatagcttttaaaaagtcctctacaaaagttcccccgtctctttgtacttcaagaaaanaataactnttcccccctggcttcgccatgnaagaggcactggnaatataaatngcaggttaacattattagcaacaaccaga

SEQ ID NO: 369334 - DNA, 769 bp, Homo Sapiens
  misc_feature (51)..(51): n is a, c, g, or t
  misc_feature (56)..(56): n is a, c, g, or t
  misc_feature (85)..(85): n is a, c, g, or t
  misc_feature (675)..(675): n is a, c, g, or t
agcggtcaagactaggcatatgctttcagataaataaggaattactccaantcagnttttccccaatcaaagaagccatgtcatntttacttttagaaacatacaattgggcccaatatgggaattttcataatagttcatacatttgtcagccaacattaaaaggtaaccaactcctcaggtatttgtagtttaccctaacgcttctttaaaagaaagtaggtaaaaaaagaaaagggtagataatctttcgtatgcaaacttttcccttatattttgtctttctttcctttttgactttagtagcatcctccacacatttgtgtgcctgatttgaaaggaagctggggcacccagcgagtttagcctttaagtttctgtgtattgatttgcagattaagtaatgctgagaggaataaagaagggacagaaacatggaacataaagcattgaaaattccggtgcttgggcttcggcttcagagtaacgtcagtggcttagggttaaacggccattttattcaaatgcttgctatacaatctgaaaacacactggcaggtgctcctctccttggcaattcattgagtatccagagttctacgatgtttaactgaagaattggctaatgttttgatcctccagtgtgactgttgttttcgtatgggggtgggtcanggggttatttgcttttttattcctgaagcttaccagatatgaatgcctaatactccattgttctgcttgttgtaatggtgaatgctttaagaca

SEQ ID NO: 369335 - DNA, 1106 bp, Homo Sapiens
  misc_feature (402)..(412): n is a, c, g, or t
  misc_feature (431)..(443): n is a, c, g, or t
  misc_feature (662)..(662): n is a, c, g, or t
  misc_feature (816)..(816): n is a, c, g, or t
  misc_feature (862)..(862): n is a, c, g, or t
  misc_feature (1057)..(1057): n is a, c, g, or t
ggggctgtacatggagatcttgctgggaaaatccgcttgctcccctcacgtcgtccagcccaggagaaccaccgccgtaaccccggagcttcctcggccaccgcgcagagccctccgagagcccgagccgcggtcttcgagctccaaggctcattcagggccccagatccttgccccgaaaggagaggatctgagaaaatggatgcactgagacctctctgaaaaccctccgagagagcgcgaaaggagcgaaggacacctttactccccagcttaaaaacccaccttttttagggggccccgaaaccccccaccctaccccgaccgcctttattcccctctttcccatacccacggctctccgccctgtttggcggccccccccccttcttccaccccccnnnnnnnnnnnttttctccaaccacacccnnnnnnnnnnnnnggggggcgcgccgggcgccccccccgtgggggataaacgccacaccaagacgcgggcgaacacttccgcgggctctccctcccggcaaacaaaatccaccgctgtgtttctctaccaccctcttatactcacagcgtcggtccgccctcgtctgatttctttcgctctccacccgccccgtccctaatacacttccataagtaatgctccccctcgctntgtttggcgcgcgctgggcgtgccgtttactaaagacgagctcgccgcggtcccgcctgtttgtggtcgtgctcctagacacaacgtatctccataataaataacagcacccggcttatatcgctcttcgtatcaccctcgctcctcgcgaaanacacccgcactcgccgcatgacccctcgatcaacacctctagatanacacacctccgcaagaggcacataacaatctcacgcgccccagacgactccaacgccaccgcacacacagcgctgtagattagcgctattattaacatataatatacgatcaccccgcacgcgctccccccgcgctctgtcctcatgtcacgcgcacccccgacctctaccgcctgttatatgcagacaacgacncgcggcgccagtttgtacatatcccccacacgtgcccaatgtcgcctgg

SEQ ID NO: 369336 - DNA, 1471 bp, Homo Sapiens
  misc_feature (136)..(136): n is a, c, g, or t
  misc_feature (361)..(361): n is a, c, g, or t
  misc_feature (559)..(568): n is a, c, g, or t
  misc_feature (674)..(674): n is a, c, g, or t
  misc_feature (703)..(711): n is a, c, g, or t
  misc_feature (874)..(889): n is a, c, g, or t
  misc_feature (1241)..(1241): n is a, c, g, or t
  misc_feature (1296)..(1296): n is a, c, g, or t
  misc_feature (1355)..(1355): n is a, c, g, or t
  misc_feature (1412)..(1412): n is a, c, g, or t
  misc_feature (1424)..(1424): n is a, c, g, or t
  misc_feature (1438)..(1438): n is a, c, g, or t
  misc_feature (1453)..(1453): n is a, c, g, or t
agatgggcgggagagagcgcacatgcttgtggtgggtcgaaaacacccgacgccctcgattgcgtcgcgcgcgcggggtggggcgaacacagaaatatatattatttgttatgtccgcgggcacacgagaaatttncgcgaggcccacgacaggtcgtgtgtctcatactcaaaacacgcctgtatgtaccggccgacatatatatcaacgaggaggatattcgcgacctcccgcccgcgctgcctaacattggctatggtggagcggagcgggggcgatacacacgcgcccctgcggttttgttcggcgaaagcaaaagtaggcgcgctgttatatatatggggggggagagcgcgtaanaagcacacggcgcgcgggtgtgtcttatttctgccgtgagagtgtgtgggggcgttaaccgcacaatagtcgggtgcgcgggcaaacggcggcgcgagaaacgcggttgttgagagcgaggctaggagcgcgggcgtctcgtcgcgtatcaggagagagcctcacttctccctcggctgtggtagagaagagagcgannnnnnnnnnaacagcgtatatacagcgcgccgcctcggggaggagagacccgcccccatatggtgaggagagtgtttgtggtacaaagagaaacagctcactatggtttttcccnccccgcgcgcgggtacgttttttttgttnnnnnnnnnaagagaaaccccccaccgccccctttgttgtaattggcggcgcgggctgttcttttcgaaaggaacacggataacggcgggccgaattggccgcgttcccccgtgaagggggggcacgggcggcccacaacaggagagggttttggaaaaacctctttgtgannnnnnnnnnnnnnnnccaacccaggaacgattgccggagatatggggaatgaggtcccgtatgggggggttagattaggggggccaaattggccacgatgtcgttggcctggggatatcttaccatttattataattgcgcacattagtgtggattaagtatgattagaaacgctaagcaattgaaaagaagcaaaaaggtaatgcatccctcttcctcagatctgcaaaattctgtgcctttttagacatgagagaggctgttttggatctaagtcaataatggctcttgcaagatttctttcaatgtcttgcatgttggttctaaaactcccttaaaggcagactataccttgaacgggggaaancagcctatcttgggcctctttaccttgcctttcatccactggtcctgcactgagnctcagggatagcacctctcaccaacggggtgacttttatttccttcactcattcattgngtgctgtgtgttagtgtcaccacgtgccaagtctgatgttggggctacagctgaggnagagcagttggnatttagtgtggggncatgcctccagaggnatcacttcaaataatggg

SEQ ID NO: 369337 - DNA, 700 bp, Homo Sapiens
cacccgatgctcccacccgtgggcagattgcaaagctcaagggctgcaaagttgttggagcagtagggtctgatgaaaaggttgcctaccttcaaaagcttggatttgatgtcgtctttaactacaagacggtagagtctttggaagaaaccttgaagaaagcgtctcctgatggttatgattgttattttgataatgtaggtggagagttttcaaacactgttatcggccagatgaagaaatttggaaggattgccatatgtggagccatctctacatataacagaaccggcccacttcccccaggcccacccccagagattgttatctatcaggagcttcgcatggaagcttttgtcgtctaccgctggcaaggagatgcccgccaaaaagctctgaaggacttgctgaaatgggtcttagagggtaaaatccagtacaaggaatatatcattgaaggatttgaaaacatgccagctgcatttatgggaatgctgaaaggagataatttggggaagacaatagtgaaagcatgaaaaagaggacacatggaatctggaggccatttagatgattagttaatttgtttttcaccatttagcaaaaatgtatactaccttaaatgtcttaagaaatagtactcataatgagtttgagctacttaataaaatacatttaagtggtatacaaacaccacaag

SEQ ID NO: 369338 - DNA, 467 bp, Homo Sapiens
  misc_feature (16)..(16): n is a, c, g, or t
aatggctaagccccanggagtccaactaatgtatatatggcagatttggcctttttcaaaaaaatccacctaatcctacaatgtgcccagatacatgttccctatgccccaggaagttatgaagacttcaacaattaaactgaaacccaggggaagcttgccttagttttgggtttcattataaactcttagcctcagtcccaggttaatctgaagtttgaaagctcagattaagcaagccatgccaagaaactggacgatgtgtaagcctagactctaaaattcaagatgtgtgaaataatataagtcaaaagcaagaaaaacgtaatcccgtctgaactcaagtagtcattcatataaatttgaacacacctgctgtgcctagacaagtgtctttctgtaagagctgtaactctgagatgtgctaaataaaccctctttctcaaattcgtaattctcaaaaaaaa

SEQ ID NO: 369339 - DNA, 172 bp, Homo Sapiens
ggatgttagatgctttgaaactccatatcagaagaaataactttataacaattttttttaataatgaaaaatattttcctgacaagtgagctctaaattctctttattgtaaaagagatgtaaaggttttatattctaaatcctagtaaaattgacagtgatttttaaatat

SEQ ID NO: 369340 - DNA, 810 bp, Homo Sapiens; identical to SEQ ID NO: 15878
  misc_feature (655)..(694): n is a, c, g, or t
  misc_feature (697)..(704): n is a, c, g, or t
  misc_feature (706)..(729): n is a, c, g, or t

SEQ ID NO: 369341 - DNA, 861 bp, Homo Sapiens
  misc_feature (68)..(76): n is a, c, g, or t
  misc_feature (134)..(143): n is a, c, g, or t
  misc_feature (249)..(258): n is a, c, g, or t
  misc_feature (316)..(328): n is a, c, g, or t
  misc_feature (369)..(383): n is a, c, g, or t
  misc_feature (432)..(447): n is a, c, g, or t
  misc_feature (457)..(563): n is a, c, g, or t
cccagcgggggccccggggggtggagaaccccccgcgggggtttaaaggttttatctaacgccttgtnnnnnnnnntcctcttgtgcgggaggatgtttatatttattcccccctcctcccccgaagggccccnnnnnnnnnnagaaaatatataagagccccctggggatcccccgtggaggcaacccaatagtaccccccaggtcccccttgggttgttttaaaatcccggggttttccccgggggnnnnnnnnnngggggttcaccaacctcctttattcccggtgttttttgggaaaacagatgtatccccnnnnnnnnnnnnngggggggcccccgcccccgaaaaggttttaaaagagtttcnnnnnnnnnnnnnnncggaacacaccactttttgtttagcttgctgttgtttgttcacatcaannnnnnnnnnnnnnnnggtcatcaannnnnnnnnnnnnnnnnnnnnnnnnnnnnnnnnnnnnnnnnnnnnnnnnnnnnnnnnnnnnnnnnnnnnnnnnnnnnnnnnnnnnnnnnnnnnnnnnnnnnnnnnnnatataaaaataagtgtttattaacaaatgggctcagagtagaaaatgcagacagatgggttcactttaccatattttgggatcatcatcttattgcgtacagcactgtaggcaagtaaacgaaaccaaaggctggctcccctggccgaggcctgggactgatgcaagacagccagccagtcacctccgcctcccatgaacctcttggaaaacttctcctgtcccacttctgccaccctccagctccttgagagagccagaggttgagaagaaaatgagcctgaagtgaaaggaaatcc

SEQ ID NO: 369342 - DNA, 866 bp, Homo Sapiens; identical to SEQ ID NO: 10651
  misc_feature (631)..(669): n is a, c, g, or t
  misc_feature (726)..(736): n is a, c, g, or t
  misc_feature (772)..(812): n is a, c, g, or t

SEQ ID NO: 369343 - DNA, 1530 bp, Homo Sapiens
  misc_feature (219)..(227): n is a, c, g, or t
  misc_feature (352)..(415): n is a, c, g, or t
  misc_feature (564)..(564): n is a, c, g, or t
aggtggtgtggcgcacggaataacagaaagagagtgtgggcgttaaatttaaatataaggggtagggcgggtggaggagcgtattctagaaggatatacgctgcggggtgcggagccatattaagagtgggcacgagaagcggggtggacgccatgcgtggtcttatagcggtgtcggcgaaacataacaagaagtttgggaacacagacacggagaannnnnnnnntggtgagataaggggataatggggggcggaaggggatatgcggcgtgctagtaataaggggtggtgtgctatgtatttggggcgggagttggcgtaatatggcaccggtttattaaaatgagaannnnnnnnnnnnnnnnnnnnnnnnnnnnnnnnnnnnnnnnnnnnnnnnnnnnnnnnnnnnnnnnggcgaaactaggcttgggtgggaaggacatgtgcacggggagggtagagggtgtgtcaaagatggggtaaggcacggatggggtggaagggatttacgagggggcggtgcgggtggatgtgaatatttgaatatccgaagcgcccgcgntgtggcgtcctctgggatgtagaaaggccgcggtaaatgcggcgtggaggggagtggcatataagggatggttgggtgggggggatggtatagggtaggcgcgcggggatgtgtgtttttgttggggggggattccagggcgccttagtccatgtgccagaaatgtggctaagggaggcgggatattgaccctgttcaccgttcgctttcgggggccgcggggccaaaggaaaatatttggggaaacttttccgggggccaagggcagccaggcaaggtattggtgttctattgggtgtaatttttgtataaagatttatttatttattatatgtaagtacactgtagctgtcttcagacacaccagaagagggaatcagatctcgttacggatggttgtgagccaccatgtggttgctgggatttgaactcacgaccttcggaagagcagtcagtgctcgtaaccactgagccatctcaccagccctccaaagattcacttttaaaagatcatttgatgaaaagccagggagtatggggtgtggggtgtggaaggccttcaggaaaaggcttgcatgtggcgatgtgcttttcctgccctccccatgaggttcctagccattagtagcagatgtaataatggtgacagagctcagataaaacaaaaagaatggagaaatgccaaggctcaaataaaaatgaggcttgatatatttccagaatgaaaaaatatttaataaaatcagggtcaagagaaagtccctataccacttgtcttcctccctcacttctggtcagaccaagggcgcctgcatcggaagctatctgacctcaagtcaggcacactgtgtcttcagggcttctcaggatgcttctttataaggtcaaaccacacaggtcagggaagacccaggtacaggctggggagccccacaggtatagggctgagggagcccagtaggttac

SEQ ID NO: 369344 - DNA, 857 bp, Homo Sapiens
ggagccgagggagggaagactgctttgtaggattcgttttaaaactgaacattaaatgagacaatgatgctcaccagcaaacaggcgggcaggcacatctcagagctaagtagtccaaagccagcacctggccctgggcaactagaaacattgatggaaccactcagggctatccaggaacctcgatcgagcagagctgaaaccaatggcatgttgagtcccaaatgccaaagccattcaacctagaacaccttaggcattataggaacaggacacttctgcctcctgatagaggatgacaaacagaggcagaatgtagtttgaagcttagataatagggtgtgatggatgaccattttgtcttttttgtgttggtacagtagaagacacaaactccaaggtggtgtgtctggacggaaggggtgtggcggcactcaggacagagtttggtggcacctgcaccgaggttcaggctaggagtaccctaccacccaaagagacaaacttttgtgtaagtcccccccaccgaacgaatcctcactggaaaaggccccctcagccccctcgtcaccaacagggaaaacttgagggatgggacccctctcatttcccagcctccaataaaaacagccacctggattgcagtcccaatggacctttttcccccgttcgctttatagtccacccctttttttccctcttccctttgtcggtgccgccctccggcccctctcaaaaaacttttctataaaacccatttgttttggggggcgcgggggcccccattagggtcagttgaaaacttggtccccccccttggttttccctaagaacatacctggctccatgaacctaag

SEQ ID NO: 369345 - DNA, 810 bp, Homo Sapiens; identical to SEQ ID NO: 10653
  misc_feature (192)..(224): n is a, c, g, or t
  misc_feature (606)..(621): n is a, c, g, or t

SEQ ID NO: 369346 - DNA, 836 bp, Homo Sapiens; identical to SEQ ID NO: 10655
  misc_feature (421)..(471): n is a, c, g, or t
  misc_feature (561)..(570): n is a, c, g, or t
  misc_feature (577)..(720): n is a, c, g, or t

SEQ ID NO: 369347 - DNA, 622 bp, Homo Sapiens
ttaccaaaatatatggcaaccccttcaccttctctccctatgaggaataattataactagctcaatctcctgtacgccaaacagatttaaaatcactaatcgcctactcctcagttagccacatagcactggttattgcatcaatcataatccaaactccatgaagcttcataggagcaacaatactaataatcgcacatggcctcacatcatcactcctattctgcctagcaaactccaactacgaacggatccacagccgtactataatcatggcccgaggacttcaaatggtcttcccacttatagccacatgatgactgatagcaagtctagctaatctagctctacccccttcaatcaatctaataggagaattattcattaccatatcattattttcttgatcaaactttaccattattcttataggaattaacattattattacaggtatatactcaatatacataattattaccacccaacgcggcaaactaaccaaccatataattaacctccaaccctcacacacacgagaactaacactaatagcccttcacataattccacttattcttctaactaccagtccaaaactaattacaggcctgacaatata

SEQ ID NO: 369348 - DNA, 715 bp, Homo Sapiens; identical to SEQ ID NO: 10656

SEQ ID NO: 369349 - DNA, 972 bp, Homo Sapiens; identical to SEQ ID NO: 10657
  misc_feature (41)..(41): n is a, c, g, or t
  misc_feature (306)..(329): n is a, c, g, or t

SEQ ID NO: 369350 - DNA, 590 bp, Homo Sapiens; identical to SEQ ID NO: 10659

SEQ ID NO: 369351 - DNA, 787 bp, Homo Sapiens; identical to SEQ ID NO: 10671
  misc_feature (677)..(677): n is a, c, g, or t

SEQ ID NO: 369352 - DNA, 499 bp, Homo Sapiens
  misc_feature (275)..(275): n is a, c, g, or t
  misc_feature (278)..(278): n is a, c, g, or t
  misc_feature (288)..(288): n is a, c, g, or t
  misc_feature (409)..(409): n is a, c, g, or t
gggcccggaagtgacgggcgaaagccggctcagagctctggaggtagaggtgaccgatcctgggggtcggtgttaggccgtgggaggtttttcgcgagactgagccacgcgtctatcttctgtcccagggccgccgtcaccatgggccgcgagtttgggaacctggcgcggatacggcaacgtgatctcctacagattgtcgccctttgagcagcgcgccttcccaagctatttcagcaaaggcatccccaacgtgctgcgccgcactcgctgangcnatccctcgcngtgcgcgcgccgtttgtagtggtctacctgatctacacatggggcaaccaggagtttgagcaagtcgaaaaggaaagaatccagccatgtatgaaaatgacaagtagacggcctgcacctngggtgacaatcccctgcctctgaaagacccttctctgggagaggaatccacactgtagtcttgaagacaataaactacttatggacttcc

SEQ ID NO: 369353 - DNA, 1071 bp, Homo Sapiens; identical to SEQ ID NO: 10672

SEQ ID NO: 369354 - DNA, 454 bp, Homo Sapiens
  misc_feature (354)..(354): n is a, c, g, or t
gtggcaatgctatcatcatcgtggtcgggggtgcggctgagtctctgagctccatgcctggcaagaatgcagtcaccctgcggaaccgaagggcttttgtgaaactggccctgcgtcatggagctgacctggttcccatctactcctttggagagaatgaagtgtacaagcaggtgatcttcgaggagggctcctggggccgatgggtccagaagaagttccagaaatacattggtttcgccccatgcatcttccatggtcgaggcctcttctcctccgacacctgggggctggtgccttactccaagcccatcaccactgttgtggggagagcccatcaccatccccaagctnggagcacccaacccagcaagacatcgacctgttaccacaacatgttacattggagggccctggtgaaagtttttttgacaagcacaagaccaagttttgg

SEQ ID NO: 369355 - DNA, 649 bp, Homo Sapiens
  misc_feature (405)..(405): n is a, c, g, or t
ggggcgctgtaccacgccctcaaaggctccgcctctgctgcttgaatcccacccctctatctgcaggaccctgagccgtaatgatcctgcaacagcccctggagcgaggtcccccaagtcgggacccacgggccaccactggggtaactcgcggcctaaacgccagtctttcccccagggaacctttgcacaagcagttcctgtctgaggagaacatggccacccatttctcccgactcagcctacataatgaccacccctactgcagcccccctgtgacttttcccgaagccctgccaccactcaggagcccttgcccagagctgcttctctggcgctatcccgggagcctgattcctgaagccctcaggctgctgaggctgggggatacccccagtccctacntaccctgcggccccagctggggatatcgtggagctctgagtattgatggcctgtgtccctccctatcttctttctgacaacaaagaccagcaactcccagaaagggatgaagtccttctgcaaacctggccaccaggaccttccctctgacaagaggacactagctcggtggaaccctcagtgaaaggcagcctgggaaagggaaaatgttaccccattagtgaataaagacctgtgagcagtt

SEQ ID NO: 369356 - DNA, 532 bp, Homo Sapiens
gggggaggctagacgggccgctgcgagaagtcgctctggctcgccttccgctctctatggtcgggagcgcgagcccctcctcttcccggaacgagccctcttgctcgacgcgcgcgcagcgctaggagggagttccgtttccggtctggtggctttcgatttttggcgttcagtagtcgcggttggtgggtaacaaccgagccaagatgttgcggaatctgctggcccttcgtcagattgcccagaggaccatcagcaccacttcacgaaggcattttgaaaacaaggttccagagaaacaaaagctgtttcaggaggataatgggatgccagttcatctgaaaggcggggcatctgatgccctcctctacagagccacaatggctctgacgcttggtggcacagcctatgccatctatctgttagctatggctgcatttcccaagaagcagaactaatgtcgtcatcccagtcttcacgtggttcagtttcatcaacgctcgatggaccaggaatctgatgagtaactgag

SEQ ID NO: 369357 - DNA, 552 bp, Homo Sapiens; identical to SEQ ID NO: 10683

SEQ ID NO: 369358 - DNA, 638 bp, Homo Sapiens
  misc_feature (568)..(568): n is a, c, g, or t
gggtagagggcggtcgcggcggtcgcctgggcagcggtggcagaatgttggcttccagagcgctgagcctgattggcaagagagccatttctacttcggtgtgccttcgagcacatgggagtgttgtgaagagtgaagactatgctttccccacttacgctgatcggcgtgactaccccttgcctgatgtggcccatgtcacgatgctgtctgccagccagaaggcgctgaaggagaaggagaaggccgactggagcagcctttccagggatgagaaagttcagttgtaccgcatccagtttaacgagagcttcgccgagatgaacaggggcaccaatgaatggaagacagttgtgggcatggccatgttcttcattggcttcactgcgctcgttctgatttgggagaagagctatgtgtatggccccatccctcatactttcgatcgtgactgggtggccatgcagaccaagcgaatgctggacatgaaggccaaccccattcagggcttctccgccaagtgggactatgacaagaatgagtggaagaagtgagagccctgctctgncggctccctgcctccctcactccctcggcatgctggaagctgccgtatccaatggtccatgctaataaaa

SEQ ID NO: 369359 - DNA, 587 bp, Homo Sapiens
atgcgcacatgggcccccttcgtctcagctgtgcgggaacggccgagggtaacatcccgggctcgcgggaggctgtcggggtaatggccacacgctgacagaaccagccgagtggaaaaggggagcgaagccgttcctctgcacccttccccaggcctgaggccttcccgcttggtgctgccgccgccactgccggctgaggaggggcgatgagttggttcaacgcctcccagctctccagcttcgctaagcaggccctgtcccaggcccagaagtctattgacagggttctggacatccaggaagaggagccgagcatctgggccgagaccattccgtatggagagccgggaataagttcccctgtcagtggaggatgggatacttcaacctgggggttgaaatcaaacactgaacctcagagtccaccaatagcctctcctaaagcaatcacaaagccagttcggaggactgtggtcgatgaatctgaaaatttcttcagtgcctttctctcgccaactgatgtccagaccattcagaagagcccagtggtatcaaaacctccagcaaaatcacaacgaccagaa

SEQ ID NO: 369360 - DNA, 503 bp, Homo Sapiens
gcatcaagaattaataaatacagtgtatcattattttaaagacatgtttagggaaaaaaccagcttctcttccccttaaagttattggtggtgggagggcaagagaggaagagatggcagctttttaagtgaaattttaatcttatctatcttttgttcattttgagtccccaaataaaatatttctgtactttaatttcttaatcactattgtcagcttggttgctacacatttaattacaatataaagttgacattgaggatgaagaaacttaattatactttttcttatttctatttaaccaataagattttaatagcaaattagaacaagattttacctccttaataactaatggttagataaagtagaatttgtatcaagtaactcggatttcagatttctggatgtaccagttactatgctactgaggagatacatctagttgatgaagttaaaatattaattactactccagttatatgaaaccaaattattttga

SEQ ID NO: 369361 - DNA, 461 bp, Homo Sapiens
  misc_feature (31)..(31): n is a, c, g, or t
caaatgggagcattgcataaccaacaaaccncacatggagacaaaccctagtttaccagctgcctgattaaagcccaagtgcccccaggttgcctgtgaagaatagcccccttccaaatacctttgggaaagtagttacctgggaaacttgtaaagggtattacatttttatatttaaacaccctatagagatcttcaaatcccttgagtctgagcttgtgggtggaaatctaaatttgtatcataatctgtcttttgtgaaacattttgaaaatatgtatatataatattgtatatgcaaattgtgttgtttcacttgtaaagggaaaaggcttatttttctttatatttctgataacttgttttgcatatgaccagcactgactgaaaggcatgtgtagctgcaaacactgttgctttttttgtgaaatgaaaataaaagtatttaaatacaaaaaaaa

SEQ ID NO: 369362 - DNA, 470 bp, Homo Sapiens
  misc_feature (73)..(73): n is a, c, g, or t
  misc_feature (84)..(84): n is a, c, g, or t
  misc_feature (118)..(118): n is a, c, g, or t
gtatttaaatacttttattttcatttcacaaaaaaagcaacagtgtttgcagtctacacatgccctttcagtncagtgctgggncatatgcaaaacaagttatcaggaaatataaagnaaaaataaggccttttccctttacaagtgaaacaacacaatttgcatatacaatattatatatacatattttcaaaatgtttcacaaaagacaggattatgatacaaatttaggaattccacccacaaggctcagactcaaggaattgaagatctctataggtgtttaaatataaaaatgtaatacctttacaagtttccaagtaactactttccaaagtatttgaaagaggctattcttcacagcaacatggaacacttggctttaatcaagacagctgtaaaactaagttttgtctcaatgtgagtttgttgattaatgcaaatgctcccattttgccataattctcatt

SEQ ID NO: 369363 - DNA, 223 bp, Homo Sapiens
  misc_feature (48)..(57): n is a, c, g, or t
  misc_feature (153)..(153): n is a, c, g, or t
  misc_feature (171)..(171): n is a, c, g, or t
gaaactgattatatagaagagttggctttaaaatgtttgcaaatgtcnnnnnnnnnnaatactggaagaaaaaatattctgttgtgtctcatacagtgcttaggatgtctttcacagagcttattaaaaagatgaaacctgagaacaaactgnctttattcttaactcagncccattttgcaaattaaaagtggggggcagaggtgggcggatcacctgaggt

SEQ ID NO: 369364 - DNA, 415 bp, Homo Sapiens
  misc_feature (375)..(375): n is a, c, g, or t
  misc_feature (392)..(392): n is a, c, g, or t
  misc_feature (401)..(401): n is a, c, g, or t
taaagcgctatgtaaatgtaaggtattatagaaacatctttaacatatagtttcataccattcattttttaacaaagaaagggaaaagtctgcttgtaagctggttgaaaaagttaatcttgatataaatttgtgtttgataaatatcctctcagtgttttatcttccatgtttcaacaactattgaaatatgaaatgcctgtgaactcttaaagcttcatgagcagctgcttgagttcagggaagttcactgttaggaaatagggctttgttagctgactaggggtcaggggaaacttttctcttcaaatttgaaaggctgtttctgttttcattttacattattattcaggaatggtagcctattctataccnatgggttttaggtaaanatttcctgnataggggcttccac

SEQ ID NO: 369365 - DNA, 368 bp, Homo Sapiens
gggggacggtcagtttggtgtcaacatgaaacaccaagatgtctgtctctgaagcgtgattttaaaatccccatgcctgtggctgcgcttcctatttctagggctgggaaacactccttgcatcaaggggtcacttacagaacaaagaatcttttgggggaaacttcctctaaaaccctctcatatatagacagctttgactggagggtccatttttcttccaggatggtgttactgcagttgaaagggcaatatgaagttactttcttaatgtgacctagcaataggcatagctacgtggcactatattctggccagactcgatgtgtactctaacttaagaaataaatcagtaaggcagaacaaga

SEQ ID NO: 369366 - DNA, 571 bp, Homo Sapiens
tgagccaccgtgcccggcctgatgtttttgaatgattatgaaaatgggtatacagcattaaaaccttagactgattttaaatatattaatttcttttaaactcaatataatgttaatattactgtagcacttactagcatttctgaaggttggtcttgagataagattgaaaatgacagttgttgattttctgaggtaatatacccaaataaaatatatgtatgtgtacatgaatctaaactgtcttcttctgttcctcattttgctttacttaaataatctttcatattttttaagtgttttgcccatgtgcttgggtagccttgaagtcaccagaataactaggactcaaattcagaccaaaccaggactagctttttgtgccatgagttagccatggtcctggacccagcaaaaagaatgattatgatggtcagagtaagatgagcaattgcaacataatattctctaatattgtatactgtaaatttattcagctgccctcgtttactcacagtttgcttatttgccaccataagaaatggtacaataaaaattcatgtaatcagaa

SEQ ID NO: 369367 - DNA, 413 bp, Homo Sapiens
tgtttatcgatgccaccttgtgatcttcatatggaacataatgtattaaccaaagtatgttataaatcaaaaatggtcaaggttcagcatattctatatgaagatcacaaggtggtatcgttttagatttctatgaaggctctcatttgtacatccctttgaaaaaatataacagatttaacatgtttcgaacttaacttgtttagcaacactaatgcttacaaccatatttgaactactgtacttataatttattacctctaattgctttatttcagtgtatgagacattactgttttaatgctttgctttgaacataatttcaagaaccagatttattttctatagtcataaacccttttttctcagaactccatcttcgtactcttcagatgcatatatgaccctgtggc

SEQ ID NO: 369368 - DNA, 789 bp, Homo Sapiens
tctcatcactgtgcaaagtcatagtctgcgaattgactttggtgaaaagtgtgttactttcagctggtgcttcactttgttttaatcctctgtgcctacccttctgctgctcctggagcgttcttgcccaagagaggtcttctttccatatttcagggttcattggatagatgtgaagggctacttgaaaacttcgaattgccaggattatctctcctaaaccaagttgagcacgtcccaaagtctgccaagactcccatgaatgtggattttgctggacggccatttctgctgcatgtactgctgggaacatttcatgaagagacattagcacctgtgatttcatctcgtatagggtagcatcatttggagttaactgtagtgcttcatcccacttctgaattgcctcccgatatcttttattttcagccaaactggctccttcatccttcagctgtttacttttctcagcacagccttcaagaagaatttctttcctacgtttaatggcatgaagccagttcccttcatcgttgtcaactacatccttctcatcagcagcttcagcttcaaactgctgggaagtgacctttgagaccttctcaccaattttcctcttccacccaaaggaagccattctgccttccctggattcctggtttcctaagaaacgggtttggcccacccctgggcgttcgaacagtccacagaagcgggcaaaggaaagacgactcagtctttcccctccgccaatctcttctccgggaccacaaatccccccctggaaag

SEQ ID NO: 369369 - DNA, 843 bp, Homo Sapiens; identical to SEQ ID NO: 97955
  misc_feature (135)..(158): n is a, c, g, or t
  misc_feature (707)..(707): n is a, c, g, or t

SEQ ID NO: 369370 - DNA, 462 bp, Homo Sapiens
aagtttcttactgccacatatggtgtgaagtgacagtaagttgcttaatgacatcctgcagtatctgcttgcttttggagactccagtgagatgttgaaattgttcctgtgcttggtaactactttcctctgccaggctatgggaaagaggatgtaattgtgaataatatacaccatccagtctttaatgtgctgcaacaatgtagtaatttgtttttttcatttgttcccactgcctttgtgtacatagaaaacttaaaaatttcccccagtctattagaagttaagatgttccctaatttattaaatatgcctttattcacaatttgtttttttaggttattcttaatgcattatagaattaagtatgactttgtttatttttattacagtatgtagttattgacatattgtggtttgcagaattatcaattgtataaactaaacctttaaattaaaaaa

SEQ ID NO: 369371 - DNA, 372 bp, Homo Sapiens
  misc_feature (44)..(44): n is a, c, g, or t
  misc_feature (55)..(55): n is a, c, g, or t
  misc_feature (63)..(63): n is a, c, g, or t
  misc_feature (100)..(100): n is a, c, g, or t
  misc_feature (106)..(106): n is a, c, g, or t
  misc_feature (114)..(114): n is a, c, g, or t
  misc_feature (129)..(129): n is a, c, g, or t
  misc_feature (210)..(210): n is a, c, g, or t
  misc_feature (234)..(234): n is a, c, g, or t
acagtatgtaagaactttcttgtggactcacctagagaaactanaaggaagcctntaccattntagccctgaactattttctgggcacctgaatcccagnaacccncaatgagntcttcaagatgaagngactgctgccagctaccagcctggctggccctgtcctgtcaaccctcattgccccaactcccatgttgttttgtgaagatnaaagctgggatctttttctttttnttaagtctcacaagacatggggcatctccacaaatttaagttcctgtccatttggaaatttgtttctatgtgtacagtttgtcagagaaaaacaaagtttttgtatgaatacagaatgtgatttacgcaagaattgac

SEQ ID NO: 369372 - DNA, 494 bp, Homo Sapiens
  misc_feature (325)..(325): n is a, c, g, or t
  misc_feature (440)..(440): n is a, c, g, or t
  misc_feature (467)..(467): n is a, c, g, or t
  misc_feature (481)..(481): n is a, c, g, or t
acgtattcaatattgagtttattaacaaaagtggatgtgtacatagtcttatctcatatttgaatatacacactgcataatgacagctattttttatcagagcaatgtttcccaaacatagaagcgcagaagtaaaatgttattttcatttttctgtattcttgattttagtttctagaattcataaactcaaaactgttcacataagtttagagtatttgttcttgtttatctctgacaaagaggtgttctctaagaaattttatattttataatctttcctctgaaatatgagaaagacatggaatctcctgagttatatatngcagcttatacattctttgaaaaaattattttttaaaaatatcacaaagtatatatccataatatatgttgctattcacacaattctttaagcaatattcaagtatatttgtgcnttatatttttacattaccttagaaccnatttttagccttcnataaaactatgta

SEQ ID NO: 369373 - DNA, 702 bp, Homo Sapiens
gggaaattggtagacttaaagctgaaattgcaagatcaaatgcatctttgactaacaaccagaacttaattcagagtctgaaggaagatctaaataaagtaagaactgaaaaggaaaccatccagaaggacttagatgccaaaataattgatatccaagaaaaagtcaaaactattactcaagttaagaaaattggacgtaggtacaagactcaatatgaagaacttaaagcacaacaggataaggttatggagacatcggctcagtcctctggagaccatcaggagcagcatgtttcagtccaggaaatgcaggaactcaaagaaacgctcaaccaagctgaaacaaaatcaaaatcacttgaaagtcaagtagagaatctgcagaagacattatctgaaaaagagacagaagcaagaaatctccaggaacagactgtgcaacttcagtctgaactttcacgacttcgtcaggatcttcaagatagaaccacacaggaggagcagctccgacaacagataactgaaaaggaagaaaaaaccagaaaggctattgtagcagcaaagtcaaaaattgcacacttagctggtgtaaaagatcagctaactaaagaaaatgaggagcttaaacaaaggaatggagccttagatcagcagaaagatgaattggatgttcgcattactgcgctaaagtcccaatatg

SEQ ID NO: 369374 - DNA, 365 bp, Homo Sapiens
gggatttctgcagagacagaaagaaacgcagctcttgactgcttttttgtaaacattactgtaagagttgtgataactttttattctactatgtatatgtatggaatagtattaataaatgaactagggaaggatgtaataaattagacatctcttcattttagagagaagatggaaacaacattgcttttcttttctcaaataaatatgtgtgaatcaaaagaaaaaacttttttcaagttaatacatggttcaggaaaagaagaaacaagcaaagaagccaaaatcagagctaaggaaaaaagaaatagactaagtcttctttgtgcagaaaccctgagtttccatggaggcaacccggttcc

SEQ ID NO: 369375 - DNA, 625 bp, Homo Sapiens
  misc_feature (130)..(261): n is a, c, g, or t
  misc_feature (308)..(317): n is a, c, g, or t
  misc_feature (355)..(452): n is a, c, g, or t
ggaagggtcaacatcttttacattctgcaagcacatctgcattttcaccccacccttcccctccttctccctttttatatcccatttttatatcgatctcttattttacaataaaactttgctgccaccnnnnnnnnnnnnnnnnnnnnnnnnnnnnnnnnnnnnnnnnnnnnnnnnnnnnnnnnnnnnnnnnnnnnnnnnnnnnnnnnnnnnnnnnnnnnnnnnnnnnnnnnnnnnnnnnnnnnnnnnnnnnnnnnnnnntttgggggcccccccgccccccaaaaattttttaaaacctttttttnnnnnnnnnnccccaaaaggaaaggaaacagggccaaacttgttcccnnnnnnnnnnnnnnnnnnnnnnnnnnnnnnnnnnnnnnnnnnnnnnnnnnnnnnnnnnnnnnnnnnnnnnnnnnnnnnnnnnnnnnnnnnnnnnnnnncctttacgggatttttcaacgggagcccaagggagctcaaattcaaattaccccccgcccggccatttttggaaaaatgggggaaattcttaaaccttttgccccaaggggaaccctccccaaggggattgataaacctgattccccaggggaataaaaacccttggccccct

SEQ ID NO: 369376 - DNA, 592 bp, Homo Sapiens
gggagtcgcggcgatcttctcctcgcttctggagtgttatcgtcaccatgtccctaatggtctcggcatggccggggcatgggggccgtcgtggtccccaacccacgtgcaggtgacggtgctgcaggcgcggggcctgcgggccaagggccccgggggcacgagcgacgcgtacgcggtgatccaggtgggcaaggagaagtacgccacctccgtgtcggagcgcagcatgggcgcgcccgtgtggagcgagaaggccaccttcgagctgccatcgctgctgtcctccggacccgcggccgccgccaccctgcagctcaccgtgctgcaccgcgcgctgctcggcctcgacaagttcctgggccgcgccgaggtggacctgcgggatctgcaccgcgaccagggccgcaggaagacgcagtggtataagttgaaatccaaacccacgaaagaacgacaaggaggcgaggagaaattgaggttgacatccaggtttatgagaaacaacatgactgccagcatgtttgacctttctatgaaaaacaagtctcggaatcatttggaaagctgaagacaagatcaaggggaagat

SEQ ID NO: 369377 - DNA, 652 bp, Homo Sapiens
cgtttatcgatgcctcagtgtcagaggaggaggccacctttgaggtgctgctgctactgtacttgggcttcgccgaggtgtacctgcaggacctgcacccagactaggggagcaggaagatgcggtggtataccttgaaatcccaaccaggagagaaggataaagaggagaaattgaggttgacatcccgcttatgagaaacaacatgactgcccgtatgtttgaccttttcatcaaagacaagcctcggaatccctttggaaaactttaagacaagatcaaggggaagaatatggatagtgcatcaggtgctgcctcccacatagtctccagcactacaccttcagtccaaagtgatgattagtcttcgtcccaagacaagaaggatcaagaccttgttttccaagtctaatttgcagaaatttcctgatccatgattgccctgtagacatcaaagctaaaatgctgcctcaactgggagactttcagtcccggtgggacaatgacaacaatgagagggactcctcttcagcttcagatgtcatgtctcacaagacaaccgcaagtacatatcttaagcagctaaacgaaatcaatgtcacccttccccaaatggaaggtgcatcgataaacccggggatccttagatcga

SEQ ID NO: 369378 - DNA, 819 bp, Homo Sapiens
gggggccgcgggtggcgcggagggaggccttgcgggcggatcgggcgcttggcggcggaggtggtgggaggcggcgggcgggagcgcgggtcaggccggccccggcgatggcggacgcggcggcctccccggtgggcaagcggctgctgctgctgttcgcggacactgcggcctcagcctcggcctcggctcccgcggcggcagcggcgagcggagatccggggcctgcgctgcgcactcgagcctggcgggccggcacggtgcgggccatgagcggggcggtgccccaggacctagcgatctttgtagaatttgatggctgtaactggaagcaacactcctgggtaaaagttcatgctgaggaagttatcgtgcttctgctggaagggtctcttgtatgggcgccccgtgaggacccagtccttccccagtgcattcgagtctccattgcacaatggccagccctgactttttactccccttgtaaataaactgggtttgggttctgtgggtccagtggaatatcttctggatcgagagcttcgcgttcctgtcagatgccaatgggctgcatctgtctccgatgggaaccgatagccaaaaccagattcttttgcgacatgctgccactgaaagaaacagttaacggctttgatccgtgaccaaaagcgtacaagagatatttcggccggaaggtcccctacagtggtttcagggccccggggtcacaaaatatatcccccccacaggggggaaaaaagggctgggcttctattgggggttggcgaggccattaacggaccttcccattcactccgg

SEQ ID NO: 369379 - DNA, 1081 bp, Homo Sapiens
tctcagggcgggaagagaatcgagttgatgccacccgggttcccatggactagaggttcagaaccgtgaagaagaaactagaagagggaatggtgttcacagaatatgagcaaattccaaagaaaaaggcgaatggcattttcagcacagcagctctgccagaaaacgccgagcgcagccgaatccgtgaagttgtcccctatgaggagaatcgagtagagctgataccaaccaaagaaaataacacaggatacattaatgcctcccacatcgaggtggtggttggcggggcagaatggcactacatagccacccagggcccctgccacacacgtgccacgacttctggcagatggtgtgggagcagggagtgaatgtgattgccatggtcactgcagaggaggagggtggacgaaccaaaagccaccgatactggcccaaactaggttcaaagcacagctcagccacctatggcaagttcaaggtcaccacgaagtttcgaacggattctgtttgctatgcaaccacgggcttgaaggtcaagcaccttttgtctgggcaagaaaggacggaggggcatttacaatatactgactagccagatcacggctgtccagagggatgtccaagatttttatcctacttggaggagatccagtcggttccgtcgcataccaaacagcatgctggaaggcaccaagaaccggcaacccggccattcgtggtccactgtagtgctgggggggaaggacaggggtgctcattcttcggagctgagaacaatggtggactaacgagaggggagtgccctgatgcgaaggcccccgggacaaaggagtcaagaccgaaaacggcgaaaaggtgtttacacgaccactacagaccccaaatccacagccattatagccccaacagccggaggagggccagccactcgccgcaggaagaaccagaaaatggtcccccaaggtgagagggggcgaacagggacctgaagagcgatttcagaacgtgtgctgggagaagtgccgcaagcgaggatatacgacgggatgaagagagcgagagagatgagaaggaa

SEQ ID NO: 369380 - DNA, 943 bp, Homo Sapiens
agacctagccagacagctacaagcaccatgaatccttctccaggtccctctcccctttctccgggatcatcagggtttatccaattctcacacacctgtgagacccccaaagtacttctagtactggcagtcgaggcagctgtgggtcatcaggaagaactgctgagaagacaagtcttagtttcaaatctgatcaggtgaaggtcaagcaagaacctgggactgaagatgaaatatgtagcttttcaggaggtgtaaaacaagaaaaaacagaggatggcaggaggagtgcttgcatgttgagcagtcctgagagtagcttgacaccacctctctcaaccaacctgcatctagaaagtgaattggatgcattggcaagcctggaaaaccatgtgaaaactgaacctgcagatatgaatgaaagctgcaaacagtcagggctcagcagccttgttaatggaaagtccccaattcgaagcctcatgcacaggtcggcaaggattggaggagatggcaacaataaagatgatgacccaaatgaagactggtgtgctgtctgccaaaacggaggagatctcttgtgctgcgaaaaatgtccaaaggtctttcatctaacttgtcatgttccaacactacttagctttccaagtggggactggatatgcacattttgtagagatattggaaagccagaagttgaatatgattgtgataatttgcaacatagtaagaaggggaaaactgcgcaggggttaagccccgtggaccaaaggaaatgtgaacgtcttctgcttaacctctagtgccatgaattaagtattgaattccaggagcctgttcctgcttcgatatctttactactataaattataaagaagtctatggatttatccaccgtgaagagagtagcttcagaaaaaacattcccgactttatctaattc

SEQ ID NO: 369381 - DNA, 751 bp, Homo Sapiens
cctccccctcttaagggaactttcgggggctccctttttaaaaaaacctaaggttttttccggagggtattacttttccctccccattaaaaagggaattgacccctttttaaagttttgcctaatccatatcttcctaaaggtaaccccccatccaaatccaaggcaattggaccctttccctttcccctcaaaaagttttctttatgcccaaatccaaagtcattctgctatccctgactcaaggccaaaccactaaggatttctatcattatgcatccagttttctcttgaacaagctactttttatatggtactatcctcatttgctgttggtgttagagagctatgtagaagatggctctgactaaaaagaattcataataggtaaaagactcataaatggcctaaagaaactgctatagcaatatacagaaacaattcaaagcactctagttatcagaggttatcagtgaagattcatgaaaaaggagatgcatgaacttagctttcaaaagatagataacatttctaattttttgaaaaaataatacttttatatggttttaaaaaatcaaaatatattaaggtacagtatgctgtgataaactgccctcctagctccgttctttataaccactagtttccttcctaagataattactacaagttttagtccttccttccattggcattttatgtataaacaaacaaatatgaatatatgtcccactgtggtataagaagaaat

SEQ ID NO: 369382 - DNA, 845 bp, Homo Sapiens
  misc_feature (115)..(192): n is a, c, g, or t
  misc_feature (218)..(330): n is a, c, g, or t
ttgttttagtatttcctaaataagggcattccaggttcatctttttctttttcctcccaaccctttatttaaaataaccttgaccactttgggagggccaagcttgggcagatcnnnnnnnnnnnnnnnnnnnnnnnnnnnnnnnnnnnnnnnnnnnnnnnnnnnnnnnnnnnnnnnnnnnnnnnnnnnnnnttagcggggccatggtgacgtgcacnnnnnnnnnnnnnnnnnnnnnnnnnnnnnnnnnnnnnnnnnnnnnnnnnnnnnnnnnnnnnnnnnnnnnnnnnnnnnnnnnnnnnnnnnnnnnnnnnnnnnnnnnnnnnnnnnagactccatctcaagaaaaaaataaataaataataatttgtgtatgtgatgactgactctagtcattatggaaaataacttttggcagtttagttcctacttgttaacaattcctctttttaagagaggtactacatttgatttctcaatttctcagtttgttttcaatacaaacagcaaccactgaaatgcagaaaatggtaatcaagtgtgatgtttctataaaaaataattgagattcacatgtaatagaccctttagctttaatgagcagacatgagaatggtttatgatcttaagttggtaacataggaatatgtatttgtcaattttagttcacaaacatatccataagaatgtttacacatggcagtatcaaagcatataaaatattttctatgtaagtaaattgcatcttttatgctagggaacaaagtagcaataaatgttcatttttggatggcagtacacattgttaacaatcgtgtaattataataaatatgtctacctactc

SEQ ID NO: 369383 - DNA, 819 bp, Homo Sapiens
  misc_feature (102)..(102): n is a, c, g, or t
  misc_feature (300)..(559): n is a, c, g, or t
atgacaatactatcctatgtaccaactaagatcataaccatctcagtctgctcataaagctaaagggtctattacatgtgaatctcaattatttttataganacatcacacttgattaccattttctgcatttcagtggttgctgtttgtattgaaaacaaactgagaaattgagaaatcaaatgtagtacctctcttaaaaagaggaattgttaacaagtaggaactaaactgccaaaagttattttccataatgactagagtcagtcatcacatacacaaattattatttatttattnnnnnnnnnnnnnnnnnnnnnnnnnnnnnnnnnnnnnnnnnnnnnnnnnnnnnnnnnnnnnnnnnnnnnnnnnnnnnnnnnnnnnnnnnnnnnnnnnnnnnnnnnnnnnnnnnnnnnnnnnnnnnnnnnnnnnnnnnnnnnnnnnnnnnnnnnnnnnnnnnnnnnnnnnnnnnnnnnnnnnnnnnnnnnnnnnnnnnnnnnnnnnnnnnnnnnnnnnnnnnnnnnnnnnnnnnnnnnnnnnnnnnnnnnnnnnnnnnnnntcaagttattttaataatggttggagaaaagaaaagatgacctggatgccatattaggaatactaaacaattcagtaacctcattaaaaattgcttctatttgctatggtattaaaggacaatggctttatcctaccaaatataaaagccacttttcatgtgagtctttttccaagacattaaatcataaaagtttatttcagggaaaaaatacaacattttaaagcttcctttacctagatttccatttctaattacac

SEQ ID NO: 369384 - DNA, 1049 bp, Homo Sapiens
ggattaatcgccagattacaaatgcagacttgtggaagcatcagaaggatgtgtttttgagtgccatatccagtggagctgactctcccaacagcaaaaatggcaacatgcccatgtcgggcaacactggagagaatttcagaaagaacctcacagatgtcatcaaaaagtccatggtggaccatacgagcgctttctccacagaggaactgccacctcctgtccacttatcaaagccaggggaacacatggatgtgtatgtgcctgtggcctgtcacccaggctacttcgtcatccagccttggcaggagatacataagttggaagttctgatggaagagatgattctatattacagcgtgtctgaagagcgccacatagcagtggagaaagaccaagtgtatgctgcaaaagtggaaaataagtggcacagggtgcttttaaaaggaatcctgaccaatggactggtatctgtgtatgagctggattatggcaaacacgaattagtcaacataagaaaagtacagcccctagtggacatgttccgaaagctgcccttccaagcagtcacagctcaacttgcaagagtgaaattgcaacccagtggtctgagggaggcttctatggtgtttcgaaatcatgtggagaagaaacctctggtggcactggtgcagacagtcattgaaaatgctaacccttgggaccggaaagtagtggtctacttagtggacacatcgttgccagacaccgataccctggattcatgattttatgtcagagtatctgatagagctttcaaaagttaattaatgactgcctcctgaaaccttgacaactaattcagattttttagcaataacaaaatgtagtaggcttaaaaaaaatcttaactctgctacatggctctgactgctgtgggggattgaaaagaatatgcttatgtttgatgaaagatatttaacaagttttgttttaacagagttgacttttcaaagaaaattgtacttgaattattactataatattagaataaaaatgtttatcaatat

SEQ ID NO: 369385 - DNA, 1275 bp, Homo Sapiens
gttctgctgccagtgtgtggacgtggtattttacaaccccaatttaaagaaagttgtagaggcccacaagatcgttctctgcgctgtaagccatgttttcatgctgcttttcaatgtgaagagtcccactgacattcaggattccagtatcatccgaactacccaggatctttttgctataaacagagatactgcatttccaggtgctagccatgaatcttcaggcaacccaccattacgagtcattgttaaagacgccctcttctgttcttgtttatcagacatccttcgcttcatttattcaggtgcttttcagtgggaagaattggaagaagatatcaggaagaagttgaaagattctggggatgtttcaaatgtaatcgagaaagttaaatgcattttaaaaacaccaggaaagattaattgcctaaggaattgcaaaacctatcaagccagaaaacctttgtggttttataacacttccctcaagtttttccttaataagccgatgcttgccgatgttgtcttcgaaattcaaggtacgacagtgccagcccacagggccatcctggtggcccgttgtgaagtgatggcagccatgtttaatggtaattacatggaagcaaaagagtgtcctgattcccgtttatggtgtttccaaagagactttcttgtcatttttagaatacctgtacacagactcctgctgcccagctggcatattccaggccatgtgtctcctgatctgtgccgagatgtaccaagtgtccagactgcagcacatctgtgagctgttcatcattacccagctgcagagcatgccaagcagggaactggcatccatgaaccttgatatagttgacctgcttaaaaaggccaagtttcaccactctgattgcctttcaacctggctacttcatttcattgctactaactacctcatcttcagtcaaaagcctgaatttcaggatctttcagtggaagaacgcagttttgttgaaaagcacagatggccgtcgaatatgtacttgaagcagcttgcggaatacaggaagtatattcactcccggaaatgtcgttgcttagtaatgtaacctggagcttttatacactacatttcttttttattattatgaagaatgggatacctccaggttccagtaaaattcttctgaccgaaaccaatgtgggtgttagaaaaattaccatatagcttaatatgtttattagttctctttggaaaaaaactaccactgtggtcttaaaagggaacaa

SEQ ID NO: 369386 - DNA, 523 bp, Homo Sapiens
  misc_feature (17)..(17): n is a, c, g, or t
  misc_feature (36)..(36): n is a, c, g, or t
  misc_feature (51)..(51): n is a, c, g, or t
  misc_feature (56)..(56): n is a, c, g, or t
  misc_feature (75)..(75): n is a, c, g, or t
cccggcctactcaatcnaggccctactaactacccncacctcagtcaaaanccccnaattccgggatcttccaanggaagaacgcagttttgttgaaaaagccacagaagggcccgtccgaaatatgtacctgaaagcagcctgccggaaaaacaggaagtaatattccactccccggaaatgtccgttgcctagtaatgtaaccccggagcttttaaaacactacatttcttttttattattatgaagaatgggatacctccaggttccagtaaaattcttctgaccgaaaccaatgtgggtgttagaaaaattaccatatagcttaatatgtttattagttctctttggaaaaaaactaccactgtggtcttaaaagggaacaaaatataccataggctaaaactaaggctttcactctagaatgcaaagctgttttgcagctgttttcccttaaagatgtcctgttgctttagtgatatttagacccctctcagttaagaaatgcttagattaaaaaaaa

SEQ ID NO: 369387 - DNA, 637 bp, Homo Sapiens
  misc_feature (403)..(525): n is a, c, g, or t
ggcaggcttcctgattccacgctcaaagcttcttaaatcaactgagcagttgtgcctcattctgtgctcactgcccttagtgctttgagcgaacacccttggttttgggccatcctgaggcaagtgatgctaaaagtactcagtatttacatgacctgtttctgaaaacagatcatgtaagcagaaaactgctattacgagctataataactagtatttccttaaaaagtataccctacgaatccaatgcatatgacaacagtgtttttgacagcacatttttattcaataaatatggtttgtcatattaaattgcatctgtgttttagtggggaaaaaatgatccatgcccttaaataataaaagcacatttaagaatatattataccagtttatccgtttnnnnnnnnnnnnnnnnnnnnnnnnnnnnnnnnnnnnnnnnnnnnnnnnnnnnnnnnnnnnnnnnnnnnnnnnnnnnnnnnnnnnnnnnnnnnnnnnnnnnnnnnnnnnnnnnnnnnnnnnnnntgagaaccctcatatgggctgatgtggaatgggcacttgggatcgttatatggaaaagtacctagcagtgtggtgtgtggagtatggtattattttgagtaaactagtaaaa

SEQ ID NO: 369388 - DNA, 1348 bp, Homo Sapiens
  misc_feature (947)..(947): n is a, c, g, or t
  misc_feature (1127)..(1135): n is a, c, g, or t
cttctatgccagcaagtcctgtattaaccaaggctggaattacttggttatccttacaatggagtaagccctcaggaacaccatcagatgaaggaatttcttacattttagagatggaggaagaaacttcaggatatggttttaagcctaaatatgatggagaagatcttgcttacacagtgaaaaatctcagacgtagtactaagtataaatttaaggttattgcttacaactcagaaggtaaaagtaatccaagtgaagtagtaaaatttactacttgccctgataaaccaggcatacctgtaaagccttcagtgaaaggaaagatacattcacacagttttaaaataacctgggatccaccaaaagacaatggcggagcaaccatcaataaatatgtagtggagatggcagaaggttctaacggaaacaaatgggaaatgatatacagtggtgctaccagggaacatctttgtgatcgactgaatccaggctgtttctatcgtttacgagtttactgcatcagtgatggaggacagagtgcggtctctgaatctttacttgtgcagactccagctgtgcctcctggcccatgcctccctcccagattacagggtagacccaaagcaaaagaaatacagttacgatggggaccccctctggttgatggtggatcacccatttcctgttacagtgtggaaatgtctcctatagaaaaagatgaacctagagaagtttaccaaggttctgaagtagaatgtacagtgagcagccttcttcctggaagacatacagcttcagactacgtgcagctaacaaaatggggtttggaccattttcagaaaaatgtgatattactacagccccctgggccaccagatcagtgcaagccccctcaagtgacatgtagatctgcaacttgtgcacaagtgaattgggaggttccntttgagtaatgggaacagatgtcactggatatcgactggagtgggggaggagttgaaaggaagtatgcaaaatatgttacctgggggccctggtctccgtttatgaaataaaaagggacttttccccaagcaacctaccctatttaatggcaagggtcccaaggcttcctgagttggttnnnnnnnnncgaaggccccttttcagtggaaagtataaaagccctgggtgtggacctcccaccattccagtttccctgggcaatttgggggaccctggttctttccaagaaaaaataaggcggatgggatggtggataatgaaaaaatcccccccactttaatttccaccccttttcataacatgtgcctttgggccaaaatagaaccttgtggggaaaaat

SEQ ID NO: 369389 - DNA, 1368 bp, Homo Sapiens
  misc_feature (422)..(430): n is a, c, g, or t
  misc_feature (735)..(735): n is a, c, g, or t
  misc_feature (810)..(810): n is a, c, g, or t
  misc_feature (953)..(953): n is a, c, g, or t
  misc_feature (1022)..(1022): n is a, c, g, or t
  misc_feature (1060)..(1060): n is a, c, g, or t
  misc_feature (1065)..(1065): n is a, c, g, or t
  misc_feature (1332)..(1332): n is a, c, g, or t
  misc_feature (1334)..(1335): n is a, c, g, or t
acgggcggacactcggccgggcagccgcgggccgagcgcagccgcctccgccaccgatgcgcctggtggccagactccaagtgggaccggcgcagatgctccctctcgtgtctggggaacctaatggctcttctatctctgcacctgcccagttgggactcgtatggtgggacctgggagtggtgagtaatggctgatccctacaacgtggatgctgattggtgagaattctatacacccgcttgcgacctccaaatacaaccttccctcgcgaactctgccaattgcattctttccctctgccgcacagagctctcctcactatctttcttcttatctggcgcatccctggcttctcctgtgctccgccctcagatccccccaatcaaccatcgatatccgctctacatttcttcacccannnnnnnnnatacccactcctatcaaaattcccacttatcgcactcacattccttaccaacaattaactgccctgaaatataatttccacgcgtttatctgttattttcaagcgtctccgttatccgtctctgcttaaatcttggtggcgcttctaggaggaattgtttaaggaaaagagatgtaggatccctgactatagtagtgcttgttcagtatccttcctagctatctatgctgtgcgttcgtaggctgagatgagcgagtctcggcgagtatcattgactggagtagtaatcatccgcgctctccccnccgctctttcacctgtacgcagtcacctcgcgcagtgatcacattgtaccgcccgtgtgccttgcaggaatgacnacggacgcgcgggacaccgcatccggaccgcgcgttgttgtacaccctcacgtatcgtgcaccacgtgtcacgacacacggatctcagcacgcagtctctctgtctctcccgttcgcgatctcctgagggactccccggacanttcccctcactactctcccccacactttctctattcaccgctcgccccgtatccactaccgagcatgtngtaaaccacctagcttatcttttccttcaccccagcangaccntatgagtactctaataactcttctttatttagcaagtgacacatcctgacctcgttcttacgtctctgtgtacgacacgacccgcctcgcgtcatgtcacacaatgttgtacctcgatatagtattcatgtaacgaatcactcctccgtggctgagcgcacattctgtttctgatacacgatatcccagccgacttaaacctctattaatttttcaccacgaacaccgcattacgcacacgtatttattatcacgccaccaagtttngnngtctcacgcacatccgttactatctcctcgacg

SEQ ID NO: 369390 - DNA, 838 bp, Homo Sapiens
  misc_feature (733)..(733): n is a, c, g, or t
  misc_feature (772)..(789): n is a, c, g, or t
agcggatcgaagcgcagggtggcagccccggagccggggaatgtgaagagctctcggctgtgcagtggtaccgtcggggcctgggccgcgaaggatcttctgccacagctgcaacatgggcggcaagaacaagaaacacaaggctccagcggccgcggtggtccgggccgccgtgtctgcttccagagccaaatctgccgaggctggaattgccggggaggcccaaagcaagaagccagtgtccaggccggccaccgctgccgctgccgctgccggctccagggagccccgtgtcaagcaaggtccaaaaatttatagttttaattctacaaatgattctagtggtcctgcaaatctggataaatctattttgaaagtggtaattaataacaaactagagcaaagaattattggagtgatcaatgagcataaaaagcaaaataatgacaaaggaatgatttctggaagacttactgccaaaaaattgcaggatttatacatggctttacaagcattttcatttaagacaaaggacattgaagatgccatgaccaatacactcttatatggaggtgaccttcattctgccttggattggctctgtttaaacctttcagatgatgcacttcctgaaggattcagtcaggaattttgaagagcagcaacctaaaagtaggcctaaatttcagatctcctcaaatacaagccactatttcacctccattgcaacctnaaacaaaaacatatgaagaaggacccctagagtaagccnnnnnnnnnnnnnnnnnntatggaagtaaatatgaaaagagtggattttacgatatgctgaaccacc

SEQ ID NO: 369391 - DNA, 937 bp, Homo Sapiens
  misc_feature (98)..(98): n is a, c, g, or t
  misc_feature (108)..(108): n is a, c, g, or t
  misc_feature (532)..(551): n is a, c, g, or t
acatcataggggcagtttggctgccctttccctgtctggagactcccatctgattaaccccaagatttgtaaatatccacagggtcagttttgatgtngagagattgntcatccataattcccttcacgactggggccaagatctgtctcagggcattctggccacgggcaccacggttgaaacttacaaccattttaataaccgtaggatttcctgtcacaatctcttgaatctgatctaccttcgacttgatttcctcttggagtgctgtcttaaagagccgcaggagcaggtactcctctcgctggttggacgcgtagttgtagagtgtgaagattacagagtccatgaacttggtggacttgttctggggcatctgaaaaatgagcttggccagataggtgggattggtttgcaataaataaaacaggtgctggtaagcttccaacttctctctcttctccttgctcaaagccttgagacctcccttctgtttatttatcatcatcatatcagacaactgttccttannnnnnnnnnnnnnnnnnnnactgtgggaaaccacatcctgcaacgtaatcttatttttcactagcagtccaattttgatatccatgagattgaggtcattctccagctgctggttagaacgaatgagggtgataacctcttcccgcatcttcataaggtcaagctcctcctgaaaatcctggtcacattggtccagcaggtggacaaattttcggaccacaaccataggaggatcctcagcattgatgagagtcttgtagtcatcccgagcttagtgtgcccgaataaaagcctggatttagatactgtcatttatatggtcccggaagtactgcaggcgatctcgatagcgctttcgagcttggtgcatccttgacagggactgaatctttacaacttcatctt

SEQ ID NO: 369392 - DNA, 1346 bp, Homo Sapiens
tcaacattcgattattggaggcctacttgcagcatattacctatcatggagaggagatattcaagattaaagcagtgcaattggctagaaaaactccttcctgcctttaacacacctactgggattccttgggcaatggtgaatttgaaaagtggagtagggcgaaactggggctgggcatctgcaggtaccaactattctggctgaatttggtacactacatatggagttcatccacctcgagctacttgacaggggacctgacttactacaaaaaggttatgcacattcggaaactacttcagaaaatggatcgtccaaatggtctttatccaaattatttgaaccccagaacagggcgctggggtcagtatcatacatctgtcggtggcctgggagacagtttttatgaatacttactgaaagcatggttgaagtcagataaaacagaccatgaggcaagaaagatgtatgatgatgctattgaggctatagaaaaacatcttattaaaaagactcgtggaggtcttacctttattggagaatggaagaatgggcacttggaaaaaaagatggggcatttggcctgctttgctgggggaatgtttgcactaggagcagatggttccagagcagataaagctggtcattatttagagctaggggcagaaattgcacgtacttgtcatgagtcatatgacagaactgcattaaagctaggtcctgaatcattcaagtttgatggtgcagtggaggctgtggctgtccggcaggctgaaaagtattatatcctccgtccagaagtaattgaaacctattggtacctatggcgattcactcacgatccaagatacaggcagtggggctgggaagcagcactggccattgaaaagtattgccgagttaatggtgcgttttctggagtcaaagatgtatattcctctactcctacacatgatgatgtacagcagagcttttttcttgctgaaacattaaaatatttgtatctgctggtctccggtgatgaccttttacctttagaccactgggtggttaatacagaggctcaccctctgcctgtgttacatttacccaacaccaccctttcaggtatcctgctgttcgaagaaagcagttccagaaagaccctttctcacctgtgggtttggttacctggaccccctaccgaaattagtttggaaggggcggcgtttttggaaaacccgggaccctccatggcaaacaggacagggggggaaacattttccccccctaagaactggtcccaacttgggagaaaacatctcaacctttgggaaattatatcccccttttttaaaccccgg

SEQ ID NO: 369393 - DNA, 379 bp, Homo Sapiens
gctcctacccgacggggtgggggtggggtgggctgtggattctgctgatgtcaggactctttgccgacctgatcaacactcacccggctgctcctgccgccgcctcgcctcggagccgggagaccagcttctcacttcctcgcctgatagactcacggatcttggagagtgagctgctgcggcgaagggcctggggaggggccggggatgctgctcagtcccccaggcccatgcagtccccacgcccaccccaggagccgaagcacagcccatcctcacctgttctgcgtcaccagctgtgcctgtgttgggggcacctagggggaaagatgggggacactgagatggggacatagagaagccaccccgtcgggtggag

SEQ ID NO: 369394 - DNA, 827 bp, Homo Sapiens
  misc_feature (23)..(23): n is a, c, g, or t
  misc_feature (45)..(45): n is a, c, g, or t
  misc_feature (131)..(131): n is a, c, g, or t
  misc_feature (138)..(138): n is a, c, g, or t
  misc_feature (163)..(186): n is a, c, g, or t
tggaacagttgaagggaaacttnatcccaggagggagggcagctnggaagaaatcttgaccaaagcccttctgaactgctctcatgaatggtgcaccacggaagagcccccagtgactgcaggaggcaacncctgggnatacagatttgtgtgtgtaacatgnnnnnnnnnnnnnnnnnnnnnnnngaaagggaaggcccaaacacgaaaggtgtccttatggtcagacaccctaattagactccccgtcccctggtcagccagccagctactagccacagctcagagactaaagccctttctgaaaatcaggatacagggaaaaaccaccactcttcagctacctctttgttccccaaaccctctgctcactgggaagtgggcaaagccttcagatgagaccatctgaggtctatataacccagggtttgtttcacagctttcatagattatggctgtcctatcccctgccctgtctggaaacattaggagctcaagactgaacatgaagctccaattgtgagctccaggaaggtggaagaaacagctgcaggcacaggttgttcaaaccaaaatgaaacaggaggggaggaattagaactgagtcagtgatgccatgagggaatgaccgtcctgtcaggaacatgagtcttggtcttcctaaattcgactgagaatggcctggttctagccactcttccccactagagagctgctggggaaatactggctaccatagctgtggatgggagggagcacaaagtcaatccgagcaggaatgacaccagcaaagttgcctcctactgtagttacagtccctgctcccc

SEQ ID NO: 369395 - DNA, 799 bp, Homo Sapiens
  misc_feature (38)..(38): n is a, c, g, or t
  misc_feature (52)..(52): n is a, c, g, or t
  misc_feature (661)..(674): n is a, c, g, or t
aagcaaaaaggaaccactgcccgtccaccggacatttnaaaaaaagaaatgnactgaggtgaataaagcccccaggaaaattaacagaagtagccaactgccccagaaggagccagaaacagaaaagcagaatttcccatttacaaatgatgacagtactgtgaaagctccccagaattagcagtaagaagcacaactctgcaggttcattatactctggacacagtatatgtttcttctcttctgaatttcaaggtaatatgacatttgcttaataaatgaaaattcataatatagaagatggaggacctcagtaagtatttagatattaaagacaggaacaaagtggccattttggaattagtcttttatcaaaagttatccaagtctatttttcatgagaattaccagggtattatctgcaaattaaaatgccaagcctccaaatcctcataggtatcaattaattatattttccattcctgtctcaacaatttcaacttcctgttttgagcaaactcatcagcttagatttatcaacatcttgttttaaacccttcaaagaacattatgaataaagagaatttaaaacgtttctcagctgagacatcctcattctcaaatgagaatattggcttaatttagagtttctacatggctnnnnnnnnnnnnnntgtttaaatacgtgatactgagttttccagtcatggtaaagggtttgtgctaactgacctcttctttccttgcagggctaactgcagctacctagcaaaattactagctggagttactggtgccc

SEQ ID NO: 369396 - DNA, 767 bp, Homo Sapiens
ggagatgaggctctcactccaggtgatgaatgcatggatgggatactggatgaatctttgcttgaaacctgtccaattcagtcaccattacaagtttttgcaggaatgggtggactggctcttattgctgaaagactacccatgctatatccagaagtaattcaacaggtgagtgctccagttgtaacatctaccactcaggaaaagccgaaggatagcgatcagtttgaatgggtgaccattgaacagtcaggggagttagtttatgaagcaccagaaactgttgcggctgaacctccacctatcaagtcagcagtacagaccatgtctcccatacctgcccattctttggctgcttttggattatttcttcgtcttccgggctatgcggaagtgctactgaaagagagaaaacatgcccagtgccttcttcgattggtattgggagtgacagatgatggagaaggaagtcatattcttcaatctccatcagccaatgtgcttccaaccctttcctttccacgtcccttcgtagcttgtttagcactacaccctttgacaactgatgatggtgtacttctaaggcggatggcattgggaaattggagccttacaccctcattcttgtctgtctctctgctttgagccaccattccccacgagttccaaactctaggcgtgaatcaaactgaggccacaggtggtcaagctcttcataaccctacatcaacagaaagaacaacagttatattggggccaaagggact

SEQ ID NO: 369397 - DNA, 892 bp, Homo Sapiens; identical to SEQ ID NO: 264277
  misc_feature (812)..(822): n is a, c, g, or t

SEQ ID NO: 369398 - DNA, 748 bp, Homo Sapiens; identical to SEQ ID NO: 33190

SEQ ID NO: 369399 - DNA, 950 bp, Homo Sapiens
ccccgggaagcaagacgacaaactggggccacttctgctgcacgggtccctgtgccaccttgatcccctctttgcacagccacctccgggggaggatcatgacgttgctttccagcatctgcagccctggggtgccattggcttgcagcaggggtgtggaccacatcttccagcttgttctcctcctcagcaggaatgcaataccaaatgcagtcagcaccagtgtgtaagtagtcaatgtatggaaggtgattttggtctcgagaccagcatgaggtagaaaagaccatgccaatatttagccagggaatagtcactccaggcacagcaccgaggtgacgcaggatggaccctgtgttattggggaggacggtgaggttccatccatgcctcgaaaagggttctgattttcctactgggaatccactgccgtgagtgttggtgtccaccttgccgcagtgcactgccacgtggcagtccttctcttccactagcctccagtactcttgctcgatttcggctggggcaggctccttgctgaaacacatgctcatgatattcctcgctgttcgataaaaagttgttagagaaacagaccttccttatagagtacaatggaagacatgatgaagccgatgtacgtctgtgcccctactgccaggaccacttcctagtctccgagagttgtgtagtacgacggcccacctagtcttttaatatcggactctaggctactacgcgtccgtagatgcgatggcttgcaggaacgcctgttccgtggggagcaaacgtccgtaggagtgagaccatttattgggctcaatagcctgagcagagggtggaacgtggtggtaagtcgttctacgagtctggctttacaacgaccccttgagtgttgtacaggatctctgttcgtcgatcagcagcgctccgtttgtacagccagcctc

SEQ ID NO: 369400 - DNA, 873 bp, Homo Sapiens
  misc_feature (134)..(134): n is a, c, g, or t
  misc_feature (674)..(713): n is a, c, g, or t
ttctaagacatgtccaccgagtgtgtgtgactcaagactcaagagtgaggctaaactgcgaccccgacatcacttccttcatggaaaggtgttggccctgatgtagctcatggaaggatcagactgggaaccancagaggaaggatgagctggcatgtggaggtcagagcatctcacgagagtccctcaggctctgcaacactagattcgaatatgagcctagggtttccccaacacgtgcgtgcatatgaaaccacatcatgattcccgacgtgagttagatgagggagagtttgtgtaactccacacccaggagggtaagccactttattatcatgctttggggctgtgcttaagaatttaagctctgttttaaagccgaagaagaaaacatttgaatttaccttcatatgccactaagaacaaaagctctgaagttcttcctgctggcaccaaatattaggattacaagctgtctctctgacaccagtggtaaaaaagcaagtagaatagtttctgagtctgtgttgcagcctctgacacgtggctcaccgctgtcatttgggggatggaatgaacagtcactgttctatagcatcctcctgtgctcttacctaaggaatctaaattgtcctagccttccactgctatgcactgaatgaggactactctcnnnnnnnnnnnnnnnnnnnnnnnnnnnnnnnnnnnnnnnntggatctactaacatgtttagcaaatggctctgacagggtggccatgagcagatgagaccagctcttgcttggttggaagccacactgcagtttgcagtttagcctttggtgtctcagtggcctcttgcttattccatgctttttctatcccattctctc

SEQ ID NO: 369401 - DNA, 515 bp, Homo Sapiens
  misc_feature (187)..(187): n is a, c, g, or t
  misc_feature (239)..(256): n is a, c, g, or t
  misc_feature (313)..(313): n is a, c, g, or t
  misc_feature (515)..(515): n is a, c, g, or t
tattttacccccttgggggcgcccaattgggtttggggccggcccggttcccctctgtgtaaattcccccccagggtttaaccttgggggaagggccttgaaggaacagggggggaaaattgtgctttggaaacccttgggaagggccgggaggggttgccaagttgaagcttgaagaatgggccgnccaattgccaattaccagccctcgggcaaaaaagtgaggacctccattctcnnnnnnnnnnnnnnnnnngtgggtaaaaactgggaagtgaaacagacattcacttagtctggaagtatctccccnaaggtatttatggatgacaaagggaaaacagtaactatgtaggggagaagccccggcagccgctgccaccacctgaactaacaggaccaggagttggacagactgacattgcatatctccactatgcattgagaagatgacatcccagctgtggtattcatgccaaaaaataaaataaaccagcagggcgtggtggctcagn

SEQ ID NO: 369402 - DNA, 743 bp, Homo Sapiens
  misc_feature (336)..(336): n is a, c, g, or t
  misc_feature (421)..(421): n is a, c, g, or t
cgcaaaaaacatacgtgctccgaattgctgaactgcagcaaatactttctccccaggatgggatggaggcgaagcagatggatctgccacacacccttagcatgcgccagtgaaagggagagccgcggggagaggcctatcaccggctcgggggcagtccttcccagacccgaggatgacgtcagcacagccgggcaacgattgatggggccgccggccaatcagccccttccatccacagatccgtgctgcgtgccctctgggaagggtgaagtaaaaccctcagtctgagcctgagaaatcctggcatttgtaacccagggctgcgaaggaaancccacagggcgggtccccagggccggtatcgagcctctgggacccaaaggaaggggcaggaacgtcgtgcaacccctcgcgcacngcacctgtcgggaccggccgcctccttcctgcctacctgtcctgcctccttcgccccgaatttcaccttaaaccatgatgaaccaagcccagtggattctgaagcccgggacgatggcaggttcgagagagaattgggcagctgggggcggggcacaatattatttaggcgcctccaccccaccttcacagaaatacatctggaaagcatgggctgtcctagggctggggactgggggttacggtctcatcgatgactcagagggagagaaaaccccctgggtcccaagccaaaaagaataaaattctccagaatagccaac

SEQ ID NO: 369403 - DNA, 781 bp, Homo Sapiens
  misc_feature (437)..(460): n is a, c, g, or t
  misc_feature (708)..(708): n is a, c, g, or t
ggggcttagagggctggagtggccgccgagttggaggcggtggtggcagcagtaggagtgtgtagagtgcgggattgggggccaggccctgcggagggcgggggaagttgtcttcttttttttccggaggggccggtaaacctggtggctgaacggcaagatgaatttcctccgcggggtaatggggggtcagagtgccggaccccagcacacagaagccgagacgattcaaaagctttgtgacagagtagcttcatctactttattggatgatcgaagaaatgctgttcgtgctctcaaatcattatctaagaaataccacttggaagtgggtatacaagctatggaacatcttattcatgttttacaaacagatcgttcagattctgaaataataggttatgctttggacacactatataatataatatctaatnnnnnnnnnnnnnnnnnnnnnnnnaattccacaagacagagtgaagatttgggaagccaatttacagaaattttcattaagcagcaggaaaatgtcactcttctgttatctttattggaggagtttgatttccatgtccgctggcctggtgtgaagcttcttacttctcttttaaaacaactaggggcctcaggtgcaacaaattattttagtcagtccctatggggtgtttcaagattgatgggacttactagcgggattccaggggaggntatacggtaatggatggccgtcttactaccggccaggcacttaacaagaaagcaatggtgcccaatccagaaa

SEQ ID NO: 369404 - DNA, 1047 bp, Homo Sapiens
  misc_feature (873)..(873): n is a, c, g, or t
atgaacagaattgttaatgagagtcatttagacaaagaacatgatgctgttgaagtggctgactgtgtaaaagagaaaggccagttgacaggcaaacactgtgtctcagttattcctgacaaaccaagccttaataaatcaaatgttcttctccaaggtgcttccactcaagcaagcagcatgagtatgccagttttagctagcttttcgaaagtggacatacctatacgaactggccatcccactgttctagagtctaattctgattttaaagttattcccacttttgttaccgaaaataatgttatcaaaagtcttacaggttcatatgccaaattacctagtccagagccaagtatgagtcctaaaatgcaccgaagacgttccaggacatcatcagcgtgtcacatacttataaataacccaataaatgcctgtgaattaagccctaaaggaaaagaacaggcaatggacttaattattcaagatactgatgaaaacacaaatgtgcccgaaattatgccaaagttaccaactgatttagcgggagtttgttcaagcaaggtttatgtgggcaaaaatacatctgaagtcaaagaagatgtggttttaggtaaatcaaatcaggtatgtcaatcttcaggaaatcatttagaaaataaagttactcatggacttgttactgtggaaggtcagttaacatccgatgagagaggcgcacacataatgaacagtacctgtgctgcgatgccaaagctgcatgaaccatatgccagcagtcagtgtatagcaagtccaaactttggaactgtgagtggactcaagccagccagtatgttagagaaaaactgcagtttgcaaacagaactgaantaagtcttatgatgtaaaaaaacccttctcctttattgatgcaaacccagaatacgagacagcagatggacacacctatgggggtcctgtggaaaatgaacaattttttggataaccggttttgaaaaaaattaaaacgggaaacttgaattttaaatatttgatgggttttgc

SEQ ID NO: 369405 - DNA, 986 bp, Homo Sapiens
  misc_feature (214)..(214): n is a, c, g, or t
  misc_feature (516)..(555): n is a, c, g, or t
cagtgctcacaattcatgaagagatgaacactcccagtccaccgagaaacccaacacacctgggattgcatatttgaggttcacatggtggcaatatcacttgcagtgttggaaggaaaacccccaaccacgatgctattctgccgttacacctccttccaatagaatgccacaaaataaaggcacaggaaaataccttacatccgtttaatcntaagtgggacccaaaacaaaagagacaactggctcaagaacaggaggggaaaaaaggtactgccataattgatcctagcatcccttcatggctgcaatgcgtaactcttcacttttcagtgagaaaaatctatactcttgtgtttctaaaggaaagcacaaaatattcttgcaagatttaaatactgctaatcagtggcaaagagtgtaaacagatgaaatggcaaagttttaaaagtttttttgtagtgtttgggaaaataaagaatctgtggtaggaagcaagcaggtttaagtacaagnnnnnnnnnnnnnnnnnnnnnnnnnnnnnnnnnnnnnnnnccgaaagcccagcctcaagcctcaacctactttaagatgcacaaatacaactcaaacttcataaagcagaggagtaaaaggtgcaagagccatgtagcatcccagaagccatggcgaaacaaacacagcggtatttaaaaactgggttcactcaaaggcacaattcaatcaacctctttttctctatttaagtgtatatatttatatccctttgtatatcagagataagttttgttaattgtagaggacacaatggctttcttcttgcttctaaaaattactgaagatgaatcataataaaacagtaagctcctgatgctagtaacattaatgtgtaagataccaaataaggcaagttttcagccagaaaggggtagggggttttagctttctaaacatcctgagacctgaaattaaaggatacaggaccc

SEQ ID NO: 369406 - DNA, 527 bp, Homo Sapiens
aacagtaaatttaacaatacatgtcgaggccctgaaaaaaggtgaaagctgccctgtgttaaagcatgccttaaaaatcctaacttttaaagcaaagcaaagttgtccttccttaggtcagccactgccctggtccgaccagtgcagcttggcccagccctcactatgaagtggtcttattcccttgtcctctcccaggccgatatactaatatataggctcacaaggagctgtagggtttccctcctgccctcttaggtagagaagtataggcacttctctacccagtacagtgcctgctgatctctgacgttcagtggaacagaatataatgtcatttcctcctgacagtaagaaatttatagccacctaaagaaaagcagtagttggtatttgtcaactcaccataattaagaactgaagaacatggtcagtgctcacaattcatgaagagatgaacactccaagtcaccgagaaaccaacacaactggattgcatatttgaggttcacatggtggcaatatca

SEQ ID NO: 369407 - DNA, 1362 bp, Homo Sapiens
  misc_feature (1337)..(1338): n is a, c, g, or t
ggggagccactggacaaagcttctgtctctgtgtgtacatttataatgttctaaccaagtctcaaaccttgatgaaaaacacaaaatttttccataaacttatcagaagactcacttttctttctttcttggatagagaaaccattttctgacactaggtttacaatctcagtgtccttacaagttaagtcctaagctcacaggatcctccgagcatgtccatcacctgctctttggctaaggtggcagtgtacctctagatcaacctgggaacagtcacaagggagtgtgacttcttggccataataaactcactcgatagtgtttatgttattaatctgaatgcaacagaagacaaaagcacaggcatgcacacacacacaaccccaaaccactaaaaactacctaaacactgacttaataaatagtaaaaaggtaatgttgggacttttaaaccttgaatccattagccaggcttgggatgaaaggaccatctaaaatcatgctagtctaaaccatgctcttccacacagctgtttaaaaaccactgggtatgaggaatatgctagaaagaaatgttaaaaatagattgttggctcacacttatttttctaataaataggaccattattactaccaggaaagtcttatttattttgcctgaaattggcttaaagaaagtctcatgacgggatgggatgggctgcgcttctcaatgaactctgaggcagaaatatttgccttggattctgtggattcgttaaacctgtgtgctaataattcaaacaatgttgcatgaattgtataagggtttgtgtatagttttcaaacatctggggtgtaatgatctttgttaaacatatatgctgtaaagtgccatagtctttttggaggtgtagcatatttaaaaatatatatgtatatgatacatacacaagttttgtgtgaaagatgtgcaataacaaaggtgtagtgtatggttttggttggttttgttttggaaactggacaggagtcaaaacgagggatgtttgtttctggttttggcaaaaggagagttgcgcgatttttgccgtcatgggcttattcagtaacccataaattttgaatgcctgcacgagatccgtatggtgaaggaaaagacctgggtatgaaagatcattttgtttcctgggggtgtaaaaaaataatccgctaagtggtgatggtcgaagagtttaaagcgcccggcacggccgagggccccagggttaattgccttaggtcctggttgaatggttgaaaaaaggtgggaagacctggcccgggtgtttggcccctgtgtggctccccttggnnccaggggaatgaaaccgtacggcg

SEQ ID NO: 369408 - DNA, 857 bp, Homo Sapiens
  misc_feature (780)..(788): n is a, c, g, or t
  misc_feature (799)..(799): n is a, c, g, or t
  misc_feature (807)..(807): n is a, c, g, or t
  misc_feature (823)..(823): n is a, c, g, or t
  misc_feature (845)..(845): n is a, c, g, or t
ggtgggtaatttctcgttgcaaatattaatccgttgtttttctggcgcccagcccggcccgccgcagtactgtactcgaggtacgttcctatgcaaccgagagccccggcaaatacttcatgagcttagcagcctgggctcgagcagctatgcaaacgcgcttttcatttggagcacggggctgatgtgaagataagaattgtttctcctggagaaagatccatcatttctccagcttcccaagcccccggcacctctgctcagctcccagatgtgacgagcacctcccgccagggggagtcaggggttgatcaaaccagctcttgtgacccaaaccagtgccgctgcattaaagggaggcccagctactccttcccagctgagatgggggtacaggtcagatttggcagggagatggcactaacacgacacaagctcactcccagaaccgcagcctgatgtttataataatcggatgtactgtgcaattttaggaggggaaaaaaagggtgtaccagctttaactctaaaataaatttcgatttttgcgcccccttggaaaattaataaaagagggtattaagaactgcgggcggtcggcccaatacaatatcttgtcgggcgcgctgccgccctcggaaagcttttataaaccattccttttggacgcccgcggcccccggaaggtgagggcaggcctggggcttaccgggggcgccgaagggagtccgggggccttgacagagagcgtgggattccccagccaattagtagcccccnnnnnnnnncaaacccagangaggtcgnacgtcctcgccagagncggaggtctcgggggccccgtngctgggaatcct

SEQ ID NO: 369409 - DNA, 1053 bp, Homo Sapiens
  misc_feature (1043)..(1043): n is a, c, g, or t
actaggtacgaggccgggtggttaatcggcacgaggcctccgtgaaagactgacgggcgcatgcggtcggggttgttcactggctgtccggggctccgcgcgcgtcgccggcccagctctgtcgctgacgggaggatctgaagccggccgcaggtcaaagagtaaaatgaagtacattctggttactggtggtgttatatcaggaattggaaaaggaatcattgccagcagtgtgggcacaatactcaagtcatgtggtttacatgtaacttcaatcaaaattgacccctacattaacattgatgcaggaacattctctccttatgagcatggtgaggtttttgtgctggatgatggtggggaagtagaccttgacctgggtaactatgagcggttccttgacatccgcctcaccaaggacaataatctgaccactggaaagatataccagtatgtcattaacaaggaacggaaaggagattacttggggaaaactgtccaagttgtccctcatatcacagatgcaatccaggagctgggtgatgagacaggcgttaatacctgtagatgaagatggcctggaacctcaagtgtgtgttattgagcttggtggaaccgtgggggacatagaaagcatgccctttattgaggccttccgtcagttccaattcaaggtcaaaagagagaacttttgtaacatccacgtcagtctagttccccagccaagttcaacaggggaacagaagactaaacctacccagaatagtgttcgggaacttagaggacttgggctttccccagatctggttgtatgcaggtgctcaaatccacttgacacatcagtgaaggagaaaatatcaatgttctgccatgttgagcctgaacaagtgatctgtgtccacggatgtcttcatccatctaccgagtccccttgttgttagagggagcaaggggttgtagattattttcttcgaagacttgaccttccttttgagaggcagccaagaaaaatgctgatggaatgggaaagagtggctgacagntttgttcgtt

SEQ ID NO: 369410 - DNA, 1313 bp, Homo Sapiens
ggggactggctgtgaggcggtcctgcctcgctgccttcagtccctagtgtctgggtccccgccctccagccgcctttgagtcgtgcctgggtcctcgcccttgcctcagaaccgcgaagaaaggaagctcgcgtgtttgctagaaaacctagttgggagtgcgaggcagagaacgttcagcacctttgttcctcccgaaccctcgggacagaggcagggttctgagggcagggattccccctcgtcttggccccaccgcccgggctgggcactaaactcgggccgcggcggggcgagcgaggcgggctccggagggagctgacgcctgatgatggcgcagtccaacatgtttaccgtggctgatgtgttgagtcaagatgaactgcgcaaaaagctataccagacgtttaaggatcggggtatactggatacactcaagacacaacttcgaaaccagctaattcatgagttgatgcaccctgtattgagtggagaactgcagcctcggtccatttcagtagaagggagctccctcttaataggcgcctctaactctttagtggcagatcacttacaaagatgtggctatgaatattcactttctgttttctttccagaaagtggtttggcaaaagaaaaggtatttactatgcaggatctattacaactcattaaaatcaaccctacttccagtctctacaaatcactggtttcaggatctgataaagaaaatcaaaaaggttttcttatgcattttttaaaagaattggcagaatatcatcaagctaaagagagttgtaatatggaaactcagacaagttcgacatttaacagagattctctggctgagaagcttcagcttattgatgatcagtttgcagatgcttaccctcagcgtatcaagttcgaatctttagaaataaagctaaatgagtataagagagaaatagaagagcaacttcgggcagaaatgtgtcaaaagttgaagttttttaaagataccgagatagccaaaattaaaatggaagccaaaaaaaagtatgaaaaggagttaaccatgttccagaatgattttgaaaaagcttgtcaagcaaaatctgaagctctcgttcttcgggaaaagagtacccttgaaagaattcacaagcaccaagagattgaaaccaaagaaatttatgctcaaaggcacttttactaaaagatatggatttgctaagaggaagagaaccagagctgaagccaagagttgcaagcttttgaattgtatccactgactgaaggatacacgtccgacggtaccggctcgattctat

SEQ ID NO: 369411 - DNA, 850 bp, Homo Sapiens; identical to SEQ ID NO: 9194

SEQ ID NO: 369412 - DNA, 828 bp, Homo Sapiens
  misc_feature (365)..(405): n is a, c, g, or t
  misc_feature (659)..(659): n is a, c, g, or t
  misc_feature (692)..(692): n is a, c, g, or t
agcgggcttctggaaggcgctgctcttccggttctctgtcccggttcctggggttgcacagacagaccctgtaaacatgtcagggttcagtccggaactcatcgactacttggaagggaaaatctcctttgaggagttcgaacggcggagagaagagagaaaaacccgcgagaagaaaagtcttcaggaaaaaggcaagttatcagctgaagaaaatcccgatgactctgaagttccatcatcatcaggaattaactctaccaaatcccaagacaaagatgtcaatgaaggagaaacatcagatggagtgaggaagtcagttcacaaggtctttgcttccatgcttggagagaatgaagatgatnnnnnnnnnnnnnnnnnnnnnnnnnnnnnnnnnnnnnnnnnagaaacacctgagcaacccactgcgggcgatgtatttgtattggagatggttctcaatcgtgaaaccaagaaaatgatgaacagagaaaaggcctcggagtaaacttcccagagctctgagaggtctcatgggtgaagccaacattcgttttgctcgaggagaacgtgaagaggcgatattgatgtgcatggaaatcataagacaagctcctctggcttatgagccattctctactctagccatgatatatganggaccaaggtgacatggaaaaatcatttgcagntttgagttgatttgctgcgcatttaaatcccagtgacacagaaaaaaatgggttaaaacgggcaagaaatgtctcctggaacagacaatattaagccaaggctatttttttgctatacaaaagctcttaatatgaa

SEQ ID NO: 369413 - DNA, 840 bp, Homo Sapiens
gaccaagagctggattctgattctggcagcaacacaataactaaaacaccattcaccacatgacaaaacaaacaaatccaatgacaaaaaggaatcgggaaaaaaagcagcaacagaaacagtatgtggcaatcattcacataaggcccctctcccaccataccttatgatatacatcccttatagcatgacaatgtaccccaaggcacctgaggcctcataataccactcgagacactgacagctccatggacgcttttgtacacagtggtttgtgtgtaaataactattcattcatttgtagatgctccacacatctggtcaaggcaggaatttcttctccttgataacaccacttgggtgagagatcatccatcaagatgaacgaagagcatgaattggagcatgctactggagactctgcggtagcgctgcctttagccagcgggtctgaggataagccactgctgctactactgccatccaaaatatctgaacatgaactgagatcagacagttgcgcggcatctggagataacatattggtagtgccttggaagagtctcttgggctgactttctgtctccatttcaccttttcttttaagaggaccaagaacactgggtctaatgcacttgactggactctgacttctccttgaaaatcgtcttggactgggaactggacttggtggcaatccactgctgctcacgaacatctttccgaatcccctggtgggtgaaggtgctggagaaactggagtgaagtcaattctcttaggagaatataatttctccggcttgtcaaaatcactgtcactcaggctcaagctctcatccc

SEQ ID NO: 369414 - DNA, 1047 bp, Homo Sapiens
  misc_feature (68)..(123): n is a, c, g, or t
  misc_feature (713)..(775): n is a, c, g, or t
ggggaccgggacggctcgggggccgccgacgccgcgggggcaccggattctgttgggggctgaagcgnnnnnnnnnnnnnnnnnnnnnnnnnnnnnnnnnnnnnnnnnnnnnnnnnnnnnnnnctgcattggcctggccatggtttaagcatttggaccaataacaccctgagtgtcaagttcctcctcagtcgggctggagagtcgagagcgggtcatggcaaagcgaaggctggagctaggagaaagcggtcatcagtacctctcagatggtttaaaaacccccaagggcaaaggaagagctgcactacgaagtccagatagtccaaaaactccaaaatctccctcagaaaaaacgcggtatgatacgtctcttggtctgctcaccaagaagttcattcagctcctgagccagtcacccgatggggtattggatttgaacaaggcagcagaagtgctaaaagtgcaaaagagaaggatttatgatatcaccaacgttctggaaggcatccacctcattaagaagaagtctaaaaacaacgtccaatggatgggctgcagtctgtctgaggatggggggcatgctggcccagtgtcaaggcctgtcaaaagaagtgaccgagctcagtcaggaagagaagaaattagatgaactgatccaaagctgcaccctggacctcaaactgttaaccgaggattcagagaatcaaagnnnnnnnnnnnnnnnnnnnnnnnnnnnnnnnnnnnnnnnnnnnnnnnnnnnnnnnnnnnnnnnagttgtgaaagcccctccagaaacaagacttgaagtgcctgactcaatagagagcctacaaatacatttggcaagtacccaagggcccattgaggtttacttatgtccagaagagactgaaacacacagtccaatgaaaacaaacaaccaagaccacaatgggaatatccctaaacccgcttcctaagacttggcttcaaccactcaggacatagcgattgctcagtttctatgggaaacctttctcctctgcctccccagccacctggtac

SEQ ID NO: 369415 - DNA, 744 bp, Homo Sapiens
acgtggcacgcagccagctcacagcacccaaaggcacgggcaagttgcatcacggcagcccctccatgtctgaccaggagcaggtgcgttcctgaggtcctggccacttctgcaggagcgtccgagggagcccagctgatataccacagcccctgacctcccaggttagcctttccatccaacagcaccaggactggacaggccaccttggctgaggatcacgtgtgcctgggtctgggcggtgctgatgcccacaggccctgagtctgtgttgcgcaaaggccttggaaagcagtgcacatcctgtctgcaccggtgtctatagtgaagccatctttgtccgtgtggccatgggagggtctgtctgtgctgtgtgtgtgtcctgcgcgcgtcgggagctgctgcgccacacacaggcacgcagggtgtgggcacacctgtgcttctgagcccacgtgcccttgccggtggccaggcacacacacagctgtgcatccttggcccaagatcagctgtgccacacctgcaggctgcaggatcttttctgtatatctccctccatcaccagaagtaagctcaggactgaggctgacaggctggtctgagcgctgctcacctgcacctcctggctgcacctgtggccccggactcagcttccccatctctctcctccccaccccacctctgggtcatctccggctggggctgtaccacatctgggctcaataaatggttgattgattg

SEQ ID NO: 369416 - DNA, 804 bp, Homo Sapiens
  misc_feature (219)..(233): n is a, c, g, or t
  misc_feature (248)..(465): n is a, c, g, or t
ggtcaccagctcagtcacgtctatcttacaaatccccatctagcaggaagcctgctctgcccttggactatagacctgaagggctgttgttaagttacaacgttcccagtggaaggaggacagtacttaaaagttacaagatgtgggttctgatcttagttcttatggcctgtcagccagggaactcctggccagcagtctcatccttgaacttcttcnnnnnnnnnnnnnnnctcaagacggagtcnnnnnnnnnnnnnnnnnnnnnnnnnnnnnnnnnnnnnnnnnnnnnnnnnnnnnnnnnnnnnnnnnnnnnnnnnnnnnnnnnnnnnnnnnnnnnnnnnnnnnnnnnnnnnnnnnnnnnnnnnnnnnnnnnnnnnnnnnnnnnnnnnnnnnnnnnnnnnnnnnnnnnnnnnnnnnnnnnnnnnnnnnnnnnnnnnnnnnnnnnnnnnnnnnnnnnnnnnnctcatccttgaacttcaaatttccaccccaccttactcccacaggcatataccagttgttcctttttctctgttcttatgcaggaaatggcctgaggtccaggagtccccttggtccccctttttccctcactctcaacattcaattagtcttcacatctacagccgacaattgtaacttcttttctttactcattatttcctaagtgacaacaggagcttcctttgggggcctccctttttctaaaaccctaaattcgaaactcttacgggtttagatctttccttacttaaaaccccttttcctgggccccctaaacctactgaaagaaattcttag

SEQ ID NO: 369417 - DNA, 787 bp, Homo Sapiens
  misc_feature (545)..(592): n is a, c, g, or t
ggggtgacgggaaagggggagttcgcggccggtggcggcggtggcgacagcggcgacctagggatcgatctggagggacttggggagcgtgcagagacctctagctcgagcgcgagggacctcccgccgggatgcctggggagcagatggaccctactggaagtcagttggattcagatttctctcagcaagatactccttgcctgataattgaagattctcagcctgaaagccaggttctagaggatgattctggttctcacttcagtatgctatctcgacaccttcctaatctccagacgcacaaagaaaatcctgtgttggatgttgtgtccaatcctgaacaaacagctggagaagaacgaggagacggtaatagtgggttcaatgaacatttgaaagaaaacaaggttgcagaccctgtggattcttctaacttggacacatgtggttccatcagtcaggtcattgagcagttacctcagccaaacaggacaagcagtgttctgggaatgtcagtggaatctgctcctgctgtggaggannnnnnnnnnnnnnnnnnnnnnnnnnnnnnnnnnnnnnnnnnnnnnnntacttcaggcaatactacacattcccttggtgctgaagatactgcctcatcacagttgggtttttgggttctgggactctcccagagccaggatgttgaggaaaatactgtgccatatgaaagtggacaaagagcagctacaatcagtaaaccacaaactctggttataccacggctgtctgatgtggatgctat

SEQ ID NO: 369418 - DNA, 801 bp, Homo Sapiens; identical to SEQ ID NO: 176734
  misc_feature (769)..(769): n is a, c, g, or t

SEQ ID NO: 369419 - DNA, 819 bp, Homo Sapiens
  misc_feature (326)..(326): n is a, c, g, or t
gggaggggagggagaggccgagagaaatttcggtactgcgcatgaaccgagcgtgacgttgaggtttgaaataaccggcaaagagtaaaggctgaaactagcttcctgaaagcttcgtagggcccgagccctgtgagcccaggttctgcgcccactaggaggtgtcatgctgactgctttttttaaagccctagaatcttggcttcggcgtttggggtaagctccgttctcgttctcaagcgcgtttccgcgaactctcgcgggattgacgggccgtctcgagagccggcatctcctaggagctagtcctggtcctcggctaggcnggcttgggggtcgcggcgtaactggggagccagcctgacgccggcggaccccgcctgtgatcctggcaacgatggatgatgacttgatgttggcactgcggcttcaggaggagtggaacttgcaggaggcggagcgcgatcatgcccaggagtccctgtcgctagtggacgccgtcgtggggagtttggtggaccccacaccggacttgcaggcactggtttgttcagtttaacgaccaattcttctggggccagctggaggccgttcgagggtgaagtggagcgtgcgaatgaccctgtgtgctgggatatgcagctatgaaagggaaggggggaatgtgttccatccgtctcagcgaaaccccttttgaagttgaggccaagaaaaggatttggaaaagaccctcctgcatgaaatgatacatggcctatttatttggcacttaataccaccaaagacccggaaagggcatgggcccaaaaattttgtaaa

SEQ ID NO: 369420 - DNA, 807 bp, Homo Sapiens
  misc_feature (24)..(24): n is a, c, g, or t
  misc_feature (363)..(378): n is a, c, g, or t
agaaatttgactttaataaccccnggtacttgaacaaaaactaaaaattttaaagttaaaaaaagttttgtttttaatcccgcagtccttactcttaagttctctgtaaactattatgcacacagaaaccttggtattagctgaagccggcctgggtcttgcacagtgggggtttacttaagtaaaagtagcacaaacatttcaaagacaatctcaatttttcagatactgccaaaccgagataccaataacatctgaaatctttgcagagactatttataaaaacatggaagtgtttttattttcccatcataaaaatataatcacgatagagtggaaatgtctaactgtattagtttagtnnnnnnnnnnnnnnnngtatgaccactgatggtactggtactacaagtcttcatcccataactgacacaggcttaaccccccataaatattacaacatctcaacttatctatcgtctaaaatgaaagatccagagagcgactgttcttagttgagcctgggattgaatcaattccactttattgtttaatctgaaccattattgcttttggctaattcatcttgctgaggactttccaaataaaaatactctgtcaccatactgtcaagcaaaaacgacaatgaaagataaaaatgggtataggcaaaataaggaacaacttaatttaaatgttcatggtttgagtttaaagcctgtgggagtatgcttagttttaatattcctcatagacatgtttgccacaacagagcttccttgttaccccaattttgtttcactgcttccc

SEQ ID NO: 369421 - DNA, 762 bp, Homo Sapiens
gggacacctaccatgtacaagtatcggccgggttacagtagcagcagtacgtcagctgccatgccgcattcctccagcgccaagttgagtcgtggggacagcttgaaggagccaacctcaattgcagagagcagccgtcaccccagctaccgctcagagcccagcttggaaccagagagcttccgttctcctacctttggcaaaagttttcacttcgatccactatccagtggctcacgctcctccagcctcaagtcagcccagggcacaggctttgagctgggccagttgcaatccattcgttcagagggcaccacctccacctcctataagagcctggccaaccagacacgcaatggaagcctatcttatgacagcttgctcacaccttcagacagccctgattttgagtcagtgcaggcagggcctgagccagacccacctttaggctatacctctcccttcctgtcagccaggctggcccagcaacgggaagctgagaggcacccacgtttggtgccaactggcccaacacaccgagagccctcaccagtccgttacgacaatctgtcgcgccacattgtggcctctctccaggaacgagagaagttgctgcgccagtcacccccactcccgggccgtgaggaagaaacaggcttggggggactcaggcattcagtcaacacccaggctcggggccatgcccctcgtactagttcctcctcagatgattcaaagagatcacctttgggcgtacgggga

SEQ ID NO: 369422 - DNA, 977 bp, Homo Sapiens
atctggttccctccagggcgagcaattgcacaaatgtccactgagtctggtccagggatcaaggaagggaaggtcttaaaagataaaagggggggttgctaccccagtctcagggccccaactctccgactccccaagcctactgcatttaagaaaacactcctcatcctcttggaatcggtggtttaaaaaatgtccatgcacgggaggggagccccttgagggaaggaaggtggcccacctggggccctttggtgtaggcgcagaggcgttggggaggggaggtgccgaaggctcacaccgaaatctcataggtggtaccaccaacccctgacaccttcttgactcctcccctcgtggggctactgagaggtggctggcctgggccaggggaggctgagcctaagctcttgggctgcccgttggatttgctgtaggtggtcttcagctgtacttcatctttgggtgtcagtaatggctgcaaggccacttcttctgtctcagagacaccaggttgggctttttggctgctgtaagacatcgatcggcccaggtatggggctgttggccctggttcaggggaccctactccccggccccttagcccatctggcttgccaaaacgggggacagctgggcgtcccagtggagtcttgcccaaaggtgatctctttgaatcatctgaggaggaactagtacgaggggcatggcccgagcctggtgttgactgaatgcctgagtcccccaagcctggttcttcctcacggcccgggagtgggggtgactggcgcagcaacttctctcgttcctggaaagaggccaaaatgtggcgcgacagattgtcgtaacggactggtgagggctctcggtgtgttgggccagttggcaccaaacgtgggtgcctctcagcttcccgttgctgggccagcctggctgacaggaagggagagcctcgtgccgaattcgccacccaggcc

SEQ ID NO: 369423 - DNA, 1190 bp, Homo Sapiens
  misc_feature (217)..(275): n is a, c, g, or t
  misc_feature (906)..(933): n is a, c, g, or t
  misc_feature (945)..(945): n is a, c, g, or t
tccggaattctccggatgcgggaatccgagcggctggatttcatgaacgcagagctgaagacccagattgaggagctgaagcaggagcggcagcagctcatcctgatgctgaaccgacaccgccccacctgcatcgtccggaccgacagtgtcaagacccccgagtcagaaggcaacccactgctcgagcagctcgagaagaagtgaccatgggctnnnnnnnnnnnnnnnnnnnnnnnnnnnnnnnnnnnnnnnnnnnnnnnnnnnnnnnnnnnggggccccagatggcccttcctttggtgcatgaaaaactgtacaatgaggttcagcacagccagcatcagccgagcttttttgtgaaactcagatcagccacccaggaggaagagcgggctgaggaaacccaggagggaccaagcgctgagaccaaagttgaccctcgggtagggttgtcctgcctggggccccacttgaaggaggcaggacagaggcaccgaggccagggagacgcccaacgaggcagccctgggctcttctctggcctcctcaccagggcacccatccaaggaacctccgaacagccaggaaaagccatgagttgcaaccaaaacgcggctgaggatggaactcagaatgaaactgcaacccacctgcccccagccctgcccctcgccctgatgcgaagctggagaggggcgtgctgcggggccctgatgcccccacccacctcggtccagcgcggccctgcccaggaggcggcagccgggcgcaccctcgccagccctgctggagtttgctgtgggcactgaggcgcgggcgcccttccaaagcacatactcaccgaatgtttacagactggctgtcctggcagggctttcaactgcacatgtctttcatactttccnnnnnnnnnnnnnnnnnnnnnnnnnnnnacaaaaaaaaangattttatacaagcaatatatatatggatttctataatcactcgatgtgatacagtataaatatgctatggtttgtttgttatgaacagatagccaccagttacggccattgtgtgtaactcctaagtactgtagtctctgggtgtcgggggtggccagggcgggggcggggtgcatttccatccttgtaaacccttcatagtactcagtcctgtatcgctcagtaaacattgctcttacttaaa

SEQ ID NO: 369424 - DNA, 940 bp, Homo Sapiens
  misc_feature (162)..(162): n is a, c, g, or t
gttggaagggttcccttcttgaggaagatttcggaaaatagttccacaaaggaacctgtgccatcagctttggattattagggatggcatgaaatgcactgtagaaagaacgcaccagttgcattctcaattgctgtgcgctgttgagtagtcagtcctgtngtagcagctgaagaaagagaagctgatcttgcactggtctgttgtgcacctaaattatgctttccagaagtggacccagagtgacacaataaaaacagaagtgctgtccatagtggattgacttcagaaccaccaagccaatctttcataatatggctattgccaacttctgtcaaaaacctaagaataggagcaactaggtcggctgtgataggcatcttattacattgttgtgggacatgatggcgcctgagtttgtcctgggaaatatctattgactgggcaatgctttctgagctagaaatgtggctaaagcagaaactagccagactcctcacaagaagagaaggcaaacctgagtctagtaattgtttaatagcttcaggagattgagaagaggaagcaagggtagccaaatgtgattcagttaatgcgagaggtgcttgatgcatatttagagtcatctgttaaagatgaactaagatcctgctttttgctatcatctgtcatggacagtctatgatgacattgcactggaggaggggtaattcccatccagcccatgagcaaagaaaaatagtttgggtgtacgtgacacattgagcaaagtagactgtcaacagctttcttcaaaaccatattgcagggaagagacatggaccaattaaaaagtaacctaaaaaataaaagatatcatattaatgatacaagtatatttttagaagaaactatttcaaatatttctgttatagttcaaagtatactctgacattatcta

SEQ ID NO: 369425 - DNA, 836 bp, Homo Sapiens
  misc_feature (46)..(46): n is a, c, g, or t
tccaggactttccgcttgtcgcttggtgtcgctccgctcccttcangagccagctggtaggtgtcctggtctgcagggagctgcagcatgcccttctgaagctgctgccggtacgtctggagcatgaagaactggatgatcaaaggggatagtggctggagatgcgcttgctggcctcctggtgataggccatcaggtgatgaaaagatctcctccatggaagagtctgttgccgagctggactggaaagccccaaaataccaggatttcttcttcttttcttcttccagctccttctctctgaccttctgcaatgcacccctgtatacctggtcctggcagtagacaatctgttccatctggaagtggaggcggatcagcttctcaccttctctctcttgttctgctctaatgtcttcaattttggacttggcggttctgtggaggttaaaaaactcttcaaaattttttatcgaaacatctgtgaaagcaagccggaccatatccgtcacggtgtgtagcatatccacagccggctcttccagtgccttgatttgctgtttcacgattgtctcaaaggtcctgtaattcacaaagcctggcagctctctaccagcgtatactgattttcaaatttcgggatttttctactcaaaattttaggcccttctggaaaatggttttcaattatggtactcctatttgtggaactcgtgtcggagtctggtaaacagccgaatgtcttcctcccctacagtttcctctccttgcatgagagcagtgatgtcctgattaaaggcattaattttatctatcaggaagaacattttttcacc

SEQ ID NO: 369426 - DNA, 952 bp, Homo Sapiens
  misc_feature (714)..(723): n is a, c, g, or t
  misc_feature (747)..(777): n is a, c, g, or t
ggcgatcagtcagggggtgggggacacaggactcacggctcgcctcggcctctacctggagtgatggtggctcagttcgtcctagttactggctggttcttcacaatctcaccccacagattgatgggtcaaccttgagaacgatctgcatgcagcatggcccactgctgacattccatctgaatctaacccagggcactgccctgatccgatacagcaccaaacaggaggcggccaaggcccaaactgcactgcacatgtgtgtgttgggaaacactaccatccttgctgagtttgccactgatgatgaagtcagccgctttctggcacaagctcagccccctacacctgcagcaaccccaagtgcgccagctgcggggtggcagtcgctggagaccggccagaaccagtcagatcccgtgggacctgctctgaatctttttggtgggtccactgggctcgggcagtggagcagcagcgctggtggcagcagcggggccgatcttgctggcgcttcattgtgggggcccccaaactattcttctagcttatggggagtcccaacggtggaagatccccataggatgggcagccctgctcctttactacctggtgaccttctgggaggagggtcggattcaatctgaacttagaactttcaactctgacctcgtgaccttttttggaacagcagcactaacttgaccttttcgnnnnnnnnnncaacttgcaataaatacatttttnnnnnnnnnnnnnnnnnnnnnnnnnnnnnnnggtgggtcattgacagactgtctgagcacatagttgcctcccttataacttcagttttttcgtttggaatatgaatccaaaaagagaacatatcactcttgaaatacttgaatcatgaacgccaacctagaaagacaatgtgaagcaagtacacataccatttaaatttaaacac

SEQ ID NO: 369427 - DNA, 761 bp, Homo Sapiens
gggagaaatgtcgaggaatcatcggaggcaagagtcagcgtgtgaatggactcaccagcagcaaaaacagccagcccatggccacacacaaaaaatctggacggtcaaaagagaagagaaagtctaagcacaagctgaagaaaaggagaggccatctctctgaggaacccagtgaaaatatcaacaccccaactagattgaccccccaattacagatgaagccaatgtccaatcgtgaaaggaactttgtgttaaagcatcatgtattcttggtccgaaactgggagaagattcgtcaaaaacaggaggaagtaaagcacaccagtgataatattcactcagcatcattatatacccgttggaatgggatctgccgagatgatgggaatatcaagtctgatgtcttcatgacccagttctctgccctgcagacagctcgatctgttcgaacaagacggttggcagctgcagaggaaaatattgaagtggctcgggcagcccgcctagcccagatcttcaaagaaatttgtgatggtatcatctcttataaagattcttcccggcaagcactggcagctccacttttgaaccttcctccaaagaaaaagaatgctgattattatgagaagatctctgatcccctagatcttatcaccatagagaagcagatcctcactggttactataagacagtggaagcttttgatgctgacatgctcaaagtctttcggaatgctgagaagtactatgggcgtaaatct

SEQ ID NO: 369428 - DNA, 1260 bp, Homo Sapiens
  misc_feature (605)..(673): n is a, c, g, or t
gcagaaaaatggctacgagaaaaaaaagactccagatgcaacccctctccttgatgccagctcactggagtatctgtttgctcagggacagtatgatttggtgaaatgcctggctcctattcgagaccccaagaccgagcaggatggacatgatatttagaacgagtgtctagggatggctgtcctggccatctcacactatgccatgatgaagaagatgcagttgccagaactgcccaaggacatcagctacaagcgatatattccagaaacattgaataagtccatcagacagaggaaccttctcaccaggatgcggataaataatgttttcaaggatttcctaaaggaatttaacaacaagaccatttgtgacagcagcgtgtccacgcatgacctgaaggtgaaatacttggctaccttggaaactttgacaaaacattacggtgctgaaatatttgagacttccatgttactgatttcatcagaaaatgagatgaattggtttcattcgaatgacggtggaaacgttctctactacgaagtgatggtgactgggaatcttggaatccagtggaggcataaaccaaatgttgtttctgttnnnnnnnnnnnnnnnnnnnnnnnnnnnnnnnnnnnnnnnnnnnnnnnnnnnnnnnnnnnnnnnnnnnnnaagatccgggaagagtggaacaatttttcttacttccctgaaatcactcacattgtaataaaggagtctgtggtcagcattaacaagcaggacaacaagaaaatggaactgaagctctcttcccacgaggaggccttgtcctttgtgtccctggtagatggctacttccggctcacagcagatgcccatcattaccctctgcaccgacgtggccccccccgttgatcgtccacaacatacagaaatggctgtcatggtccaatctgtacagaatacgcccatcaataaattggcggcaaagaaggaaaccaaggaaggggatgtaacctggctgaggtgggaacctgcacccgacttttgacaaccatccctcatggccggtccacctgcctttgaagaagaccttgaacaaggtggcaggggtggccccacaaggcaagtttcaggaactttttcaaaatccaaggggcaaaaaggggccccttaacgttcctggccacggtttcgggaacggcaaaccttctcccacacttgggggagagacctcccttgaacgcccccgctctaaagaagacaaaatactcgtg

SEQ ID NO: 369429 - DNA, 1324 bp, Homo Sapiens
  misc_feature (627)..(627): n is a, c, g, or t
  misc_feature (819)..(819): n is a, c, g, or t
  misc_feature (1117)..(1117): n is a, c, g, or t
ggagagtcgccgcgcggccgccggtgagccgcatggagccccgggcggcggacggctgctccctgggcgacgtgggtttctgggtggagcggacccctgtgcacgaggcagcccagcggggtgagagcctgcagctgcaacagctgatcgagagcggcgcctgcgtgaaccaggtcaccgtggactccatcacgcccctgcacgcagccagtctgcaaggccaggcgcggtgtgtgcacctgctgctggcggctggggcccacgtggatgctcgcaacatcgaccgcagcaacccgctctgcgatccccgcgcccccgggcaacatcgagcgtgtgaagctcttggctgtcctacgcgggccaacggtcaatcccctccccttggacacgaccggtccccccctgcatccacggccctgcatctgaacgggtgagctcccacccctggggtggaacgtcttcccttacccggaccttagaggcgccccatacccttacgaaatgtgtcccccaatgtgtcccacctctatggagggcatccccacttcggtctggcgtcctgccccactgcagcgccccaggccaaatacctatttctctcgcacgcagacatcgatacaccccacntgtgtcactgcccctccaaagctggcgcatccagggctgttcatccacacccgccgcgacacaagttggtgcggagtaatagaaggagcgtctatgtgcccagcgcggaaaacactcggtgccacacgccccgtgtcgacattgtagatgcgggtggcgcgagcggccccgagagaggcgggtatacaatgngtaagataatctgcgcgctgcgaaagtacactatgtcccaccccgcagagaaagaaagtatgcctcctctcacgcccccggcaccagtattattggggggagcggatgcgcaagaaccatcatcgaataaccgcattctctctgcgcgatgatcatagatacagcgccggaggcggacacagccacataaacgcacggggcaatttgttgaaagtttcacggcggaatggcgacaaagctcatcactagtcgctcccttccccactgtgtgcaaccgcgttgcgccctcccctacgantgcaccaaccctcgcttcacttttggatacccctctcttggtcgatcttttttggtttgcaccccgccttctcttttcgtgcgctcgcagatacgtctccgccgcgaaatagcgagcctgtgctcgccggcgatacgaagcttgcaaggcggttcacaccggaatctagtgccgatcataatcgagtcgacctggatcacctgtggt

SEQ ID NO: 369430 - DNA, 598 bp, Homo Sapiens
gtagattgggtatagaagaacccttgaaatgactgccttttctggttgctgtcatctgaaagccctatccgagaaccatatgtagagtcagattctcatcccagaagcagtagcctggtgaagagccacttgcccacatctaaaggatgtgtattcatacaagcaagtaggagtgtctttgaatagaatatttaccgtcaaccctaaaggagagctggtacaggaacatgcaaagaccaacatctcttcgtatgtgagactctgtgaagtagtcgaccacgttttcccgttgctgaaaagaagccattcttcagactttccctgttcgggataccttcagtaacttcaccttttgggaggagagccactgccaccttttggaaaaccaggacattcattctgcctcagcgtaaaatgtcccaagcagcctcttgccagcagtgcagagcctggttgtcaccccattaaaggataggtctccccggagtgcacagctccacctggggagcctggcgcgtcatcattggcctgacagcaagagagaattgaagaagcatttctcacctgccccaccccggggctacatttctaaaccctc

SEQ ID NO: 369431 - DNA, 1305 bp, Homo Sapiens
  misc_feature (204)..(204): n is a, c, g, or t
  misc_feature (232)..(232): n is a, c, g, or t
  misc_feature (930)..(930): n is a, c, g, or t
  misc_feature (942)..(942): n is a, c, g, or t
ccgtgtttctgccgccaccccccaagaaatgagagacacgggagggcgttgtagccacacatagttggcggtataagagcgcacaaccccagaggttgtgggatccagtgggcgtgtgggtgtaattgggggaggggaactatggggaagtagccccggttccaagtgtgaggccatctgcccccatgttgggaagagccggcntattctttgcccctctttaaaaataganccaaaatccttcagagttttccatgcgggggggaaactcggtgacatattgttaagcgaatttgagtgtaagcgggtgaatttctccaaacgagcgggttggggtaggcggggggtggccttcgccgaaaggtataaatttcccggagagggctggctcgaaaactttaatctcccggaaacaggggagaaccagatttcccccaagctaacttattccccttggtgccttccaaggttaggacccacccctaaagtccactgtgattccgtgggccttcgaagttggttagaaaacgccattgcaaataaaaggtgtaccaaaaaagggggagaagaaaaaaatgtgtcatgcaaagagggatgtgttattttatttttttgggtttgggttttagagtaggttgggttgccgtggttactaggcgatggatggcagcccttggtggcagagaggttcctagcctgggagggagaaacgcagggtgtgtgtgttcccgtgcatgagaagactggattgtatctcactgatgacaggccaacggctgctttagagatggtgagagattggatcttatataaacagtgttttaaccctcttcatcctgcatgcaaacagatccagctgcctgtagcactttaagtctcaagtactgagaggtggggtagagagagtgcctattgtaaacaaaagcaaanggatccagcccnggatctcagcgcccaatttcttcaccccagcccccagcaggcttagcctacacagtgtgctctcagggactatttctatctgacttcctctttctgaaggttgggcgtttggaccgttgaaacaaaatgagtgccccctattcagggtactcatgagaaaacggctttgcaagtcttcctcttagttatcaaatgctctcctctgctgattgacttcttttcttgcagtactgatgcatgttggctgagatgatcatggagatgagtgacaccagagctcacagaaacattcatgttgacaggtagcaacagagtcagtcacgctgcatttctcagtggcaaagagaaatggcctcgacactg

SEQ ID NO: 369432 - DNA, 1214 bp, Homo Sapiens
  misc_feature (151)..(189): n is a, c, g, or t
gggggaagaggaggcggaggccgaggcggtggcggcgctgctgctgaacggcggcagcggtgggggcggcggaggcggcggcggaggagtggggggcggcgaggcagagacgatgtcggagccgagccccgagagcgccagccaggccggnnnnnnnnnnnnnnnnnnnnnnnnnnnnnnnnnnnnnnnagatgagagcagcagcagcggcgggggtgaggaggagagtagcgccgagagcctggtgggcagcagcggcgggagcagcagcgacgagacccgctcgttgagccccggcgccgccagcagcagcagcggggatggggacggcaaggagggcctggaggagcccaagggaccgcggggcagccagggcggcggcgggggcggcagcagtagtagcagcgtagtctccagcggcggcgacgagggctacgggactgggggaggcggaagccacgcgacctccgggggccggcggggcagccttgggagatgtcgtcggatggggaacccctgagccgcatggactcggaggacagcataagcagtactataatggatgtagacagcacaatttccagtgggcgttcaactccagcaatgatgaatggacaaggaagcactacttcttcaagcaaaaatattgcctataattgttgttgggaccagtgccaggcttgcttcaactctagcccagatctggcagatcacatccgttccatacatgtagatggtcagcgaggaggggtatttgtttgcttatggaaaggttgtaaagtatataacactccatctaccagtcaaagttggttacaaaggcatatgctgacacacagtggagacaaacctttcaagtgtgttgttggtggctgcaatgccagctttgcttctcagggagggctagctcgtcatgtacccacacacttcagtcagcagaactcctcaaaagtttctagccagcccaaggccaaagaagattctctttctaaagctgggatgaacaaaaggaggtaattaaagaacaatcagacgacgcctcatttaccccggcccacttgatttcttccaatgccccaaacccttggaatggcgataaatacttccgagccctattgcctttaacccttctccgcttcattataagaaaaggtttaggggaaaagggaccacaggggcttggttcttcccataggtacctggtaatatgccct

SEQ ID NO: 369433 - DNA, 1003 bp, Homo Sapiens
ttgggggttccacctcaaagtttatggggtaatgttgcgggtcgcaatgggcacacccaaaagtgttccagggggtttccagcccaatgtgggggccctgaaagcccacttccaggttgccgttgggtctcagcgccaaaggagggcacacaagaagccagggtcccttttgccggggatctcctagggagggtgggttcccaagtgggccggcccagggtaagttccaagttcttggttgtttccagccagggggctggggtttcccgggattattcaccggtccatcacaattaagggggccaggcccagttcgtcccaaggggcacccccattagggggttgccacttttcagggggccgcttgctgtcccaaagcaagggaatgttcctggggaaggctttgggggggtgagggcccttccagtgctgacattcggggcgaaggctgaaggctgaggctgaggcggaggtctagaggcgccctggagatttgggggggtacctcctttgggggctccctgagggctgggctcccccgtcagattccttcccagccccttccggcccccccaggctccactttccactggggccctcagaactgaggagacccgggcccagggggccgtgaggtccggggaccctctgtggggataggcgatgcaggggggtggtccacgggagccgagcgggcaggccactgcagcagaggtgggggccgcccatcaccagagccactcagggaggaccgcggcccccagccagggcctggtgggaggggttggtcaccattgcctgccgtgttctcaggtgtggggtgggccacgggggggttattgctagagggaggtcaggccaccgcccccactacagtctgaatcatccacgttcccgccactattgcagccggcgccacagcccttgtgaagcctgggggtggagaggtagaaaagggatcaggagggacacggctgaggccagaggcctcacaagcatgagt

SEQ ID NO: 369434 - DNA, 1147 bp, Homo Sapiens
ggggatccattaacccttaatagtcaatgtctatgattttaatgtattactagatccacactgtcattatttcccccagttcgttaaatctgcaaatactttatgttcagttttacatctgttaaagcaagatcctcaagggcagggatggaattctactcacttctgcatcccttgacattgcagtgtgtggaacagagatgacaaatacaggttcaaatttgtgccacctgaaagagtgccatctagaagcagttgcttcaaactgcacttcaacgggacccacacgccctgctaagcaactcaaactcatcatgaaataaatctgcagaagaaatgtgtactctctattcaaactctgaagtaaataaaatgtgtatgattgacacaatcacaaaatggcatttaagtggaagtctgcttcctgaagaaataaaagccagagcaaacagatttggggtcatatttttgttcactgaaaggaccaaccagtttcatcaaacaagctttagagaaagagaaactgagtaattcatcttgtcagttacagttcacatatatgcacacacatacaaactggctcagcatcagtgaaacataactattcaaatacaaaagtataaaaaacctctttaaaaaaccaatagcagccaaaacagaacatttgtaaacaaaaccacaactatcagccctgtgcttaaacacagaatctgcattcttttgaaacattaagtatatgcaataaagagaatatagaccatctttttccttaatatacaatacccaatatctaaaacaatgtcaccaataatagacacaaatcggtgttatcataaggcatgttgaacagtctttttcacagtactcaggggcatcatgttgctgcagaggccacactttccagaagttttctcctcgctgtgatcctcgcacaccgggggcactcggaggactggaagcactgtttgtgaaagcaagccctgcacgctgaacatcttctacatgttgctgtctgaaatgggaagatgacagtcgtattctggcaaaattcacaaataaagccctttccttgacacagctcacagccagccacatgtgcaagggaagctttcagaatgtccttgagtaagggtgccagcagccctcc

SEQ ID NO: 369435 - DNA, 1150 bp, Homo Sapiens
ggccagcctggtagtttccttaaaggcagggaaaacccccaattgcaaaaggaggaaaaatttccttgaaggccagcccagaagggcccccaattttgggccaccaaggttttgggtggcaaggagactgggcagttctagtaggggctcccgctgccctgggttgcccccatgggtgcattccctgagttgtgagcaacccaaaggaactttcagctctgacaattcttctgcctcattttctttgtgcttgcttaaggagtggaaggcgctagggggccaggcagtccccacttctgtctcgtggtgtccattttgatggcctgcacccagccacagacccatgaggatggggatgggggttctggcttgctatgagtgccagtttttgctctggaaggaggtgaccatttggtgccgcaaggggaaagtgagtagggaaggctgctccccagggccggacaaaccaagaaagccaggtcttcctcctgcctccatgggtcaggtccagcccttcaccagggctcccccaggtgcctttcccactctaggctcctggaagcaggctggtaggactggatgtgcataaggggcacctctggctggcaggcaggcaggcctggactctcagcaagagagtgggctcaagcagcttggttttggccctctccacagcttgtggggcaaaggcttatgtcccaaaggtgagctgcccaactgggacagagagcccctctggagaggaacagagtaaacaacttggactcagctgaaacagtgagataaggcacagaaaatggggaggtggccatgggtaccaagtgcgagccaggcagacacccaaccccatgcagcacacagctgtcccgagccctcctgggccctctcatgcaaacaacaacgaaaatgaagacgaacccgaaggcgggagccgccagctctgatcttgataaaataggtctgcaaacaacgaacatcgttccaaaggcagtacacgagaccgtcatctagtcatgcgcatcaccgctgctatttccacagtgtctgctcgtacccccatagtgacacatcatagtacccagacatcgacccaatctcgtgcgtggttaccagagagatcctgatctatcaagacgaagctcaaccttcc

SEQ ID NO: 369436 - DNA, 462 bp, Homo Sapiens
aacttaagggacagggcctaagtgttaaaccatgaattccatcaaaacattaccctactagtacttgctattatagttggtgccccagtgggtttataatttagcaagaagaattaagtagtatacaaacagccatattttagcatacaatttataatacgggaaatgctacaggccctggggacctctttttgaaggcaaggctatggaaaattttacaaatggaagttaaatcaagtatatactagaaactctattccatttgttcactaacctgatatcatggattgcacatctcctgtctctcttctttccccatatttttagagaactcactagtaaaatgataaattctccatttttcattccaatagccaccatgtccccttcagggctgtaacacacagtacgagcagcatgtcccaaattcactttgtttaacatcttctgcatttaaaaaaa

SEQ ID NO: 369437 - DNA, 797 bp, Homo Sapiens
gggggacagacaggagcccaagactgaagccagcccttgcctcttgtgtcccttcccaactctggtgctggagtaatggggtgctctgcattttgatggggagcaaggggggaccccccctgtaggagtatcggcctctcccctgccccctaccctctctcgtggaccaaagtctccagcagaagggactcatcataagactgacgactcccccacctccacccacacaccgagtgtcatcagtcctaaaggcagggaaacgctcacagaattctgcccacgggttagatgtggggagaaggatattctcagctccagagtgattaggtgatcagccagaaactaaggcaaggtgacaagcagcagcctggagtcacagttggtcccaggcgtgtgggcactaagcagcctctggagacatgcgggcagttgaggatgcaaggacacagtgagtgagtggcgctcctttttggggtcctccagtcctctagtcaagccccaggttcgtaaatatgtgtgtattacattttaaaacctgtatcaacagtcacatttaagctccctattgggttaaagaaaaatcatactccaggtaactttttcccattcgacctcctatagagacaatatgcaaggtgtcatttcacagtctcagtccctgtgaacagtggctgacaccggtgcccaaggctgacctgctacactccaaattcctaaactgggctgccttctacctgcccccctgggaaaccacccaaaccactccggtctctttggggcctaaacaatgaaagggt

SEQ ID NO: 369438 - DNA, 906 bp, Homo Sapiens
  misc_feature (805)..(805): n is a, c, g, or t
tgatctaatgccatcagaatctcttgggatgggacccttttatttactattttgtaaagctccccaagttaaacttgaaaagtgaattaggtcatattaggtcagagattaatacaaattgtactactgattatcttaccctagcaagtgtaggttaatttttacaatcttcttatgtatgctgtttctaataaaaggggttgttctcttgctcaatctaactaacaggtgagctataaaatcacacaggtgatcacaactctatccaaagaatggtggtgctccatccttaacctcagtactagttcttatcctcaggtgcttatcactcattcttgggacttcaaaataaatatatagatatccaggaaccaccttagccaagacaaatcaaaatcaatcactaggagagacacctgagcatatgaacttttaaaaaggttcatgattttggatgcctcaccctggatggagctctctcatagtatgccacacggtatgtccttagctgtattcattaatattacagggaagcagatttcagtttaagagaaaacaatgaaaacaattcagagctacccagtaatggaatggttttaaagcagtgagttctctgtggctggaagaataaaagcaaaggttgaactatcacttgctgggaatgctatcaaggggtttccaaattcagtaagtacttgcatcacacaatatttaaatttcctcacaattaagtttctctagccaaaacttccaacagatcacatataatggatatagacattgtcatgaaaactcatgattttancagaaattatcacagttaaatggattagaatttagtagtactggtcgaacattgcctctgacatcagccttattgagggggaatacttttcccctcctctt

SEQ ID NO: 369439 - DNA, 625 bp, Homo Sapiens
agttgttgcagataatgtgcctgacgtggcagtggcccagtcagctgcattcccgacaggcccacggtgggcgcagggggactcatctggctgatgggctgctctgggaccggtctccccctctctgctgcacctgggcatgggcacctgtgaccccctccattccctactcaacacgacaatctgagacaccttgcgggagctaaagcaggtcgtctgggccagggcttccaggagtgtgggactctgctgacaaataagtggatttgagtcacatcccaaacacagcactgagcaccatcaagtcatcaagtcaccccggaagaggactggtttgcagtggcctttcaattctatgaactgcacccaggagcaagtcttggtttggtactactgtgtctttcacgtctctctaacatttgctaagcttccttatcaacggaaagggaaggcaggaagcccagagcttgaggagacaatagtctccagctaggctttaataccattgtacagcttgttgtgtttatttttgttactctctatttatggcaagtgatactgctttttttcatttacaatgggatatagagtttctttataaattaaattttaaaaattgaaaaaa

SEQ ID NO: 369440 - DNA, 801 bp, Homo Sapiens
  misc_feature (699)..(699): n is a, c, g, or t
ggggaggcgcggaggggctggctgggcaggaggggttggcggggcagcagggccgcggccatggggagcttgaaggaggagctgctcaaagccatctggcacgccttcaccgcactcgaccaggaccacagcggcaaggtctccaagtcccagctcaaggtcctttcccataacctgtgcacggtgctgaaggttcctcatgacccagttgcccttgaagagcacttcagggatgatgatgagggtccagtgtccaaccagggctacatgccttatttaaacaggttcattttggaaacagattgaatacctgcttaagaagcttacagaagctatgggaggaggttggcagcaagaacaatttgaacattataaaatcaactttgatgacagtaaaaatggcctttctgcatgggaacttattgagcttattcggaacatggacagtttaccaaaggcatggaccggcagactgtgtctatggcaattaatgaagtctttaatgaacttatattagatgtgttaaagcagggttacatgatgaaaaaagggcacagaccggaaaactggactgaaagatggtttgcactaaaaccccaccataatttcttaccatggtgagtgaggatctggacggataagaaaggagacattctcttgggacgaaaattgctgggtaaagtccctgccctgaccaangatgaaaagaaaggccctttttctcgcgaaaacggcttggaatacaactttttgaaaaccagggccttccgcattcccagaagaaaccggggatgggattcc

SEQ ID NO: 369441 - DNA, 794 bp, Homo Sapiens
  misc_feature (567)..(621): n is a, c, g, or t
gggaacattccagcactttctatctggcctccttgtccccacactacgcccccccaccctcgccagggcttcctctagtgaacactgttaagagctaatctctgagacagggaaggcattactcacttaaaacccaggctgagtcctggccacctgctggattgtgacataggaggtggaatccactgaactgctacttctgcacaggctccttctcctggggctgtacccaggcccagccctgatggctcaccctgtcaggcaccagctgctccctcctgggctctcacccacctgcacatcctccttcctagcatcacattacctgcgtgtttccccagacaaaagcacttcccattcttgaaccttgcctaccctgggctgagctgacggcaatagatttaatgacagtgactcccaggaagggggtcctgtgactttgcgccttaataagaacaaaaggtggaattggtgacctaggaaaactgttgaattctaaaaagaatgaagttagtttctaacccctagtaatgttccctttttattttttgagtcttgccctgtcannnnnnnnnnnnnnnnnnnnnnnnnnnnnnnnnnnnnnnnnnnnnnnnnnnnnnngtttagccgattctcctgggtagctgggattacgggtgtggtcccaccccaccttagcccctggggcataatttgtactcacaaacaaggtttttgcctagtttggcccaggcctgggtcctcaaattcctgggctttcagtggatcaacccaacctcgggctttccacaagg

SEQ ID NO: 369442 - DNA, 1165 bp, Homo Sapiens; identical to SEQ ID NO: 98022

SEQ ID NO: 369443 - DNA, 893 bp, Homo Sapiens
  misc_feature (41)..(77): n is a, c, g, or t
tgatagatactatggggaatggagttctcgcggggcggcgnnnnnnnnnnnnnnnnnnnnnnnnnnnnnnnnnnnnnatcaggccaaatcggccgagctcgaattcgtcgagagcggatcgcagcgccgagcggggcccgcgggcccatgaggaggcctggggaccatgggctccaggatcaagcagaatccagagaccacatttgaagtatatgttgaagtggcctatcccaggacaggtggcactctttcagatcctgaggtgcagaggcaattcccggaggactacagtgaccaggaagttctacagactttgaccaagttttgtttccccgttctatgtggacagcctcacagttagccaagttggccagaacttcacattcgtgctcactgacattgacagcaaacagagattcgggttctgccgcttatcttcaggagcgaagagctgcttctgtatcttaagctatctcccctggttcgaggtattttataagctgcttaacatcctggcagattacacgacaaaaagacaggaaaatcagtggaatgagcttcttgaaactctgcacaaacttcccatccctgacccaggagtgtctgtccatctcagcgtgcattcttattttactgtgcctgataccagagaacttcccagcatacctgagaatagaaatctgacagaatatttggtggctgtggatgttaacaacatgttgcatctgtacgccagtatgctgtacgaacgccggatactcatcatttgcagcaaaactcagcactctgactgcctgcattcaccggtcctgcgggcgaagctctaccccctggtactgggaagccctggaacatccccgtggctgcccgccgcaatttgggtgggacttacg

SEQ ID NO: 369444 - DNA, 1300 bp, Homo Sapiens
aaataaatgttgggacaggaaaattaggctgaattagtcctttaaccattgcaccaaaaaaagggcccgttttactaatcccaggatataaaatatttttgattaatccattatttatactaaattccccaaaaggcaaaactaaaatctacattattattacctatcttgggcctcaggcagtgtgatttctctaggttctaaaaatgcaatttctcgaaaaggtggaacacatctgactatatctggtacataatgtgtatgaaacaatggtggcattgagtatcttcgttcacctgataaaggcactatctggttaactacagttggctcttggtggggtgaatggaaacgttgccgtttaccgtcaagaggaaggtttttttcatcgcttaatctcttccttcctcgaaataatggggaagctgaggtctgtattggacggacattcccatatgtcaccgcctgtaatgacacagcctctagacaagtcggcattctgaaagttgaattgggccattctaataagctgctggtgtgaataaacagtaggtgacagggtaaagaagttattatgttgttgatgatttggagtgaagggtgggcgacccaaaattgagtttgggaacatgctcttgttcactggaagtgaacatgtattcttctaccttagttcttcaccaccctttgaaacaccatgcaagggtcccaagactatcttcctcttttggtcctggagtggtggacgaggcagtacgcgaggaatagaaaacgagtaagcaaagtaagcggtcctaagattcttcaaaatgtacagcagcccagatgccgcccataaatttggaataaccaagagatactgctggaacctcccacgcaaaacaaaacgctaccgtttcggaaaagtttcccgtgccccgccgccgacctgggcctacactgctgcgttcctctccgaaaccccctaaactcacaggtgtcctccgggaagggctaagcagggcctacccgcactgcccgttcagaagttctaaggcccgagctgggcgtacttggtcgtagctttctcccgaaccaaaggaggtagtggtggcccgtgggacagctaggcccagctccggctccggctgagatctaacccccctcacggctgccaggggaggagcaacacaagaaaaggtaggggctgcaaggatatagaaggttgggggcggtggcaaaagtggaagagcaaaagtcgccgaaaaagcggcgtagaaaaccctgtcaaagacacccggaagaccgacgtgaccccgct

SEQ ID NO: 369445 - DNA, 1139 bp, Homo Sapiens
gggggcttttcgctgcggcagctccgagggcacctccggttctcccccatcctccgggagtgtctgggcgctcagtccgctctgatcccgccgaaaccacctgcggttggcaggcaggagactaggcgtctgccggggagggcagggacccgctaagctgatctcctgtacagtagtgctacttaaaatatgctggggaccatcaccatcacagttggacagagagactctgaagatgtgagcgaaagagactccgataaagagatggctactaagtcagcggttgttcacgacatcacagatgatgggcaggaggagacacccgaaataatcgaacagattccttcttcagaaagcaatttagaagagctaacacaacccactgagtcccaggctaatgatattggatttaagaaggtgtttaagtttgttggctttaaattcactgtgaaaaaggataagacagagaagcctgacactgtccagctactcactgtgaagaaagatgaaggggagggagcagcaggggctggcgaccacaaggaccccagccttggggctggagaagcagcatccaaagaaagcgaacccaaacaatctacagagaaacccgaagagaccctgaagcgtgagcaaagccacgcagaaatttctcccccagccgaatctggccaagcagtggaggaatgcaaagaggaaggagaagagaaacaagaaaaagaacctagcaagtctgcagaatctccgagccagtcccgtgaccagtgaaacaggatcaaccttcaaaaaattcttcactcaaggttgggccggctggcgcaaaaagaccagtttcaggaagccgaaggaggatgaagtggaagcttcagagaagaaaaaggaacaagagccagaaaaagtagacacagaagaagacggaaaggcagaggttgcctccgagaaactgaccgcctccgagcaagcccacccacaggagccggcagaaagtgcccacgagccccggttatcagctgaatatgagaaagttgagctgccctcagagggagcaagtcagtggctcgcagggaccttctgaagagaaacctgctccgttggcgacagaagtgtttgatgagaaaatagaagtcaccaggtccgga

SEQ ID NO: 369446 - DNA, 2436 bp, Homo Sapiens
  misc_feature (1925)..(1925): n is a, c, g, or t
  misc_feature (1929)..(1930): n is a, c, g, or t
ggcctgggtggcgaattcggcacgagggccatgctgacatgctgacatcgccccctgaggacttggctgcaaccccagagcccccagggtgtcccggagccctggaccgtgctggcagctggacggagctccctggctgagggcgcaagatgcgggtgtaccagcgtgaagaggtccccggctgccccgaggcccacgctgtcttcctagagcctggccaggtagtgcaagagcaggccctgagcacagaggagcccagggtggagttgtctgggtccacccgagtgagcctcgaaggtcctgagcggaggcgcttctcggcatcggagctgatgacccggctgcactcttctctgcgcctggggcggaattcagcagcccgggcactcatctctgggtcaggcaccggagcagcccgggaagggaaagcatctggaatggaggctcgaagtgtagagatgagcggggaccgggtgtcgcggccagcccctggtgactcacgagagggcgattggtccgagcccaggctagacacacaggaagagccccctttggggtccaggagcaccaacgagcggcgccagtctcgattcctccttaactccgtcctctatcaggaatacagcgacgtggccagcgcccgcgaactgcggcggcagcagcgcgaggaggacggcccgggggacgaggccgagggcgcaaaagaggggccggggccgccgcgggccaacctctcccccagcaactccttccggggcgcagcgctcggcgcaaggctccacccttctcgctggggcagggatatccccgacgtacgcggcagcggcgtcctggccacgctgagcctgcgggactgcaagctgcaggaggccaagtttgagctgatcacctccgaggcctcctacatccacagcctgtcggtggctgtgggccacttcttaggctctgccgagctgagcgagtgtctgggggcgcaggacaagcagtggctgttttccaaactgcccgaggtcaagagcaccagcgagaggttcctgcaggacctggagcagcggctggaggcagatgtgctgcgcttcagcgtgtgcgacgtggtgctggaccactgcccggccttccgcagagtctacctgccctatgtcaccaaccaggcctaccaggagcgcacctaccagcgcctgctcctggagaaccccaggttccctggcatcctggctcgcctggaggagtctcctgtgtgccagcgtctgccccttacctccttccttatcctgcccttccagaggatcacccgcctcaagatgttggtggagaacatcctgaagcggacagcacagggctctgaagacgaagacatggccaccaaggccttcaatgcgctcaaggagctggtgcaggagtgcaatgctagtgtacagtccatgaagaggacagaggaactcatccacctgagcaagaagatccactttgagggcaagattttcccgctgatctctcaggcccgctggctggttcggcatggagagttggtagagctggcaccactgcctgcagcaccccctgccaagctgaagctgtccagcaaggcagtctacctccacctcttcaatgactgcttgctgctctctcggcggaaggagctagggaagtttgccgttttcgtccatgccaagatggctgagctgcaggtgcgggacctgagcctgaagctgcagggcatccccggccacgtgttcctcctccagctcctccacgggcagcacatgaagcaccagttcctgctgcgggcccggacggaaagtgagaagcagcgatggatctcagccttgtgcccctccagcccccaggaggacaaggaggttatagaccgagggggaaaattgcccccagatttcattgtgctttgtatattacaaggccctgtntgtnntttgtatttgataattccgaaacaactcacacccccccacgtcgacggaaccgaccccacccgaaaaattgcttccgaccgtacacactccccgtcccacaccatagacttgcaccaccgagtcttcctccgacccccgcagatacgtcccccccgaccattgcgggctcctcccccccctgtcgaaccaccaccctcttcatactttcccccacttcccggatgccctccccataatttaaacctcacccactgcatagatcgcgccctatttccgtttttctttaaccgctacactccattctcacttttcgggagtccagtgcaacttccgacgagcgcatagacaatataacattactctctctgcctccacccaataataaatatccctctttcaactaccaccccgcgcccgtctctcacgaggaacgtgccggaggcctagacctgccttgaatatacaccctcttgcctgtaaaaacaacaacgggaagactcagcga

SEQ ID NO: 369447 - DNA, 1023 bp, Homo Sapiens
gggtggcgaattcggcacgaggcggaagcagtggcgtccgcagctggggcttggcctgcgggcggccagcgaaggtggcgaaggctcccactggatccagagtttgccgtccaagcagcctcgtctcggcgcgcagtgtctgtgtccgtcctctaccagcgccttggctgagcggagtcgtgcggttggtgggggagccctgccctcctggttcgccctccccgcgcactaaaacgagcaagggagaagcaagttactatgagtctgctaaactgtgaaaacagctgcggatccagccaccctgaaactgactgctgtgtggccatggccagctcctgtagcgctgtaacaaaagatgatagtgtgggtggaactgccagcacggggaacctctccagctcatttatggaggagatccagggatatgatgtagagtttgacccacccctggaaagcaagtatgaatgccccatctgcttgatggcattacgagaagcagtgcaaacgccatgcggccataggttctgcaaagcctgcatcataaaatcaataaaggatgcaggtcacaaatgtcccgttggaaatgaaatactgcctggaaaatcaactattttccagaacaatttctgcaaaaactgaagaattctttcttctgaagggcgaaattgcccaaatggaagggtagtcttgccccaaaaagcgacacttagcacaccttggacgattcatccaaccacaattaggccacctttgtatcataagggaatggaacccagatggtaccccgacgtctttcccaaaaaattccgcaataaaaatatcccacatttttgaaccggtattctcctatgggacaacacattattccctgagcgaacatacttcggcccttgaatcaacggcgcatttcccgggaacaagcacgagcaactcattcgatacagaccacttttatttatatcaacgaataacgctcataacatttgcaaactaacgtttccaacagttaataacaccggaaac

SEQ ID NO: 369448 - DNA, 814 bp, Homo Sapiens
  misc_feature (772)..(772): n is a, c, g, or t
tctgcagttcccgtagctgccagcctgtgcagtcctctgtgatgcttggggaccggctcctcggtcacaccccagtcctgctctgaaggttgccgttttccaaacagaaggatggtagctagaggggagatagcaagattctggagtctggaaagccttcacttggtttcttcagatggaggtactgagccctctgccttagtggatgacaacggtagtgaggaggacttcagctatgaagacctctgccaggccagccctcggtacctgcagcccggcggggagcagctggccatcaatgagctgatcagtgatggcaacgtggtctgcgcagaagccctgtgggaccatgtgaccatggatgaccaggaactgggcttcaaagccggggatgtcatccaggttctggaagcctccaacaaggactggtggtggggccgcagtgaagataaggaagcctggttccccgcgagcttcgtcagattgcgagtgaatcaggaagaactgtcggaaaactccagcagcacccccagtgaggagcaggacgaagaagccagccagaaccgccacagacactgtgagaacaagcagcagatgcggaccaacgtcatccgggagatcatggacaccgagcgggtgtacatcaaacacctcagggacatctgtgaagggctatatcccaacggtgccgcaagcacacaggaatgttcacccgttgcgcagctagcccattatttttgggaacattggaagatatttacaaatttcccgnacaggaaacggaaacgttaaatgaaaaaaatgtccggccgcc

SEQ ID NO: 369449 - DNA, 1135 bp, Homo Sapiens
  misc_feature (609)..(669): n is a, c, g, or t
  misc_feature (1094)..(1094): n is a, c, g, or t
gggggtctcgggctccggccgggtctcgcgcgccgtcttctcgagaggggcatcgcgccgcccggcgcgcgccgcccccctgcctcgcggagcggggtctcgcggtccccgctcccaccctccgctcgcctggaccggacgggagacgctgccgcatggcctgggcctggcggggggggcgagtggccacgagccggcccccgcctcccctacgcggggcgtcgcgagagtccgcgagtagtctcctatcgggtccgcctgcgacggcccgctaaccacggagcggggccccgggcccacccgcgcgccgtgttccccctgccccccgtcgcggcggtcccgcgggttggcagcgcgctcctaggccgggcctcggggcttgcttgtcctgcgccgtctcggcggccgtccccgcgcgggtacgccgtcgtcgcgctgggacggcgcgggccttccgctgcgtgggcgggaggcagggacctcgcgcgggcgtcctcgccgttccgctcctgcccgtgcccgggtccgtcgatgcggcatcgcgcgcgcccggggtatcctcgacaccgcctgccgcccgcacccgaccgtgtacggtccggcccgcgnnnnnnnnnnnnnnnnnnnnnnnnnnnnnnnnnnnnnnnnnnnnnnnnnnnnnnnnnnnnnggcacgggatcgggaaccccgggggcggcaggctggtggggcggtgccgtcggccgccatcgtgcgtcgcgggtcgagtcgtgcgcggtggcgcgcgtccgtacgtgtcgacccggctcgctcggcctagctggcgtctgctcggctggcgcctgtgcccacgtcctacgcgctctctcatctacgcacaggcttcgtgtgttctgcgctccctcacatcttgccacatatccgctcggtgcgcggacgctccgcccgtctgtgtaactctctagcgctcgagcccggcgcgagctcgacgccggtgcgctctgcgacttggcgcgacgggtttctctgcggcgcgcgagtggggtcgtgcttccgcgtgttggccactcgctcgtgcgtgtcgctcggccgccgtggtcgcctcgcgcgagtcnctgacgctgcctgtgcgctcgcccggctgacgtcgcagtcc

SEQ ID NO: 369450 - DNA, 1112 bp, Homo Sapiens
ggggacatactctgtcctgggtcaaaccccactggcagcaggaattctgaatgtattggggacccctccttaggcctcgttaagtctcaaacacagtacagctcacccagcattgctgacgactgaagattcagaaacaaaacctacacacagcactgaggtcttaatcatagcaaaatgtgataaaccatgttgtgaaaaacttttatacattgaagccatgaccattttgtgtctatcttactctagcacaaaaattgggggatgttaaaagatagttgtgtggaagctataaggttctgtctgtcgtgttactctctgtggaaatgagaggggtctcccatttacactaagcaaatttccattggtcaattttaatgatgtcttgaagcacaatttagctgagcactgagtagccatatgctttctgagtacaagtgtgtctgccttcttcaacatgtagggttgatcaagctaatacttaattgcaaatatcccttgtatgaggttaactaaaaaaattttgctatgtctgatctacatgtttgcattttgttcaactaaattaatatttgtagattgcaagttttgtttaaaataactttattgagtttttaagtcctgatctgttctaaggtgccctttctcacctcccattgattcagtgattctgaagttctttaatttgcaaggtaaaataagtctactagagaggaggaaatcaggcacaaattggaccaattctcatgccattttgcaaagcaaaactgtaaggatgatgaaacccggcctaacctaaattaatggatcatttccacctaaatccagatagaggaaatatcataaatattaacttgtctccctagaagcctgagatttttcgccttaaatgacatggttgtgtttttgtaagagaaacttaatcctaatctaataatgtgcatttaagtaagcagttctaagtcatgtatgacaatgcaattgtctgtttcctgaaaacaaataaatcgggaacaccatatccatttcaagctatcattaaagtgtaatttcctttgctctcttttactgggattatttgttttaaagtaaaacattaaaaagatgtctat

SEQ ID NO: 369451 - DNA, 600 bp, Homo Sapiens
  misc_feature (47)..(99): n is a, c, g, or t
  misc_feature (215)..(215): n is a, c, g, or t
tttcactgtcccttaagaccatcctgttagccaagatggtcttgatnnnnnnnnnnnnnnnnnnnnnnnnnnnnnnnnnnnnnnnnnnnnnnnnnnnnngtgtgagccaccgtgcccagccaaagactgctcttaaagcacctttttgacagtgaacatggtctaaaaaagggaagatattgtagaagatttcacacacacacgcgtgtgtgggnaggacaactaaaggtattgaaggtactaattaattagatttccaaaattttctacagagagttaattatcacccaaaatgtgaatggtacatacaaaacctggcattttcttgtgataagtttacatttttaggagagtggagctttcaatctgcccttttctcctttgtttttgtagttttcaccaaagatgatcaactagaaatgttaagtggctatgcaagcaaaagcatagataggttaaaaaaaaggatcagctggctgggcagggtggctcatgtctataatctcagcattctaggacagtgatgtgggaggattatttgaggctaggagttccagttcgaaaccagcttcgtaaacatagcaagacccagtctctacc

SEQ ID NO: 369452 - DNA, 676 bp, Homo Sapiens
gggaaaaaaagaacgttctcaggttgaccagctgctgaatatttctttaagggaggaagaacttagtaagtcattgcagtgcatggataacaatcttctgcaagcccgtgcagcccttcagacagcttatgtggaagttcagaggctacttatgctcaagcagcagataactatggagatgagtgcactgaggacccatagaatacagattctacagggattacaagaaacatatgaaccttctgagcacccagaccaggttccctgtagcctcacacgagaacgaaggaacagtagatctcaaacatccattgatgccgcactgctgcccactccctttttcccactttttctggagcctccatcttcccatgtgtctccatcacccaccggagcctctcttcaaataaccacgtctcctactttccaaacccatggcagtgtccctgctccagactcatcagttcagattaaacaagagcccatgtctcctgaacaagatgagaatgtgaatgctgtgccaccaagctctgcctgcaatgtgtccaaggaattactggaagctaatagagagatcagtgacagttgtccagtttatccagtcatcactgctagattgtccttaccagagtcaacagaaagtttccatgagcctagcctctgtataacgggtacc

SEQ ID NO: 369453 - DNA, 786 bp, Homo Sapiens
ggtactggtctgatcctcagtgaagtccagcggaacctcaatagctgggatcgggcccgggttcagcgacaccttgagctcctactgcgggatctggaagatagccggggtgccacccttaatccttggcgcaaggcccagctgctgcgagtggagggcgaggtcagggccctcctggagcagctgggaagctctggaagctgagacactggcggcaggcacctagctatgtgaccactggccctaaaccttttccctctgtggcctcctggcttgcactgctccctctagaaagattccttcaggtctggaggcagaggaatgggcatagctgagccagttgccctcctagggcatgtttgaccaggactgagtctggaatctccaagttaaagatggtgaatcaatgcttcgggcttggagatggaacatgcctcctctccattcagctagaaggaccaaagcatgtggcatttggatggccagagtgccctgaagcaccactaccaaccttgcctccccctcctctcaaagagcctctgattgtgtcaccaaggggctcacatcttatgtctgccatgcccaggggtgtcgccatccagatgtgttggaagcttcccctcctgccttatgctcacctgtggacaccgaggatgccctcacattggtgctttctcctcatcctcatgccccctttgccacaatggtatgatggcttggtagcccctcgaggcagatgcacctgacttgctgctattaaaaagccgtgtgcctttctaccaaaaa

SEQ ID NO: 369454 - DNA, 777 bp, Homo Sapiens
attcctctccaaagatgcgattttctgtgtaggtctgatatgcgtaaactttgggtctgaaacttacttgatcttttccaactcttcctcattagcattgtcacatccctggactctccttctttaggggtaaggatgactgagagcaaaatgattccaagatcatggtcaggataatgaggatctttcagagtaagggtcacatctgtgggcctgtttaactccaattgtgtcagatccagaaaggctgagcccataaagtcatcctgtagtccaaaatcatagtcaaatacctttatatacaatggctccctaagatgatcaaccagaatacaagctttttcttcccacacagggttgaggttcttgtgtattatcttacttctaaaaacttcttttcctccgattttaaacttcacatatggatcactcgtccctcctcgatctcgagcagctaaactttgaccccttcttaatgtaatgtccagctggtacattccgggatcagccaaggggacttctgcattactggttccagcagtgtttattattttcttattacaaataaatggcaaattgcaggcacttttcagcttgcagctgtctagcatagttgattagaaatgaacaaaacatctttcactccagtgagagaactgcatatttagacttgctttcttcactgaataccggcaaaagaggctgttcacctccaagtgatagcaacagccctgcacggagcacttgctgctctgcacagcagcgacttggaatccc

SEQ ID NO: 369455 - DNA, 1078 bp, Homo Sapiens
  misc_feature (939)..(954): n is a, c, g, or t
attccccactatgaatctaatgtatgctttactgttatcctcccgtttattatgggcccaaaccataccagataccctaaatccttttggcactattgaataagatgccaattgcctatataaaaaaaagacacaaaggcatcagattgagaaatatgtggcaccaaaacatacttctcatgccacattacacagctgcgagaaatcaaagacacaccgatgtgtgttttctgctcatatcaccccatatgctgggctgggcttgacactggatgtgaagactcagtgcctgagagatcaatagcaggtccctactgtattgactgatctttaaatttggccgccttattattctaggagctctattctaaactcaaggagttcagaaaagctgtgccagccagtaagtaaagttggacctttggtcttcagaagatagggttttgtctttggttgttttttgaagcccctgtcattttgcttgatgcccttcacacttttctccctgcctttttgttaaagtttttttctcctgtaataaaatcagttaataaccactgaactaacttctttagattaaagctctattagaagtgcattcagtggtccagaatattctgagaaagtataacaacttctttcattatggagctctcagtatctttttatagggaagaagtcagaaaactccaacaacacaacacaatctagtagcattaaggcaacacagcagaagaaaagttaactgtccccatgtgatcatctctgaaaatcaaaataggcaaaaacaataggggccaaaaaccaagttctgagcacagactacaggaacctagaggatgggggaaaatctacttaatagtccctgtttcaaatcaccagcccccaaagctatcctattattgtcacattcctgtggggtatctaatacaatttacnnnnnnnnnnnnnnnntcaccaccggattatcaacatggtaaatgaagaaggagctcacattttctagtggcaactagaatgatccatggaacccattctatctgcccaattattcccaagtcttcttttcaatgtctac

SEQ ID NO: 369456 - DNA, 556 bp, Homo Sapiens
gccggctaccatatggttggacgaggacattacattaagataacggaccaaagtgctgggattacgaggcatgaaccaccatgcctggactatggccattttcagtgttgtgtccagtgatgtttccttcacaccaagaagtcttcaggggattcatatatggattgtgaaatcctctagtgacatggaagtttctgtgtcatgcagatagagaaattgtgatgcctggatgcctgaggttttttggagtgaggtactatgcatttgcaagtaattgtaaactgtataatccaggattaaaagataaactattgttgcatttagaactgtgtttagaatacaataatttgttgttgttttgtaataggactgaagccaatattaaagcaagtcaaccaaaggttctctggtgtagacaagacagcaaaaggacagactaccttgtggaacctagcattgttctccttctgcagcactaagtaacatttgttctccgttaagatctttgcaaacacacaccagaattgctggtcgtccaaccaaaatggtagccggc

SEQ ID NO: 369457 - DNA, 812 bp, Homo Sapiens
  misc_feature (726)..(726): n is a, c, g, or t
ggctgccggagcgcatgaccacactcaccttcctgggcaacttcccggacacagcccagctgctcatgccgcaactgaatgccatcattgcagcctcaatgaccatcaagtcctctgacaaactccgccagatcctggagattgtcctggcctttggcaactacatgaacagtagcaagcgtggggcagcctatggcttccggctccagagcctggatgcgctgttggagatgaagtcgactgatcgcaagcagacgctgctgcactacctggtgaaggtcattgctgagaagtacccgcaactcacaggcttccacagcgacctgcacttcctggacaaggcgggctcagtgtccctggacagtgtcctggcggacgtgcgctccctgcagcgaggcctagagttgacacagagagagtttgtgcggcaggatgactgcatggtgctcaaggagttcctgagggccaactcgcccaccatggacaagctgctggcagacagcaagacggctcaggaggcctttgagtctgtggtggagtacttcggagagaaccccaagaccacatccccaggcctgttcttctccctctttagccgcttcattaaggcctacaagaaagctgagcaggaggtggaacagtggaaaaaagaagccgctgcccaggaggcaggcgctgataccccgggcaaaggggagcccccagcacccaagtcaccgccaaagnccggcggccacagatggacctcatctctgagctgaaacggaggcagcagaaggagccactcatttatgagagcgaccgtgatgggg

SEQ ID NO: 369458 - DNA, 811 bp, Homo Sapiens
agcgggccaggcgcacgcgcggagctggagccggcgcggaggagcgggcggccgcggctgtgccctctcctactcctcaccgcgcgagcgcggggaaccagtagccgcggctgcttcggttgccgcggtcggtggtcgttatggattctccatgggacgagttggctctggccttctcccgcacgtccatgtttcccttttttgacatcgcgcactatctagtgtcagtgatggcggtgaaacgtcagccgggagcagctgcattggcatggaagaatcctatttcaagctggtttactgctatgctccactgttttggtggaggaattttatcctgtctactgcttgcagagcctccattgaagtttcttgcaaaccacactaacatattactggcatcttcaatctggtatattacatttttttgcccgcatgacctagtttcccagggctattcatatctacctgttcaactactggcttcgggaatgaaggaagtgaccagaacttggaaaatagtaggtggagtcacacatgctaatagctattacaaaaatggctggatagtcatgatagctattggatgggcccgaggtgcaggtggtaccattataacgaattttgagaggttggtaaaaggagattggaaaccagaacggtgatgaatggctgaagatgtcataccctgccaaggtaaccctgctggggtcaagttatcttcacatttccagcacacccagcatctggcaatattcaaagcattaatcttatgttcctttataccatctttattgtggccccaaagataccg

SEQ ID NO: 369459 - DNA, 844 bp, Homo Sapiens
  misc_feature (79)..(118): n is a, c, g, or t
gagggctgaggtttccattaaaccgaagatcacgcccagtgcattcccagcctgggataggagcaaggattctgtttcnnnnnnnnnnnnnnnnnnnnnnnnnnnnnnnnnnnnnnnnccagtgatgtgggtaggatcaccttctagccatctggaagccacacagtaacaacttcaagttgccagctgggtttggtcaaagaaatgtgtaaagccaggatccactatccttagctgattctgttagatcaaaatgcctaatacaaacaatttcctcatgtctaaaatactgtttccgaaagttatttcttttgttttacaaatagagagcagtaatcattttcctatgaatactagaatgattatataatcctcattcaaacctcacaccaagtgttttcaacagccagaacagagcaatttttaaactacgaaaaatgaagtgcaaaccttacaatttcatagcaatgttccccacgtttcactcatgaacagctatccaattgcatgcaccttcctgcagaacttcttccaagtccagtccttccactggaggggctttcttcctatttctccaataggtctaaaatgtcaggttacagtcagatttggcaatgtgtattacttcaaatgattgagctggaggaaactacattcctttggaatgatgacagaatctatcagaaacttcacacatccactcagctctcctggatccctgtccacaccatgaagcctgaagttgttatgatggcctttatgaacctgaaagaagccgctggcttccaccacaccacagtgtcacccgaagaaatccaatcctttaagaaagatcgaagaattc

SEQ ID NO: 369460 - DNA, 556 bp, Homo Sapiens
atcagcttgcttaagcctattatcaaagtgtttccaatactctgtgagtctcgagagaaggctgttcgagatgaagcctaactagctgctgtggagatttacagatggattcgggatgctctgagacccccattactaaatataaactctgttcagttgaaagaactagaagaagaatgggtcaaactgccaacaagtgctcctagacctactcgatttcttcgttcccaacaagaactagaagctaaattggaacaacaacagtctgctggtggagatgtctgaaggagtgtggtgatgatggtgatgaggtgccacataatagatgcttatgagcttttagaagctgtagaaattctttccaaacttcccaaagacttttatgacaaaattgaggcaaaaaaatggcaagagagaaaagaggcctggagtctgtagaagtactaataaaaaaccccatactggaagctggcgattatgcagatttagtaaaagcattaaagaaggttgttggaaaggacacctatgtcttgttggagcttgggatcctctagaa

SEQ ID NO: 369461 - DNA, 914 bp, Homo Sapiens
  misc_feature (824)..(824): n is a, c, g, or t
  misc_feature (832)..(832): n is a, c, g, or t
  misc_feature (862)..(862): n is a, c, g, or t
  misc_feature (871)..(871): n is a, c, g, or t
  misc_feature (882)..(882): n is a, c, g, or t
  misc_feature (896)..(896): n is a, c, g, or t
aatgctgctgccgccgccgccgccgcctgccgggtattcctgctgatcctgctcggaccttagcttccctgacccctccctgcccggggagcgaaatactcttaattctaaggaaaacctggaagcacaatgggagatgacagtgagtggttgaaactgccagttgatcagaaatgtgaacacaagctgtggaaagcaaggttaagtgggtatgaagaggccctgaagatcttccagaaaataaaggatgaaaagagcccagagtggtccaaatttttaggattgatcaaaaaatttgtcactgattccaatgcagtggttcaattgaaaggattagaagctgcacttgtttatgttgaaaatgcccatgtagcaggaaaaaccacaggagaagttgtgtcaggtgttgtaagtaaggtgttcaatcaacctaaagctaaagccaaggagctgggcatagagatctgtcttatgtacatagagattgagaaaggagaggctgttcaagaagagctcctgaaaggcttggacaataagaatcccaagatcatagtggcctgtatagagacactgaggaaagccttaagtgaatttggttccaaaatcatcttgcttaagccaattatcaaagtgttgccaaaactctttgagtctcgagagaaggctgttcgagatgaagccaaactaattgctgtgggagatttacagatggaatcgggatgctctgagacccccattacaaaatataaactctgttcaggtgagacaaaaagttttctggttgctttcgcacaaggttaatatgaaaatattttcttcctatngttgttgnatattctggtccttaaaaaataatttattnttacattcnttaatttttgnaaatcagcctttcntgaggcaatggtaacttt

SEQ ID NO: 369462 - DNA, 423 bp, Homo Sapiens
gggattatcaatgcagagaaatctgaattcaatgaggatcaagccgcctgtgggaagctgtgcatccggagatgtgagtttggggctgaagaagagtggctgaccctgtgcccagaggagttcctgacaggccattactgggcactgttcgatgggcacggcggtcctgcagcagccatcttggctgccaacaccctgcactcctgcttgcgccggcagctggaggccgtggtggaaggcttggtggccactcagccccccatgcacctcaatggccgctgcatctgccccagtgaccctcagtttgtggaggaaaagggcatcagggcagaagacttggtgatcggggcattggagagtgcctttcaggaatgttgatgaggtgattcgggccgggacttggaggcttcagcaagattgggc

SEQ ID NO: 369463 - DNA, 828 bp, Homo Sapiens
agcggaggcagagagagtcgggttacaagatggcggatctgtagtagttaccgcggcggcgggagagcaagcgagccctggggggcaaagagacgggagagtgggtgtatgcgcgggtgaagtgagaggtaacggggcctccgggcggagaggcctcagtggctcttgtcaccccttctcgcggctgaacctttggagccatggtgaattcgggcctctccgaagccgccgccgccgccaccgccactactgcctttaccgtctcctaagagtgaggagcgcggacgaggtaagcgaggaggcggcggctagagcggtggagacagcagccaccatgtcggatacgcggcggcgagtgaaggtctataccctgaacgaagaccggcaatgggacgaccgaggcaccgggcacgtctcctccacttacgtggaggagctcaaggggatgtcgctgctggttcgggcagagtccgacggatcactactcttggaatcaaagataaatccaaatactgcatatcagaaacaacaggatacatttaattgtttgggtcagaaaccgaaaaactatggatttgggctcctgagttttccaggagaaagcttggctgtgaaggagatccggggaaaaaattttggccgggttccaagggaaaagaaccccctcacgggggaaattcccaccagggaccctcatttggaggaattctggaaaaaagaacctgaatttgaaaagaaaatgccctcgaaaaacttaagtccattctgggatttggaaccttgcccgccaaaatggggggggaaactcccaaatttaaaaacctttgg

SEQ ID NO: 369464 - DNA, 882 bp, Homo Sapiens
ttccccgaaggagtagcaacggtaacgggcccagggccctagacccaagctgtgccccaaccagaggcactatcccctattctacagttccaagtaaccttaccggtcggactctggcccgaaccagcagcgacatcccctggagctcctccacgtaagtggaggagacgtgcccggtgcctcggtcgtcccattgccggtcttcgttcagggtatagaccttcactcgccgccgcgtatccgacatggtggctgctgtctccaccgctctagccgccgcctcctcgcttacctcgtccgcgctcctcactcttaggagacaggtaaaggcagtagtggcggtggcggcggcggcggcttcggagaggcccgaattcaccatggctccaaaggttcagccgcgagaaggggtgacaagagccactgaggcctctccgcccggaggccccgttacctctcacttcacccgcgcatacacccactctcccgtctctttgccccccagggctcgcttgctctcccgccgccgcggtaactactacagatccgccatcttgtaacccgactctctctgcctttctcttcctcctccagcaggctcgcacgggctgtcctagcaggggctacggcggccgacaagtcccatgagcagcacctccgcttctgcacgcgcttcccaggccggaatgctcggcgctctcgcgaggaggggtacccgactggggcgggagtactttggccgcgcgtgctcagagcgaagtgtacgacgcttcgggcacgagtgttggcccgtgatcccagtaacgttctgtataatagtatggcataatacagaagtgtatgccagcacgcacatccagcgtattaagacccaaggtctac

SEQ ID NO: 369465 - DNA, 623 bp, Homo Sapiens
ctggtactgcccggagacagattatccgggagatacagagtattcctctcttcacaccaggaccagccactgttgcagcatgagttcccagcagcagaagcagccctgcatcccaccccctcagcttcagcagcagcaggtgaaacagccttgccagcctccacctcaggaaccatgcatccccaaaaccaaggagccctgccaccccaaggtgcctgagccctgccaccccaaagtgcctgagccctgccagcccaaggttccagagccatgccaccccaaggtgcctgagccctgcccttcaatagtcactccagcaccagcccagcagaagaccaagcagaagtaatgtggtccacagccatgcccttgaggagccggccaccagatgctgaatcccctatcccattctgtgtatgagtcccatttgccttgcaattagcattctgtctcccccaaaaaagaatgtgctatgaagctttctttcctacacactctgagtctctgaatgaagctgaaggtcttagtaccagagctagttttcagctgctcagaattcatctgaagagagacttaagatgaaagcaaatgattcagctcccttatacccccattaaattcac

SEQ ID NO: 369466 - DNA, 1170 bp, Homo Sapiens
  misc_feature (165)..(165): n is a, c, g, or t
  misc_feature (228)..(270): n is a, c, g, or t
ggcaaacagggcgagtggttgttggcgtgaggggatcgggcggttgctggagtgggtggttatcgtggtggtcaggtgaggataaggcgtaggctcagtatggtgaggcgccgtgtgatgagatggtacactttcgtggtgggctatggtggagctccacgtgtnagaacataagggtagagtgtggtcgcaggttgaggtggagttggggttttggtggcggaagcnnnnnnnnnnnnnnnnnnnnnnnnnnnnnnnnnnnnnnnnnnnctatgggcacgttgggacgttatggtgccgcaagagaggtgggtgctggtggggatttaataagtgacttacatctttggattcagtgcgttgggaaggctggttggagttgagtggtagaatgtgatgggttgatgttgcgtgggagtatagcgcagggcttgccctttaagacccatctatggggtagggaggcttgggtggttcatttcctttgtgttcggatgtcagactctctactgtagactgcaaagcattgctttcctcttcgttaaccatggaaatctatgtttacaggactatcttctgaaatttcaattatctcacagtctttatcagaattttcatcttcattcttaacatcaggatcagaagactgacacaggtcagtgtgttggttgttgtttttcatagaaagatcaatttccagatactttgacaaagcttctgtgcacttttccacaatgtgaaccatctgaaggtaactggcagcagtcaagtatttcaaaagctctttccttttaacttcaagtgctccagtatagcaagacagtaacaattttctgccaacttctgcactctgtaagatggtgattctgacatgttttgactgtgtgagtaaaaactgatctctcataaaagtggagcaagcagccaaaatcaccttgtgcccctggaactcagtgtcattaatgtaaattgatacatcacaaaataaattctgctgtctcaaaagattcattttctgcaagaccacatctccttgctgttcaaactggaaatgcagaacatcagactcagcagccatgatcacaatcgactcagaaaactagagtcaaggattccacggcagcgtctgcccaagccggaagatggaccctcgtgccgaattcgccaccc

SEQ ID NO: 369467 - DNA, 1231 bp, Homo Sapiens
  misc_feature (21)..(21): n is a, c, g, or t
  misc_feature (27)..(27): n is a, c, g, or t
  misc_feature (48)..(48): n is a, c, g, or t
  misc_feature (57)..(57): n is a, c, g, or t
  misc_feature (91)..(91): n is a, c, g, or t
  misc_feature (160)..(160): n is a, c, g, or t
  misc_feature (200)..(200): n is a, c, g, or t
  misc_feature (1142)..(1178): n is a, c, g, or t
ccagggccaaagggtggaggnaagtgnccgagccccaaaagtccgcangagctgagntgtgggtccatatcgaatgggtggtggtacaggncctcccatgggggtgctcatgagagggactcctgggaaaggagggggcccctttggagccatataaccnttgccttcatcgagtacctgggtaggggaagagcctctgnagctgctgttcatcatggtagctgtaccagatcctggatcagaaggagagggtttcccagatgcctcagctgaccatcgaggatgaggtagaggcccgtccactgatccaaattcacttctaggcatatctcttcgattgagagtagcagagagaggtctcacgggtggctccactgtcaatggaggggagcattctccaccactcacaggggatgggccaaaagacccattctggctcagaggacctctccgtggagggttttgtgtatttggttttcctggcattggttttacaatcacaggttcttcttgcagcattgccatcttttgtgttaattctaataatttgtgtctcaaattggcagcttcccttttctcttcagctatagctctttctgcagcacgagctttgagccagttttcatgagctttcttctcatgggtagcgatctggtttttaaatgaccgctctgtcttctgtaattcatcctccatttcttcaattctccgcttgtaagtttttacttcctctgcagccgaaactgccttttcatctgcagctgacagcctgtgctctctttcttgccgttcatactcttcttgactcagtttcttttgcaaagccatctccttctgctgatagagctcattcagaatctccactttctgcctcaaggttttgcattcatcttccagtccagctttggcagcttgtagtgagttgcggtcatcttccaatttctttacctggtcttccaggttacatttagtggacacggaggctcttagcttaagctgtaaaagctttagatcctcttcaactaccgatattgcagtctgtgtccgagagacatccatcatctgcttaatttgatttttcatcttctcattctggtcacctcgctctcgacgaattcgagctcggccgatttggcctgatnnnnnnnnnnnnnnnnnnnnnnnnnnnnnnnnnnnnncggccgccaccgcgtgcagctccgagtcgccctatagtgagtcgtatacatta

SEQ ID NO: 369468 - DNA, 839 bp, Homo Sapiens
agactcaaaataagtttaacacttactgtgttgggcaccctaacagaagagctatcttaactcattgaatattaagatctgctggtttcaggagtcaaaatgtagaaaaagaggagaattgtaatatggtcagaaacagagaagccttttctatgtaaattcagacttatctgaggctaacagttttccgaagtggtggtgggtagcagcatgacagctgcttgccatgactgatgcagactactaggtttccattttagctctctgtaggtactgttttcttccccactgtgtcgaaagtgatttgttttgaagcaagagtagaatataacatctatcaaatatagcttttaaaataagaatacctggtctggatccagttgagcagcacagcagataaaccttagagtttttctgttcttacatgacggtttccatgtggaaagatctaaactttcttggaatcactattagtgaagaaaaatgtagaatctgtataaccagtaattccccaattcttactttcaaagtcatatccaagaaagacaatatgtcagaatagaatgactttggtctaggtgttttcacgttggcaaaaataaggaggaaattatattattttaatatccaaatttaaaggtttggaaaattttgaatagttaatattagaacttatgttggctgttttttatatttccaagcattgagtattctgcattaatccaatactattcccaccaaagagatttctggaagatttttaaaaaaatgatacccctgttttatatttttgaatgtagaagagactcctgaaagagaggaaaggtcctgagttatac

SEQ ID NO: 369469 - DNA, 1014 bp, Homo Sapiens
  misc_feature (19)..(19): n is a, c, g, or t
  misc_feature (31)..(31): n is a, c, g, or t
  misc_feature (39)..(39): n is a, c, g, or t
  misc_feature (46)..(46): n is a, c, g, or t
  misc_feature (64)..(64): n is a, c, g, or t
  misc_feature (103)..(103): n is a, c, g, or t
ggaacctgaggcctgaagnaggtttctggcnaattgganaaacccntgagatccctgaccaganccaggctttttgttgggccagaagcccatatttagaagnaagagcctaaaggaaaagctgaaaaccctggcgacgaaaaggaagcccaagaacataggagatattttgacaaaacggaaaaacaacagaacaggaagtgaggcaggagaaccacagagatggaagcccaggaggtgtccaattagacgggcacaagagaaaaacagccagagaccgagaaaacggcgggaaggaaaggttccatctggagaaaaaaacctctcaagactggaagggacaggagctggtgaccatgaagcagttcagactcagctctgagccccttgtgtggaccacaagcagcactgcaaagtcctcgctgtagagagaagaccatagatgcacacagacggggttatcccttgaaaccagatccgggaagccatcagtcaaaaagcctgtgtggtcacagatgcttactggtggttcctgaaatgagtatttctaggcagggggcttcagtataaaccagatgtgtgctagctgggtggacttcaagtaaggagtcaagacaaaacacttagagtgaccttttggccactgctgtgtctgaggctcagcctgctctagatctgattcccacagtggagggacaaagggccagcagcttgtaggaccaaatgagaaaaatacataatcattatgttttagccagaaaaaggcaacttgattatgaactggatgacatatcaaatgcaaggccttaaaatgcattcactctaataaactgctctgtagaattcaagggaatgaaatccgcttctcatacgtaccaaggaccaactgctttgaatcttccactgtggatgatggcaactggtccttttaggagagccattttccagacagtcttgtctttatttatttattttttaattgttagtagcttttacttattatttatgtactta

SEQ ID NO: 369470 - DNA, 832 bp, Homo Sapiens
ctcgagcggttcctgtcagggtcagccggcgggccccctgggtggtccacctgcaaatcgcggagcggcgccccagggatcgatggcgatgaactataacgcgaaggatgaagtggacggtgggcccccgtgtgctccggggggcaccgcgaagactcggagaccggataacacggccttcaaacagcaacggctgccagcttggcagcccatccttacggctggcacggtgctacctattttcttcatcatcggtctcatcttcattcccatcggcattggcatctttgtcacctcaaacaacatccgcgagatcgagattgattataccggaacagagccttccagtccctgtaataaatgtttatctccggatgtgacaccttgcttttgtaccattaacttcacactggaaaagtcatttgagggcaacgtgtttatgtattatggactgtctaatttctatcaaaaccatcgtcgttacctgaaatctcgagatgatagtcaactaaatggagattctagtgcctttgcttaatcccagtaaggaatgttgaacccttatcgaaagaaatgaagaccaaccaatttgctcccttggtggagctattgccaaacaggcatgtttaatgatacattagaattgtttctcaattgggcaatgaattcttatactataacctatcggtttgaaaaagaaacgtgatgggttggtgggcccgctttaaatggtgaaattccgaaatccccccggggggagaacaactcggaaaccgcttaagggcaacaaactcgtggatgggttaacccagtcatgctggttttggcccaa

SEQ ID NO: 369471 - DNA, 882 bp, Homo Sapiens
  misc_feature (52)..(88): n is a, c, g, or t
  misc_feature (130)..(177): n is a, c, g, or t
gggacgtatagactcactatgggcgaactggagctcaccgcggtggcggcgnnnnnnnnnnnnnnnnnnnnnnnnnnnnnnnnnnnnnatcaggccaaatcggccgagctcgaattcgtcgagagcgggnnnnnnnnnnnnnnnnnnnnnnnnnnnnnnnnnnnnnnnnnnnnnnnnctcgagcggttcctgtcagggtcagccggcgggccccctgggtggtccacctgcaaatcgcggagcggcgccccagggatcgatggcgatgaactataacgcgaaggatgaagtggacggtgggcccccgtgtgctccggggggcaccgcgaagactcggagaccggataacacggccttcaaacagcaacggctgccagcttggcagcccatccttacggctggcacggtgctacctattttcttcatcatcggtctcatcttcattcccatcggcattggcatttttgtcacctccaacaacatccgcgagatcgagattgattataccggaacagagccttccagtccctgtaataaatgtttatctccggatgtgacaccttgcttttgtaccattaacttcacactggaaaagtcatttgagggcaacgtgtttatgtattatggactgtctaatttctatcaaaaccatcgtcgttacgtgaaatctcgagatgatagtcaactaaatggagattctagtgctttgcttaatcccagtaaggaatgtgaaccttatcgaagaaatgaagacaaaccaattgctccttgtggagctattgccaacagcatgtttaatgatacattagaattgtttctcaattggcaatgattcttatcctatacctatcgctttgaacaacgaaaggtatggttggtgta

SEQ ID NO: 369472 - DNA, 775 bp, Homo Sapiens
cccacaagccccggttgagaaaagggttttttattttattggcgccaacggggttcccaccccaaagccttttctggaaaaattccccaccttttccaggtaaaataaaaaggctgggggctttttcccccttttcccacagtgccccaaactgggggtattcaaattctaccaaactggccattttaaacttggggaaaaaaattaggaaggctttctcccccctttttggtccattcgttttttgggtacacaatttgggaggtagccattctgacaaggaaaggggagctggctccattccgtgggaccgggttattttggttaaaaacccaaaattgttagggtcgaaaggaatcaatcgtcaccccaatacaaataaatatttgcgttatgaaagagacggggcggagtcccacggtatccctttttaaagcggcatttccagcacagcagcgtggcgctcacagagaccagcagggcgcagctctgggatgccacatgggacacagctgcaagtacccgtaggcaccgtcccgccgcacgcgtccctccaccgagcgtgaggatgtggcgcagggcacgtgcactccgtctgcgacggggaccggttcgtcctgactgcagaatgaccccgtgttcaaaaacagccgctcccatttgcagaccacatgggccctggctgggctctcaggtccgagggccagcacctgctttggtgaccgcagctgtgccggacgcccggcaaggagcgtgatgtgcgcagccccccgag

SEQ ID NO: 369473 - DNA, 767 bp, Homo Sapiens
ctccgaactccattgactaagaaacttacaattaaagaaatgggtgcagagaggagagatcataaaaattccttcaaacagggcaaactgcctccatcttggggtcacgcaacaagttatcccaggtgtgcccaagatgcgggagaggggtcaacatttacaacggtccaaactccaagattctaacaggactcatctatttattgattattactattaagccacttcccagcagtgtgactgccgtaacaagaacaggactcagtttctaaaggcaataaaataacaaggacatcatggacaaagcattgggaacactcctcgtagggaactggcttttcctctccagccagagcacccaggtgccaggggccactcccgagcacactctttgcgcatctcagccctcatgccggatgctcttctccccgccctaatctgaccttctcagttcatctggataaacctgctgtgcttcctgtccgtgaagcgaggcgctccccaaagcgggagccaaagtctggtgatgaaacagctggcaccaaagagctggttctgcctcctcctcaccaagtaaacacgtactttattttttaaggaaagaaaagtcttaaaaatatatggcactagagtgtaaaactatacaactgcatccaatgaaaattccctgcagcttgcagcctgtggcacaccatgtccctcagatgtagagctgatgggaggccagggtgtccatgaacggccgcaccaggttgtccggggttgtt

SEQ ID NO: 369474 - DNA, 888 bp, Homo Sapiens; identical to SEQ ID NO: 10595
  misc_feature (155)..(267): n is a, c, g, or t
  misc_feature (277)..(277): n is a, c, g, or t
  misc_feature (401)..(409): n is a, c, g, or t
  misc_feature (810)..(848): n is a, c, g, or t

SEQ ID NO: 369475 - DNA, 923 bp, Homo Sapiens
  misc_feature (555)..(555): n is a, c, g, or t
  misc_feature (875)..(883): n is a, c, g, or t
tgatacagattgttataattaaagaatgctgtgctgggaccactctttaacattcagatgctgaccactaaaagtccaacttaaaatgacttaaaaacagtaagaaaatatattgattcacaatacatgaaatctattgacagaatgtgctgcagtgtttctgatccaatgattcagtaatgtcatcaagaaccttgggaacccgcctccacaccccacccccttttcaaccacaacattggcatcatcctaaggctggctaccctcgtggtcatggggatgattgccagtagcagttgggagccttgtgcatcttcatttacatgcaggcggaaggagtcaggctgggattctagggggccctgtcctagtatgagaaagctttcccagaattcactttccatatccttaggtctcattgctctaaagtaacttagacctgtccatccctgagccagtcactggcaaagggtctagaataacctttagggcagtcaggtccactggagctgagagtagaagtggaggccacatgagggatatatggggacaganaggatagtttttttaaaatcatggttctgataggaaaaacatgagcaacgcacaatatctattacatttgcctagaagcagaattttttgaggaactttaaaaaatgtacagatacctaggtcccaacctttgtagactgatttcagagtgttttgggatttggtataggaacttaatagacctcacagggtgttctgatgcataatcagagctgagatcaactggagttgatgatagtgacttggattattagttttgtgattagtgcaaaacaaaggtttaatctgatcttgaactttcctgccacccgtaatggtannnnnnnnntttttgggtttttgaaaaggccaccaaaataaaaaatttt

SEQ ID NO: 369476 - DNA, 922 bp, Homo Sapiens
  misc_feature (45)..(77): n is a, c, g, or t
  misc_feature (370)..(457): n is a, c, g, or t
tgaagtcatataggggaatggagctctacgcggtggcggcgcatnnnnnnnnnnnnnnnnnnnnnnnnnnnnnnnnnatcaggccaaatcggccgaagctcgaattcgtcgagagcgggtgagcatgcgcagagacactgtgggcgcgtggtgcagtccctggagggttctcacgctttggctgtctggacttttaagtttttccgctttttcaggaaggcgaccggcagcctcgggcaggggagacaggactgtatgtcagagaagagacggcgcttggacgccaggaatcctctgaagcaggagactgccctatccaggttacccttcccgaggggaaaccagggtctccttcagaaagctgaggcannnnnnnnnnnnnnnnnnnnnnnnnnnnnnnnnnnnnnnnnnnnnnnnnnnnnnnnnnnnnnnnnnnnnnnnnnnnnnnnnnnnnnnnctctgcttgccgtgcaggaggcgctgaagaagtgcttccccgtggtggaggagcagcagggcctgtggcagagtgccctgcgggactgccagcccctcctgtcctccctcagcaacctggcggaacagctgcaggccgcacagaacctgcggtttgaggatgtgccggcgcttcgggccttcccagatttaaaagagcggctgaggcgtaagcagctggtggctgatgacatcgtcctggacaagctaggggaaaggctagccatcctcctcaaggtgcgagacatggtcagcagccatgtggagcgagtgtttcagatctatgagcaacacgcagacacagttggcattgatgctgtcctgcagccttcagcagtgagcccctctgtggctgacatgttggaatggttgccggatattgcgagaccttttcgaaagtccgaaagtatctcctttcggtctatta

SEQ ID NO: 369477 - DNA, 843 bp, Homo Sapiens; identical to SEQ ID NO: 98080
  misc_feature (751)..(766): n is a, c, g, or t

SEQ ID NO: 369478 - DNA, 1008 bp, Homo Sapiens
  misc_feature (44)..(44): n is a, c, g, or t
  misc_feature (55)..(55): n is a, c, g, or t
  misc_feature (92)..(92): n is a, c, g, or t
  misc_feature (108)..(108): n is a, c, g, or t
  misc_feature (113)..(113): n is a, c, g, or t
  misc_feature (139)..(139): n is a, c, g, or t
  misc_feature (144)..(144): n is a, c, g, or t
attaagaataagaccctagaagtatgggaaaaaatggctaacgnaggaaatcccngaatatcaatatgggaatggagcagcatgggtagagnaacttctcttgttgancagancatatatccacgttaagagtcttggnaattncccaaccacatacatttctgctagcttataaaccggggccccattctcggagggtaatcgtagttttggtcaccttcagtagtaccttgattctaatgaactcagagattcagcaatggaatcatttccttcataggcataggttgcaagtgagtcgtaggggggtgcggtggggtcaagatcatgctcttttagcctttcattaatgaaatcccggacgtccgtgttatctggagctgtaggagtcctccgaggaataaataacgtttctggaataatatctcgccggagctttttttcctcaatggctgcaggattcctcagggtgccgatatcaaaggcctgggtgtcctcctctccaccaccctcatcgttatagctcacaatgttgtctctgatatcttcttttgacaagatcagaggctctttttttcgctgtcttttcagagctgcaaacagtactaccagtagaatgatcgatgcagaggaggatggcgatcaaggccccagtgctgaggccggcagggaggagcagggcttcagcactgcaggattgcatgttgccttggctgtcacaagcacacactcgaatggtcagtgtgcctgtgctgctctgaattgggtaatcattgtctgatatcaccacaggcaagagataggtactgatttcatgtctattgaatccattttttctggttaagattctggcagtattatcttcattatcctgtactgtgaagtttggattgacagcagctaaactgaaaaaaaatttctgtccacctaaagggtcatctttgtctactgcacttatagtctgtattagctgccctggtctggcattttcacatacaaaagtgtcat

SEQ ID NO: 369479 - DNA, 442 bp, Homo Sapiens
  misc_feature (23)..(23): n is a, c, g, or t
  misc_feature (55)..(55): n is a, c, g, or t
  misc_feature (76)..(76): n is a, c, g, or t
caaaaacagtacctacctataanccaagtaagaatgaatgaatgccagaggaggnatggccgatcaaaggcccccnagtgcctgaaggcccggccagggaggaaccagggcttccagcactgcaggattgccatgttgcccttggctgtccacaagcacacactcgaatggtccagtgtgcctgtgctgcctctgaattgggtaatcattgtctgatatcaccacaggcaagagataggtactgatttcatgtctattgaatccattttttctggttaagattctggcagtattatcttcattatcctgtactgtgaagtttggattgacagcagctaaactgaaaaaaaatttctgtccacctaaagggtcatctttgtctactgcacttatagtctgtattagctgccctggtctggcattttcacatacaaaagtgtca

SEQ ID NO: 369480 - DNA, 939 bp, Homo Sapiens
gggagggccggctgaggagccggcgtgcggcgcggcgggacgggacgtgcggcccagcgagttggtcggtcccggggtcacccgctacgggaagcaggcctcgccacagactaagaaaaatggctttgtcagcccaacagatacccagatggtttaactcagttaagttgaggagcctcattaatgctgcacaactcacaaaacgttttactagaccagcaagaacactgttacatggcttttctgctcagcctcagatatcctctgacaattgctttctccagtggggatttaagacttacaggacttcctccttatggaatagttcccagtctactagctcaagtagtcaggagaataattctgcccaaagcagtctgcttccttccatgaatgaacagtcacagaagacacaaaatatatccagctttgattctgagctgtttctagaagaactggatgaattgcctccattgtctccaatgcagccaatttcagaggaagaggctattcagattattgcagaccctccattgccaccagcttcattcacacttcgagactatgtggatcattctgagactctgcagaagttggttcttctaggcgtggatttgtccaagatagaaaaacatccagaagcagcaaacctccttctgagactggattttgaaaaagacattaagcaaatgcttctgtttcttaaagatgtgggtatacgaggataaccaacttgggagcattcctgacaaaaaatcatgcaattttctctgaagaccttgaaaatcttgaagaccagggtggcttatctgcattcaaaaatttcagtaaggagatgttgccagatggtccgaaaagcccctttttgccgaactttccgtggacagatggttaccgattggggatttttcagaagaacttgaatttgtgtgagacgac

SEQ ID NO: 369481 - DNA, 720 bp, Homo Sapiens
ctattgtcatggtttttcatattttttcagtgaaatgaaaagttttgagtggttacttaaaaggaccaaaaaggaaagattcattataataagacaatagttgagggggcataacttcccctaagaggtaacatttggatccagaagtagaaaattccttctgacctcctggctgtgactagcattaacaagtaactaactgttagcctctgaatctggtaactggtccgtaaggaggacagcaaaaaaggagagaaagccaaggtggttaaaccaaaaaaggttaaatgacatggagcttgaaagagctcaaatcccttcatgggatccccacggagccccttcctgtggacacacacctctcttcccttgctggaggtttctttctgcaaagaaaccctaagaggaaaaagcactggcctagctgtctacatgtggccctgggtcaccttagtataggctgcagcacggagaggttagtcagacctatctgacaccaacatccataccaagccttttaacttccttggaagaactggtttattttcataaagaaaataaccaacataattccattacttcacataagcaaaaccctaatggaaaggcccatcagccatcaacagggtttgcttggctgcagtgagctagactagcttgtgtcccagttcactctcacacaatcagctttaatgaatgcacaaaagaatcagaccagta

SEQ ID NO: 369482 - DNA, 778 bp, Homo Sapiens
  misc_feature (186)..(207): n is a, c, g, or t
  misc_feature (224)..(466): n is a, c, g, or t
  misc_feature (678)..(678): n is a, c, g, or t
  misc_feature (682)..(682): n is a, c, g, or t
  misc_feature (684)..(684): n is a, c, g, or t
  misc_feature (699)..(699): n is a, c, g, or t
  misc_feature (701)..(701): n is a, c, g, or t
  misc_feature (713)..(713): n is a, c, g, or t
  misc_feature (715)..(715): n is a, c, g, or t
  misc_feature (718)..(719): n is a, c, g, or t
  misc_feature (722)..(722): n is a, c, g, or t
  misc_feature (732)..(733): n is a, c, g, or t
ctcctgagttacgctactggggtcacctgttgctcccctagcaagttaggcatgtcatatatttttaacagctttattgagatataattcacatattatacaattcacctttaaaacatacgattcaatggttttcagcaaactcacagagttgtccgcccacttgagagcaaacacatgttcaannnnnnnnnnnnnnnnnnnnnngggacagagtcagcttnnnnnnnnnnnnnnnnnnnnnnnnnnnnnnnnnnnnnnnnnnnnnnnnnnnnnnnnnnnnnnnnnnnnnnnnnnnnnnnnnnnnnnnnnnnnnnnnnnnnnnnnnnnnnnnnnnnnnnnnnnnnnnnnnnnnnnnnnnnnnnnnnnnnnnnnnnnnnnnnnnnnnnnnnnnnnnnnnnnnnnnnnnnnnnnnnnnnnnnnnnnnnnnnnnnnnnnnnnnnnnnnnnnnnnnnnnnnnnnnnnngtgtaagccaccgtgcctggcctacgtgttcaattttctatgaacaaaggctttagtccttgacccagggctaaagtggtctgtccaagctgttgttggtagagggagtatgataaaatgtttaaatcctcatttggttaccttgagtccctggaacacgcagtaactgtcatgctatagtcatcagctgtatttggctgggaatacaaatnaaantnctggtgtaaggaagnantagggttttttntnaannccnggttttagtnnctgacaaaatttcttttggttttgttttttaataaaatggaacca

SEQ ID NO: 369483 - DNA, 752 bp, Homo Sapiens
atcaggccaaatcggccgagctcgaattcgtcgagagcggaagaaggctcttacagcatggccgccggtactgcagctgccttagcgtttttgagtcaggagagccgaacgcgggccgggggtgtcgggggcctacgggtcccggccccggtcactatggacagttttttcttcggctgtgagctctccggccacacccgctccttcacctttaaggtagaggaagaggatgatgcggagcacgtgctggcactaaccatgctctgcctcaccgagggagccaaagacgagtgtaatgtggtagaagttgtggcccggaaccatgaccatcaggagatcgcagtccctgtggccaacctcaagctgtcctgccaacccatgctcagtctggatgacttccagctccaaccacctgtaaccttccgcctgaagtcgggctctggccctgtgcggatcactgggcggcaccagattgttacgatgagcaatgatgtttctgaggaggagagcgaggaagaggaagaggacagtgatgaggaagaagttgagctgtgccccatccttcctgccaaaaagcaggggggcaggccctagccctcctaggtcagctccatgtgccatgcaccgccatgcaccctgttccctgacaagtttcaacaattgtaaatatttcttccttgaagaggagagcttgggtgggggttgggtgggagggacttgggtctttggtgctaggagaggggctgtgctcc

SEQ ID NO: 369484 - DNA, 592 bp, Homo Sapiens
gggagctctctgatgaagttatgtctccccatggagaacctatcaagatgcgaattggactgcactctggatcagtttttgctggcgtcgttggagttaaaatgccccgttactgtctttttggaaacaatgtcactctggctaacaaatttgagtcctgcagtgtaccacgaaaaatcaatgtcagcccaacaacttacagattactcaaagactgtcctggtttcgtgtttacccctcgatcaagggaggaacttccaccaaacttccctagtgaaatccccggaatctgccattttctggatgcttaccaacaaggaacaaactcaaaaccatgcttccaaaagaaagatgtggaagatggcaatgccaattttttaggcaaagcatcaggaatagattagcaacctatatacctatttataagtctttggggtttgactcattgaagatgtgtagagcctctgaaagcactttagggattgtagatggctaacaagcagtattaaaatttcaggagccaagtcacaatctttctcctgtttaacatgacaaaatgtatgtactcacttcagtacttcagctcttcaag

SEQ ID NO: 369485 - DNA, 826 bp, Homo Sapiens
ttaggaagggagacacaggctgccccaaggttcagaataaagggtagcatagaccaagagtgcttaccctgggcagtggagtcacactctcctttttacacccccaaagaaagtctggtgtccagttcagccctgcttgtgtcacgtatcctttgctgctctgagtccttggggcctgagaactgggacccatgagtcctgctgcccagctgctacgggctgaattctgtccccctaaattcttacgttgagaaacccctggaacctcagaatgagactgtacttggagattgagcatttaaagaggtgattaacttaaatgaggctggttaaagttaaaatccagtccaactggtgttcttagaagaggaacgttgggcacataatgaaactagagatgtgtgtgcatgaagggaagaccgcacaaggacacagtgagaagacagctgtctgcaagccaacaaaagaggcctctaggaaaaaccaggcctgctgacaccttgatcttgaacttctagcctccaaatgtgagaaaataaatctgttgtttaaaccacctggttctgtggcattttgttatgggggccctagcaaactgaaacccaagccttctgcactgttccgggatgttaacttttctgtgaactaactccaaacctctgctgtgtaatgtgtgagaaaccagacccggagaatgcctttccagagtccaggaggttagatgggttgggcttccccagccaactgacaaaaacgtgcctgtggtggatcacaaatgcacttgtgtgcagtcagagattgtttccactcttagttccttcagccc

SEQ ID NO: 369486 - DNA, 865 bp, Homo Sapiens
  misc_feature (657)..(657): n is a, c, g, or t
agcggggcagacggcgctgagcgcggcggcggcgggagcggcgtcgagtgtctccgtgcgcccgtctgtggccaagcagccagcagcctagcagccagtcagcttgccgccggcggccaagcagccaaccatgctcaacttcggtgcctctctccagcagactgcggaggaaagaatggaaatgatttctgaaaggccaaaagagagtatgtattcctggaacaaaactgcagagaaaagtgattttgaagctgtagaagcacttatgtcaatgagctgcagttggaagtctgattttaagaaatacgttgaaaacagacctgttacaccagtatctgatttgtcagaggaagagaatctgcttccgggaacacctgattttcatacaatcccagcattttgtttgactccaccttacagtccttctgactttgaaccctctcaagtgtcaaatctgatggcaccagcgccatctactgtacacttcaagtcactctcagatactgccaaacctcacattgccgcacctttcaaagaggaagaaaagagcccagtatctgcccccaaactccccaaaagctcaggcaaacaagtgtgattcgtcatgcagctgatgcccagctatgtaaccaccagaccctgccccatgaaagcagnccgcattctcaactatcagaaacatttcttttaaagaaagaacccacctaaatgttgaagctggcagaaaagacctacccatgtgccgctgtgtcccccaaccgatccaaatgtgaaaaaaacaccttggccaaatgttgattgaaaaaacaagggcttgcactttatgacattttcgggccttcccccaaaaacggtcttctggagg

SEQ ID NO: 369487 - DNA, 901 bp, Homo Sapiens
agtggcccaccttgaagcttccggccccaatgcatggctgatagccgttccagctgaacaagtctgtttccaaggcatgaactggctctctggattattaagattgattgccgtactttggttattggtggcgctgaatctgcgataagtgcattctcaaattgtcacacagtttacggaattcagccttacgcggtgtattggaggcagaatttgaaagcttgctgggcaatatcatggtacaggcgctctactctagaattgtttctaagaaggtccaaacactgcctgtaagactcccacaggaatttaacccatggagttaaaagtaatctgtcagtacgatcctgagtgtcttcaccacttacagcacttaggagaacactctcaggagtttgaatattatctagatcctctatatctaagaccatctgctgagattcttctttagcagcttcagttttttcctctgccattttcaaatatgccctaacaacatcctccagagattttatgttcacctgttgacaaatgttcttatactggtataacccctcctttgccaagtggctcttgcgaagatccacgcaaagttccaagtatttcaacataattggttcgtgtatcttttgccatgttctatgttttttacttttcataacatcataaagaacatccagagcaggctgctttttgccaacctcaagaaattcgttggcgcgtttgagggcattttccggcctctgaaaataggccggcatcttggcggcaggctcagctcacccggcgtcagcgaactctctagtggcccgggccgggagaggagacgaaggggaaccagcgtaaggtcccacgcgcctcgccagcagtcgcccgcgcccagccggccagagacggaaag

SEQ ID NO: 369488 - DNA, 870 bp, Homo Sapiens
ggggcatgatgtagaaatggtctttgatgcgaagttactcagccaactcctgtatgagttctacacctgcatccctcctgtgaaactccagaagcagaaagtacagtctatgaatgagatagtccagagcaacctctttaaaaagcaagaatgccgggacattctgcttcctgtcatcaccaaagagctgaaggagctgctggagcagaaggatgacatgcaacaccaggtcctggagaggaagtactgcgttgaattgctcaacagcatcttggaagtccttagctaccaggatgcggccttcacctaccaccatatccaagagatcatggcccagctgctgcggacagtgaaccggacagtcatcaccatgggccgggatcacattctgattagtcactttgcggcatgtatgacagccatcttaaaccagatgggtgaccagcactactccttctacattgagaccttccagaccagctctgaacttgtggacttcttgatggagaccttcatcatgttcaaggacctcattggaaagaacgtgtaccctggagactggatggccatgagcatggttcaaaacagggtcttcctgagagctatcaacaagtttgcagaaaccatgaaccagaagttcctagaacacacgaactttgagttccagctgtggaacaactattttcatctggcagtggcttttatcacccaggattctctgcagctggagcagttctcacacgccaaatacaacaaaatcctgaataagtatggggacatgaggcggctaattggcttcaccatccgtgatatgtggtacaagctaggtcagaacatgttttgctacgtaaaacgcatggcagtgaatat

SEQ ID NO: 369489 - DNA, 847 bp, Homo Sapiens
  misc_feature (206)..(327): n is a, c, g, or t
  misc_feature (740)..(740): n is a, c, g, or t
gggagcatgtgctcgcgccaggagtggtggctgttaggggagggacctcagacctatgtctgcatggcctgaggtcagagttcacatcctactgattgaagaccttgttcttgagctgtccggttgccacagggtcggacctggaggctgcagaccatcgtggccctttgcagtgttcggaaacatatgcgcaccccagggagggnnnnnnnnnnnnnnnnnnnnnnnnnnnnnnnnnnnnnnnnnnnnnnnnnnnnnnnnnnnnnnnnnnnnnnnnnnnnnnnnnnnnnnnnnnnnnnnnnnnnnnnnnnnnnnnnnnnnnnnnnnggagcccacagaaaaaagcaaatagacgcagaaacgggcacgtgcagtagttctggccacacatgtcccctaggtatccacagaatggcatgggtattgtatatgcataaagatggagatcagtcatggaggccaaggacaagtaggtgcactggttgaactacagtagagaatggcatggaagtggtgagcaatggacctgggcctgtttctcaagtgtgtatttgatttccttacaattccccggagaagttgtcatgggaagccacccgcctgctggcaagggaagatggttgattcttctgatcaatggacgccctgcagagtcctgtagtcactgtggcctggcatccatggggccaccaatgctggtggatggcttaaggacggaaagcatttcctctgcccccacntgctgaatgaagagtggctttttggaggtcctatacccttcaaggagctggttgtccaccaacgaatgacatggcaagttccactccctaaaagggatggcccgtgc

SEQ ID NO: 369490 - DNA, 132 bp, Homo Sapiens
tgaggatccccgggagccttaccctcagcaagtggaataggcttcacaagtctccttcagagaacacaaatcttttcttattccattcctgttgggttgcctacgtccaatctccccctccccagagatgcc

SEQ ID NO: 369491 - DNA, 693 bp, Homo Sapiens
gcacacagccccagggaactggaaaaaggcccagaagtgaacacttagggtgcaattaccgttctcctgaagatgggaagacacacggatgcttgcctaaaatatctgccgagaggtgagcagctgtggcctgggaaggcgcttgctcttcctccacatcagccagaaggcagatcacaccttcagagcaccctacagaacccagatggcgaatcaaagtgcagaaaaagaacacccgcttcctcattagtcatttaggaagataagatagcatgggacagggagaacaaccatgttctgaatggagactttttcaggttcccaaacttgggacagtgagtgtgaccccacatcctgtggtttctgcctgacccttctaagccagaggtgagaaaacaactcccagagaccacgactctcaccctcggaggtacctgttcccctgcaggtgtggctctctgacaacccctaggcaggggtgggctccagcttttggaagcaaccctacctagctggccccccaagcattaagaagcttccctgatggggccatgttttggtctccttttaagccctcagtcacaatgtaccttctgagcttgtcctactattcagatgattttctctctgagttgcaatactgctcaatttaggcctcgtgccgagtaacaccgagcctcgtactagccgtta

SEQ ID NO: 369492 - DNA, 915 bp, Homo Sapiens
  misc_feature (415)..(437): n is a, c, g, or t
  misc_feature (514)..(514): n is a, c, g, or t
  misc_feature (525)..(525): n is a, c, g, or t
gacaggacgtggatgggaagctgacctaccaggaaatctggacctccctaggttctgctatgccagaaccagagagcttgagagcatttgattccgatggagatggaagatactcattcctggagctaagggtagctttaggtatctagcttcatcaggcatattttagaaatggactgcctaatatctatttacctaacaacaaaacaacccttacttacccatcagtcctctagtcctccaaactactgtagcagatactttgccaccttttaacttgtttgaagaagctatataaaagttatttttttaaagaagaagaccattttacttatgatgttcaggaaatctatgatttcctacaaccagtaagatcttacattttaaaattgccagaaaaaaaattaaagccctnnnnnnnnnnnnnnnnnnnnnnngaggggaggagaccttatcttttaaagctgggaaatgtatatagagagagaataagccacttttatatttcacttanatttgccttanattagctgcactttatagagactcagaaaatgtcttttctttaaaagataggccttttctgtttgtaaatatttaaatgaaagaaagcattgtgcatattgtgtggaaagtaggaagaatggttttgaacaggatatgaacaaatgacttattaaaaattgctgatctggtgtaggtggcagctgaaactacatccatgtctccataaggtatccctcaaaggcccaggcgctgccagggggtttgtcctggtagctggaggaaccgatttcagggaggagaccctggagacaatactgactccagccatggctcatggaagtaggattcctggttctttggttccaattcctccgctaatccccaactggggaatcaagaaatcttggg

SEQ ID NO: 369493 - DNA, 455 bp, Homo Sapiens
gggcttaggagattgcccagatggcaagaggtcctgggctccttcttgaggggctgcctggcccgctccatcctactcccactaactacacctcagggcgggtgaggttccgacactgatcccagagatgccgtggatacgccagggtcccagggggaatctccccaagctcacactctctcccgcttatcgcctattctcacacctcttctcggtcccatcttctgcacccattgcccagtcttgctttctctttcccatattccgttttcttcttctcttgtgccaaactgacagaaaccgtcaccacactggtctttttctttaatgtctcattccccttgaggccagctgctatgccaggtggtgtctctgccaggctcctcaggcccagacagaggccagcccacaacctatgaccccctccccaccttcaccttctcaaaaatggaagg

SEQ ID NO: 369494 - DNA, 695 bp, Homo Sapiens
  misc_feature (419)..(429): n is a, c, g, or t
  misc_feature (627)..(627): n is a, c, g, or t
gcagggggaaccaggagaccctacagtagggataatggggaaaggaacaaaaaattgatttagttgcgtttattgatacgggcccactaagcagaggttctggacctcgtgctaccactgctggggtttgactggttggttggtgagctacaacacagaccaaaaagtgacctacacaaagtgaggctgaaatgccaggcctgcctctctgcgtggcagaggatgggactcaaaggcttggggaggttggagtgtcagagtggatttatcttttgagacctactcacccaagcctggagaggagagaggacacacctcttaccacccccacgagaaataaatttgtgaggggaacactcctccttcctgaacaaaaaacccacagaccccgaacacgccaccccacaagatcagccgannnnnnnnnnnttccactaaaccatgaataacaccttacctgatcacccccgtcgcgaaccgcagggtgagcggcggggcacacagactgccggaaagaacacacaaaaaaatagggcgggagcaccccgcggccccgcaaaaaacttttaaaaacacctcttctgggcggccggccgccccccacagagacaaagccacaacaggggntcacacgtgttttccccaaaagaaaaaccgccccacaagacaccaagcggttgggtctctcctccccc

SEQ ID NO: 369495 - DNA, 727 bp, Homo Sapiens
ggcctgagtggcgaatttcgacgaggggtgaacccgcagccggacttctgctgcactggggctccgaatgacccagaatctggggagtgagatggcctcaatcttgcgaagccctcaggctctccagctcactctagccctgatcaagcctgacgcagtcgcccatccactgattctggaggctgttcatcagcagattctaagcaacaagttcctgattgtacgaatgagagaactactgtggagaaaggaagattgccagaggttttaccgagagcatgaagggcgttttttctatcagaggctggtggagttcatggccagcgggccaatccgagcctacatccttgcccacaaggatgccatccagctctggaggacgctcatgggacccaccagagtgttccgagcacgccatgtggccccagattctatccgtgggagtttcggcctcactgacacccgcaacaccacccatggttcggactctgtggtttcagccagcagagagattgcagccttcttccctgacttcagtgaacagcgctggtatgaggagggaagagccccagttgcgctgtggccctgtgtgctataccccaaagggaggtgtccactatgtagctggaacaggaggcctaggaccaccctgaatgcaggtctatgaagaccagtggtagtgcccaaacttctcctaacatctagtctaaaacattctcctaggacc

SEQ ID NO: 369496 - DNA, 1061 bp, Homo Sapiens
  misc_feature (58)..(58): n is a, c, g, or t
  misc_feature (315)..(315): n is a, c, g, or t
  misc_feature (403)..(403): n is a, c, g, or t
ccagtgcgtccagcgacgcggcggtgtgacgccaacgccgacctcgaggggtccgagngtcgccagagaacgacagcgccagccgatgaggtggggcctcgttataacagacggggggtgctgccgcgaaggagtcagcgcacgcacgatgctggcgatacgagcggccgggagcatccaacgtactagagtggcgagcgggcgagagaacaactcgtcagtgacgcggtcgtgtgtacgtgtcaggaacacgcgtgcttcgcatatcggtcgcgccacacccgaaacggcgtcgttctggtgtagtgcggttgngcgaaacggtaccacagagcgccacttgcggcctccgggcgaaccgacgagggaaactctcgcctctgggcgaacacgcccaggtacntacgggggcccacactggatttccagactatgacacgctcgacacaggagaacgcgcgcgggcggccgccccgacaccccggaaaaacggcgtttcataaggaaaacggctttcctcgggggcggtggcccgaaggggcgccgcccatataaaggatttggaagtgttcgggagaagggccccgggggaagggcgcaacccgggggcggaggcccggcggggccaccctttttggagccgcgccggtcctggggccgaccgcgggcggcggcaccagctgcggccgcaggcatgaacgtgcgcgggcggcggctggcaggcactgcgccaggcccctggaagtcgaagcggtaggcgtagcgcttgccatgcaccttgctcatgatggttcttgtcgtagtagtagcgcagggcgcggctcagcttgtcgtagttcatgttgggcttgctcttgcgctcagccccaccgccgcgccacctcgtccgggtccgtgagcttgaactcgccgtgaccgccctcccacgcgatgcagccggcgttcgcgcggtcagccagcagctccagcagaaactgccacagctggatctgtccgctgcctttctgaaccgcggggctcagcgcccctcggccgattcacacccagcccgactagcctgt

SEQ ID NO: 369497 - DNA, 414 bp, Homo Sapiens
gggatccacagcataaatcttgtaagcctacccacatccaacactaccacataaataatgaggctggctaggaaccattcagttaccttctggagcaaaggctccataccaacagcaaatcatggagacagtttacaaacagcagcagcttcagtgtagagccctagttccaagaccctcatctgcggcctttgcaacagacccattctggtacattctcaaattccttatccccaggaaagagcacaggctgacaaagttgggggcacaggggccctgggaaggttcactatctactgttgacacgttacctgtacaactctgtgaaacctctggaggatttttgcaaggacaaaccaaaatgggtgatccaccctgtttccaagtcataaagttgtaaatgtctagaaaagt

SEQ ID NO: 369498 - DNA, 673 bp, Homo Sapiens
ctcgggatgccttccttatcataacaaatttaatataatttgattaccaagtacaatttatttttctgagtactttaccaacattctccattactcttggaaaatgattatactgggtggaaatgtattaagttttagcagtgtcacatgttgagcaaaaacagttgaatctgaaacagaggaattttgattcacaaatgagtctgccagtgagaacatacttacctatagtctttgaagcagctggttagagcttattgcagattcttggtctatgctcattaagtttagtacacagttcagcctgtgcctgaatgttaaattggaagtggtgtgatttttaaaacagttcagaacaggcctgagctacctctggcatggagttgttgaaggctgcctgtggcccaccttcagtcccaccagactggttcttccctgctgggacacaggcatcataatgcaagggcaggttgttacttgccacatcaggtggtgggattcagcattgaagctacttaaactccagtgacatgattttagtttctcatactgtgaagctagaatatttgagactgttaccatcctaatttaggtttcttcatataaagtacttttgcttttctcatctcaaagtcatttgtctccactcttgagttgtaaatgggtttttacg

SEQ ID NO: 369499 - DNA, 873 bp, Homo Sapiens
  misc_feature (708)..(708): n is a, c, g, or t
tatccctcatgatctctaaatagccaagagaagagtcattcttgtatggaacaatggacattcacagccttcctcattcctggctttaggacttcagatacaatcatgtcagagctcagggcttcaacatatgaattttgggggcacagttcagtccatagcaatacttccattcccctgacctgcaacatgtccagttacttcgaaaagtacttgtcatccactatattaataacatgctcattgccagcctatgaaacaagttgaccactccatacataaggtcatagataatatgacacatgcaggttgagttgtcagccctgataagatcccaagacttgcccaacaagtgcagtccctggagctacctggtccagtaattagaggagtattcctgataaagtcaaatattgtccttggcagcccccacctaaaagaagctcaatagctggtatgcctgtttgtctattggagataacatgtatcacatctgagtattattttgcctcctttagttaaaattacccacaacacagccacctctgaatggggccctcaacaacagcagactcgagaggcctactatgcattaacatgggcctgacattaatgtaggcccatggaactacaggtctcattgactcttacccatacagattggatactgcggcaacaagagactgctatcaggatgcaccaggcccnttgggttttggacatataaattacccaagatggttgccatatacattcccctttgaatggcagctactagcctgctattggactcctaatttaaacagaacacttgaccactgaaagcactgtatgtgaaccttaagaccctgagctgcccaatctcatggcagg

SEQ ID NO: 369500 - DNA, 1462 bp, Homo Sapiens
  misc_feature (71)..(80): n is a, c, g, or t
  misc_feature (154)..(154): n is a, c, g, or t
  misc_feature (156)..(173): n is a, c, g, or t
  misc_feature (177)..(177): n is a, c, g, or t
  misc_feature (255)..(255): n is a, c, g, or t
  misc_feature (1268)..(1371): n is a, c, g, or t
  misc_feature (1373)..(1389): n is a, c, g, or t
aaatattccccaatgggaaagaagggttttctaagggggccaagaaaaagggcaaaattgtttccgggagnnnnnnnnnnatcccctttttttgacccgttcccatccgaatttgggacctaaacccggagaattgatgagggtgttggacccntnnnnnnnnnnnnnnnnnngttnggcttgcgcgcaatgcacacggcgcatgtatggtgtgatttgtgaaataggccctcacagtccaggttgagaaaacanaactcacacagacacatacatatcatccattcttatcccacaacgtttatacgagaaaatgtgaaaatgtgaatctgagcttcagactcccaagaagcattagaggtggagatgggagcaggatggagagagacgtgaagaagctttagaacagaattcatttagagattcaaaacacaggaggaggtggtgtgctgaatgtcttgtggctgtgttgttgcatgggcaatcccaaggagcccatcccaggggctgagggtccagaaggcagggaaaaactgtgggcacagaatatcttctgcacctcattggttttcttgctaaggctgagtgctctgtctagaacaggtccaaactgcattaggaaatggatacatggatattctaggtttaaaaaccagcctttggaacttggtgatttccctaggaaatcgtaggctgaactggaatcctatggcctgggctgccagactttccagcgacagccctaaactcatgatactagtatgaggcaggaaagggtggacaagggtgggagtctccaaccacagatatgagggagaagttatggaacaaaataagtaagagaactcagaaattctctccttccagtttatccccaacccagggaagcagaggcacattggggtaacaaggataggtctggggaaaaaaatgagggtgttctacagctgagggtagtcagtaatgagagagagagaggaggctcactgaaggacacctctattgaagagtaaatggttggcatattgcagcccccctccacactgctcctgtgcacgtcacgtctggtctgagcaaatgcacgtagaatgggagaggccatttaaccaccatcagctactgcacaactcagttatcacactggggcagctcacagaaatgcttgtctcagaagacacgtctggagtcacggggtcagcctaaggctttgcatagcccactgagctaagaatagtttataattggcacgggtccggtagctcacaccnnnnnnnnnnnnnnnnnnnnnnnnnnnnnnnnnnnnnnnnnnnnnnnnnnnnnnnnnnnnnnnnnnnnnnnnnnnnnnnnnnnnnnnnnnnnnnnnnnnnnnnncnnnnnnnnnnnnnnnnnctcggagaggattctctctctctctccctcgtgccgattcagcacccagcctcgtacctagcctacgtttggt

SEQ ID NO: 369501 - DNA, 1263 bp, Homo Sapiens
  misc_feature (58)..(58): n is a, c, g, or t
cacaggcaacgcccttcccctgttaagtgggtccgccagggacccagggctcttaccngaaataagagatggttccccacggtgcttaaaacaggtggttacgctgttgtctttttaagttttttggcagtaaaaaggaaactaaaattaaaagctatataaccccatttttataaattctaaacattttgatttttggtttacattgctttcctgcttagaaaatttagagaacgaaattgatttaactacattttccaagccccaaattgaaatgcagttctgaaattgaagttcaataatattcccccaactttagaaaacaggaagtcaggtcatgcaactttcaacagtggatatatacaaagttccaccttttctttctgctggatcaatctaaagtcaggaattgacaacaatttccctcttactcctaggtaatgatttacctgatattaaccaaaatcgattttgagaaagtgttcccaattatcttgcggtaaatcacagtactgcatctatgaatatgctctaagaaaagcaaaatattcatggaagcataaaacaatatcacctttaaataaaaatactttattcattcctgataggttatcaaaatgtacactggttaacccaagtaaaaatgggtatgctgaaatagttaactagggcatatttgaagaattttgtttacttttaaaagaggaaaaatcacttccaatcttcccttccacacattcctaacaagcctgcactatacctgcttaaaactgaaaatataaacaattacatgggccccacttcattacagaatgcattttcctgtactcttaaaggaagctattacattgaaagttaccttccctttgcccaaaaactttcagacaagtttactgctctttatattttgtgtaactttgtaaattatacaagaaatatagcacacaacttgaattaatctaaaaacacatacacataaacacaggataaagtgcaacacaacagaacatgtctgcaacattcactttctcaaacccccacagaaggattttcggagtaaatggaaataatgttgttctcaagtgcatgaacactaaattcaacagaataggttatttttccacactgatatttatattgaaaatcctatttgctttgcttcccctgtggcttctgtctctcattttcagttaaaagttccgaagctgtgattctttttaaaccttaagaaaatccaactccacagagctacacaaagtgtta

SEQ ID NO: 369502 - DNA, 1624 bp, Homo Sapiens
  misc_feature (1331)..(1331): n is a, c, g, or t
cggaattctccggaatccgcaagactcacagtctgctggtgggcagagaagacagaaacgacatgagcacagcaggaaaagtaatcaaatgcaaagcagctgtgctatgggaggtaaagaaacccttttccattgaggatgtggaggttgcacctcctaaggcttatgaagttcgcattaagatggtggctgtaggaatctgtcacacagatgaccacgtggttagtggcaacctggtgaccccccttcctgtgattttaggccatgaggcagccggcatcgtggagagtgttggagaaggggtgactacagtcaaaccaggtgataaagtcatcccgctctttactcctcagtgtggaaaatgcagagtttgtaaaaacccggagagcaactactgcttgaaaaatgatctaggcaatcctcgggggaccctgcaggatggcaccaggaggttcacctgcagggggaagcccattcaccacttccttggcaccagcaccttctcccagtacacggtggtggatgagaatgcagtggccaaaattgatgcagcctcgcccctggagaaagtctgcctcattggctgtggattctcgactggttatgggtctgcagttaacgttgccaaggtcaccccaggctctacctgtgctgtgtttggcctgggaggggtcggcctatctgctgttatgggctgtaaagcagctggagcagccagaatcattgcggtggacatcaacaaggacaaatttgcaaaggccaaagagttgggtgccactgaatgcatcaaccctcaagactacaagaaacccattcaggaagtgctaaaggaaatgactgatggaggtgtggatttttcgtttgaagtcatcggtcggcttgacaccatgatggcttccctgttatgttgtcatgaggcatgtggcacaagcgtcatcgtaggggtacctcctgcttcccagaaccttctcaataaaccctatgctgctactgactgggacccacctggaagggggctgtttatggtggctttaagagtaaagaaggtatcccaaaacttgtggctgattttatggctaagaagttttcactggatgcgttaataacccatgttttaccttttgaaaaaataaatgaaggatttgacctgcttcactctgggaaaagtatccgtaccgtcctgacgttttgaggcaatagagatgccttcccctgtagcagtcttcagcctcctctaccctacaagatctggagcaacagctaggaaatatcattaattcagctcttcagagatgttatcaataaattacacatgggggctttccaaaganatggaaattgatgggaaattatttttcaggaaaatttaaaattcaagtgagaagtaaataaagtgttgaacatcagctgggggattgaaaccaacaaaccttccttcttaacattctactgtgtcaccttttgcattgaggaaaaatattcctgtgacttcttgcattttttggaatctcataaacttttagtcctcgaaatccccgttggagggggaccctttttacttggccctgaaaaatacacatggctgggcccattgtggaatttgaagtctttccaaactcctgga

SEQ ID NO: 369503 - DNA, 929 bp, Homo Sapiens
aaatccacaagactccagtctgctggtgggcagagaagacagaaacgacatgagcacagcaggaaaagtaatcaaatgcaaagcagctgtgctatgggaggtaaagaaacccttttccattgaggatgtggaggttgcacctcctaaggcttatgaagttcgcattaagatggtggctgtaggaatctgtcgcacagatgaccacgtggttagtggcaacctggtgaccccccttcctgtgattttaggccatgaggcagccggcatcgtggagagtgttggagaaggggtgactacagtcaaaccaggtgataaagtcatcccgctctttactcctcagtgtggaaaatgcagagtttgtaaaaacccggagagcaactactgcttgaaaaatgatctaggcaatcctcgggggaccctgcaggatggcaccaggaggttcacctgcagggggaagcccattcaccacttccttggcaccagcaccttctcccagtacacggtggtggatgagaatgcagtggccaaaattgatgcagcctcgcccctggagaaagtctgcctcattggctgtggattctcgactggttatgggtctgcagttaacgttgccaaggtcaccccaggctctacctgtgctgtgtttggcctgggaggggtcggcctatctgctgttatgggctgtaaagcagctggagcagccagaatcattgcggtggacatcaacaaggacaaatttgcaaaggcccaaagagttgggtgcccactgaatgcatcaacccctccagactaccaagaaaacccatccagggaagtggctaaaagaaaatgaactgaatggaaggtgggggattttttccgttttgaagatcatcccggtcgggccttgaacccccatgaatgggcctttcccccgggttaaaggttgt

SEQ ID NO: 369504 - DNA, 970 bp, Homo Sapiens
  misc_feature (384)..(384): n is a, c, g, or t
  misc_feature (404)..(404): n is a, c, g, or t
tccctttttaataggggaataccaacagccccttcaaatgatttccttgagggaaaaaggaagataattccacaaaattcgttttccaacaaggcagggacattttgctatactgtaccaaataaagccatgttcctcaattccagctttgggagttctgagaagaaatacctctcagagcagggagtcaaggagatatatttttatcccaatctgaatactgtactttgtataaaggtggctgatcaggttgcctgtggagaggttgggtggttggacaagaagagggatgtgatttgggcattcctgaacctttggctccttatcctcaaaagaggaaaggaacttgggcaaaagtagttaaattctcttggcttcagcttncctcaccagtaaaacggagnacaataacaggaagtccctcacagggttgtggtaagaattaaatgaatgaacacttgagaagtctttaaaagagtgcctggtgcactgtaactactgtgccatagaatgccatcataacgacaccaatcgcttcgctccaaactctctgagcacccttgtagatggattacctaaaccgtccctcccagactcttcacagagaatttcattaaagtcagtagacttcagctactctctctcatgtgcaggggaaaacaatataatccctttatgagctaaccaaataaattctctcaggaactgcccttgcatgaagaacatacctccagggatgcttgcttagttggggaggtgagtgaggctctctggacctagctgagatggcctggacctaaaggaagagagtagctcaaattccccacagaataactcagaaactttgaaggatgggagctggtaagccaaagaggtgagggagctctagggtcaggcaggaagctcaatggaagagaaatttgagagaaattgttctaatattcttctgtgtagttttctgatttgttta

SEQ ID NO: 369505 - DNA, 923 bp, Homo Sapiens
  misc_feature (552)..(693): n is a, c, g, or t
gtgatagaagtgggtggccctgcagagagcacacaagggagagcagggctgggttggataagccaggccaggagacacagagaccatgctcatgggaagagtggacgtgcagtctgcactttcctttctttggatccactcttcccagcttgttagctcaagctaggagcacacagtgtgtctccagtccttcaccaagaggacaggagatcgagatgtggaggtggcccctgggcagataactgaggtgacaaaccatagaattggttccacatgtagaagaaagtctacaaatgtagccgatcttataattagcatgcagcaccctcccagccgagccacacaagcttccacctgcccctccagctccacctgccgtggctcccaagactgtcagcacctagaaaccagttcttgcctctgaagcatgctgccgtcctcgatgcagatgtcttagctgtcacctgcgcaccttttgctgtcacatagttagtctgggagcaaagtctatcagtggtttggagtaccagctttcggatgagataaaaacannnnnnnnnnnnnnnnnnnnnnnnnnnnnnnnnnnnnnnnnnnnnnnnnnnnnnnnnnnnnnnnnnnnnnnnnnnnnnnnnnnnnnnnnnnnnnnnnnnnnnnnnnnnnnnnnnnnnnnnnnnnnnnnnnnnnnnnnnnnnnatcatgtagcatgacaccttgttctccaaaggcaagctctccatggaactatgactgttactgtctctcccagggtttttgaagctctaatagtccacatgagcagtgtgacccaggatgaccttagaccttgtaacttttccccccgtattaaaatgggagctaagatcggtatccccttcctaccccatatccaactgggccttcctaaaaggctaccccggggaatt

SEQ ID NO: 369506 - DNA, 1310 bp, Homo Sapiens
gatctccgccagtgtcggattcagaggaacagcaagagtcagcacgtgctgtccctcgataagagcacagcgccgcttctcgacgtcttcagcagcatgttgaaagacaccaccagtcagcaccgcgcacacctcttcgatctcaactgtaaaatttgcacaggccaggttccctccgcagaagatgagccagctccgaaaaaacaaaaattgtcagcttctgttaagaaagaagacttaaaatcaaagcatgacagctctgcacctgacccagctccggattcagctgatgaggtgatgccggaggctgtgcctgaagttgcctctgagccaggcctagaaagtgcttctcatccaaatgtggacagaacgtatttccctgggcctccaggagatggccatcccgagccctccccgctggaagacctgtccccctgcccagcctcctgtgggagcggggtggtcaccaccgtcacagtgtccggccgggaccccaggaccgctccaagcagttcatgcacagccgtggcctccgcagcatcccgcccagacagcacccacatggtggaagccagacaggatgtgccgaagcctgtcttgacttctgtgatggtgcccaagtccatactagctaagccatcctcatctcctgacccaagatacctgtcagttcctccgtcaccaaatatcagcacttcagaatcacgttcccctccagagggagacacgaccctctttttgtctcgactcagcaccatttggaaaggatttattaacatgcagagtgtggcaaaatttgtcactaaggcgtatcctgtctctgggtgttttgattacctcagtgaggatttgcctgacacaattcacattggtgggaggatcgcaccgaagacagtttgggattatgttggcaaactcaagtcttctgtgtctaaggagctctgtctgatccgcttccaccccgccacagaggaagaggaggtcgcctatatctctctctactcctatttcagcagccgtggccgctttggtgttgtagctaataacaacaggcacgtcaaggacctctacctgatcccgctgagcgcccaggaccctgttccatccaaactcttgccctttgaggggaccaggtcttgagtcaccacgtccgaatataattcttggggtagtaatctgccaaaaaatcaaacgtcccgcaaacagtggagagttagacaagatggacgaaaagcggacccgacttcaaccgggaagaagcggacggttccggccctatcccaaaagtagccacaggtccccgcagtcgg

SEQ ID NO: 369507 - DNA, 759 bp, Homo Sapiens
  misc_feature (407)..(428): n is a, c, g, or t
cttgaaatgataccctccttcacccttttctgtcagaactgaaagctacatagcttcttctatttcttcatgcacttgttagaagcaatatgcattaacctattttccgatgctgttgattctctaatctgttaatccatttgcagacgctattgattttcaaacttaagttatgaatacctgctataattctgtggttaattaaccaactttggaaaagaaaatgtgcttctaccaaagggtacaattttttctatgactaaaacatataaattcatccatgagcaattgcaagtgtccaaacattttaccctttctgaacaacattaactctcccagggcaaaacaaagtcacacatgtaacatattccccaagttgccccactcccaccacagtgcatatgtgnnnnnnnnnnnnnnnnnnnnnntccaaagcccagatttcatgtaaaaaaaatctccccttaagtaattatttttcctactgcatatttttaatctcgctgtctttgtatatgaattgtctttcctcttatattccttttacagaatttgagaaatgaaacactgaggaatgataaagattatacatgtattcaaaaaatattaaagacatataggtcaaaaccttttctgatatctaaatgctacgagatcatccctgtattaagatctgagtcatgattagtcataacctacaggtcaatatgtatattctcatccaattatctttagaagtttctacattatataactcag

SEQ ID NO: 369508 - DNA, 1052 bp, Homo Sapiens
gaaagcaagcagtcttgtgagttaagtccatcaaagttagaaaaaaatgaagatgtgaacactaatttaacacacctattgaacatactttcagagcttgtggagaaaatattcatggcttcagaaatacttccaccgacattgagatatatttatgggtgtttacagaaatctgttcagcataagtggcctacaaataccaccatgagaacaagagttgttagtggttttgtttttcttcgactcatctgtcctgccatcctgaatccacggatgttcaatatcatctcagattctccatctcctattgctgcaagaacactgatattagtggctaaatctgtgcagaacttagcaaatcttgtggaatttggagctaaggagccctacatggaaggtgtcaatccattcatcaaaagcaacaaacatcgtatgatcatgtttttagatgaacttgggaatgtacctgaacttccggacactacagagcattctagaacggacctgtcccgtgatttagcagcattgcatgagatttgcgtggctcattcagatgaacttcgaacgctcagtaatgagcgtggtgcacagcagcacgtattgaaaaagcttctggctataacagaactgcttcaacaaaaacaaaaccagtatacaaaaaccaatgatgtcaggtagcagccttcgccccagtgttctgcatggattcagcatgtccaacatggtaattcacttcagtttaatgtctcctttgctcttgccaaaaaatagcacacttttccacattccagtgatgtgtgagctatgcaaacaaaatccaagactctgctggtgaataactatgccagcaacctagtaagctatctgtgcaggatatttgcactatttccacatggaatcaatctttaacaacctctgagccttggtgtacagaccacctttcacaaaacgaaatgctatgactgtatcttgatatctcgaactttcaaaatatatttgcagtacacccagttgccaaagttatgctgtctcttacagaagaactacaatca

SEQ ID NO: 369509 - DNA, 1047 bp, Homo Sapiens
ggctggtccggtccggattcccgggatccagccgctgccgccgcaccacctctccttctctgcctctgaccctccttctcgctgctccccctgcccagctgctcctcccacctggccatgaccaaagcccctgctggcaccctggcccagctctgagtcctgggaccctcggtcctctctcctgggccatggccaactcaggcctccagctcctgggctacttcttggccctgggtggctgggtgggcatcattgctagcacagccctgccacagtggaagcagtcttcctacgcaggcgacgccatcatcactgccgtgggcctctatgaagggctctggatgtcctgcgcctcccagagcactgggcaagtgcagtgcaagctctacgactcgctgctcgccctggacggtcacatccaatcagcgcgggccctgatggtggtggccgtgctcctgggcttcgtggccatggtcctcagcgtagttggcatgaagtgtacgcgggtgggagacagcaaccccattgccaagggccgtgttgccatcgccgggggagccctcttcatcctggcaggcctctgcactttgactgctgtctcgtggtatgccaccctggtgacccaggagttcttcaacccaagcacacctgtcaatgccaggtatgaatttggcccagccctgttcgtgggctgggcctcagctggcctggccgtgctgggcggctccttcctctgctgcacatgcccggagccagagagacccaacagcagcccacagccctatcggcctggaccctctgctgctgcccgagagtacgtctgaactccgcctgccctggccagccccccacccagtggcccccttgcccagcatccagccagcctcgcagcaccctgggaagggcactgggggcataagaaggggcaaaggtgctcctgaacaacttggtctcaaaacaaagcacccacccctggaattcgagagaaccagaatccttggagaaaacaccacaagggagggaacccagccccccccaggcataaaa

SEQ ID NO: 369510 - DNA, 1024 bp, Homo Sapiens
  misc_feature (27)..(27): n is a, c, g, or t
  misc_feature (40)..(40): n is a, c, g, or t
  misc_feature (988)..(988): n is a, c, g, or t
  misc_feature (992)..(992): n is a, c, g, or t
ccatgctccaatgactttcccagctgnctatgtctgctcngaatgcttgccgcgaaacaaagtggtaatctctaccggctacttcttggtctcgcctactccgggttgtatgaggaactgcagatgcaaagcggtccttttctttgttcatgagcctctgacgcaattcattctggccacagttctgtggaccaatcaagatgataggtctcttcctatttgctggctgatgataaagtgacatttcctcataggttaagatctcctcgttgtcataatcatcatttttattggcattatataaaacctttttcctcttctttttattcttctttgcacaccacagttttcctgatttttctggctccttatcttcttctatggtttgtttcatggcttccctttgctgctgaaagcttttccctggaacaagcccggctagaggttgattatcttcgtccccttccctgtaggcctgccaccagtttggatcttcttgactgatcacatgaagtatatcacctttttgaaaagacagacctaactctcgacatggaacataagggtcatctgaggggtcatagtcaaaatgagcttttacatggattactgtttccttggcaggaggcggcttgatctgttgactgggaatcaggacaaaagtcaaagtaccatgcatatcagacaacaagtcaaaaacctcattgacatctttcccccgaatttcaatgccattaatctctagaacttcatctccttcatgcaacagaccacttttctctgcagcacccccttttactatccggctaatgatgacagagtccatttcattacgaactgtagcacccaacggaatatcacgagccttttctatacgaactatttttacagtttctcctccatactgccaatactttcataaactctctcatctgtaatgggctctagctgcatttcctgctcagcaaccttatcgtggcgtatgganggangagtctccgtcgaactgggatcctctgatcaa

SEQ ID NO: 369511 - DNA, 919 bp, Homo Sapiens
  misc_feature (821)..(821): n is a, c, g, or t
gtctgtgaaggccgataggccatccttggagaagcccgagcccattcacctctcggtgtccacgcctgtcacccagggaggcacagtgaaggttctcacccagaggatcaacacaccccctgtgctggttcacaaccagctggtcctcaccccaagcattgtcaccacaaacaagaagcttgctgaccccgtcacccttaaaatcgagaccaaggtccttcagccggccaacctggggtccacgctcacgccccaccaccctcctgctctgcccagcaaactgcctacagaagtcaaccatgtcccctcggggcccagcatcccagcagatcgaactgtctcccatttggcagctgcaaagctagatgctcattctcctcgaccaagtggacccgggccatcctcattcccaagggcaagccaccccagcagtactgcatctacggcgctctccaccaacgccacagtcatgctggctgcaggcatcccagtgccccagttcatctccagcatccacccagagcagtctgtcatcatgccaccccacagcatcacccagactgtgtccctgagccacctctcccagggcgaggtgagaatgaacactcccacgctgcccagtatcacctacagcatccgggccagaagcgctttactcttcctcgggctccgcctgcagcccccagcaaaaaagaaggtcaggggccccaacagcgtggccaacaaccccccaagccaagcccccagcctgggggtggcctggcacatgggccttcccaaggaacccctttccgcaaaggaagagaaaggggcattttttncaccccttttccccgggttccgcttctcaaaagcccacaaagacccccccgtgttgggccaagtctcccgagaagggtgaacctctaaaggtctagga

SEQ ID NO: 369512 - DNA, 761 bp, Homo Sapiens
tacgtaaaggccgatcgctgagtgcaatgtacgagggatggagcgaatcatgcctcacttaggctggtgatagtgcgagactctgtctcccaaacaaacagcaaaacacttaaagagctgaaaatctagtgtaaaaccaaataaacaagtgaataaaagagaatggatcagggaggattgagtagatgtgatcttccctcgtcctcctccctggacattatatataagacaaccctaagaagactgaaatgtggagagaaggaggtagaccagctaggagccccagaaacaaaggcaggacacaatgctgatttctgtggactttctttttgcctcatatatgccatacttggagctaaagaaaccagcaacctggaaatcccaataggagcagcctaaaaattccctaacaaaagcctgttctctctagccaaaggatcaggaatgaggcagtctagcaaaacagaaaacttttagacaataattgcactattccagccaaatgccacagaaacaaactgtggcttgtcctctcctattctggcaaagactgaatggggtgcctagacttccaccaccagcaagtctattaggaatcatccctctctttcctgttggggtggtagcagaagaaacttaatagagagtcaggactttcacccaaactcagtgagtggtaatgaggctaccccctaaggaaagaatcagtgaactgaaagaacagtagaaattactcaatctgggtcaggcgcaatggctca

SEQ ID NO: 369513 - DNA, 672 bp, Homo Sapiens
  misc_feature (307)..(316): n is a, c, g, or t
agctgccaatctttttgaaggaatattcttacctctactttgtcaccttctactggctccttaactaaaatctgccatttggctctctggttaacagtcccttcctgtaaagtctaaaatcttaattctaaatccacagtttaattcacaagctagtacttgactttttttctgtatttgacatttttgacaacccctactttaaagatttattcccttgacttcttacattttgctcactcctgaaccaccccccaccttttggcctcttcatttattccttaaatgttattcctcagacctccannnnnnnnnnctctcttaatcacaacaccacttctcacgcttgggtaattttaattcagcagttcctaaatccttatctttagccagactcctcaatccatctgcctgttgcacttttcttggttgtcccagagacacctgtgtgtgtcttaaaacattcattctctgcaaaacctactctaatgcctgtgtccccttactttggtaaattttagaaccattataattctaagttttctaggctcatttcctctccctccaccttcccccaataatttaaggggctaaaatttttacgggatttttatcccccccctcctcgggaaaaaataacctccttttaaacctttccttggcgtattaatt

SEQ ID NO: 369514 - DNA, 898 bp, Homo Sapiens
cgtgcccgggactcagtggagtcagccacacaagttaaactctagattaaattcctcccgcggttagcctgacccatgcccgggactcagtggggacagccacacaagttagactctagattaaattcctcccgcggttagcctgacccatgcccgggactcagtggagtcagccacgcaagttaaactctagattaaattcctcccgcggttagcctgacccgtgcccgggactcagtggggacagccacacaagttaaactctagattaaattcctcccgcggttagcctgacccgtgcccgggactcagtggggtcagccacacaagttaaactctagattaaattcctcccgcggttagcctgacccgtgcccgggactcagtggggacagccacgcaagttagactctagattaaattcctcccgcggttagcctgacccatgcccgggactcagtggggacagccacgcaagttagactctagattaaattcctcccgcggttagcctgacccatgcccgggactcagtggggacagccacacaagttaaactctagattaaattcctcccgcggttagcctgacccgtgcccgggactcagtggggacagccacacaagttaaactctagattaaattcctcccgcggttagcctgacccatgcccgggactcagtggagtcagccacacaagttagactctagattaaattcctcccgcggttagcctgacccgtgcccgggacttcagtggagtcagccacgcaagttaagactctagattaaaattcctcccgcggttagcctggacccgtggcccggggacttcagtgggagttcagccacgcaagtttagacttttaggtttaaatttccttcccgcggtttaggc

SEQ ID NO: 369515 - DNA, 475 bp, Homo Sapiens
  misc_feature (16)..(16): n is a, c, g, or t
  misc_feature (22)..(22): n is a, c, g, or t
  misc_feature (44)..(44): n is a, c, g, or t
tttaaccctgaacgtncccggnaactcaatggggaacacccacncaaagttaaactctagattaaatcctcccgcggttagcctgacccatgcccgggactccagtggagacagcccacacaagttaaactctagattaaattcctcccgcggtttagcctgtaccgtgcccgggactcagtggagacagccacgcaagttagactctagattaaattcctcccgcggttagcctggaccgtgcccgggactcagtggagtcagccacgcaagttagactctagattaaattcctcccgcggttagcctgaaccgtgcccggaagtgagtggagtcggccacgcaagttagactctagattaaattcctcccgcggttagcctgacccatgcccgggactcggtggaatcagccaccccagacctctctcactgttatcatttttgcacaggtggtttcagcagcttgatgccaa

SEQ ID NO: 369516 - DNA, 916 bp, Homo Sapiens
ttgagtgcgtatgttatttttagacaaagtagacttcagaacacagaaaattatcacagataaagaaggacattacataatgataagagagtaaatgcaccaataagacataatactaaacatgtatatatctaataatagagcgctaaaatatatgaagcaaaagctgacagaactaaagagaattggacaaatccacaattgtacttcaaagcatcacaggaccattaatcctgaaatcttgacctcagtttctctcaggcctcttttggcctcagttgactctctctgtgcctctggttccacaaaggaataaccctgccccagagagtttagggtaactgtgaaagcgtgttctgtaaggagcccaccccaaccagatgtgagactgtgagcatagccagactttagctacttgttgaaattttagagaaaatcaataggaattttccagctatgtctctctgggaaactcatgaaagctcaaacacagcattaagagtttgttgtggacaggtattattttgcatctatcatccactctcctatttctgataacagtgtcccaattttgctttagggaaaatacctctacatacccctaacttaagctgcaattaagtcaatatgaatatttcatcctcctgactcagtgattggtcagaaacaggcacacaactcagccagagcaatgagatgcaaggttacacttgctggggcatctgggaaagagagcttcctctctcctctttgggcatcaccagaaaacatgatgtccatttagccagatggtgtggcttggggatacgagagctgggcaggccacagtctttttgatatcgggagggaaaccctagaactatactgtgtagcacctgagggtaaagcctacactgcggaaggcagaacagaagga

SEQ ID NO: 369517 - DNA, 861 bp, Homo Sapiens
ccgaggtgttttctgaatctgtaggctctgagaacatgtaggattcactcctgtggcataatttacagaagtgtttcccttgtggactgctggttctgaaaagctgacatccccgcaatcatgggcctcctgagctctgcttacaccacgctgaccggtgtttcctctttggccagggtgaggaccctttcaccagtgaaactgttgatccagaaatggaaggagatgacaatttaggaggtgaggataagaaagagacacctgaggaggtggccgcggacgtcttagcagaggtgattacagcagcagtgagggccgtagatggggaaggagcgccctgctccagagagcagcggggagccggctgaggacgaaggccccacggacacagcggaggccggtagtgatcctcaagccgaacagctgctggaagagcaggtgccctgtggaacggcacatgagaagggcgtccccaaggccagaagtgaggctgcagaggctggaaatggcgccgagacaatggcagcagaggcagaaagcgcccaaaccagagttgctcctgccccagctgccgcggatgctgaagtggaacaaactgatgcagagtctaaagacgctgttcccacagaatgatgctcatttccctgttccagggaaggcgttgggatgatggatgcgttggtctttctcccttggtttgtaagcagtacaagggcgtgtgctcccagaatatgctgtaatctaattttggtgaagagacccagcgtttcctcctgagcaatgcctctcacggctttgtctcatgcagtcgtgtgggctttcttgcccaggttttcaaaagcctgaaagtacattggtccc

SEQ ID NO: 369518 - DNA, 936 bp, Homo Sapiens
  misc_feature (809)..(809): n is a, c, g, or t
ccggtccggaattccctcggatcagaaaaaagcagtggtggagtcggcagtggggcagaggagggggagctggaagggaaggaccccaaagcagaagcccgcacagtaggcacagcgcacccaagaagggtccaggagtctgcagaaacagaaaggtccccggcctcagcctcctagtccctgcctgcctcctgcctgagcttctgggagactgaaggcacggcttgcagcttcaggatgcgggctccgggtgcgggcgcggcctcggtggtctcgctggcgctgttgtggctgctggggctgccgtggacctggagcgcggcagcggcgctcggcgtgtacgtgggcagcggcggctggcgcttcctgcgcatcgtctgcaagaccgcgaggcgagacctcttcggtctctctgtgctgatccgcgtgcgcctggagctgcggcggcaccagcgtgccggccacaccatcccgcgcatctttcaggcggtagtgcagcgacagcccgagcgcctggcgctggtggatgccgggaccggcgagtgctggacctttgcgcagctggacgcctactccaatgcggtagccaacctcttccgccagctgggcttcgcgccgggcgacgtggtggccatcttcctggagggccggccggagttcgtggggctgtggctgggcctggccaaagcgggcatggaggccgcgctgctcaacgtgaacctgcggcgcgagcccctggccttctgcctgggcacctcgggcgctaaagccctgatctttggaggagaaatggtggcggccggtggccnaaattgagcggggcatctgggggaaaagttttgatcaaagtttctgcttctggaaaacttggggggccccgaggggcattccttgccgggaacaaccccaccttccctgggaccccgccttggcttg

SEQ ID NO: 369519 - DNA, 804 bp, Homo Sapiens
ccaaatgcaaagagactccactagagctggtgtttgtgatcgacagctcagaaagcgtggggccagagaactttcagatcattaaaaattttgtgaagactatggctgaccgggttgctctggaccttgccacggcccgcataggcataatcaactatagccataaggtggagaaggtggctaatttgaagcagttctccagcaaggatgacttcaagttggctgtggacaacatgcagtatctgggggaaggcacatacacagccactgctctgcaagcagccaacgacatgtttgaagatgcaaggccaggtgtaaaaaaagtggccttggtcatcactgatggacagacagattctcgtgataaagagaaactgacagaggtggtgaagaatgccagtgacaccaatgtggagatatttgtgataggggtggtgaagaaaaatgatcccaactttgaaatattccacaaagaaatgaatctaattgctactgacccagagcatgtttaccagtttgatgatttctttaccctgcaagacaccctgaagcaaaaattgtttcaaaaaatttgtgaggattttgattcctatctcgttcaaatttttggttcatcgtcacctcaacctggatttgggatgtcaggggaagaactcagtgaatctactccagagcctcaaaaagaaatttctgagtcattgagtgtcaccagagaccaggatgaagatgataaggctccagagccaacgtgggctgatgatctgcctgccactacctcatctgaggccaccaccacccccaggc

SEQ ID NO: 369520 - DNA, 919 bp, Homo Sapiens
  misc_feature (516)..(786): n is a, c, g, or t
  misc_feature (811)..(811): n is a, c, g, or t
ttcttacaaactgagtatggcaaactcttcatgctaagttctagcattaatcaacatcagagattccatactaaagagaaatcatagcaatgtatgtgaatcaggtctcttgaggcctgccaaatgactagatatcaaaacatacatcttggatgaaaccatacagatggattatgtatgctgaggctattattcaaggaccattactatggaacatgataagatttacacaagcgataattcagtctctagttctccaatatttatgatactgcatgctgcagaaaagtcacagctccaaatacgttgaatctcatgacgcgatgcatgtcgaaggtccaagggcatgtggaaatggtcagttaatatttcaggcaattaaaaaaaacctaaattatatggggttttttgaaaaaggctactttacattttatgacttttcatcctcaactctgaaatcacttcatgtgacttctttacagacctttcactgtggtctcttgaatcagtaggatnnnnnnnnnnnnnnnnnnnnnnnnnnnnnnnnnnnnnnnnnnnnnnnnnnnnnnnnnnnnnnnnnnnnnnnnnnnnnnnnnnnnnnnnnnnnnnnnnnnnnnnnnnnnnnnnnnnnnnnnnnnnnnnnnnnnnnnnnnnnnnnnnnnnnnnnnnnnnnnnnnnnnnnnnnnnnnnnnnnnnnnnnnnnnnnnnnnnnnnnnnnnnnnnnnnnnnnnnnnnnnnnnnnnnnnnnnnnnnnnnnnnnnnnnnnnnnnnnnnnnnnnnnnnnnnagactcttgtctcaaagggtagtgnacgctgccgggaaggaaaaaagaaagccggtatagattgaacaggggggattgaactgtcctttaaacctggaagaaatcacattttgcaattccaagtttgtgcccc

SEQ ID NO: 369521 - DNA, 878 bp, Homo Sapiens
gctgggtaaccggtccggaattcctgcggattaatgtttggaaatgtatccctgatccatctggccaaagaggattccttaggagtacctttgctattcgggtttgctgaacattcaggaggggaatcctaagctccaaggctagaacctcaggtatttgctctctatcaaaatgttaagtaaagccctttagacaagaagtctcaaataattatgacagaagatgattataaggatgaagacaaggatagctgactactcattcagggactccttttcagagaatttcttcaatttcctttggcagtaaattttcccttagatgaaaaagataataccctgatattctgctatgtacagaaagcaggaagaacaatactttctgaactgctaacaagagtagctctcctctagatataacaatgtttctccttctcattaaccaccttaactcatctttgatattcagaccttgttattctaaagaatatttccccgcggaacaaaccataaatttgcaaagttaattaggactctgatcttaacgcatttccccccatttcattcctaacgctctgccgggggtgtccaagggagaggaatacagtcgtgggttcttggtttctgtttctggttgagccaataaagcctcttcctcatccctcttttccgcttatcactagagacataatagaaaaactatataaaaatagaaggaatgtcttaaactccttttccccttttataattagttggcagagagacatttaaagtgtgcatatacttcaagaaaacaccatataaatatgattttttatctaggtaatgacatggccttcagggctgcttaaaaggccttaaaaccaaaaccaaaggcc

SEQ ID NO: 369522 - DNA, 1182 bp, Homo Sapiens
  misc_feature (112)..(189): n is a, c, g, or t
  misc_feature (896)..(904): n is a, c, g, or t
  misc_feature (931)..(980): n is a, c, g, or t
  misc_feature (1025)..(1033): n is a, c, g, or t
  misc_feature (1065)..(1118): n is a, c, g, or t
gttaaaaaaagaaaggggaatttttggcccccttggtgccattccagcccctaggtttaggaaaaataatgttaccacccattttccgggaattcttacaattttccaattnnnnnnnnnnnnnnnnnnnnnnnnnnnnnnnnnnnnnnnnnnnnnnnnnnnnnnnnnnnnnnnnnnnnnnnnnnnnnnttccattttccagatcttgggaatgctccagtcttttgcaaaagtcgatgagtggcttcagcactgggaaaagaagccccgaaaggtgaccaatggaacctgtattcacagttcttcaaagttcccttttgaaaccataaggaagaaaacgaagggaagaaggatttcacactttgggggcaaggggagatggtttctgttgatgtttagctatgaaagtgaaacagcaaagcatctatttatttgtctccaaaatctatgttttagcagcacaaagttttcaaagttcagaccatttatttatttttctttttacatgagaaagggtgtgtgttaacaggaatatggatattaacagaaacaagtgcctcacatacagttccttttttgctttctgtacactgctatctgctgctttgttggctgcgctctggatcactcgctgctcagactgcctaacacaaggacaaaactttgaagtaaaaaatgtgtcttttggtatatggaattgtcattaacatttgcctctctgcttgcagaagaagcacataacaacctgggaatcttttgtttttctctttcttttattaaactaagtcttgtttgtttaaatcagaaacaaattctcaagtaacaagaaccctttcccttttttctgcatcagcagtgaaagggtgtgtctttggattttatttaaagcatgaaannnnnnnnnctgagagaggaaagaaaaaacaaacannnnnnnnnnnnnnnnnnnnnnnnnnnnnnnnnnnnnnnnnnnnnnnnnngtacacagccaattacacaaatggaaacaaatcctttagtatagnnnnnnnnngaatatttgaagctcctaccaaacaaggaggnnnnnnnnnnnnnnnnnnnnnnnnnnnnnnnnnnnnnnnnnnnnnnnnnnnnnntgcacaaagctaacagacacaggtaactagaattatatgcctttaaaaagtttcaactcccccc

SEQ ID NO: 369523 - DNA, 923 bp, Homo Sapiens
  misc_feature (432)..(486): n is a, c, g, or t
aaaggcaccgtagggttgatgataacaaacgggtggagatatcttcggtccccaagggaaagatcggtggaggaagagaacggaaaaaggtccgccgttggggggtggttgcaaaagcaggctccactttgcaaatttaccccaaacgatttagtgtcctctcgaacaaagggtcagggctgaaacgggaagatgaaccttcaccgcagttaatgcagcaattaagtcaatgggcacatttgcatggtgtgttgggttacattggtaactcaaagctgatgccttaagaaggttagggcaaaacaggatttaagataaaataattttaggggatcagggaactctagatgcgtctagcagctagcctgtggcctcgatgcagtggggccacacaaacagcacagcacggtggtggggctttgttcttcgtgnnnnnnnnnnnnnnnnnnnnnnnnnnnnnnnnnnnnnnnnnnnnnnnnnnnnnnnctgttgctctctggcaatattcttgatttttagaaggttttatgcatatcaaccagtagagaaaggaccccaaaaccaggctggcctatcacattctgtgccatttggtaatgcctgacaaaaacattttaattttcaaattgcttgattaaaatggcaaacagtttgaaaattgtatacctctgtatcattcagttaaaaaacaataaagtgacattcttaaaaacatcaaggactttcccctcacgggcacacgagattgttttagttactgagaatctgtatcccttcctttttactttttaagaatctcattgattaaagagaacaaaagaggttggcacaaaggggcccttctcgccctagccatcctgaacaggaaacaaacacaaagttctcttccgtggaatttggtccatgaaatagaacattcggaa

SEQ ID NO: 369524 - DNA, 859 bp, Homo Sapiens
  misc_feature (747)..(747): n is a, c, g, or t
  misc_feature (771)..(771): n is a, c, g, or t
  misc_feature (791)..(791): n is a, c, g, or t
  misc_feature (825)..(825): n is a, c, g, or t
  misc_feature (844)..(844): n is a, c, g, or t
tcagagattgaaattcaaattgcagtgtttaccagtaaagttttattggggcacacccatgctcacccttttaaatattgtgtatggccgctttgtgctacagtagcagagttgagtcattgcaagggagaccatatggcccaggtagcctaaaatatttatctgatcctttacagaaaaagtttgctaacccttgataacagatactctaaaatacaggtttttcttcttcaatttagctcagtggtaggtcaaattgtttgcttttgctattaagcttatgatttggaaacgtaaaatttcatggtggatcttataatcagaactattcaaaagggaaaacatgccagccattttatatgatgaagtctcttattccatagaaaactgtagaaagatatctgtatctttggagaaggagaaagaaaggaaagaactccagaatcccatcactgttctttaaagcatgcatcacagacctttaagagtatgctttattgagtaaaggttatagtttgactttaagataagaaattttctagaatcatgtttgaattctaaacgttgatattcttaagtaccatttctgattaggaattaggtgttaaaagaatcatggtaaggaaaccttaatccgttgaaactcttgtaatttggacaacaaaaaactagaaataacactcttttctttgaagatctgattcaaatacaccttagaagagtttaaaatctcccaggcctttaggntgcaataggatattatgccttggnttgactccttttcattcaanttaatgtaagtatgttgttcaaggctttgaagcnttgaaccatggttctcgangaatttttatttaat

SEQ ID NO: 369525 - DNA, 889 bp, Homo Sapiens
  misc_feature (800)..(800): n is a, c, g, or t
  misc_feature (817)..(817): n is a, c, g, or t
  misc_feature (833)..(848): n is a, c, g, or t
ttttcgaaaggggagagtgcaaccctgatttcccagagcgacgccaaccctcccgtctcccactacacctggtttgactggaataaccaaagcctcccctaccacagccagaagctgagattggagccggtgaaggtccagcactcgggtgcctactggtgccaggggaccaacagtgtgggcaagggccgttcgcctctcagcaccctcaccgtctactatagcccggagaccatcggcaggcgagtggctgtgggactcgggtcctgcctcgccatcctcatcctggcaatctgtgggctcaagctccagcgacgttggaagaggacacagagccagcaggggcttcaggagaattccagcggccagagcttctttgtgaggaataaaaaggttagaagggcccccctctctgaaggcccccactccctgggatgctacaatccaatgatggaagatggcattagctacaccaccctgcgctttcccgagatgaacataccacgaactggagatgcagagtcctcagagatgcagagacctcccccggactgcgatgacacggtcacttattcagcattgcacaagcgccaagtgggcgactatgagaacgtcattccagattttccagaagatgaggggattcattactcagagctgatccagtttggggtcggggagcggcctcaggcacaagaaaatgtggactatgtgatcctcaaacattgacactggatgggctgcagcagaggcactgggggcagcgggggccagggaagtccccgagtttccccagacancgccacatggcttcctnccctgcgcatgtgcgnnnnnnnnnnnnnnnnaacatataacctatgccaataaaaatgtctcagcaacagtg

SEQ ID NO: 369526 - DNA, 1753 bp, Homo Sapiens
tgccccaagaaagaaggggagagccttttttcgcctttatcagcgagtgttatagcaaatggtgttttttccccctttgggagagaccccaaaaaaaggccaagggttttcgtggccataagggggaaaggccccggaattgcgccttggaataatttccaaaagggtttcaagcctcgaagaaacatatgcccattctgaggtgatgaaccggttgaggaaagtaatcacgacaccgcttttccacacggtactcactgctagaattcagagttgtgtcttggtaagcgttgtaaatgctgatgagggtaaagtgatctccttcgggatgtaaaaatgtcttccaacaagtcaaggcagcctcttcagctccatgtggcacatgtgaaaagcaatttggagctgttaccatggctgcgattgttagcacttcatctacacagtcaaattcacaggacgctaagatagacttcgagagttgtggatcaagaggaaactctgacatgatgattccaaattcagaaagatttccatcattatccagtgctgccagataatctaagtcttccaatgcctgcatcaaactttctggtgctggtctgttcatgaagtcacagtggcctaggcccgcaatgtctatcctcttcataaaaagcaccatgcttgttaggttggcttcctgcatttctgctggcttcagtggcgtcatgtctttggaggcaaattcttcagtgtacaggcagaaaaattttcctgaagaagatgagccaagaatctgcttgcgtatctctgcctggctctggctgatgggctgcatgacgagcgagtttgctcttattctcgggttgtacacctttcttctttccacacccacatcgataacaaatctgactgagttgctccagatcaaaaactctccagagctagtagttaacaccactcttctttgataaacttggcatcttttttctgtttcatcgagtggcttgaacaatgaacatttctcttttggatacaaaggaacaaccaccagttctccaagatctgggtttaggttagatccttgatagacagttttcacagactttctcaatatcctaaagaaaaaacccatgaaataaaatacaatgcaaacaacatcactattaaaaaatatgtctgaattacaaaaattttaggcaatactacgtaacagatacagggaaagaaatctctgtgttgctgcctacatgtatctttaaataagtaaagatgcacctaaatgagaaaacgtctttggggaagttaaatataatttatattgttttcccatttaattttgttagatttcactaaaaatctaagtaaaaaagatgacttcccacaactgccatagtttttacagctcaattccattctctaggtctctagcttatgtctctttcctttccataccatttgtagaatgggattgaattaactcaagggttttgtaggaagacagatccatctagaaaaatagcaaggtatcacaggtcactgagaactaggtgagctgtgctcgtttcctggtctgctaagtggctcccaggaagctgggcagaggccgctccagggggtcccacatcagctggtacacaggtacggtcccttgcttgcacttcctttttccacatataattgaattacttggggcagattttttaccaagcaaacagcatggctgttgatcctaatgagtgaaaacttgccaattggaataatgagaaccgct

SEQ ID NO: 369527 - DNA, 679 bp, Homo Sapiens
gctgctgtggctatggtatgcaatcgtgctggatcttgatgcgcctagaggatttctacatcggatacccctcctcgtaactcgggagctgcatctggacaggggctgtggcctgtgctggctggagctgctgccttcatttatgagacacggggtggtacatactgtgccctgctgaggactctgctagcgctggcagctttctccacagccatcgctgccctcaaactttggaatgaagatttccgatatggctactcttattacaacagtgcctgccgcatctccagctcgagtgactggaacactccagcccccactcagagtccagaagaagtcagaaggctacacctatgtacctccttcatggacatgctgaaggccttgttcagaacccttcaggccatgctcttgggtgtctggattctgctgcttctggcatctctggcccctctgtggctgtactgctggagaatgttcccaaccaaagggaaaagagaccagaaggaaatgttggaagtgagtggaatctagccatgcctctcctgattattagtgcctggtgcttctgcaccgggcgtcctgcatctgagtgctggaagaagaaccagactgaggaaaagaggctcttcaacagccccagttatcctgcccccatgacctgtggccacatgccctg

SEQ ID NO: 369528 - DNA, 2348 bp, Homo Sapiens
  misc_feature (2282)..(2282): n is a, c, g, or t
gatttccgtgccatgcttttggttacacggtatctcagtcacgctttctgcctggttggtggatcctcaggcttaccagtggctatttgcaagagcctgtttccagcctccgtcagcctgtcggtgctctgaccctctgaaaccttgctttgctgggcatctccccatattctctctcctgtacatagtgggcagtggtgtgtggttttgaatggcagtgctataaaggatgccagctgtgctttaggcacctgtaggccagagggttgctgcctcaggcataaggttggtatgaaaaggggctgccttagaaaagcaggcacatcccttgttcagaaatggccactgtaggaaagcctgtgaacctcccaccagtggctttaagctgccagccatgccccatttctagaatagcctttgctcttccacacgcaacccttccatcagtgtcgtccagcctgcatggggagggcctggctgcccagacacccaccctcacttctcatggccagcctgtgtttgcagatcactgggctgctctgtccccagcttgccccgtgccaggcatggctctgtgagattctgtggaatgcccttcttgacttgtggaaatcattcaccaagtacgatgggatgggattccaagtaaacagtggaccgtcatattgcaaagcaggcccacgcctgggctggccttggttgaggggatggaggaatgttttcgggggtgctttgcagggcagtggtgcagccgcagcgtgaacgctcttggacagctgaaaaccatggcctccttggggatggccagtgctcctgggtgtctccacctgcctgggttgtgcaggaggccggctgccagtgcctggggctgggaaacttttttgcttggggcaggcttgggtgagctctcccagatgtgtgcccaacccaacactgcctggaacatccttgttctctgccaggatgcaggggcactgttgcctctgacacagcagtttctgggaactcagaggactgcctttctgaaggctggggagaggctttgagcaaggagcttgtttttgcttaatcgctctagaccatccctgatgcgtagatgtgagaggatgttttctggcacagtgttatgaaaatacaagataaatgatctcagtggaatgtttcatattacccgaaaaaaactggaaatcatcctttgttgtgaacacactgagactaagaattgaagcaatgcagttttaagaagtatttttcctattttttgctgtcaactttttggcaatgccacggcaaagttggtgtttcagcacatgctagagtgagctccggcttcgtgtctttaaccaactccactaatgtttcactgggtagacggagctggcctctatatttagccagaagcctttgcctcttttcaggcatcaaaaatgggttttgtcattgtctttgtctttgagagcagcagtttgaggtctgactccttcagttgtcctgtgagctgggcgttgcagtctgctcgaatcaagtgttggaaaagcccccacccctcagcccatcgtgaaacgacagctgtcagcctggggggcggctgctgaggaggtgcagcaggaatggggctgggccctgaggttttactttccgagccaatggcccctggaacatgccagcacacactgccatgtcctggagctaaagagctgcctttaaggacaggctcgtgttgtccagtttgccctgagagatgcacctgaacagggggcccgtcgtggctgcaacccacggtgggtatgttagtgtttccaggcagttgtcagcagctgccgggtagtgtgtgtgtgcgacagcaggagagttcctggaggaaagggactggggacactttctcagaggttctcctgcctggaatcaagtgatgcgtgtccagaaggcaagagagggcggctccgcctggttaaagtttgggaacgggacggagccaactcctccttccaggactgtgggccccactcttttgcgctaacacttcccctccctcgggtcactgaggaaagagctgctctgtcccctccagtgccctgaaaggtccctgggcctccacttggctgccaatggcaggggggccctttctggacaagggggtgcccccaaagctgcctgttcctctcctcctgaaaactttcacccccaaacaacccaagcccgttgggcccccctggcagaggggggaacccctggcccaagcctgggggaaaaacccacaaaagggcctctggttctcgaanaccggtggcgccgccacaccagaggaaacccgagaggggggaaaaacccttccccctctcccccac

SEQ ID NO: 369529 - DNA, 875 bp, Homo Sapiens
tctggggaaaacttttagaaatatacttttaatttttgaaagaaaattaaaccaaacaaaaatcaaatccctaaaactgagtattcccatttactaactggctaaaactgatgatgaaagaagaaaaagtaccttccgatagaaataaaaacattatagatcagtgctatttataatttattacttatcaaagtaactccagctttcttatagcaattcaataagccctctcctagaactcaggggcttttaaatttatgtttttactaagaaaacctttttaaaaaaaatccctaagctatatgtttttaaaacatttaaaattgattttttaaattttgaaagtgaaattataaccatcttcaaaacatacagtaaaatgtattacgtagacaagtatcaattatttcaaacagcatgacaatttaactacaaataatttcaaatcctaacaaatataattacctaatgtttaagtaattttataaataaattaccaaattagaagacagtattggttgactacattttacaaactataagaatatatcccacacttcatatattttaacaccctggggtatttttctgcattaataaaattcattctattataaattttcaggaattctttctgatgtaccaagatttcatatgaaaaagcagaagctatttttttatttccaatataaaacagtaagtatgaacccaatgtagaaatctgaagttagacaattccctttggcaagaaaacaattataaacaggtcttaatataaatagaatccataagcccataaaaagggaagtacacaaccctgtgtttcttaacaccgaaagaatcgtcagtacacagatttaaaatcattatccgga

SEQ ID NO: 369530 - DNA, 1432 bp, Homo Sapiens
gaggcactagattgaatgacaacagctacagcatttcttactgaacttaaccctgtgtgacccttgaaataataaaacccactgatcaaaatagatgctataatctttaccacaaatgaataattaaccctgtgctcaaactgctacaaaaatatgagattcaaatgttggagccaatgaagtttgtataaaggagagtttctgccagtgggatgtggcagtgccaccctccttatatcttggctgtcagtcttttggcttggtcccgcagctccattgttgcgattgctgaaagatgaacttcgtcaggtccatctgctaaacgcaaaactcgggttatagcatacatgttagccagagggtaatcctgggaaacaccagcacctccgcacacctggatggcccagtcaacgattttgctgacagcccgtggggcagccactttgatcatggcaatctctttcttagcggccagcactgcccagagtgtccatgctgtgagcagctttcagagtcaacaagcggatcttctcaatggcaatgcggctttcagcaatccagtgagccacaacctcatgtgcatacaacttcttcttgaaagctatcctttgtgttgcccgctcacacatgatctacaaaagcgcgttccgcccaaacctactgttctcatacagtggtggattctgccaaggtccaaggcggccttgggaaatttcaaatcccctaccttcacctagtattagatttgtggcaggaactcgcacttgattaaaatggatctcaaaatgtcctccatgaaaattatctgtgtagccaaaaactgacaaaggccttattatttttactccaggtgtgttcatgggaacaagaatcatgctgtgctgtttgtgtctagtcaaaagaaaaattgtattagaaaaagtttgctaagaagaaaaataaaacagataataagcagaatcacaattgtctttttgatgttttcatgtagtcatgtaagcagtgatgactggaatgggaactgtgtaaaagacgtacaccaacatagtctgatgcaggctgtgatcatacagagagcaagtaggtaaagttccccccaagaacaagcgcaattttgcacttgggattcccagctccactgctccaccattttttgccgttaattacatagctatcttcatctcgttggatgctgcattcaatattcgtggcatcacttgaagctacatcaggttctgtcatacagaagcaagaggtaatgttcccttgaagaagaggctcaagccactgtttcttctgttcctcacttccatacaggtgcagaacctccatattccctgtgtctggtgcttggcagttaaagacatctggagcaaaaaagcattttcctgtttcttcagcaatcaaggcatagtccacgtggctgagtccc

SEQ ID NO: 369531 - DNA, 1210 bp, Homo Sapiens
  misc_feature (963)..(963): n is a, c, g, or t
  misc_feature (1127)..(1142): n is a, c, g, or t
gaaaaaacaagctgggtaccggtaccggaattctcccgaataagagcctttaatccgaaggatttccttcactgaccgaaagttcagtgtaacttccagaggttcaatagatgatgtttttaactgcaatctgtcacccagatcatctctgacagagcctcttttggcagaattaccatttccaagtgttctggaatctgaagagacacccaaccaatttatctgattgaactgaacattgtagcagttgctcccgcactccaggcctgtgctagactataggctggggggagggtaggaggtgggaggcagatacttccacctgcgtgtcaatctccggctcctccatggcttctatggaggactcctctcttctgcttctgtggatgtgatgccctggcaggcccagggcagctgattcccctaaaacttatgattaccaggatggaaaggccttggtcccatggcactgggtggggctgggggatattctctactttgaacacttctccaaagaggcagaagggccacagagttctgccaccctgaacatttttctcagttccctgggagtttttgtggcagcctttgtgggagtggtctgactggctgttgacctagcatgcttcataaatcaaggtttggccctctgcttggagcatccaaccccttgaactcaaacctgtcgagcaaggggttaagagttctgttctcttgccaacctggctgggcaaaagcctgtgccatctttcactgggaggcaaatatgtttttcatcctgccatatgacacctatgagaaacgttcacagtgaggagtagccaggttgctaggacagtaaccctgccacacactgcctgaaatcggaactcccttggcctccctctttactaagtgacccatgtagaaagaagccaggagatatggtaccgaacaatgacaggggaaggggtattggacacnggcagcgttcctccttatttgaaaacacattatgtcagttggggaattttaaataagcttttagccaaaccttacccctaaaagcaaaatagaagaaaggctatacccatttacccttaaaacattttttccatctcatgggctacaattgggaatctctttgnnnnnnnnnnnnnnnnaaatccttattcttcactaataaaaaaaccctggcccttggaattgaaattccccttaccatattgga

SEQ ID NO: 369532 - DNA, 1569 bp, Homo Sapiens
ctggtccggtccggattcccgggatacaaatgaaagctcagtatagaggaacagacactgtttacgtccctcccactgctaaccttatatatctctatagacaaatgtgataatgacatgatttcccacctgccctccaagaaaatggtgactcactctcaagtcagctactgtagagagggttctaattggttctgcaatttgctcttaaactctagcagggaactctcctcttaccacatcagcatgtaaggtgaataataactctggttttgccagacagcaggttgtctgaccttcaaccactggggcaattgccgggcagatgcacacagtaggctcccgggcttctgggctctgagtgttcctctcagcacctctgagtaagctgctgccaagcacatatccctatgacaacactttgtaaaagccgcggggcccccatacagcgagtgaccttgcaactgtgcagggttgccattggtcactttctcaccttgggaaggtgtcagtgttttcagttctaaggtaagaggtgtagagctgttcccaccagggctctgggacagactggaaaggaccacagacctggccatccctgggcagcagggccagtgtcacctgctgacctctagtatttcctttgccctagagctagagtcatgatagctgagggtcactcgccctgcaagagtcactaggcacccaccatgccaataaggctctccgctggctccctgcagttggctgggtgtttaatagtcactgaaaactcccagccctgctgcacactagaggcaggtcctctcggtcctctccatcctgtgcttctgtggcccccagcaagctcaccgcctccttggaggagagagacatacaaggacagtgggtcatgggtagtaccagcctcaaattcccacaggctcatactcagacaattgtattactgccttatgttttttaagtgtttttttaaattcttcatagttgagtattatttgcaattttattagttacagtgctattaaagaatatgtgctcctttttattatattatcagatacttatgtttaattgtacattttttaaatcctgaatatattgtgttttgttaacaaatgtaatcagtggaacccttcttacgttttgattattagcagttaaatacattttgtatacatgaagcttagattaattcccatcatcatcatctcctgtttttatatgtgtccctatgtgtttcatgcattcctctttgatcagattggaatttgagttaaaatttagctttgtacattacgtgtgagagttacagactagcaagtctaattactttgccttaccttgagtgtatgccacagggtcagataacacattaaacatttagttacactggattactcttccaaagctgacctcctgctaatgttcagaggtaactgcaatccggaaagaaataatatcactgcagaaagaatgtgactctaaaaataaaccaggacctccctgtgatttgccttgcctgcagatggaccagttgactcttgtggctggtcagccctgggggtt

SEQ ID NO: 369533 - DNA, 905 bp, Homo Sapiens
ggctggtaccggtccggattcttcggatgttcaacttatcccagattcctgagggtgaggtggtgacggctgcagaattccgcatctacaaggactgtgttatggggagttttaaaaaccaaacttttcttatcagcatttatcaagtcttacaggagcatcagcacagagactctgacctgtttttgttggacacccgtgtagtatgggcctcagaagaaggctggctggaatttgacatcacggccactagcaatctgtgggttgtgactccacagcataacatggggcttcagctgagcgtggtgacaagggatggagtccacgtccacccccgagccgcaggcctggtgggcagagacggcccttacgacaagcagcccttcatggtggctttcttcaaagtgagtgaggtccacgtgcgcaccaccaggtcagcctccagccggcgccgacaacagagtcgtaatcgctctacccagtcccaggacatggcgcgggtctccagtgcttcagattacaacagcagtgaattgaaaacagcctgcaggaagcatgagctgtatgtgagtttccaagacctgggatggcaggactggatcattgcacccaagggctatgctgccaattactgtgatggagaatgctccttcccactcaacgcacacatgaaatgcaaccaaacacgcgattgtgcagaccttggtttcacctatatgaaccccgaagtatgtccccaaacacgtgctgtgcgccaactaaagctaaatgccaatctcggttctttacttttgatgacaactccaatggtcattctgaaaaaatacagggaatatgggttgtaaaaagccttgtgggatggcaacttaactccaaaaccagaatgcctggggggaaaccaacat

SEQ ID NO: 369534 - DNA, 1235 bp, Homo Sapiens
gctgggtggcgaattcggcacgaggctcacgtagtactgacagtaccttaagagctctggagaccgtgaagaaagtgggaaaggttggcgctaatggtcagaatgctgctgggccctctgcagattctgtaactgaaaataaaattggttctccacccaagactcctgtaagtaatgtagcagctacctcagctgggccctctaatgttggaacagagctgaattctgtgcctcaaaaatccagcccatttctaactagagtaccagtatatcctccgcattctgaaaacattcagtattttcaagatccaaggactcagataccctttgaagtcccacagtacccacagacaggatactatccaccacctccaacggtaccagtctggtgtggctccctgtgttcctcgctttgtgaggtccaataacgttccagagtcctccctcccacctgcttccatgccatatgccgatcattacagtacattttcccctcgagatcgaatgaattcttctccttaccagcctcctcctccgcagccgtatggaccagttcctccagtaccttctggaatgtatgctcctgtgtacgacagcaggcgcatctggcgcccacctatgtaccaacgagatgacattattagaagcaattctttacctccaatggatgtgatgcactcatctgtctatcagacatctttgcgaggaaagatataactcattagatggatattattcggtggcttgtcagccaccaagtgagccaaggacaactgtgcctttaccaagggaaccttgtggtcatttgaagaccagtttgcgaggagcagataagaagaaaagccagatcagtggggcacagtacccacactcagaaagcacctcttgtctcttcaactcttcctgtggcaacacagtcaccaacaccaccttctcctctgttcagtgtagactttcgtgcggatttctcagagagtgtgagtggtacaaaatttgaagaagatcatctttcccattattctccctggtcttgtggcaccataggctcctgtataaatgccattgattcagagcccaaagatgtcattgctaattcaaatgctgtgttaatggacctggacagtggtgatgtttaggaagagtacatttattttgaacccccgaaaaggcccaaagaaagaaaaatcccaaaaatttcccctttttggggaagggaacccttttttctcaaaaaa

SEQ ID NO: 369535 - DNA, 1091 bp, Homo Sapiens
  misc_feature (11)..(11): n is a, c, g, or t
  misc_feature (1014)..(1014): n is a, c, g, or t
cctggatctcngaaccacacgttacaagctccaggcgagccagccccaccatgggcagaaatgagaggcccccacccaccatggacagaggtgagggggccccctcccggtatcgtccccgagaacgggctcgtgaggagactcaacaccgtgcccaacctatcccgggtgatctgggtcaagacacccaagccgggctaccccagctccgaggagccaagctcaaaggaagttcccagttgctaaccaggagctgcctgagcctgtgtcctcaggtgggaagccacatttaggcactacgcatgtttttctagcttagattatctatgttatctcatcctttcagccatcccgccattctagtggcgtttagtatcttcacctatattattgtcatccgtacgactttaattactttcgcccgcccccatacttataatttcacataacttttaatttatctttacgcgattctgacaatagattaacccaacaattattactaaagacccacatgcttcacatatcccatatctatatcattctgtcaattttactatactttgtaaatagtctattgaataacgcaataccagtatcgatatatcatatttgtttcgaatctcgcatttcattctgttcttcaatgcgtattataacttaagcatatctaactaaaatatatacacgtgatgaatcctattcgcttccactgttcctcatcccctcttcatatatacagccatccaattaaagattttatcctcgcccatccttggtgcgtataaataagaaacaatcagaagtggacatgcatgctcgctatatttaataggtcacgtccccattctcgacctcctgatgcctaaagactaatactccagtgtaatacactcgcgtcatagatattttcacgacttagtctacctctgacgcggatagtatcagccgcaccaatatctgatctatatatgtaagaacgcggattttgataacttatgtcaatacctgatncgtctgcgttaataaactaactttaaccaattactatatattaacacaagatgacgttgatccacagataaataatg

SEQ ID NO: 369536 - DNA, 740 bp, Homo Sapiens
tttcccgggattgagcgtggctgcaggcctcaagatcacccatatacactggcttctccaagaacaatacactggccgatgacctgcagacgtcctccaccgaggaggaggttccctgctgtggctacctgaacgtgctggtgaaccagggctggaatgaacgctggtgccgcctgaagtgcaacactctgtatttccacaaggatcacatggacctgcgaacccatgtgaacgccatcgccctgcaaggctgtgaggtggccccgggctttgggccccgacacccatttgccttcaagatcctgcgcaaccggcaggaggtggccatcttggaggcaagctgttcagaggacatgggtcgctggctcgggctgctgctggtggagatgggctccagagtcactccggaggcgctgcactatgactacgtggatgtggagaccttaaccagcatcgtcagtgctgggcgcaactccttcctatatgcaagatcctgccagaatcagtggcctgaaccccgagtctatgatgatgttccttatgaaaagatgcaggacgaggagcccgagcccccccccagggcccagatgaaacgtcacgcctcctcctgcagtgaaaaatcccatcatggggacccccaggtcaaaagtaaaaaaccacatccttcagggcccaaattaatacaattttccggcaagaagcggaacctaggaggaatccccggaagaaaattgggcatc

SEQ ID NO: 369537 - DNA, 911 bp, Homo Sapiens
gccactctccgagagccctagctcccctgcctacagcactgtaacccgtgtccatgccgcccctgcagccccttctgccacagcattgcctgcctcccctgtcgcccgccgttccagtgagccccagctgtgtcccggaagtgccccaaagacccatggggagtcagacaagggcccccacaccagcccctcccacacccttggcaaggcctccccgtcaccatcactcagcagctacagtgacccggactctggccactactgccagctccagcctcccgtgcgtggcagccgagagtgggcagcgactgagacctccagccagcaggcaaggagctatggggagaggctaaaggaactgtcagaaaatggggcccctgaaggggacttggggcaagaccttcacagtccccatcgtggaagtcacttcttccttcaacccggccaccttccagtcactactgatccccagggataaccggccactggaggtgggccttctgcgcaaagtcaaagagctgctggcagaagtggatgcccgggacgctggcccggcatgtcaccaaagtggactgcctggttgctaagatactgggcgttaccaaggagaatgcagaccctaatggaaatccctccggtggcatgcaaatttgctaatactcccccgtgggaggttagctgcccccaagatattgcctagtttagttccaatatacacgccaccgtaaatcggactaaacaatgcaccctggacagcaattttacccttacgtggattaactagccattaactttcccccattaatagcagatttacaaacatcaccctaaaccccagcaataaacaaattattttcagcatcggttattttagacagacaggaacctgaacaaccttaattaacaaacac

SEQ ID NO: 369538 - DNA, 926 bp, Homo Sapiens
attccctggatcaaaacagcaggcggagaccgtgctgacttctggagattcagaggtcttcgcagctccaagagaaatcttcgaaaaagcagagaggatttgtccgctcagcctgttcaaacaaagtttccagcttatgaaagagtggttcttcgagaaggtagtttattttctacagactaacctaataccctttaacgtcaatatgtttaagaaagaaaaggtataaaatatgctgtttttcatgtgaatttctctccagctggatttctgaggcctgtaaccatttttggaccaatagctgatgttgccagagaaaagctggcaagagaagaaccagatatttatcaaattgcaagtaagtagcctcaaggctaacttaaatgaggttgggagttacacctctaaagtgagtgagttctgattcactcattcaataaaaataagactttttgtcagtgaaaaattagcagtttatcccattcttttaatttggtgagaaaaccccagtgaccatgtccttgttccaccaattcttttaatgagaaaagtcaccggtttaggaaactcttggcttcataggaaaattgcataacatacaatgtcattgaatccctcccagtcatgctctgaagtaaggagtataatattccatggttaccgttgaagtagcccggagaccttggatgggtctttgggcggaatccttttccggttttctacaagttcaaaccttcccgggtgggcccctacagggaaccctggggccccgcacctcgggttatgaataacagtccccatttcgggtgctccggtatccgggataccgttctaactccatagaaccctggagatagttacaacgaacatccgggtttatagatcggcataaaacatcagaaagatggacataactcattgatcaa

SEQ ID NO: 369539 - DNA, 1204 bp, Homo Sapiens
  misc_feature (752)..(803): n is a, c, g, or t
ccggaattcctgggatgttgctattccagtcaatcatgtcgagtcactggactctgaaaatcctattggttcctttattttatttgagtttagagttcccttctgggtttgtattatgtctggcaaatgacctgggttatcacttttcctccagggttagatcatagatcttggaaactccttagagagcattttgctcctaccaaggatcagatactggagccccacataatagatttcatttcactctagcctacatagagctttctgttgctgtctcttgccatgcacttgtgcggtgattacacacttgacagtaccaggagacaaatgacttacagatcccccgacatgcctcttccccttggcaagctcagttgccctgatagtagcatgtttctgtttctgatgtaccttttttctcttcttctttgcatcagccaattcccagaatttccccaggcaatttgtagaggacctttttggggtcctatatgagccatgtcctcaaagcttttaaacctccttgctctcctacaatattcagtacatgaccactgtcatcctaaaaagcttctgaaaagagggggcaagagccactctgcgccacaaaggttgggtccatcttctctccgaggttgtgaaagttttcaaattgtactaataggctggggccctgacttggctgtgggctttgggaggggtaagctgctttctagatctctcccagtgaggcatggaggtgtttctgnnnnnnnnnnnnnnnnnnnnnnnnnnnnnnnnnnnnnnnnnnnnnnnnnnnnatggccccttgagctctttgtaagaaaggtagatgaaatatcggatgtaatctgaaaaaaagataaaatgtgacttcccctgctctgtgcagcagtcgggctggatgctctgtggcctttcttgggtcctcatgccaccccacagctccaggaaccttgaagccaatctgggggactttcagatgtttgacaaagaggtaccaggcaaacttcctgctacacatgccctgaatgaattgctaaatttcaaaggaaatggaccctgcttttaaggatgtacaaaagtatgtctgcatcgatgtctgtactgtaaatttctaatttatcactgtacaaagaaaaccccttgctatttaattttgtattaaaggaaaataaagtttttgtttgttaggttaata

SEQ ID NO: 369540 - DNA, 949 bp, Homo Sapiens
gaggtggcagtccctgcagaccctgccaacctggattctgaggccaagataattcagcaggcaggacaggtgtggttcccagactcagcctacaaaaccgcccaggccatcaaggacttcaaccgggagaagttgcccctgatgatctttgccaactggagggggttctccggtggcatgaaagacatgtatgaccaggtgctgaagtttggagcctacatcgtggacggccttagacaatacaaacagcccatcctgatctatatcccgccctatgcggagctccggggacgctcctgggtggtcatagatgccaccatcaacccgctgtgcatagaaatgtatgcagacaaagagagcaggggtggtgttctggaaccagaggggacagtggagattaagttccgaaagaaagatctgataaagtccatgagaaggatcgatccagcttacaagaagctcatggaacagctaggggaacctgatctctccgacaaggaccgaaaggacctggagggccggctaaaggctcgcgaggacctgctgctccccatctaccaccaggtggcggtgcagttcgccgacttccatgacacacccggccggatgctggagaagggcgtcatatctgacatcctggagtggaagaccgcacgcaccttcctgtattggcgtctgcgccgcctcctcctggaggaccaggtcaagcaggagatcctgcaggccagcggggagctgagtcacgtgcatatccagtccatgctgcgtcgctggttcgtggagacggagggggctgtcaaggcctacttgtgggacaacaaccaggtggttgtgcagtggctggaacagcactggcaggcaggggatggcccgcgctccaccatccgtgagaacatcacgtacctgaagcacgaactctgtcctcaaaaccatccgagggcctgggttg

SEQ ID NO: 369541 - DNA, 948 bp, Homo Sapiens
  misc_feature (732)..(744): n is a, c, g, or t
  misc_feature (852)..(862): n is a, c, g, or t
aaggtattggggcagaggctccccaaattggggtgatcccccaaggagtgatacatatattgtgtatatatttacagctgtattgtaaaagtggggtccctgtccccagctgctcctggggagtagaagcaataatgtatttctaatttgtgggtcccacttcggctatgcgggtttctagggggtgggggcttgggaccaaagccttgccccgcccctatgccccttgggggttttggctgtgtaagggggtgaaggactgcccctcccttccgagacccctccttcctggtttctgttcctttttcctgactcacgccgcccccgggctggcgcagcgaagggtgtgggacagggtaaggggttggaagagccttgtggagagcgggcgagccggcgccatctggcggccatgctctgagtgggcgagcgccccccgcggccactggagcgagctgtcttcacgctcctcatccaccccagctggtgagcggcgcccccttgccaaggcagtgggcacagaacttctcgcttggccgcaggggaaggggctgcggacctgtgggaaagtgatccccttcccagatccttgccagccgggcttcctgtcaggcaggggagaataatccccactctgctcttaggattgaatccacccccattctgtacatagcctcttctgttggtcttgttgaaatctagtttcagatttttaactacccaattctgctnnnnnnnnnnnnnaaacccccccctgtccgcggcgggggtgctgggaacccctttttgcaccccgggggctcctggcctgggcaataattttccccctttgcctgggccctggacgggctnnnnnnnnnnntcctttaaaaagggggcaagggtttcagaggggggcccggggggcctcctttccctccccttttccaatgccaccccccccagtgc

SEQ ID NO: 369542 - DNA, 867 bp, Homo Sapiens
  misc_feature (782)..(792): n is a, c, g, or t
gaactccgtgacctcaagtgattcacccaccgttggcctcataaacctgttttgcagaactcatttattcagcaaatatttattgagtgcctaccagatgccagtcaccgcacaaggcactgggtatatggtatccccaaacaagagacataatcccggtccttaggtagtgctagtgtggtctgtaatatcttactaaggcctttggtatacgacccagagataacacgatgcgtattttagttttgcaaagaaggggtttggtctctggtgccagctctataattgttttgctacgattccactgaaactcttcgatcaagctactttatgtaaatcacttcattgttttaaaggaataaacttgattatattgtttttttatttggcataactgtgattcttttaggacaattactgtacacattaaggtgtatgtcagatattcatattgacccaaatgtgtaatattccagttttctctgcataagtaattaaaatatacttaaaaattaatagttttatctgggtacaaataaacaggtgcctgaactagttcacagacaaggaaacttctatgtaaaaatcactatgatttctgaattgctatgtgaaactacagatctttggaacactgtttaggtagggtgttaagacttacaccgtacctcgtttctacccagaaaaagaaatgggccatacttccaagaactgcaagtgcttatgaagggtgaatatttagggcctccctggaatttttttgaatgttaaaatggggccannnnnnnnnnnaaaaggggaaggggggttttaaattatacacctttttaatggttgtaaacctttttgaaaaatgggggtatttta

SEQ ID NO: 369543 - DNA, 645 bp, Homo Sapiens
agcggactctgaaagcagtcttcacagaaacttttcacagaagtcaaatagttaaagcaaattctagatacatggtagagaccaggagaaaatatgaataactttcttctaaacaaggagctcagtggataaaccatacctctagattccttgcttccattttcccagaaacaagatgaggaagagaaagatcagtgtgtgtcaacaaacttgggccttattatgcaagaactttcttaaaaaatggagaatgaaaagagagtccttaatggaatggctgaattcattgctcctactactttgtttgtatatatatcctcatagtcatcaagtaaatgatttttcttcactgcttaccatggacctgggacgggtagatacatttaatgaatccagattttctgttgtatacacacctgtcaccaacacgacccaacagataatgaataaagtagcctctactccccttcctggcagggaaaagaggtcttggggactggccagatgaagaaaagtatttaaagaattcccagccaaattaccccggaaaaaaataagtaagaattcccccttttaccaaataaccataccccaaaatccattttgaaatttcttgggctaaggaaatggggaaatggccccccc

SEQ ID NO: 369544 - DNA, 1188 bp, Homo Sapiens
aagtggcgccaacaaatcggtcgagctcgaattcgtcgagagcgaggaagccctggagaaggaccaggagaggttagaatatgaaatccagcagctgaaacagaagatttatgaggtcgatggtgttcaaaaagatcatcatgggaccctggaagggaaggtggcttcttccagcttgccagtcagtgctgaaaaattacacctggttcccctcatggatgccaggatcaatgcttacattgaagaagaagtccaaagacgccttcaggatttgcatcgtgtgattagtgaaggctgcagtacatctgcagacacgatgaaggataatgagaaacttcacaatggcaccattcaacgtaaactaaaatatgagcggatggtttctcgctctttgggcgcaaatccagatgacctgaaggacccaattaaaattagtatcccacgctacgtcctctgcgggcaaggaaaggatgcacacttcgagtttgaggtcaagcttgctgcccttgaatttcctccaaagaaactatttggaaatacaggatgaacgtgtgattgctgagagacgaagtcacttagagaaatacctcagggactttttcagcgtgatgctccagtccgcaacatctcccctccacatcaacaaagtgggactgactctctcgaaacataccatttgtgagtttcaccattcttcaagaaaggagtcttagactacagcagccacgggacggggtagagccaggggtgatggaggaaccaccacagcagtgcctactcgtcgaagcgggctccgatgcagggcaagctcccccatgcgaggatccgggtctgcctcctcctgcctgaagacacgacatgcagcagcgggcccgggccacctcacgtttccataactagtgcctgagtttggggatgggatgccctgcctgctgatgtggcccctgaaaggaaaccgtatacggttccattggcgggtgaacgcggggcttttttccacgagtgctttccctttagcctgggcccaccaaaactatgtccctcgggagttaacacacgctaagatgattcggggttgggggcgcggttttcggagatatcaagcaccatgttctatcatagttatgaacatgaattttgtgtttgagggaacagacgtgtttgaagatgacgaaagaaccagaattg

SEQ ID NO: 369545 - DNA, 760 bp, Homo Sapiens
ggtagaaaagattcccgtgtgaattgggggtgtggaaagtctaaaaaatgtatgctgtaaaaattggctgcagtgtaatttggcattctctttaaactgatggaggtcacagtattttattattgggggtcctcaccacaggaaacactgcgatacaggggcaaaagagatggcagtgccaattaaattaatacaacaaaatcaatgcagcaccaaccaagactgccaggtctggtgtcatgggtatgcccagagcccaggagttcagaagggccctaagcctgatttaatgctctgctgttgatgtcttgaaattcttaacaattttggaacaaggggcctgcgttttcacttcgcactgggccttgcaaattacatagcgagtgctcataaaagaactcagaaacgtggtacctctcttcctggtggatacaaataaagaaatctggatccaaagttgaaagttgctggcgatatcattcaagtaggactctaaatagtggattaagatgagggtgggcctggggtgaagattctttccagctttaaaagaaagtgacttcaaaaactgcatgcaaatatcgacgatggtttctgctggaggaacagacacagctcgtataccgacaggcttctttattaccggacttgatatattgaccttcaacctgctgagggacctggacctaacgcctctccagtgaccgggaattccatctcaggtccctggaactgcccatcctgcacaagaacgccttat

SEQ ID NO: 369546 - DNA, 641 bp, Homo Sapiens
  misc_feature (14)..(14): n is a, c, g, or t
  misc_feature (51)..(51): n is a, c, g, or t
  misc_feature (65)..(65): n is a, c, g, or t
  misc_feature (73)..(73): n is a, c, g, or t
  misc_feature (273)..(283): n is a, c, g, or t
gaacaattaaaaancaggccttagggccccttcctgaaacccccgggctcngggcaataccccangacaccanacctggcagtctgggtgggtgctgcattgattttgttgtattaatttaaattggcactgcccatctcttttgcccctgtatcgcagtgtttcctgtggtgaggaccccaaataataaaatactgtgacctcaatcagtttaaagagaatgcaaaattacactgcagcaaatttttacagcatacattttttagactttcnnnnnnnnnnnttcacacgggaatcttttctacatcattatagtaattaaacacggtggcctttcaccatatacatattttcctgtaaatatgacaacctggaactagtaactgctactatccacaatgcttttaagttagccaagagtgagacttccacaacaaaattatgacataatctctcatgtccttataaaaatagccaaacataccctaaatggcttactgtgaaaatttgagtagtaacttcttaatattgaaaaacattattttcatggaaatattgtccttctactaagtgttttatgttaacatcataaggcaaactgtagcatttattggtacctggagaccgtgattttaaaaact

SEQ ID NO: 369547 - DNA, 809 bp, Homo Sapiens
  misc_feature (506)..(528): n is a, c, g, or t
tccggatctggggaccagaatccaaacggcctcaagtggaattttaaaacctagcctgtctcttttccctgggatccctctgtcaaccccacgccttttaggaaaaagaaaagtgagtgaacagcaaggaagagtgtttgcacagtacagtaacatttggttgttcttaaggctcttttcttacaaaaataagagaccctccaaccacgggctgtttaggaggacgcctgcttgggtctccaaatggctggggtaggaatggttgttggggcagagccagtggaggtgagtgaccctgagactaatgaacatcccacctaaatccagtcctccccttggatctgcctttgtcctgcttgtgtatccaggcaacctcttttcaagttggtcaggctttggacaggtgagtgatttgctgtatgtgtttgtttctctgcgttacctgggggtgccttgattaaaatcgaactttattacatactgatttctggaacaaaacagttagnnnnnnnnnnnnnnnnnnnnnnncccgaacaaattacgagggccatccgggctatttatccttctgaagtttccccaccattgaacttcgggcttcaaaaaattgatgcctcccatgggaaaaaacctgaactctgggggtggccgcccaactaaaaaggttttgccaagtaaattttttttaaacgggtcttttttcaaaaagggtttggccgcccttttttaaaaaaggccccctttaataattccgggggagggaaaaccccctttaaaatgggggttttttcccccggggggagggggag

SEQ ID NO: 369548 - DNA, 908 bp, Homo Sapiens
  misc_feature (125)..(125): n is a, c, g, or t
  misc_feature (167)..(167): n is a, c, g, or t
  misc_feature (815)..(815): n is a, c, g, or t
  misc_feature (818)..(850): n is a, c, g, or t
gggatgaaagtaggtcaacatggcggtaggtttaatctagataagctgaaagatagattgctatcaaaaacagttccccaagatgtgcatagccaaactgggatagaaggcaaactcccccaaangctacctgctggttttgaaaaggggtggttaagaacatggcnaattccccaggagtagtagaaaataatatgccctgactaccaacagctcaagtatgcttatttgcacatcctagacttggtgtctgtaagactcagttaccacttttattttcctgtacctaggagttagcaaaaggaactggggccttccagccgagccactaaacctgtcttatttggaatggggattgtccagcaaagggagcaaacatgaattagatgttaagctattgagctgaagaaaagaaagcagttcacatttaggtgaaatagatgatgttatcaggaagccaggttcccaccagagtcggtgcttggtacctggtctctccagtctcaacagactcaggtcaggtctctcacccaggaagcaaccactcaataaaatagagaacatctgagaattacaaatgtctatgcttgattgctcctctaaatccagtgcataggttaaccctgcatgcccatttcttcctgggcttcttgatggcaatgtgttcttaaataactggtcttgtgttcatgctaaagacaaacttacatgaagtttttcagtttaagacattctagtgaatggctgctatgtgtttctggcactcattcctaaccaagtctttagagatttcagatgacccttaaagatggcantannnnnnnnnnnnnnnnnnnnnnnnnnnnnnnnnggggacaagagttggcgcccgttcgcccgggtgggggtgctgggagtgcagtggtgcg

SEQ ID NO: 369549 - DNA, 979 bp, Homo Sapiens
  misc_feature (54)..(54): n is a, c, g, or t
  misc_feature (135)..(135): n is a, c, g, or t
  misc_feature (901)..(937): n is a, c, g, or t
aatccagggcttcaagaggggtggcagaaaaaaaggctccaattttcttttccntgatttcggcaagccctctgaaacatgcccagtgtctacaaagataaggggcaaaccaagggttgttttaattccatcctnttcagcagcctttagttcatggctcagggattcatgaaaacccacaactccaaatttactggcacagtaatcctcaactccggcagtactgaacaatcccaaggaacttgcaactgtcacaatatgaccatgattaatctccagcatcgtaggaagaaaaagccttagtggtccagaagtgtgcatggcaattgaccatcatggttctctcaatgagctcatcaggacattccagaaggtgatgcccagagaccacaccagcattattgaccaggactgagacttcgccacacctccttgcggactctttcagccgtcaggtagacgttctccctcttccccacgtcacaggtgtaggtaaaaacctgcaagttacagtggggcagaatttcttcctcaccattcccagcttgcagcgcagcggcgtcggccgcctccaggtcgcggtagatgtggcgcaccatgccagccgtctcctcgttgctttgcgtgttgatgtcccacagcaccagcagcgcccgacgccgggcgaactccagcgcgaagaggcggcccaggccgctgccggcgccggtgatgaggcacacctggcccgccacgctcttctccttgggccgcaccagccagcgcgccgcggccagcacgaacgcccagagcactttgaaagtgaccacgaagaactccaccacgatgttcatcgcgacgcccggggccccgcacgagccccgctctcgacgaattcgagctcggccgatttggcctgatnnnnnnnnnnnnnnnnnnnnnnnnnnnnnnnnnnnnncgccgccaccgcggtgaatccaggtcgctatagactacacct

SEQ ID NO: 369550 - DNA, 1019 bp, Homo Sapiens
  misc_feature (927)..(943): n is a, c, g, or t
tatagggcatagtgagtttatgtaggcgggtagtgtgaggcttcacacagtggggttagaacaagatcagcgaaaatgcgcattattgtggggctttttcaataaccacaggttgggggcgtctcattttccatactgggcgacaggttattcgtataagaaccccacacgtgttgaccatgacggtggataagtttgtgtttacgtgtggacccgccgcctgcccgattggttattctgtaccccttcttttttctaccagatatgagttgtgctttgtatgaggaccattagattttgggacccctttggcagaaaaaattgtatgggtattccacgcattttaccggtagggaacatgactccctttttccataggagtgaagaggtgtcaatcgcttagatatagtgctttgggtacatttttggtttagggccaagggttacccacaaatttagagtttggtcagttgagttatttggcaagggttctagggggcgtgtcaggcacacccaggtgccatcagaattcttctggggcagaaattttagaaattagattttgttgtccaggtatactcaagcaagagtaagaagcactggccctcaaaaacactcgagagacaatgggaaagaaaattttcaattcctatgtccatgttgtcttaaacatcacatcttctaactttatgatcaatgcttgtgattctcttcagaatgttttccagaataatctaagtaaaatgtctgtgggaaacaaaacagctgccactgaacctcaacatttatctgtatgcattatgtcaaggcgtgggagggggatgtacgtgtgcacagaaattcacacaaacacacagggtcacatgtatctgaaaatgccaatgtctgccctcgagtaccttacaatttgcaggtaaaaagattccnnnnnnnnnnnnnnnnngggaaacacggccctgctctgtcatgcaggctggagtgcagtggtgcaatcacagatacatgaagccttggtctcc

SEQ ID NO: 369551 - DNA, 1054 bp, Homo Sapiens
gggctgactgtgatgatggtaactccccaagtgtggaggtaccctgtgggtgcagcccagagcctcggaggaggaagacagctctctgcccccaggcaggtcccctgggtgccagggtcagcaggggctctgaggccaggagctacagcagcttgacgtagttctgtggaatcagccccctcttgccgttcagagtcccttctagccagccaggttccctggaggtttgtacatcctcaaaaaattgctcctatttcaaaagataattccgagctgtgttctgcttcacacggatacacggctcgagccttccgactgcggatgctttcaggtggcttgtccgctacagtagcaggaggagaaaaggggaaaggggacgacccgggtgaaagaggtgtcacagctgagttggagcttgttgtggttggagactgtgggttaagccactggaccatagacgatcgggtctggcctgggatagtggatgcccagtctccaaagctccctccatctgccagaaggtggtttttgtctggtccaggaggcccagggacagctgtagtcacgggagacggggaggaaagtgagtccagactgctggtaggggtgtcctccttggaagggtaaggattgtcaccatcttccagctccagacaaagattgtagacggccacgggcctcttggttctctggccttgtctcttcgactgccttggtggcgcatttgggggtgatgctgacaggcaggtgggctcagggaatgtagtatcgggcggcgtccgaaaaatcttttcatggttttcaattaagatttccacaacaatattctgaaacttcaagtccatgagggcagcgacagtttcttcctgtggcctcatcagagttggtccaaacaccactcctaagtttgccacagtcatcaggttctgcttggagtgatttgaaacatttgttaagtgtttcaccaaaatatccaacatctctttattcttctctggcagtttgtgtaccaagaaatggatcgcattaacacgagattctgggctgccgcttt

SEQ ID NO: 369552 - DNA, 534 bp, Homo Sapiens
  misc_feature (33)..(33): n is a, c, g, or t
  misc_feature (50)..(50): n is a, c, g, or t
  misc_feature (79)..(79): n is a, c, g, or t
  misc_feature (88)..(88): n is a, c, g, or t
  misc_feature (250)..(250): n is a, c, g, or t
ttaaccactggaaccataaacgaacgggtctgnccctgggaataatggangcccaaatctcccaaaactccctaccaanctgcccaanaaggtggtttttgttctggtcccaggaggcccccaggaacagctgtaatccacgggaaaacggggaggaaaatgaatcccagactgcctggtaggggtgtccctcccttggaagggtaaggattgtcaccatcttcccagctcccagacaaagattgtaagnaagccacgggcctcttggttctctggccttgtctcttcgactgccttggtggcgcatttgggggtgatgctgacaggcaggtgggctcagggaatgtagtatcgggcggcgtccgaaaaatcttttcatggttttcaattaagatttccacaacaatattctgaaacttcaagtccatgagggcagcgacagtttcttcctgtggcctcatcagagttggtccaaacaccactcctaagtttgccacagtcatcaggttctgcttggagtgatttgaaacattt

SEQ ID NO: 369553 - DNA, 418 bp, Homo Sapiens
ccagaacccaaatcatcctgaccgctagggtgacctaactagggtttcttaccaaaagcaaaggcatttttaaagttcgtgacatttaaacaaaagagcaaataccaatatctaccactttgtcaggctaaaaaacccaaacaaagccaacagccagaagttaaaataaacagatcattaggttgaaaatagaactgtcaaaacaggcacaattgacatcatttagtgattgcaaagaacgtcaggcaagacacaggtgtggtcatcataacatttatcacatgcttaattgcacatgtttgactaagaaaaacacaaagtatttaagctcatctgtagttcaaagtgcctatccgtgtatttatctattcatcctgatttatttattgagcaactcttttgtgccaggcactgtgct

SEQ ID NO: 369554 - DNA, 842 bp, Homo Sapiens
  misc_feature (422)..(422): n is a, c, g, or t
  misc_feature (832)..(832): n is a, c, g, or t
tccggaattcccgggatggggatttgcacagggaggtaagctggtgtcatgctgagcatgcagacgcatttgctccctggatgcatagcaggtgattctgccagcatgcaccagtgcagccttaccagttgtttacatccagcatctgttctgattgtcagcatctgtcccatgctgcttgtcacatatctggagtttcactctgtgtagatgagctgtcattcaggacactaggagaaaaatctgagtgggtcattgtgcccatatccacagaaaatgcagaagttgaacagcttgcttgacaaccctcaaacatctttgagcacctggtacagatgtttatgagaatactctaagatctcaacccttgatcccaaaggcacacaatcacagagcattccttttgactgtaaactgtttanccttgcttttgagagcccaaacattgtaccccaacccggaaaaagtaactacccccaattaaagtgcctcatgtgtccccagagcatggcttaacttcagggacaatcacccagggaactaataactaaccagttgttcaacagcgggttaagctcagcagttttcacagtagagcagaagtccccaggaaacaaagggttagtcattagctgagatgttgattttaaaacaccttgaccttaacttttttacattattacttttaaatctcctttgggattggggaggctggccaaaataagtcttaaaactgcttatgtcatatttggattttaagttcatgacattcggaacagcaaagccatatatgcaatgtttttatgccattaaatgtctgattccaattaanataaaaaaaa

SEQ ID NO: 369555 - DNA, 901 bp, Homo Sapiens
aattcccgggataattaagtaatatttcatttctgatctggtagataaagaaaatcaagctaggcaaatccagtagacaaggaaaattaagaaaaggaaaacagtatgagtattgcctatattcagaagactataccgtattccggaaaattaaaggagtttcaaataattagaacgtaatgtttggaatttggagcagtattggcaaagtatagactggagaggtgatcaggacctgttgatgaaggactcaggaagcctggaaaaggcatttgggctctaccctgaagtcaaaggattatcttttaagaaggctgagcataaattgatttgcgtgctagaaatattattatggtgactttataaataataatttggtggggtgcaggtatacttgcaaggtatataatagctatacgttcaagcaacaatgagaagaaggctgttgcaagaagtcaggtggtggataatggtggccagaacttgagtaataacagtgaggatggagtgaaaaacaaggataaatttgagaggtatattttgaaagccaaattcatggaatatagaggttgattggtgaccaagacatccttaatattcccctaagcttcactaaattttataaatggttcctcctgaccataagcgctacacctcccttactctagaaccgcccctttcccaacctcaaatacgtgaatctttaatctggagcccttccgggcaagttatcggtgtgtcatacaaactctttcctaccatttcttaataccatacgggtctttatgaaggtaccaaggaaagtacgccgctcggaacatattaccccatccggaatgccgaagctagggatcccaatagcataaaaagagccagaataaggggggtccaaaactcaaag

SEQ ID NO: 369556 - DNA, 1116 bp, Homo Sapiens
aatcccctacttcacaggaatgctaagctgctattatttgattataaaattggagatacattccttgtgaaaaagactggctctaagatgtaatttgagtattctccaaatcacatatttaaaggaaaaagagataaataacagcaactaaaacaagttttacaaatgactacaaagtaattatgtttcttttcgtggctttttgctttggcttaaaggtcagcatgaaaacagatgagagttaaacttagaactgagcatatcaggtagagaatcacttaggttccatcgaacacccactaccagccaagtttttgggtttactggtcttaaaaaaagatatatgcccttctgaactgagggaaagaagggggagatgtaggaaaacactgaggaagtgacagcaaatgaggtaactggtgaaagtgacagatggaggatactcactggaatacagctggagtgacaagagcacatccaaagtcctgcctaacaggtgagttgggaggaaagtttacagtcaaagtcaagtataaccctccaccacattcttctctcccgtgttccacatttcaggcaaatgaacaaaggaggcccctgtgagtgtaaaacagtccagactcctgatttctgtccccagctctgtctgacccactcctcttctttgggcaggtcatttctctccgggcctgagtttccttactttttaaatgagagaattaaactttgcaatctccaaggccccttctcactctgaaaacactatctacatagtcagatataatcacacatccccagggtcctgggatcattaaaagttcagtccaattaacagaacttggtggtaaagaatggtaattaagttgcccgggtcaatctgacacaggaacctttatggtattcctacttgtttttgtattatccccgttaaacctgggtcaccgtttctttttgaaattattcaaaaagaatctttcaacttgactcacccttgtaattttatatttttgacggttcgtttctttttcttacgctttaccccataactggggaaaagaggggactcctaatatagaaataaacggttgtttattgcggtaaaagaggaatattttc

SEQ ID NO: 369557 - DNA, 1037 bp, Homo Sapiens
  misc_feature (184)..(211): n is a, c, g, or t
  misc_feature (288)..(288): n is a, c, g, or t
  misc_feature (308)..(308): n is a, c, g, or t
  misc_feature (315)..(316): n is a, c, g, or t
  misc_feature (321)..(321): n is a, c, g, or t
  misc_feature (323)..(324): n is a, c, g, or t
  misc_feature (369)..(369): n is a, c, g, or t
  misc_feature (395)..(395): n is a, c, g, or t
ctcacccacattttcttttcacaaaggcccccataaggggtgttctctttttcttcccccccggggggagaggttttctcggtggaggtttccccaacagtgggccccttttgttctttttttataaaaggaaaaggggcttttttccccacacaggtccaacgggccaatttttaaagggtgnnnnnnnnnnnnnnnnnnnnnnnnnnnnggaatgttctaaatggagtccccggaatttccgtggaacagggtttggcccccacatttcaggaacattcaaaaggngagtctttccctgtctgganattctcnngaagngnntacaagggcaagacttctgcgctgaaggcccttgccacagtcaantgcatcccataaggttttcttctccnagtgtgagttcgttgatgtatgttgagattgcccttctgaatgaagccttttccacattcactgcatgtatgaggcttctctcctgtatgagttcgctgatgtacaacgagtagttgattttctggagaaagctctcccacattcgctgcattgatggggcttaattcccgtgtgaatcctttgatgttcagtaagctcagatttcctggggaaggctttcccacattcactgcacccgtatggtttctctcctctgtgagctctctcgtgttcagtgagcctgtacctcttgtagaaggctttcccacacaagctacacacgtggggtttctctcctgtatgaattctcttatgctcagtgagctgagacttcttgaggaaagctttcccacagtcagtgcattcatgggctttctctatgttgtgtgtttcctgatgtttaaggaattgtgacttggtgctgatgggttttctactttcagggaattcaatttccgtaggcatttgttcatgattatcatggagaaaagctccatctccattaaactcagcaggctcctttctgttgtatcttctgctctggttggttaaacctaaatatgatttcaaagttcttccgtgttcatagcgttgtcccgtcc

SEQ ID NO: 369558 - DNA, 927 bp, Homo Sapiens
ctggtacggtccggaattctccgggatctagatcgttacagcttcagggaattcatattttgttatgtgtaggatactcttaaaatgtaattcattaaacttttacaatctgaaagacagggtttttaactaacatgagaccaaaactatgttctttgattagttttagatagtataatcgagtttattaattcttctgtgtttcttcactagccagtccaagctacctatgcatttgacccaaccttatttattattgtacagatgaagcgaattgactccctttagccaactgctaatggatcgaatgtgctttttattgtaattcaacagctatagagagaaagataacttattgtgtgtttgatttcagggagagagattttctttggtcatccataatagagattgataagatttagcaactggtgttggagaaaaaaagaaaagcaaatgagtgttttcaggtttttttgcattatatgcatttatgtaatgtttctgttatcagcaatgtgcaattattttattgagaggaataaaaaagctttctatgagtttggtatggtgcgaggaaaatcttacagtttgaattatgacctagaaatttttcattcccatgtctacctaagaaggaagcagtaaatccataatttaccttttgggcaatgcttttgtgagcaaaacaaagtcacttctgccataacatcttgaatttaaccatatatgccagattactttatatgcatcaacaagatcaccagtgaagtttaatctagctaaacactgggccctgctcctgagatgggaatcctatgtgtttgggaaaacgtgataggcacaccaagaatgagtgggctttggtatcgccccaaaagagggtgcttggtccagatttcacatgcaccatgaattggcctgggggat

SEQ ID NO: 369559 - DNA, 1026 bp, Homo Sapiens
aaaaataaaaattgcctaaatttcctcccctcttttctttaggggtgtagaagaaaggcccagaagggccccaaaagggaaattatttgccaaaataaccccaagggttcacccttgtacaggagttggcagaaataagggttggaaccaaaggactcttttctctggaacagcttgcacctacaatcctttccatcttgcacttacaatccactcgaaccactgcagcatggaggcagactccttgccaaacgggtattgtcgagagcttcttcctaccatcatttgtgagtttcatcagctcccaacccctttgtgtctcagcttctaaactttctttctttgaccagaactcagccatagtagaactggatttatggatggaattagagatatgtcttatctgatgtgacaactccaaagaatcggtagtgctttagagacatcagaaggctctacagaactcaacaagagtaccatgtaaaattcatgatgtctggatgtgtgagggatagggaggcattgctatttttgactttgatctatcctttaggcccagaaaatcttatatttgtagacagaggggatccaggcactggagagttgttcctccatagggatgggagcctaatgttttaaaaagctaacagtgaagagtctagtggctttttataatttgtactagtcactcttcacttctggctcttcacctgctctgacatgatggaaataaaataagttagagacagctgttttattagagctggaagctcctattactccaactacaaatgtcacttaggtaagttttaaatgtattttagggaaatataagtatactggtaacggtggttgtgataaaggaggaaagggtaagggtatccacagttggcttgaaactataatttcaatgcttataataatttttggaaggatttgaagaaataagtccattaaaggctcaagtaagatggtaacatgcagtacattcatagttgcactatttgtaatagcgccaaaatggaa

SEQ ID NO: 369560 - DNA, 1860 bp, Homo Sapiens
  misc_feature (1035)..(1067): n is a, c, g, or t
  misc_feature (1759)..(1786): n is a, c, g, or t
tcgggatcgatacaccgtgcagaccatggcccgggccctggagcagggccacaccgtggccatgtggatcccaggcgtggtgcccctgagcagcctggcccagtggggtgcctcagtggccatgcaggcggtgtcccggcggaggagcgaagtgcgggtaccctggctgcacagcctcgcagccgcccaggaggaggatcatgaggaccagacagacacggagggagaggacacggaggaggaggaagaattggagactgaggagaacaagttcagtgaggtagcagccctgccaggccctcgaggcctcctgggtggtgtggcacataccctgcagaagaccctccagaccaccatctcggctgtgacatgggcacctgcagctgtgctgggcatggcagggagggtgctgcacctcacaccagcccctgctgtctcctcaaccaaggggagggccatgtccctatcagatgccctgaagggcgttactgacaacgtggtggacacagtggtgcattacgtgccgcaacccaggctgtcgctgatggagcccgagagcgaattccgggacatcgacaacccaccagccgaggtcgagcgccgggaggcggagcgcagagcgtctggggcgccatccgcccgcccggaacccgccccggcgtcttcgcacagccccgccgcagcctgcgcgagcgcgcagaaccccggcgcgccccccgggcccgggcctggaggacgaagtcgccacgcccgcagcgccgcgcccgggcttcccggccgtgccccgcgagaagccaaagcgcagggtcagcgacagcttcttccggcccagcgtcatggagcccatcctgggccgcacgcattacagccagctgcgcaagaagagctgagtcgccgcaccagccgccgcgccccgggccggcgggtttctctaacaaataaacagaacccgcactgcccaggcgagcgttgccactttcaaagtggtcccctggggagctcagcctcatcctgatgatgctgccaaggcgcacnnnnnnnnnnnnnnnnnnnnnnnnnnnnnnnnnagcatccttttggggcttcactctcagagccagtttttaagggacaccagagccgcagcctgctctgattctatggcttggttgttactataagagtaattgcctaacttgatttttcatctctttaaccaaacttgtggccaaaagatatttgaccgtttccaaaattcagattctgcctctgcggataaatatttgccacgaatgagtaactcctgtcaccactctgaaggtccagacagaaggttttgacacattcttagcactgaactcctctgtgatctaggatgatctgttccccctctgatgaacatcctctgatgatcaaggctcccagcaggctactttgaagggaacaatcagatgcaaaagctcttgggtgtttatttaaaatactagtgtcactttctgagtacccgccgcttcacaggctgagtccaggcctgtgtgctttgtagagccagctgcttgctcacagccacatttccatttgcatcattactgccttcacctgcataatcactctttttgatgctggggggaaccaaaatggtgatgaaatatagactttatgtatagccacagttcatcccccacccctagtcttcgaaatggtaatattttgaaaatctaaaaaatgcattcctcacaattacggaattcaaatattggcaaaaagaaggtgtggcttnnnnnnnnnnnnnnnnnnnnnnnnnnnntttcttggaaaaccacccagcggggcccatcctccctgggtaatgcaaggggctatgccccctgtcaaagcacc

SEQ ID NO: 369561 - DNA, 1152 bp, Homo Sapiens
cttccattcagatcatcaattcttctgaaggccagcaactacaaggattgccttcacagggacacacatgcaccacagaccagccagctccctgggtaccagagggcttgggtatttacacctgagactaaatttacaacagcatgtttgtcattcagcttgagagctggacccttctctgagtcatttgcttgcacccaaactcaaagttcattattcaaactccagtggacattttctccattgatcaacttcttaggtggaaaaagcaactaaggcttttgcaattttgttttgttttcaaattgtgctaatttctgttgcagttttcagtcctagagtcttccttcagctctggtcacaggtttttacttaacgcaagactgttttagtccttgaaatggagagaagcagctatctgtcagggggtcctgatggctactgtgttctgaaaccatcgagacagaatagcaggatgggaagaatgtagtcacaaacaatccaccagatgacaacactacacagtgcagaggtcagcacagctaggggacatgtgagaggaatagcgtttgttttggattgtcttctgcttttcaaggcccgaagtctatcaccttgtgtcactcccattgatttcgtcatcatcactgtacggttcgggttcttgctgatcttgattctcgaccccatttatggaaatgtcatcaacgccagagagaagtttggagaaggctgctctgtgttgtccattctcctgcccctttaacttctgacgaaaatagtccccttccagccagaggttggtttgcttcatcaccaaaaactgctgctgaggcccaatcaccgagccaggtctgcagatcctgacccacgcaatggtctcggctgctgtcatcctgtaatgcttcatgatgtagcaggctatcagagtgcccgtgcgaccaaggccagctttgcaatgtactgcaatggcaccctcagcattttcacagatatctaggaattctttgacaatggcatcagtaggggtgctgccatccgcaaagaaaagatcatggtgatcgaagccagcatccgtaaagcgtttggcatcatacatccttttattcagacgaataatggtagtaacattgtgattcttaaaatattaat

SEQ ID NO: 369562 - DNA, 728 bp, Homo Sapiens
tgaggcctccctctggaatattggatcgtaactccagcaatgcaagcaataggttttcctccagcttctggtcctcctcctccacctcctccccaaatctggtttctagcagtcactccactgagactcagagtcttcttggcccagtgccagcctcttgcatgtcccaaatcttgtcctcaggaaacacttatgcatcctatgctggggtgaactcttaagagtgcaggatcacctcatggccacagcctagctaggccctgaaacccacactcagggtttctcagatatgagtcagccccaggccactgaacctctcccattgcagggaatccctgtcaagtggtgaaagccagcatctagacctggagtcacaggcacctgtagcataactcctcctgaaatggaggtttttctttagagattggtccatatcccttatccctggacttctgagaagggtggacaacctgtggactggacttgagtctggaatttagagaagtgtccatagtagggctgccagatgaagcaaacacaaatacaggatgcccaattaaatttgaatttcaaataaaggatttttaatgtttgattctgtcccaggccaaaaattgcccactccttgtgataaatttaaatttatggggccattctggacctttaccaagggaccacgcctgaaggaaacgttaccacaaagggtttcccgggggccctgttggggg

SEQ ID NO: 369563 - DNA, 649 bp, Homo Sapiens
  misc_feature (31)..(31): n is a, c, g, or t
  misc_feature (38)..(38): n is a, c, g, or t
  misc_feature (43)..(43): n is a, c, g, or t
  misc_feature (59)..(59): n is a, c, g, or t
  misc_feature (75)..(75): n is a, c, g, or t
ccgggcggtcctcaaaacccccgggctcaantgaatcnccccnacccggaactgcaaantgccggggaattaacnggtatgaagcccactgcaccccttttaagaaattagtatttaaagttcccagatccactgcaaatgtgcagcccaagactgagaaccactgttcttggtgattacggtcatcaaccagtctggaaaccactattcctatatacctgccaagactgtttttccttaatgcactacccttagtgggcattatgtgttctcccctctattacgcttttcttctcttgtttagaaaaagaaaggggaaagaagaaagatacttctattgctatctatgtcaaaagagattcactaagacttcagatgagaggtctgctactctctagaatttacatagtaatccagacatcttaattttcaatgtaagtactttttaaaagaaaaacatttcctttgcccaaattttaaacacattataaatacctaaaccagatatattacacaacagaaagcatatgttattgaattaggtttaggaaacatacaaatagaagaaacaagactgtattctgggttaaagtaaatgaacacattctctaagtaagttgacctgattcactaactttccctcaaaaaa

SEQ ID NO: 369564 - DNA, 758 bp, Homo Sapiens
atctgaagtggcaggagtcccaccagtctgcctgctgacttttcagctgctgtaccgaatgcatggggaagggctcaccaagctgactctgtcacactgtgcctaagaactccaaacggaaagcgccaaatggctgtttaaaaagtgccccaaatcaaattgaatagccttcagaatagaaccctagagaatgtcttataaggattgtctgccatttaaaaggaaagatgtcttttctcttttgcactgctcttttaagagttttagcagatttagcaggacagatgcattgaagccacatggtttagacttgattgataaagggaatgttgcatttgggactatgctgctaacgaaatggtttgaagtattttcatgtttggattttaataataaactgcctctcatttttatgaggactagagctatagtttctgcagctctgctcagatagtcctcataatcaagaagcctctggccaactggggcaggacctgttttgctggtgggatcagactctgaaaaatggaaacgtaaaaaactggtttgcatatctcatcttctatctatctccctatctccatctctatcaccatctcactccctccctctgcaactactccctgccctaccaccgtggagtttaataatttgctaggaatcctattgaattcgctttgcttgtatatgttgcatttgtacttgatgtgtttaaggttctgggtaactttgatgcttcatgacaaaataggcaaatc

SEQ ID NO: 369565 - DNA, 889 bp, Homo Sapiens
  misc_feature (56)..(56): n is a, c, g, or t
  misc_feature (354)..(467): n is a, c, g, or t
agaaaaagtttctgggggaacagatgcaaaacccccgcgggggacactcagcctgnttccagcaactaagaccaccaatttccacccagactggcgagtgctaggccattcacaacatggtccaagctccccaactgggccttgaatcagaagggcccttgtatttcaaatgggagtttgatatcagtatctctcaattctttttattcttattttttctgcttctcctacacaactgaggaatcagtcactcctgagtaattcaaatggcagtgattctcgccataattctcagtaaagggatgacgtatcatagtggttctcaatctgtctgcaaattagaaacacccagannnnnnnnnnnnnnnnnnnnnnnnnnnnnnnnnnnnnnnnnnnnnnnnnnnnnnnnnnnnnnnnnnnnnnnnnnnnnnnnnnnnnnnnnnnnnnnnnnnnnnnnnnnnnnnnnnaatgtgggtcttcactatctcagacaagtcattcagaagaggcttaaaagaatcttgaggaaaataacatgtgtgagattcaaaaaagtctcctcaaatttgctgtgcaccccttctcccaaaaattgggaaacactaaacaaatgtaagatggatctagaaccgaatccactgcacaacactcccagaaattccatgggcttagtctaattgtgatcagtggctgggaagccccaaagcttttcaaaatagctctaagtctctataaaagcatcttttaattcttagcactattagaagccacattctttccttgtgaccaaaatagaacccttgaagatataaaaaattaaaatctatagaaaatggcaggttatttttagaacaaaacactttaggaaagtcttcaggctaaatacagt

SEQ ID NO: 369566 - DNA, 1120 bp, Homo Sapiens
ttagtttatgtagttgtcattcagacagcgccatgagttgttcgctttcacctgagacttttctattttttgtagtaagtctgcgcgttcttatcatatattactctttgtttcctttctcttccacactgtttacttaaatacgtcctgctatccaccataacatttagtgcacaattgttcaatatagtgaagcaagatcaacatgccgtcccccaccccccatctgtcttcgatttttccttaattcttcttactcttttttccttgctgtcgcgaaggctcaatgacctcgtattgtaatttcgggctggcgggccaaacattgtaatgcggatatcagactgcttttcactttattctcctctactatccgttctcttcctacatgttatcggattctctttatttaattttcacttgactcctatacttaatttattctaatcttttatgtttcgtacaactttcagacacttttagtttctgacggcttcttttttagtaagtcccgtttgtttcttttattatgttaatttaaatatttccatctttagtttttcatgtatacatttcttttttctaattttatcacgatagccaaccaacccctcaagacccatgccattcctctacttagataagctttagacatttttaactgccttttatacaatttgcctccctttggcttatgatagagcaacacatttttatctgttcttatattccctatgagatttttatttccttgtgttctattcatcttagcacatggacaaggaattgaattgaatcccatccctcacacatggatcttgcgaatggctagggaatgtggtatgagggtaggaaataaaccaacatggacagggttagcaaatgtgcaaatgtgtttggaaactaagcatctaatttaacctcatgagagggaagtgttaactagagttgaggttaagaacactgatctaaagacaatgtcatcaaagaaaccgagtgactgaactgggactcagttctttcagtcccagtccaggaaaaaaagcagtaaagccatggatgtatctaaaaaggaaacttgagtacatcccacaaactctcaacctagtttccatgcagt

SEQ ID NO: 369567 - DNA, 1355 bp, Homo Sapiens
  misc_feature (149)..(149): n is a, c, g, or t
  misc_feature (246)..(246): n is a, c, g, or t
  misc_feature (907)..(931): n is a, c, g, or t
taacatccgtatgtgagttaggagtaaagaatattaggactcatttcgcgcacaggatttgcattagagtttattgttgataatagcatcttgcattatttatcaccatgcctattaatttgttatagttggatatttagtgtatgctnaggtaaatttgtgagcctcgtctttctgcaacctgttttactttgtagtggtgttaggatgttctattgttggtgatggagttgcgtgtagtagatntgatagggtgagaaattgatgtaacaggtaacgagatccgaggaattcatgttcccccacctggcttttttacgctctattacggtattatccctgcggatcgcctgatatcatttcactctatttcccttgttgttttcgtgttgagttatagaacgtatcatgccactcacagagttgaacgtacattgtggcttacgtggtgtagtctatagcttacgataggtgtgtgtaaatatgttatatagttatgaagactgcgaatattatagaagaaataatagtaggagaacaattataataacgtcaacgccgtgtatgccgcggcgggtctgttttgtctggccgtgtgaatcaagttatgcgtattttgttattccctttctttggactgcagagtcagattgttggtgacgtgctagtttgtatcaattatgttggattgattgtcacgaaggagaaaagtattttggatgaaggtccttttatttcgttattggttttttttacctgatatatcagaaaggtttgatccgtattggggcagagtatcagtaagttgtcttccaaagtcgagaagaatatcctaattttttagaccatcgtaagcttctggaaagccctttaagtgagttttctcaaagccaaaagtcttgccatnnnnnnnnnnnnnnnnnnnnnnnnncctctaacagccctgaaaaaccagccagcacaccaggaatccaccttctccccacgggattcttctgcatgtgtgtcccccaactctctcatagtcaatggagagaagggaacactgccttcaaaatcaaccactttgctccatagtgagtagggtcctgtcagcagaggggacaccaacccagtcccagtgttgggccactcagtggaaccaggaagtatgacccaacagaccacagagactttgttccctgcctccgttgagtcagcttcggacccacggttcactatcatcaataacgtgaaatatcacataatggctgggactatgcaagtcagacccccacaaaggggctgggatccaatctaggaagagaagctccttgctcgatcttaaaaaccacgacatcatctaagaggggcac

SEQ ID NO: 369568 - DNA, 995 bp, Homo Sapiens
  misc_feature (66)..(362): n is a, c, g, or t
gaccggtccggattctcgggaatttaattttccactttttgttctactcaagtgtgtgaacttccnnnnnnnnnnnnnnnnnnnnnnnnnnnnnnnnnnnnnnnnnnnnnnnnnnnnnnnnnnnnnnnnnnnnnnnnnnnnnnnnnnnnnnnnnnnnnnnnnnnnnnnnnnnnnnnnnnnnnnnnnnnnnnnnnnnnnnnnnnnnnnnnnnnnnnnnnnnnnnnnnnnnnnnnnnnnnnnnnnnnnnnnnnnnnnnnnnnnnnnnnnnnnnnnnnnnnnnnnnnnnnnnnnnnnnnnnnnnnnnnnnnnnnnnnnnnnnnnnnnnnnnnnnnnnnnnnnnnnnnnnnnnnnnnnnnnnnnnngaacttcctactttttaatatctcaaattcattttactagacgtgggagaccaactaatgcaaatgaacagttacagggtgatgttgtactttgtgatttttgccctattttttctttccatctatcaccattctctttccaatcccagagattgatttattaggtcttggaaattctagattattccattaactattaagcagttaaacctgatacttcctacactagataatggaacttcaacattagcctattgattgcccaagaacaaacatttttttctaaatgtcaggtgttatggggaggattgatgctgacagcagaggtctagttaaaaactgatgcagaggttcaaatacgttgtgcagtaatcactagaactcaccttctaaagtgtcatgagagctctgattctgcaattagagattttttaatgtgtttttgaaattaccttgtaaaccacaaatctgtgtctctgcattgccccttattgtttcctaccacaaattctacatcaaggaaggaaagttttaaagttagactgggatttatttgtggattttatgggaggcacaataagggtacattggaggatagccttactaaagggagggcccaattacaggggaggc

SEQ ID NO: 369569 - DNA, 934 bp, Homo Sapiens
aaggtcagaagtggaagagctcatgaacaaaatcagacagaatcccaaggaccacaaacgagcaagtcagtttacagccgaaggctacctgtatgtccaggaaaaaaggcctgctccgtttggttccagttgggtcaaacactattgcatgtatcgaaaagcagcaaagaagttcaacatgatcccatttgagcacagatctggagggaaacttggggacggagaggtgttctttttgaaagaatgtaccaagaggcatactgactccattgacagaaggttttgttttgacatagaagctgctgatcggcctggcgtttccttgaccatgcaggcattttccgaagaggaaaggaagcagtggttggaagctctgggtggaaaggaagctctgtcccatagttttaatacagccatcatcccaagaccagaaggaaatgcacagttggataagatggggttcacaattatcagaaaatgcatcagtgccgttgaaacacgaggtataaatgaccaaggattgtacagagttgtgggggtgagttcaaaggtccagagacttctgagtatgttgatggatgtaaaaacatgcaatgaggtggacctggagaattctgcagattgggaagtgaagacaataacaagtgccttgaaacagtatttgaagagtcttccagagcctctcatgacctatgagttacatggagatttcattgttccagccaaaaagcggcaacccagaatctcgtggttaatgccgatccattttctggtacaccaactgcctgaaaaaaatacagagatgttggatatttttggggaaacacttaacaagatggtttcaaatccccccaaggcaaaaaccttgatggattgagggccaaattttaggagttggttgttgggcacacatttccagaaagaggcccccggc

SEQ ID NO: 369570 - DNA, 684 bp, Homo Sapiens
tcggctctacctgttctccaaggcaaagacacgtgcctggagatagcggggggccttgtcaaacccatcggtcctactgttggtataactgagcttggacctgactattagaaaatggtttctaacattgaactgaatgctgcatctgtatattttcctgctctgccttctgggactagccttggcctaatccttcctctaggagaagagcattcaggtttagggagatggctcatagccaagcccctctctcttagtgtgatcccttggagcaccttcatgcctggggtttctctcccaaaagcttcttgcagtctaagccttatcccttatgttccccattaaaggaatttcaaaagacatggagaaagttgggaaggttcgtgctgactgctgggagcagaatagccgtgggaggcccaccaagcccttaaattcccatggtcaactcagaacacatttgggcccatatgccaccctggaacaccagctgacaccatgggcgtccacacctgctgctccagacaagcacaaagcaatctttcagccttgaaatgtattatccgaaaggctacctgaaacccaagcccgaatatggggacttactcgatcacctggaaaaagaaaagacccacactgtgtcctgctgtgcttttgggcaggaaaatggaagaaagagtgggg

SEQ ID NO: 369571 - DNA, 1559 bp, Homo Sapiens
  misc_feature (260)..(414): n is a, c, g, or t
aggctggaccggtccggattctcgggatgtaatgtgtaaaattaacccattgttaatatagaatgccgttatcactcctgattaagcggtcttcattttcatgttaatactgatgtcttgtaatgctttatggaatcaaacattttcatacatattcattagtctaattctaatcataatccaatgaaaaagagcaggaaagatgctcaaggaggttatattcaagtccacatggcaagtaagaaataagactactcggnnnnnnnnnnnnnnnnnnnnnnnnnnnnnnnnnnnnnnnnnnnnnnnnnnnnnnnnnnnnnnnnnnnnnnnnnnnnnnnnnnnnnnnnnnnnnnnnnnnnnnnnnnnnnnnnnnnnnnnnnnnnnnnnnnnnnnnnnnnnnnnnnnnnnnnnnnnaataataataataagacttctagaagctcctaaatccatagcttttcctctataccagcatcttctaaaaatgtcagcagcagtgaagtttcagtttgggaaataatgcatttcccctctctggagagtgcacagttatatctccaagaagtactgaaattcagaagtctgcctaatatgtattaaacatttagcttttctcaaactttgaccaccaaatcctttgtctcgctctaactatagttaacacagaatcagtgttcccaggagcacactgtgaaaaatgtagcactctacaaaagtcctaatctccacaggattaagtgaaaccatgattaaccctctgttccttgtccttattagtaccattttctgaagagtaatgtatccccccaaaacttttatactagtttcactaaccagaatccatgtacataaggaaggacagatatttgctccctactaagacatatctattaactacattaaaaaaagtattgcatgcccatttttaaagttataaattaactgggtgatatcacagatatttcccagaatataatttgcttgcgaataaacaactgttggttttaaagcccttctattctatctccagcaactagaaatttaaacttcaaccttgccgaaatgcgccattaacaaagtttaacttctacacatccaccgcgcaattaattatcaatttggggtccctaccccaaataccgccttttgtttatcgccttaaaccgcccgtattatagagttctcaaattccacaacccgatgatcctcccttattttaattcgcaatcggatataacctctcacctcctattcttatttgttgaaggattatatattcattaccgccacattcctcttcgtacttacttcatcccccacctatctatttcactgttcaccagcctagacttcttatacataattcgatacttcctgatatcacactgcaacttcgctcaataccctctagaccaggacacacaatacctacacttccaacctcgcctacctattcactaccctccccgccttaacttccttcattcttatatcgcactgtcaatgacgactttaatacccccctcctgtttgctctctagggcaataactaatacacg

SEQ ID NO: 369572 - DNA, 1147 bp, Homo Sapiens
  misc_feature (12)..(12): n is a, c, g, or t
  misc_feature (72)..(72): n is a, c, g, or t
gaagtagtagtntccagaaatggggaaaaccaaaccaatgcctaaaaggccctgaaggaaagggaggaaganccaaagagggagggagggaggatgtgtgccccatgcattttcccctgatgcagacaaatgtggagttttaacatttacccatatggtagatgaggagacagtgtgatataagaatgcttaaagcgaacatacaggtctggatacatgatatgcacacaaaatacaaggctaatgaggcagcaatggcttaaatttgtgaatgccagtgaagaaaacacctaacagtataggcactaaagacaaaatggaaagcacacaatggagaacggaggagaaagatgcagtcacacaaaagacctctgggtaagaaagggccaacttgtcttgccacatgtgggggatgaaagatagaaaattccttttggatttagttttggggctcatgttctattcatcagagccatgtcaataactcgaaagggtcattccaagacacaatttctaccaggtacacaagctatgcaattgatggaatcataatagacttctatagatgaatcagaagtaccaggcctcaaaaagaagctactcttaacggtttgcaaatgcgttctagacagcactcttattggcttatcagcttcgccggtttaccagttactaaaagatatatgagcaatgaagtttaaacacagctctattcaatatagtcctctttgcctttctagaatttacaaaagcacaagtcccttttcactacctcattcaatctgaatcaacataagaaatgctggatctaattagctttcacaactcaaccatagctgagtgtcttctcctgtcttatctgctgcacacctgttgctattagttacattaatacactgctacaccttccagccagatggcagggatttagtaggtctcaatttttgttaggtatagtcagaccccttgcaagggactaagtgttaaaggaaaataatggcggaagaaagaagcaaatgatatatatgcatctacacacttgcatccttaatggaatagatcctagagaatgaaataaaataaccacaaaataactacactagctactgctaagtgaggaaatagtaggaaaagaatcccgagaatt

SEQ ID NO: 369573 - DNA, 520 bp, Homo Sapiens
  misc_feature (36)..(36): n is a, c, g, or t
  misc_feature (96)..(96): n is a, c, g, or t
gtctggaatacttgaatatgccacacaaaaatacanggcctaaatgaggccagcaatggccttaaaatttgtgaaatgcccagtgaagaaaacacncctaacagttataggcactaaagaacaaaatggaaagcacacaatggagaacggaggagaaagatgcagtcacacaaaagacctctgggtaagaaagggccaacttgtcttgcccacatgtgggggatgaaagatagaaaattccttttggatttagttttggggctcatgttctattcatcagagccatgtcaataactcgaaagggtcattccaagacacaatttctaccaggtacacaagctatgcaattgatggaatcataatagacttctatagatgaatcagaagtccaggcctcaaaaagaagctactcttaacggtttgcaaatgcgttctagacagcactcttattggcttaatccgtcgccggtttaccagttactaaaagatatatgagcaatgaagtttaaacacagcttta

SEQ ID NO: 369574 - DNA, 1342 bp, Homo Sapiens
tcctcgagatcacgatgtccgtctacaacggcgaagttccttttgttccagtgtcaacttggaaaagttcactaatttcagtagttcttgtctcttctggagctccgttttcccgtttattcttgccaggctcttcatcaggtggtgaaagctcttcataggagatactgtcaatgtctatttcaccaggtaatgtaaatctgccatcatctgctcctttccctattgctaaaagagcctccaggtctgtgccttttaatccatactgaagcagttcttttgcagcatccacattttcaggaactctttccaaacactcatggagaacccaggatcgcttctttattttactcaaataattctgaattgaagcaacgttgaccgctgacttcctccactgcctctgatatacaaggtcagtatccaggccgtaggtatgagccaaggacaaggcttcctcatactcttcactttcaatcttcctctgataaagttcctctggtgtcgtggagcgcaaactcacaaggcggtagtttttagtaatggttcgtgggcgtttccgtggtggtgcaaatcgctccatttcagtcaccaagtaaaggccctgttttatataaccaaagtagcgagccttggcagatatttcataatcagaatcagaatcctcttctccttcatcttcttctccagccctagtctccaaacgagatcgtttgggggcaagtttaatctcacactccaaacttaaaaatcccccatcatgggtagcagtgacttgaggtgatggttcaaaccattcacaggattttcccagtaaattcttcaaagttttcacagatgaaacagttaaagcaccagagcatcgagctaaagtcactgcacggtctgcccaccaatggacatctatcagtgggtaaaagggactcgttatcttggattttttttctcttctcagtagagagcctccaatcaggattaaggtcatcagagcctggctggtcattttgaccccattccccttgttggcttcagagatggaatcgcccagatgctcagtttccctgagaagtgaatggctgccaggagcatcccatctggagaaaggctcatcttaaaaattccatcctgttcttgtccctggcgactgtaaaacttgacacttaacatccttaataatcccagagtcttcggtactgcagtaaccccgtctccaccattagtaacctgcttataatacggtgatcctgaaagaactctccaggcagaaaggccacagctagaagcttttgacatgcctacttcagcagtttcacatccaccaacaagtaaaagtctaaaaagg

SEQ ID NO: 369575 - DNA, 1407 bp, Homo Sapiens
  misc_feature (686)..(769): n is a, c, g, or t
  misc_feature (773)..(903): n is a, c, g, or t
tgtttaaacaagggggttgaagtggtgagcagttcactttgtatgtggctttattctagtacagtgcgaggggtatgcggtgtatcacgggcgtaggtaatattaattttgggcggtagcttgtatagggagtgatattagaggtggggaacgtctgtttataataactttgtggtaatacaagttatactgtgtgggttctaaaagtgttgtatcattcgtattatagttaagggtttgttatattctttcgatgattttatttgcatatatgtacactcttttttggtgttttataggtattatttatacattagttatgctggtacaagatgatccattatatgttcgttatgttaaatatattgactccctatacagcttgtggtagtagttgttgttttattactacgctttattattggtaagaaataaatactgtgccggggctccctggttcaataaactactgataagttgttctcgtgggtattctcttctattttttatttaaattgttgattcttggccgcgttttgtatattattcggtgacggataccgtgaaattaatatatatatttggtgttggtttgtgggggaattatttggggtttaacgacatttttctaaggcttactctggttgtgttaacactttgagaggacaagtcgggtttatttgatnnnnnnnnnnnnnnnnnnnnnnnnnnnnnnnnnnnnnnnnnnnnnnnnnnnnnnnnnnnnnnnnnnnnnnnnnnnnnnnnnnnnggannnnnnnnnnnnnnnnnnnnnnnnnnnnnnnnnnnnnnnnnnnnnnnnnnnnnnnnnnnnnnnnnnnnnnnnnnnnnnnnnnnnnnnnnnnnnnnnnnnnnnnnnnnnnnnnnnnnnnnnnnnnnnnnnnngataataataataatatgtgcataatgtattgctgagtatttgacatgtagaaatgtaatatgtctataacatatttcccagtaacatcaaaaaggaggtagttggaagaaaaatgtatcgtgataagataatcactctagatggtaaagtcataattactaaaatgtattgttggctttgtaactttaatagatgtaatgtgtaaagtgataatactttcaaatggaggaaataaaagagatttgtgttccggcgggctgaaggacttcaaattaaaacattgttcggcccgcctcgggcccctccaaaaaagcttttcttagaacccatttctgttttggggcgccgccgggcgcccacttaaggggtaatgttgaaacatttggccccataaagcctgggtttttccctataggggaaaaatctccctgtggatcacaattgaaacacataaggggggccttgtgggggaatttcccttcccaacccaaaaattaaaaaat

SEQ ID NO: 369576 - DNA, 1196 bp, Homo Sapiens
  misc_feature (14)..(14): n is a, c, g, or t
attccccggataanggagccagcctctggcttctctctgcaatggccatgtgctgcagacccggagtgggtagttagttggttaatgccagtcttcctcccctggacactgagttctgctgacagcccccgcccagccagagctctgctgtataccaccgggagtggggctggtgtggagcctggaggtcgcccgctgccctcctagggctgctccagacagcattaaaacgctgcaggtcgcaggtgagactaacagctgggagagctgctccaggcatttaggaccctgactggggcagatgagtcagcccagtgggggcagggctcctggaacgaggatctacagttggagttgccccactgtcatgtcacctggagaaaaactggacccaattcctgacagcttcattctgcaaccaccagtcttccacccggtggttccttatgtcacgacgatttttggaggcctgcatgcaggcaagatggtcatgctgcaaggagtggtccctctagatgcacacagtaggtttcaggtggacttccagtgtggctgcagcctgtgtccccggccagatatcgccttccacttcaaccctcgcttccataccaccaagccccatgtcatctgcaacaccctgcatggtggacgctggcaaagggaggcccggtggccccacctggccctgcgaagaggctccagcttcctcatcctctttctcttcgggaatgaggaagtgaaggtgagtgtgaatggacagcactttctccacttccgctaccggctcccactgtctcatgtggacacgctgggtatatttggtgacatcctggttagaggctgttggattcctgaaacatcaatccatttgtggaaggcaccaaagagtacccagcctggacatcctttcctgctgatgagccccaggctggaggtgccctgctcacatgctcttccccagggtctctcgcctgggcaggtcatcatagtacggggactggtcttgcaagagccgaagcattttactgtgagcctgagggaccaggctgcccatgctcctgtgacactcaggggcctccttcgcagacagaactctggccctggatctccccgctggggggcagaagaaaactgatcttcgcccccctttcctcttttacccccagaaattcttttaaggtgcctgctcctgtttc

SEQ ID NO: 369577 - DNA, 1111 bp, Homo Sapiens
  misc_feature (33)..(33): n is a, c, g, or t
  misc_feature (842)..(842): n is a, c, g, or t
ttgtataagtgagataaataaattaagaggtgnggtcggatattcaaaaaggagcgcctcctggattactgcagggagctttgccgttcctcgatgaaaagtcctcatcctccgaggatgacccaagagaaagtgtttatgatcaggcaggctctggggaggccaacttccaaagctcccaagacactgacttgggggaaacatcatctgtggctcacgctcttgtgccagcaccccaggagccgccaccttccttcccgatacaaaagatgcagatagatgaaagagaagagttcggcccgcggctgcctcccgtcttctgccccaatgctcgtcagacacttgaggttcctcttttttgaaacataacaagaattatgtatagctcaatgcctaaaaagagcacaggcggagacaaaagaagaatattaatcgctgggaaacacaaacaaaataggtaatgcaaaaacaataatactaccgcagaacatttggtatcctccataaagttcctaccgcaaatagaatgtcagtaatgaagtaagaaaacgggtataccgtgttaatgcccaggaaacctacaacagtaatgtgttgaatcaaccattcataccaacacaaagcaataaattagtgaagcgggcccagatattaccatcctgagaaattatatactgatattattaaaaatgagagaagaacgtgtattaaatgtcgatacataaaattttatattgtgtggggtcttgaatatattatatattaagaacaaaaccataaataatcaatctcaatcgactttcgtcctccgcgtagttagtataaaaagaataatttaacangtagtagaagtgttacggcaccatacggggcgtaatcgtaaaaaaatagtcattagtaagtgggtaggcagcagttgctctatcgcgtgcagaagctaaatcaagcatggattactagagacaaggagcagtattggatccacttcggaagaattatgatacaagatttagaatatgcctatggtagcgcgactagtacgacctatgatacattacgatatgtccgagcgagacgggttcactggacggataggcagctctgttcgcct

SEQ ID NO: 369578 - DNA, 1189 bp, Homo Sapiens
  misc_feature (674)..(674): n is a, c, g, or t
  misc_feature (702)..(702): n is a, c, g, or t
  misc_feature (1025)..(1085): n is a, c, g, or t
gtagcgaggcctgggtggcgaactccgcacgaggccgaggagcagctcgccaggccctggccgatgccatcatcgagcttcagctgctgccagcttcactatgtacagaggacacacccacagtctcaggaacggatcgttggaaactaagagctctgcaggccgagctagcacctttccccctgcccctgtccctggggagcctgtgactccacccagcaaagcgggccggcgtagcttctgggatatgctgagtaaaacagagtgtggggatttgggttcccccaaaacaactgatgacattgtcctggatcggccagaagacactcggggccggaggcgtcacaaaaccgagagtgttcggactcctggtggagctgagcgggcgccaggctcagattctggagcccagagacaaaagcgccggacaacacagctagaagagggtgaggtggggacccttcatcctgtgtttgcccgtgttgctcagcgctggatggagtttatggttcagattggttgtgcctcagtgtccagaagctctgcccacatggtgtcccggttcctccttccatccatcctgtctgagttcaccgcactggtcacctcaatggctggagacaccagtgtccgcatctttgagcagcattttgggttcagagccagagatcttncggcccttgttcccctggggcaactggngcccctctccccgccctgcagctgagcggcatctgctgctttctggaaaggaactccttgcagtggaaggagaaccaaccccgcaggttgcccaaagccatggcgccgctccgaagcccaggagggggatgggagccccaggggcgaaaatgccccccggcgagaaggtttcttgccaccctaaaaggtttggggaacaacaaaaaccaaaagctggctgacccctaaactgtgggtcccccaaacctgtggggcgagaaaatggggcctcccccgcccggctcccctgtggtgccatggggccaaaaatgcggcggagcccnnnnnnnnnnnnnnnnnnnnnnnnnnnnnnnnnnnnnnnnnnnnnnnnnnnnnnnnnnnnnataggggcacggtggcgccctttccctcggggcagaaacgataaaaaggacacacacacacctttttcctgcgcccccccgaacctggggggaagggggaaaca

SEQ ID NO: 369579 - DNA, 1159 bp, Homo Sapiens
  misc_feature (62)..(73): n is a, c, g, or t
  misc_feature (177)..(189): n is a, c, g, or t
  misc_feature (423)..(431): n is a, c, g, or t
  misc_feature (1126)..(1127): n is a, c, g, or t
  misc_feature (1143)..(1143): n is a, c, g, or t
gaaatttgggaagggggaaattttttctcttggagggggttccccgggtggagaaggagagnnnnnnnnnnnngggttccaccattaattgtttaaaccggttccttagtttaaagccaagggggtatttacttatttttgggggaaagaaatattgggcaaaattttccccccttnnnnnnnnnnnnntccagtattttccaataattcccggttatatcccattcataaaataaggctttcaagaatatgttagggaccataaaaggttatttgttgaaaccggattaagcaacaaattccccacatttgataaaaaaatggagaaattgattttaggttatcaaattacctggaataaatctctctggtatcttcttatagaaggataattttccgtaagaatcaggaggttcccagttnnnnnnnnntccattctttctctctctatgaaaaaacccttaacatattttcaaaaataataaggtcaatctgtaggcctttgcctggaatccagtagtttgaaaccaaccagctaacactgctatgcagtcacactggggtttgacctcaggggccgctgcagctgcctctgcctctaaaggctgaattcctgcagccagtggcggggtgggggggcagctgcagcaacaggcacggcacatgggaggggcatggcctgctggggcaggacccaggtgtgcaatagtcatctgtggcatgtcacacagaggagctcagagctatggcgctcaagtggattgaaccaattggtaagttagttaattcctgcgagaaccgacggagtcacagagctcaaagtcagtaagtaaaggttcaggagcgggaagagagggctgaccagctgcggtcggctctgggaagggaaaaccaagggaagtgcgtgctatgcttttccaaaccaaagccacagcacggtggctgctttcaaatatgaacaggcagccacgcgagtaagctgagttgaaggaattgtgataaaatgagaaatgatttcatacaggcaaataacataagaacagacttgctttgatcccagcagctggctgcggtaaagtgggggtgggagacatggctagacagcccaggagcgagtgacaggcanngctccttgaaggagcncagaggccagcacctg

SEQ ID NO: 369580 - DNA, 447 bp, Homo Sapiens
acgtttagaatagtcacctgaggggggatcagctcaactgtactgtgggagaaattcttttccaacaaacctcatgctcgtttttctgtggtgcaatttcaagggcaacgtgttctgtcctcacctcactctggtactcgcctcttggggcggctcagcccattcatggggatggcaccaagcggccatgctcagtcttccagccccgctgagggttaaaccgaggcctctggcagactgtgcacaggtgctggcctctggctccttcaaggagcactgcctgtcactcgctcctggggctgtctagccatgtctcccacccccactttaccgcagccagctgctggggatcaaagcaagtctgtttcttatggttatttggccctgtatggaaatcattttctcattttattcacaattcctttcaactcaggttaattcgcgtgg

SEQ ID NO: 369581 - DNA, 992 bp, Homo Sapiens
  misc_feature (134)..(421): n is a, c, g, or t
  misc_feature (423)..(432): n is a, c, g, or t
gtggcagttcatcatttaactccaaagactttgcgtacatttctactgaaaacaatctgagctgattagaaccctgccattttatagcctttagctcgatctccgaccgttcatttaaaaaaattctacttcannnnnnnnnnnnnnnnnnnnnnnnnnnnnnnnnnnnnnnnnnnnnnnnnnnnnnnnnnnnnnnnnnnnnnnnnnnnnnnnnnnnnnnnnnnnnnnnnnnnnnnnnnnnnnnnnnnnnnnnnnnnnnnnnnnnnnnnnnnnnnnnnnnnnnnnnnnnnnnnnnnnnnnnnnnnnnnnnnnnnnnnnnnnnnnnnnnnnnnnnnnnnnnnnnnnnnnnnnnnnnnnnnnnnnnnnnnnnnnnnnnnnnnnnnnnnnnnnnnnnnnnnnnnnnnnnnnnnnnnnnnnnnnngnnnnnnnnnnttctacttcattttacaatatgcagatatatgtccatacacatgcataatataaatgtataccatatttgtgagaatatgcatatatgtacacattagatacacaatacaagcacaatacatatgtcttttgcccaagatacagcatttggtaaacggagacaggaatttagtaatatatgttccagaaacagtacacaagagaattcgccgagatgagaaagttgtcacctaggaatggggagtgggtaagaatgttagaaggtataattgttcttaaagttctactgccaactctttccaattaattacccactctgccatgctttatggacaggaggttgtcggacactgtcaattaataaatatttgagcatgatacactgcttggagctcctctaatataggagagtgatatcctagtgcatgttacagagggagtgtccacacagttcctattgtcatttgatgagttacttttcaggggccttgtacctgagcaagttgtcctctttttgatggatttcacattgagttacctgcattgtcttgagattgcag

SEQ ID NO: 369582 - DNA, 859 bp, Homo Sapiens
  misc_feature (413)..(413): n is a, c, g, or t
atggacaaggatggctacttttggttcatgggaagaaacgacgatgtgatcaattcttcaagctaccggatcgggcctgttgaagtggaaagtgccctggcagagcatcctgctgtcctggagtcggctgtggtcagcagcccagaccccatcaggggagaggtggtaaaggcatttatagtccttactccagcctactcctctcatgacccagaggcactaacgcgggaactccaggagcatgtgaaaagggtgactgctccatacaaataccccaggaaggtggcctttgtttcagaactgccaaagacggtttctggaaagatccaaaggagtaaattgcgaagtcaggagtgggggaaatgaggtgcaccccaggaaggccccgtagacctccgaagactccacaaganactaatggatcactggtcagtccccatggggagcatcatctcttcgaccctaaagatgtcaaaggtgtgcagcttccaaacggcatccccaggatcactgggcaatgctggaaagagcaaaagaatatcattggccctgatcacatagaagctgcgccgccttagcaaatgcttggtggtttcgacttctccctctgtctgggggcaggctcagcatctgcccactggtctcactaagagctttcagatttccctcccatagaacggttacccatagaactgggggcactttgggggtactccattctctgcccgtggggaatgtaaagggcttcatcccttggtaaggtaaccattttgggcaaagtttggccgggacctttaaaattaaaatttcccttttagccctcaaaaatttctttccttcggggagttcccccccaaag

SEQ ID NO: 369583 - DNA, 1439 bp, Homo Sapiens
  misc_feature (1185)..(1221): n is a, c, g, or t
  misc_feature (1285)..(1311): n is a, c, g, or t
agaaactggttgaatgaaaagccttgacatttaagggctttattctgtcatacggtagcaagaactggcctattggcatcgtattcctggcattgagctgtattgaccctgaatgtgtcctcctgaggtttttgagggtgacctaggagaaagggtctgaaaaagcactgggatccaagtgactttaaatctgcccgtggcatttcctgctgagaggcgagaaactagcatctctcccaacaggctcacatccgccaggaaggacagagcccaaaacgggggtagactttgtgggaaattcgccagttagtccgctgagattttaatctgcctcaagcacaggatgctgacaagaaaggtagaccactcccccgatcccagacaaaccccaggggtgacaacttctccatcagtatcctgagaagcaacatcaaatgcttaccaagtcagcacgtttactgagtgagtactctgacggaataaaccagcatttggagctgaacttgagaaacacagggccctctgacagcagcttagggaaacacccatcccttccagattggcagaatcgcttccatttcatgtcacttcggagacgctgtattctctttacaaatcattcatgaaactgagaatcagtctcccaggggtaagtcctgggccacgtgcaaacaatggcaaatccagctcttccatgatagagaaggcaaacacacccacctttcatcctgagccctaaaagggccacctcctgagcacttgggcagccactcctctgggcctcagagggccatgagcttggccaggtaggcacagcggcggggaagtcacagctgtcaggtaccggccatggtgcaggtgggaataggagatgccagagctgctttagctgaggaaagcaaacagtcagcagtgctcaaaggagcaaaacttcgaatgtgcacattgacccctgacacctgcaagcataacacagatcctaagactagagtgaagtaggaagaagaattagaaaatccagtggatgtcctgagtatagggaaccagggccgttgaaaatcagtaaaggttgattacctggggcgagaccgggtgactgtggcagtgcaggtgaaggtaccctggaccttctcagttcgctggcacataaggctccgccaataaagcgtggttctctctgtcatnnnnnnnnnnnnnnnnnnnnnnnnnnnnnnnnnnnnnatgattggagggctatatgatccagcattagcttcctggtgtgccaagcatgcttgatcgggannnnnnnnnnnnnnnnnnnnnnnnnnngctgtagctgaaagcatttctcggatgtggagaggagaatggaaatcgcagaaccaaatcagtttgccctgccatatttggcctgtggtctgtcattgggcattttctgatgtgcttttctggattca

SEQ ID NO: 369584 - DNA, 1177 bp, Homo Sapiens
ggaggccaggaggcgcaaacaaaagacgcactcggggacaagacgtttggcgcgcaggggcctcccgcgcgacaacgcagcgtctttaccgatgcgccccccaaaaactcggcggggagaattagcttccaaggttagatttctctccacccaagggaagccctccccattggggggcgtggaaaggatttcgcggctaacgcgggcaaaaatccaggcgcctgccttagggtttaaagcccaaggtagcgacatgatgggctccaggcggagtgtgcgcaaaggtttgggctgtgcccagccccttcaggtggcccaccactccatggtcccttagccaggaacctcccctcttagagaaggtgccctctgatcactcctgagcttctggacagcccaaggcatgggcactttctcatggttgcagcacagggtggtgtgtgcttagggctagggtcctgcccaggggtctgcttagggcacagcttgggggttcaacaggcaccagaaggctgaaggcagtaggggagagtgccctggggtggggtctgctgggtttccccctttaacctgctgctggcccacaccctctggcctatttgtcagctggctccgcacctcaagagcactgtgaagtactggccaggtcaggagcagggggtggcactatgctgatgcccaggtgtccaggggaagcaaaattcaaatctaaaccccaaacaagtcctcaaatagaaggaaatgaggaaagaagaaaacccctttcatgggagggtcatgccctgggcctgtcctcagccgcacacctgatgaccctgggcaggacaatgacacacagacagctccgtgggcactaggactctgggacaatgggctttttaaggttcggcccaaatggggaccggttttcaggtgtgtctgtcttctctggacttcaaagtctcacctgtagcttaaacacctatcagagaagtacactggaggtttaggaggcaaaccaggtcttagagggctcgacagtggaaccattcaatgcattgggctccttctgagcacatatgtaggggtggtggggagagccagggggccaggagtgtcccactcattttccaggagatgcaaaatcaccctgtctccgtgggtttcctgatgtggccacagggaaggctgccacttg

SEQ ID NO: 369585 - DNA, 861 bp, Homo Sapiens
  misc_feature (847)..(847): n is a, c, g, or t
tggcctgcagtcgccgccgccgccgccaggtggtgtttggactctagaccatgtgcctaggtagaagtttttcctttctccgcagctctgctcccctagcaacgctcgccacacccttgttttgagatcctctctaaggagcggagagtttaataggcaagaaggaagggagaagacagaaggaagacgctcccccgtacggagacagagggagggggggctccaaagccgaaagaggaggtccctacctgccacggataccagtcagcccttgccagcatccagccatgggggatatgaaaaccccagattttgatgaccttctggctgcctttgacatcccagaccccaccagccttgatgccaaggaggccatccagacacccagtgaggagaatgagagtcccctcaaacctccaggcatatgtatggatgaaagtgtgtccttgtctcactcaggatcagcccccgatgtgccggccgtgagtgtcattgtcaagaacaccagccgccaggagtcatttgaagcggagaaagaccacattactcccagtctcctacacaatggattccggggctcagatctgcctccagatccccacaactgtgggaaatttgattctacttttatgaatggagacagtgccaggagtttccctggcaaactggagcctcccaagtcagagccattacccaccttcaaccagttcagtccaatctccagcccagaacctgaggatcccatcaaagataacgggatttggggataaaagccccaaacactctgacagtttatttccccacccccctctttggggtgcgggggccttgtgggaaggcccccaantccctggggaaggc

SEQ ID NO: 369586 - DNA, 892 bp, Homo Sapiens
  misc_feature (488)..(654): n is a, c, g, or t
  misc_feature (823)..(823): n is a, c, g, or t
gcttgatcgtagttctggataggtggctccactcctgaccactgtcaacatcccttatatgttccaaagttgaaaattccactgttaccaattctgaatgttctgtgaacactttagatgagtattaagctgttttctccctttatgacacacatagttgatactgtctggtaaaaggaggctcttgagccattcctatttaattaaaacagaactagttgtagtgtaggaaaaagccactgataaaacagggtatattctcaagcctctctttattgagaacccctagaattgcaggataaacttgatcgaagtaaaatccaaatcttacactaagttctgtgagatttaagagcaataatcaacagttctaagcctaataaagagagctcttaatcagctcagtggtggttaaaaccagctatcttttaaagaagagaaaaaacaaaacacagcaatgccctgtctcttcagaaaattgttttaannnnnnnnnnnnnnnnnnnnnnnnnnnnnnnnnnnnnnnnnnnnnnnnnnnnnnnnnnnnnnnnnnnnnnnnnnnnnnnnnnnnnnnnnnnnnnnnnnnnnnnnnnnnnnnnnnnnnnnnnnnnnnnnnnnnnnnnnnnnnnnnnnnnnnnnnnnnnnnnnnnnnnnagtgggggaaggggtgcaaaattacactgtgagaagccaagaagtttcaaagttctatttatttttctaagtcatttttaatcattatttgtttgtttcagtggtttgaatttaacatttatgtttttaaaagatgggagtggaattcctaaaagatgagtttgggttncaaagaataatcccaaacatattcttttttaataattgggggctttatggtcaacttttagggttggaa

SEQ ID NO: 369587 - DNA, 1373 bp, Homo Sapiens
  misc_feature (865)..(865): n is a, c, g, or t
  misc_feature (1042)..(1042): n is a, c, g, or t
  misc_feature (1102)..(1102): n is a, c, g, or t
  misc_feature (1335)..(1335): n is a, c, g, or t
cacgttgaaggtgtctcgggcacacacctccaggttttgaatcagtttattccctttcactgttcaaagcagctgttcaaatacacaggctgcttacgttgacgtggagaggatttcaaacaacgctaaaatgctttgaactgacaaggtgtcttgatatctccctcactccatccagcacagctcctcgagatcactcgctaggacaatggctgagcaggcgattcgtgcgggcctcgccacctcggggcgcggactgcggggtgtcctaagccccttccgcaaggacaggatggaggcacctgtaaggagatgctggcaccaccccagcttctcccaggtccggaggaacctctactcagtcaataccctgagctggacttgtctgaagaaacggagccgactccctcttgccggggtgcgctgagtggaggggaaacatcctcgaataacagaactacacgcaaaaaagacccccctgtttatttctcaccactttcacacctccctcgaaaatagttgaagccccggaacctgaggtccttagttagtcaccccagattaaccttggacagagaaacacttccccagaatttttcccaacccatggaaggtaaacaaagattaatgggggagttcacacgttccccagttggccaccttgagtgtaaaccctctgtgaatactctccggaaaattttgaaatgttaaaacgctaatttgttttccgaatccgttagagatttgaataacgacctcacacgcttccacgcatactctcgcgcgttgtgtgaattatgataagaacattgacagcgcgctactttgtttagatatgtgctgatactagtttgctgcggtgcgnagtatctctataacgcgccccatgtcgcgacatgattgtttgggcgcacgctagaagtaaaaaatagtatcgccctcgcctgtcgaggtttgtggggatgctcacataatttcccctcccacacatctgacacacatatctgtgctatctacctatataggatagaggtgtcgctcnattatcccctattgtatttgttattcctctacgcataagagatgctcacgcacaagactngcgtcgaaagaaaaaaacgccgacgtgagcgctcatttctgatgtttcttgtcgcgggagtattacacccttagaggagaatttcttagacgtggtctcccccccgcgcacataagttttactcctcgatgttgaataactctctcccacccacctgtcgtgcgcatgtattacgtcacgctcccagactatagtatctagtgggcggcgaaacggtggacctcaatactcgntagcataatgatagtggctgacaagtgggttcctgctg

SEQ ID NO: 369588 - DNA, 1135 bp, Homo Sapiens
tgcagggaaatgaagtgtggaagagagtcgatggagcctttcttgctacgtaaagaccaattctcggtgaatttaggaaagagagtagtggaatgcctcctctaagcacttgactaattttatgttagtgctgtttgctgcatctatattggacttctttggaagcacgtgcatatgagcttccttgataagattgcctaagggaagccagagaggtcttttcagaatgtcattcccctggttcagacaggggaatgcctctagaaagacatcattgctcaaccttccactcccaatctgctgaccacaagcccctgtgtcccaagacccacttctatgctctcttctctgcctccctttccttcaacaagttccctgctgtgcattcttcgaatttagctcaagcctcctgttctctaggaatcctgactggagctttgccaaggtcagaacctcttttcttccccttttaaagtcttttctggggagcattagttacgattgtcatactcacacttagttgaaacaaataaggtaacaattattaaatttacaaaatatataaaataaattaatgttttatcattgaaacagagaagaatcaggttaaaggtaggtttggaaagacatagttgacctagagagaagatgcgtttgtctagcaatattattttcagagtgattatgtactcgatgaaaaagttggaggcatgtcacaagtttggaaataatctaatgttgtattgactttttcagggttctatttagtgaaaacacaagccaaactaaattttgatatattaagacagatgtataaagcctataatttttgaaatcagtatccacctgacatttatctctcattccatcagctgaacatttggatattgatttctaattttgtatttatcaatataatgaatattgactgccataatgatgtctcaatgacatttcgcagccctagagtaacttacaaataaagaagtagattaaggcctttgcaattctattgtcctgtgtttcttattgtaattctgtctgcctttctcccaccttcttttgctttttctgtttcaattaataacttgctagaagatcaacagaagccaactgtatagaaatatttgtggta

SEQ ID NO: 369589 - DNA, 1458 bp, Homo Sapiens
tccctgactgactatggctccaacgagaagctggtggacttcctcagcaggggaatgacacagttgcagggaaccagggccttaggcagtgccattgaatacaccatagagaatgtctttgaaagtgccccaaacccacgggacctgaaaattgtggtcctgatgctgacgggcgaggtgccggagcagcagctggaggaggcccagagagtcatcctgcaggccaaatgcaagggctacttcttcgtggtcctgggcattggcaggaaggtgaacatcaaggaggtatacaccttcgccagtgagccaaacgacgtcttcttcaaattagtggacaagtccaccgagctcaacgaggagcctttgatgcgcttcgggaggctgttgccatccttcgtcagcagtgaaaatgctttttacttgtccccagatatcaggaaacagtgtgattggttccaaggggaccaacccacaaagaaccttgtgaagtttggtcacaaacaagtaaatgttccgaataacgttacttcaagtcctacatccaacccagtgacgacaacgaagccggtgactacgacgaagccggtgaccaccacaacaaagcctgtaaccaccacaacaaagcctgtgactattataaatcagccatctgtgaagccagccgctgcaaagccggcccctgcgaaacctgtggctgccaagcctgtggccacaaagacggccactgttagacccccagtggcggtgaagccagcaacggcagcgaagcctgtagcagcaaagccagcagctgtaagaccccccgctgctgctgctgcaaaaccagtggcgaccaagcctgaggtccctaggccacaggcagccaaaccagctgccaccaagccagccaccactaagcccatggttaagatgtcccgtgaagtccaggtgtttgagataacagagaacagcgccaaactccactgggagaggcctgagccccccggtccttatttttatgacctcaccgtcacctcagcccatgatcagtccctggttctgaagcagaacctcacggtcacggaccgcgtcattggaggcctgctcgctgggcagacataccatgtggctgtggtctgctacctgaggtctcaggtcagagccacctaccatggaagtttcagtacaaagaaatctcagcccccacctccacagccagcaaggtcagcttctagttcaaccatcaatctaatggtgagcacagaaccattggctctcactgaaacagatatatgcaagttgcccgaaagacgaaagaaactttgccagggatttcatatttaaaatggtactttgatccaaacaaccaaagcctgtgccagaatcttggtatggaaggttgttggttggaaacgaaaaaccaattttgggattccccgaaaagaaatgtgaaaaagggtttggcggctcctggggccc

SEQ ID NO: 369590 - DNA, 1131 bp, Homo Sapiens
aggctggaccggtccggaattttcgggatcagaaatagagatggatttaggatactacactatatttcaaatgattctagatgtgtaaatatagtatgaacattcttggagaggggtgagacaaactggacttgctgggccaaccctggcatgtttttcattctcctcactagttgacaaggattgaaaattccgctccagcctaatgagtgaacaggatggctgcccacaaaaccaagttattagctttatgtcatcgaagctcatattctcaaaggcccaaagtgctgtgccgagacaaatccaagtgctgctcttgctgaagtgcgcactgaagtccagctgtccgtgcttacagcagtgccaaaagtggggattccatggaccaaaaacggtgccataagggaagccagaagagttgcagtgcaagatcctgggagagattataccaaagaaatcaagcctttttatcctgatgcttctaagatgatgagggtgagctgtgacagatgctgtgggaggggagttcacatacattccatgtcaaggcatttagctgataaatccatcctcagaaaagcacctttttaaaaagaagtccattttgtatattagaagatgatgatgatgatgaagatgaagaaagccctggcaggatacaaagttcctcagtatttaaggagaaggatctcttccatgtccccttgacatgactgtggctattgcccaaacctcagcttgagaacatcatataatactgagagcggaagatttttttaaagagatatggtagtttaaataggtttgtttaaagaactcttgggaaatttcttaacaaattgtaattgtttttataaaccttcctacagagttgtgtaccattcatcatcaccatcatttaatatctgtaagtgcccagaaggtacaaggtgctatacagccgttaaacaccccctccctgcaactgtttaaaattagaatagatttttgtatcaaccactgctagaagctttccccacctaggtgggctgcaagggcctgcattcccaacatcccattacatgtttcccactccagaaagtctctgggtttattccagctttttatcttgacgtgtcccattacccccat

SEQ ID NO: 369591 - DNA, 1328 bp, Homo Sapiens
  misc_feature (60)..(396): n is a, c, g, or t
  misc_feature (642)..(642): n is a, c, g, or t
  misc_feature (1247)..(1278): n is a, c, g, or t
agattggttggagggtccttccagtatttagaagtagaagaaatagaaaaaagctatctnnnnnnnnnnnnnnnnnnnnnnnnnnnnnnnnnnnnnnnnnnnnnnnnnnnnnnnnnnnnnnnnnnnnnnnnnnnnnnnnnnnnnnnnnnnnnnnnnnnnnnnnnnnnnnnnnnnnnnnnnnnnnnnnnnnnnnnnnnnnnnnnnnnnnnnnnnnnnnnnnnnnnnnnnnnnnnnnnnnnnnnnnnnnnnnnnnnnnnnnnnnnnnnnnnnnnnnnnnnnnnnnnnnnnnnnnnnnnnnnnnnnnnnnnnnnnnnnnnnnnnnnnnnnnnnnnnnnnnnnnnnnnnnnnnnnnnnnnnnnnnnnnnnnnnnnnnnnnnnnnnnnnnnnnnnnnnnnncagccccatcattttggtaaccccttattagaaatatagggaaaagttagaagtacctttaggtaagaggattatttaaaattccccaaagatcaagacagcttctaagaagggctgagtcggtggccatgggagacgctgccggctgcctggctgggagtcatggggtgttggtggggtggtgaccaaggcatgcactgacctccttcctgcccccacaataggcagtgcaacaagacatccaancggaagcgacagctgcgaccttatgtgctgcgggcgtggctacaacccctacacagaccgcgtggtcgagcggtgccactgtaagtaccactggtgctgctacgtcacctgccgcaggtgtgagcgtaccgtggagcgctatgtctgcaagtgaggccctgccctccgccccacgcaggagcgaggactctgctcaaggaccctcagcaactggggccaggggcctggagacactccatggagctctgcttgtgaattccagatgccaggcatgggaggcggcttgtgctttgccttcacttggaagccaccaggaacagaaggtctggccaccctggaaggagggcaggacatcaaaggaaaccgacaagattaaaaataacttggcagcctgaggctctggagtgcccacaggctggtgtaaggagcggggcttgggatcggtgagactgatacagacttgacctttcagggccacagagaccagcctccgggaaggggtctgcccgccttcttcagaatgttctgcgggaccccctggcccaccctggggtctgagcctgctgggcccaccacatggaatcactagcttgggttgtaaatgnnnnnnnnnnnnnnnnnnnnnnnnnnnnnnnnggatgtggaagctacagaaatatttataaaacatagctttttcaaaaaaa

SEQ ID NO: 369592 - DNA, 1084 bp, Homo Sapiens
  misc_feature (1025)..(1033): n is a, c, g, or t
ggcctgggtggcgaattcggcacgaggcgaagcccccgtccctgcagtgggcctgggtttccgactggttcgtggatttcagcgttccggggggcacggaccaggaggggtggcagtatgccagcgacttccctgcctcataccatgggtccaaaacgatgaaggattttgtgaggaggaggtgctgggccagaaaatgcaagctggtgaccagtgggccctggctggaggtgccccccatcgccctcagggacgtgtccatcatcccggagagcccgggtgccgaggggagtgggcacagcatcgccctctgggccgtcagcgacaagggggatgtgctgtgccgcctgggcgtgtcggagctcaaccctgcgggctcctcctggctgcacgttggcaccgaccagcccttcgcctccatctccatcggggcctgctaccaggtgtgggccgtggcaagggacggctccgccttctaccggggatccgtgtacccctcgcagccagccggtgactgctggtaccacatcccgtccccaccgagacagaggctgaagcaggtgtccgcggggcagacgtcggtgtatgccctggatgagaatggaaacctgtggtatcgccaagggatcacgcccagctacccgcagggctccagctgggagcacgtgtccaacaacgtgtgccgagtgtccgtggggcccctggaccaggtctgggtgatcgccaacaaagtgcagggcagccacagcctgagccgggggacagtgtgtcatcgcaccggcgtgcagcctcacgagcccaggggccacggctgggacaccggaaattcgggggaaagcttgggaaccatatctctgtcccgggccaatggccaccaggggcccccccggagctcgttccccaggaaacagggagcccaagtgcccccaaccaaaaggccccatggggccccgttcctgtcttgcttgagggcccccccaacacacctttaattttgcgggggaacgggtgcccccccatttttnnnnnnnnnatataagggggcttgaaccccaattttcttgggggccttggaaaaaggggg

SEQ ID NO: 369593 - DNA, 867 bp, Homo Sapiens
  misc_feature (49)..(71): n is a, c, g, or t
  misc_feature (154)..(438): n is a, c, g, or t
  misc_feature (447)..(478): n is a, c, g, or t
  misc_feature (813)..(813): n is a, c, g, or t
ggctggaccggtccggattctcgggatccagagtgagaccgtgtctctnnnnnnnnnnnnnnnnnnnnnnncttttatcttttccctcaataattagttgcatgttatatctgctaattttgatctatctaaaataaaatggatacttcttgcnnnnnnnnnnnnnnnnnnnnnnnnnnnnnnnnnnnnnnnnnnnnnnnnnnnnnnnnnnnnnnnnnnnnnnnnnnnnnnnnnnnnnnnnnnnnnnnnnnnnnnnnnnnnnnnnnnnnnnnnnnnnnnnnnnnnnnnnnnnnnnnnnnnnnnnnnnnnnnnnnnnnnnnnnnnnnnnnnnnnnnnnnnnnnnnnnnnnnnnnnnnnnnnnnnnnnnnnnnnnnnnnnnnnnnnnnnnnnnnnnnnnnnnnnnnnnnnnnnnnnnnnnnnnnnnnnnnnnnnnnnnnntccatctcnnnnnnnnnnnnnnnnnnnnnnnnnnnnnnnntcttaaatagatcctgctttccctagttgtttattgaattagatacaaagtctttgatctggcattgatctaacttgtatttccactcttaacccccaccgcagctgcagatatgcctcatattgtatctagattggtcttaaacatgctctgcacttctctgccttcatggaagacttttgctgatatttccttcacttgatacactttttggcttttccaccctctccctgcccccaatttctgcttgccagaataatatctgtttcttctttcattcaatttatttaacaactattgagaccctgtttgtaggtggctgggatacacctagntgaacaaaagttccttgttcatttatggcaggtcatatttccagttgaagggaa

SEQ ID NO: 369594 - DNA, 1848 bp, Homo Sapiens
  misc_feature (62)..(62): n is a, c, g, or t
  misc_feature (541)..(541): n is a, c, g, or t
  misc_feature (549)..(549): n is a, c, g, or t
  misc_feature (571)..(571): n is a, c, g, or t
  misc_feature (577)..(577): n is a, c, g, or t
  misc_feature (590)..(590): n is a, c, g, or t
  misc_feature (595)..(595): n is a, c, g, or t
  misc_feature (598)..(598): n is a, c, g, or t
  misc_feature (602)..(602): n is a, c, g, or t
  misc_feature (617)..(617): n is a, c, g, or t
  misc_feature (619)..(619): n is a, c, g, or t
  misc_feature (623)..(623): n is a, c, g, or t
  misc_feature (643)..(644): n is a, c, g, or t
  misc_feature (646)..(646): n is a, c, g, or t
  misc_feature (649)..(650): n is a, c, g, or t
  misc_feature (652)..(652): n is a, c, g, or t
  misc_feature (654)..(654): n is a, c, g, or t
  misc_feature (659)..(659): n is a, c, g, or t
  misc_feature (670)..(671): n is a, c, g, or t
  misc_feature (1664)..(1664): n is a, c, g, or t
tactcaactcacatccgctagtgttcttctaccatcgcgcgctcatgggtcccccacgccgnaacgcaggactgcctcactgagtagatgtctaagtgcgtagtggacatcatgtaaggctcctgggccgcccccgcagtgaacctcttgtcacggtgatgaacggcgccatggtagttttaggcacatcttgctggtcaggcattccccctctctgtgttaggtctataagtctccatatttaccccaagggtgggtccccctggtatgggcccacttccagggctttttctgtgcaccacggcgtactgccaggcccacaagcggtcgaccccgcgttccatcacaggagggcagcccaaaagagccccccacctgctttcctacagacggaggactattgtgtcccctgccccccctgaaaggccttgtgtgggtggatggtgggccactggttcccatctggatcagctgattacccatggcaaacatcgagcccaggcgggcgagggggtccctggaaggcggaccgcccctcccngcccccgncttgggcggtggggcgggcgcncggggngctgcgggccggncgggncgnggcngccaggccccttccntnggcnggagcgggagggctcagtcnngnggnngncngttcntcctccccgcnnctccctcctgcggcccgtcaacgtgtgtgtaaagaaaacgggaaaaggcaacaataaataagtggtgccatccctggggccatctgtccagggcggcggccggatcattcactcttggtgctgtgggcggtgtccaggttcaccacctgtagctcggtgaggttgctgctgctccccggcctgctgccctatcacagccatctggtggagctgaactgctgaaacagggatctgcactgtcccagatgatgctgtcaggaacacctgggggacgccacctggctcctggacctggctgtgtgacacctgcatggtggatggtgcctgggagaaggcattcagcacggtgaggctgccatcacccaggcccgaggtgggggcatacatcaccgcatgcgggctagggtacatcatgtggccacccacagttgtgggcacggatgacgtcatgatggtggcgggcagcgtcactgtcccgctggaggaggtctgcgtgaggtctgtgctgctgtcacgggagggagacgcttgctgtggggcctggtgcacttgaatggcctgcactgggacctgctgggccactgccccaccaggcatgagggtgaagctggtaggcagctgcataaggcccccagaggagacagggccgctgcctgtactcttcagcacagtcccattggcactgctgacagcactggggctgacactagcagacactggtgccaggtagttggtgatgggaaaggaggggccgctgctgacttgcatggtggtagaggtgctaggtgctgtttggatggtggaaggttgtacccggcaaggttggtgactgtgaacgccggcttcagtgtgtccttggtctccccactgctgtcagactccgacacctggtaggtgagatctgtctcttcaaagccagtggcactcattctctggtctgttgtggggtctgaacggggtggagagtctggcgagttgaggcaggtctgaatnagtgccttgccggtctcactggtgatcatgggctgcagttttcgggtggcaaaggtatacacatggcctgtctcactggccaccagcaacagcacctgtgtccctgtcagcgtggacagctcataggccttcttcatgatgcccgtcttcctcttgctgaaggtcgtgtagcgccgcagcttgt

SEQ ID NO: 369595 - DNA, 914 bp, Homo Sapiens
agcgggcgtttcctccgaggctggcgatcggcggagctcccacctccgcttacagctcgctgccgccgtcctgccccgcgcccccaggagacctggaccagaccacgatgtggaaacgctggctcgcgctcgcgctcgcgctggtggcggtcgcctgggtccgcgccgaggaagagctaaggagcaaatccaagatctgtgccaatgtgttttgtggagccggccgggaatgtgcagtcacagagaaaggggaacccacctgtctctgcattgagcaatgcaaacctcacaagaggcctgtgtgtggcagtaatggcaagacctacctcaaccactgtgaactgcatcgagatgcctgcctcactggatccaaaatccaggttgattacgatggacactgcaaagagaagaaatccgtaagtccatctgccagcccagttgtttgctatcagtccaaccgtgatgagctccgacgtcgcatcatccagtggctggaagctgagatcattccagatggctggttctctaaaggcagcaactacagtgaaatcctagacaagtattttaagaactttgataatggtgattctcgcctggactccagtgaattcctgaagtttgtggaacagaatgaaactgccatcaatattacaacgtatccagaccaggagaacaacaagttgcttaggggactctgtgttgatgctctcattgaactgtctgatgaaaatgctgattggaaactcagcttccaagagtttctcaagtgcctcaacccatctttcaaccctcctgaaaagaagtgtgccctgggaggatgaaacgtatgcagatggagctgaaaaccgagtggactgtaaccgctgtgtctgtgcctgtggaaaatggggtctgtacagccctgaccctgtgac

SEQ ID NO: 369596 - DNA, 930 bp, Homo Sapiens
  misc_feature (88)..(88): n is a, c, g, or t
  misc_feature (220)..(229): n is a, c, g, or t
  misc_feature (861)..(871): n is a, c, g, or t
ttgtgggggaacccatggccccacaccaggaattcctgggcaataatttttaaaaaattttttgtaggaacataagggggtccttcgnccattgtttccccagggcttgattcttgaactccctgttcctcaagcaattcctccctgcctggttcttcccaaaactgttgggcttacaaggtgtgagtcattgagcccagcttgtatttcttttgatttnnnnnnnnnntatcctgaatgtgatccaccaaattaatttcaccatccactaataggtagcaacctgaatgaaaaatactgttataaactgtacacaaaaccagagattataaacatttgcctccaaggagatgagagaggcacaaaggtacattgtgttgctctgatgggccctgtttccttcagtgccaggaagaggtggctctcagacctttcttctggcatccctcatgtatgcagtgttggttattattttcaaggccttggtaacaaaatgcccctagtgtgaccagtcagactgacagtccatatctgtaatatggtggtaagtttcctttgcatgtctttctttctagcatcttagaccttgttacctaggaaattttctttttgcttgaagtacatcattaagaatttccagtgaaggcagattcttaaagtttttgttttccagaagagatcttggaaaatataaaagagttggcagttatttcttttagtacatgagatagtattacaccaatgctgttgagaagtctattgtgaggcaatgtgtattctttctctggctgcttttgagatttctctctgtcttttttaggggcagttttactcttatgtgactagaagtagatttcttcnnnnnnnnnnnaatactgcttgagattttattgggtttttgaatctgtggatagatatccttcaaccgct

SEQ ID NO: 369597 - DNA, 884 bp, Homo Sapiens
  misc_feature (20)..(20): n is a, c, g, or t
  misc_feature (57)..(57): n is a, c, g, or t
  misc_feature (68)..(68): n is a, c, g, or t
aggtcctggtggaatgcccncgcgctgccatatcccatatagcctcctttacattanccctctttttncagcctaaatttcgcctccccattcattcataggttcaaaggcagaagcatagtcctgatctatagttggcacctgtgatttgtcaaaacatgtttccagaactgaaaaatgtgctctgggtgatgtcttatttcctcgtattgagaagtggatgctcctcaacaatgacaagctttctgggtggtcgaaaaagtactgtaagttaagcgcacccaaagtcagtgttctcccttgaaggaattgcaaaacaaatggagaacacgcagcaacagtgttgctttgataagcagttttcagggcaagaaccagtaaatgttctgaaaccattgaaaagtaagcttgtggacaaatttgccacaatcccctaagtaactgcatctgcagtgaaatttctggctggtgctttaagtagtcatcattttcagatatattctccaatgactctttgttatccactaaatggagcaaatgagacacaattttgggccctgcttttgttgaagggaggctggagacatagttcaaaaaattgttgtaggcgcttacagtcatcatgggtgagttgatttgtttcaaatgatacagtcccaaatcttgatgttcctgcctatctgaatccaggagttcaatcagcctcatccccgcaagaaattcttggaaggcaggacttaaaaaccggtagaatggtcttagtctctgggctgtaaatttgctcatcaagcacatggttagatcttcatcttcatcaagcgctgcttctgcgagatcatcatcattaaactcaaagcaacatgaaaaaaaccctttcaaggcca

SEQ ID NO: 369598 - DNA, 952 bp, Homo Sapiens
  misc_feature (531)..(531): n is a, c, g, or t
  misc_feature (607)..(648): n is a, c, g, or t
gaggcagtatcctaacggtctaaggtaacgaggctgggtgggaattcggcacgagggaaggacagccccggtagaaggaggtcatctgtgaattttgaaagtcaacagtacaggagaagagaaggaattttgaagagaaaaaggaaaattaaaattactaattaattgttagattcaatatttatatggagtttgaaaaataatagtggcctgaaggaggaagattccagctttaaaaaccaagtctgaggaaatatttggcttcataaagtaaagagacggttggcatttattattacttttgcctgtatttgatgcccataaaataagcgtttataaaaaccaatttcctgatggactattaaattcatcttagaataaattagtgaagaatttaattttagaataaataatccaatctgaaataattataccttctttccttgttaggtagttatgagtaaatctgcaaaaggcaatgaaaatgccttaaattttatcaataacagaattattgtatttaaaaaaaanctaatacttatctttaaaatagtaaataggattttaaacagagaattttatcagtaataggtgtcagtttttaaannnnnnnnnnnnnnnnnnnnnnnnnnnnnnnnnnnnnnnnnnggattttcatcaaaaagaatgtgcgatctaatgttgtaactgagagctacctcaagctagccatttgcacagtgtctgtctaatgtcaattattgctttgtttccctcaaacatttaatgtaactcacagtgtccctgttaattgcaacaacacccatgggtgcctcagagtacagtttgagaatcaaggggtagggcttttaaatctagcagacatgaattgaaatcttggctccaccttgtgaccttgacaagtcaagtctctaaaacctttctgatccttggtttctttatcttaaaaaaa

SEQ ID NO: 369599 - DNA, 750 bp, Homo Sapiens
aaagacgttcaagaaatggccccatcctcaaagaagtagcagtacctggggagctgacacttctgtaaaactagaagataaaccaggcaatgtaagtgttcgaggtgttgaagatgggaaggatttgcagggctgagtctatccaagaggctttgtttaggacgtgggtcccaagccaagccttaagtgtggaattcggattgatagaaaggaagactaacgttaccttgctttggagagtactggagcctgcaaatgcattgtgtttgctctggtggaggtgggcatggggtctgttctgaaatgtaaagggttcagacggggtttctggttttagaaggttgcgtgttcttcgagttgggctaaagtagagttcgttgtgctgtttctgactcctaatgagagttccttccagaccgttacgtgtctcctggccaagccccaggaaggaaatgatgcagctctggctccttgtctcccaggctgatcctttattcagaataccacaaagaaaggacattcagctcaaggctccctgccgtgttgaagagttctgactgcacaaaccagcttctggtttcttctggaatgaatacccccatatctgtcctgatgtgatatgtctgagactgaatgcgggaggttcaatgtgaagctgtgtgtggtgtcaaagtttcaggaaggattttacccttttgttcttccccctgtccccaatccactctcagcccgtaatcccgaacacggata

SEQ ID NO: 369600 - DNA, 1166 bp, Homo Sapiens
  misc_feature (37)..(37): n is a, c, g, or t
  misc_feature (60)..(60): n is a, c, g, or t
  misc_feature (80)..(80): n is a, c, g, or t
  misc_feature (87)..(87): n is a, c, g, or t
  misc_feature (103)..(103): n is a, c, g, or t
  misc_feature (122)..(122): n is a, c, g, or t
  misc_feature (214)..(214): n is a, c, g, or t
  misc_feature (271)..(332): n is a, c, g, or t
tgtggaaaaatcccattttactttttttaaaaaaatnttgcaaaccgtttaacttttgantagaacgcaacttaaaaaangttaaangaaccttcacccaacnccccccttgtccccggccnacccctcgaagcgcccaccgaagcttcccaggatcctggggaaactgcaaaacaagccggtttgggggatggtggcctcatcccaggagggncgggggagagaggccctggggcttccaaaactcacggatttgagggagagggagaannnnnnnnnnnnnnnnnnnnnnnnnnnnnnnnnnnnnnnnnnnnnnnnnnnnnnnnnnnnnncagcacgggaacaccatcaggctgggcggtattttcagtgcaaccaagaaatggtagactcaagtttttagttttaagactagaaaaaaatgcatcactcccccccataaccacattgaccacgcagtgttttccaaacaaaaaaaccaggcgcacaaactccacccacaaatgtacacacacaagataaatagtttagaacaccagcaacagcgaacagccgagcgtctcttcggccgcgcgccagcggcgcggacctcggacctcggggctgctcctcggctgcagccggcatcggcgcgtcccgggcctgcgggcgggtcctgaaggcggcggcggagcgctccgagtccgccttcggctcccgccgcccgcctttcaccttcgggagaaaacattttgcgcagaggatccggtatctcgggattccgaacttgctggttgcgagactcaaatttcaaaaggggctggagcccgcgccccgcccccacccgcgaggcggcgggcaggcgagcgggtgggggccgtgggaagctgctccggcccggccgggcccggctaggccgcagggaggcgctcggccggcggggctgccggaccctggggccgggacgcacgcgccgtattcgccgtggccacgggccttctggcggggcctgcgagccgggcgcgcaccgaggtagttggcgggaaggtacagcagagacgacgcgggcgcagggccggggtccggggtcccggcgggcatcaccggccgctggccgcgtacttcgccttggtgatgagatagagcacgatgtcctggtggccagcgaacgcggcgatgtgcagcgc

SEQ ID NO: 369601 - DNA, 897 bp, Homo Sapiens
  misc_feature (716)..(716): n is a, c, g, or t
tcctgtgctgtcctcaggcctccgctcctgttttggtggcccaggctctcccctgacccatcctcgctcccccacctccttgggtcatgcccacccaccctttcctgcctcctccgtgtgaagacatccaacatccacgtgacttttccagctccatttttgaacagtgactgagattctagaaaaactggctgctaactggcctgagccaggcaacactgattccaatccctcctccttttttaagttatttgatggaagactcacctaatttgtgacctgaaactgttgaagaaatagagaggagggggcccgttgattacagagagcatttgggattttgtttggtttggagatgatgcctaggttactgggtttggggggattgttttcctttgggggccttccccttttactccttttcttccagagatcaagagcttctcttgcatcttcttccactgggctctggattaatcaattacccaaaggctgcacctgccgtgttgtctgggcttgcatcccagatgtgttggagtatgcatgggatgtagtgctttttagaggagccactgggcaaggccaccaagaacaaatgcatgacattttatagccaaggacgcctcgctaaagtcttatgggcgtcccctggggttgggggggcacaaggttttgggaggaagaagacaacttcccctcattccatcatcaccatnctctttctcactaggttttctttctaggttttcaagcaatagtttctagccctgcctttggacaagggggggccccaggttaaaacaaaactaccccatcccatggagcctgcccagggcaggtcaaaaaaacaggaaacctttccccccgaaacttgttggaagtccccctggaaaaaag

SEQ ID NO: 369602 - DNA, 739 bp, Homo Sapiens
  misc_feature (63)..(63): n is a, c, g, or t
  misc_feature (68)..(68): n is a, c, g, or t
  misc_feature (162)..(162): n is a, c, g, or t
  misc_feature (369)..(369): n is a, c, g, or t
  misc_feature (553)..(613): n is a, c, g, or t
  misc_feature (649)..(696): n is a, c, g, or t
accatggcaacgtggacctggtgcggctgctcctggcacacccagcctgcgacagcagcctgnactgnacaaggctggccgcacagctttgtccatcgctctgaagtcacccacccatatggaaattgctgggcttctgagagcccacgcggagcagggcanggtccctggggctgtaggggctgcagaagaactggccgtggggaacaaaagccttcttctctggactcctccctcgcccttgaagagggcagaggtcacaggccagagagccacccttctagagaagaaactatgtcaaatatgcacatacattcctgttgtataattctgctcattagggatgctttgtagttttttgccttaggnccaagcctggaaaactacacggggcttcagagcagggttcaaggtgcaaggtgaggggtacgtcggtgtcatccaaacatccaaaaacatctttcagcctttgaatttcctcatggacctctaccccttcttgtaaccatttgtggtagccaagccaagggcagggccaggaaacccccatttnnnnnnnnnnnnnnnnnnnnnnnnnnnnnnnnnnnnnnnnnnnnnnnnnnnnnnnnnnnnnacagggtggccaccctaaaccccttttcccgggggnnnnnnnnnnnnnnnnnnnnnnnnnnnnnnnnnnnnnnnnnnnnnnnngttccccccctatttgtgaaaaaatggccccattgtctcccat

SEQ ID NO: 369603 - DNA, 1008 bp, Homo Sapiens
  misc_feature (109)..(111): n is a, c, g, or t
  misc_feature (274)..(274): n is a, c, g, or t
  misc_feature (550)..(558): n is a, c, g, or t
gggaagggtcaacaggtgcggcaaaccactttggcacacgtatccctaagtaacaaacctgcacgttctgcatatgtatcccggaacttaaaaggaaagaaaagagttnnncccttatcttcttgtttatttcaaacattcccacctaattcaacatgaaaaaaaccaaaccaaagcaaatttaaaatcctgagtggctacacaaacaccacatataatatacataccaataattagaagcctgaaaaatccaatggggtagaaattttaacangtattggaaaagactgccacagaaatgatggcagctcactcgtcaagattcattttcttcttttctctccatttgctatcacttaatataatacactggccaaattcggacaatttcagcagatggacctggaagctaagggttttatcttttccaaccacccttccccaaggtgagagtatgatgtttcagcattatcttgccagacagaaactgcattgggggttgtggtgggaaatctgtttacaagtggatggactaaaatactgaaacagnnnnnnnnntcaagtatgtgctttttaggccttgggtaaggacaatggcagccagaggacaacactgctattgtggtgatgtagaacactatttttggatggcactttaatgaaacaacgaaacccatgatcttaaagtttacagaaatgaaatttgacttgtaattgctacctatctctattcccaagatagcaaaagaggcaatagatgcatctgagaaacttctggtttagctcctcaaattgcaaattaagatctaaatactgagttttattttaacagtaagccatactatcatccttttgattaatacccaatagctagttatatgtgttggctaatttagcttatcttaaacttgtgtgccaacactttaaataaaaacactttaaataaagagctaattagagtataaaataaaatgaactggtttatagtgcagaaaaatggtcagcaga

SEQ ID NO: 369604 - DNA, 886 bp, Homo Sapiens
  misc_feature (733)..(733): n is a, c, g, or t
atggcacatagagcataggagacagagctgagacttgaatgcagttctcttgactccaagccatgggtgttcatctcctatactaacagtttctgctcgcatcccagtctggtccttgctggcaatgggttcctggggcagaggaccaggaggctggttgtgggggagtccatcctgatgtttgggactggggaggggcacaaaggaggcagggcccagctctagctctcttcccttctctggccaggacaagtggcagcacctggcctcagagggcagcagtcgtctggacatgtttgagcacatcagcctcatgaccttggacagtctacagaaatgcatcttcagctttgacagccattgtcaggagaggcccagtgaatatattgccaccatcttggagctcagtgcccttgtagagaaaagaagccagcatatcctccagcacatggactttctgtattacctctcccatgacgggcggcgcttccacagggcctgccgcctggtgcatgacttcacagacgctgtcatccgggagcggcgtcgcaccctccccactcagggtattgatgattttttcaaagacaaagccaagtccaagactttggatttcattgatgtgcttctgctgagcaaggatgaagatgggaaggcattgtcagatgagaacataagagcagaggctgacaccttcatgtctggaggccatgacaccacggccagtggcctnctcctgggtcctgtacaacctcgcgaggcacccagaataccaggagcactgcccgacaggaggtgcaagagctcctgaagaacggtgatcctaaagagattgaatgggatgacctggcccagttgcccttcctgaccatgtgcctgaaggaga

SEQ ID NO: 369605 - DNA, 1134 bp, Homo Sapiens
gggaaaatgcttatggtgcggaccatccatatactgctcgtgaacttgaagcacttgcaactttgtaccagaaacaaaataaatatgaacaagctgaacattttaggaaaaaatcctttaaaattcatcagaaggctataaagaaaaaaggcaacttgtacggatttgcccttttacgtagacgggctttacagttagaagagcttacattaggtaaggacacacctgataatgctcggaccctcaatgaactgggtgttctctactatcttcaaaataacctggaaacagctgaccagtttctgaagcgttccttagaaatgagggagcgagttctaggaccagatcaccctgactgtgctcagtctttgaataatctggcagctctatgcaatgaaaagaaacagtatgataaagcagaagaactttatgaaagagctttagatattcggagacgtgcattagctcctgatcacccttctttggcatatacggtgaagcatcttgccatcttgtataagaaaatggggaaacttgacaaagctgtacctttgtatgaattggctgttgaaattcgacagaaatcttttggcccaaagcaccctagtgtagctactgccttggtgaacttagctgttctttatagccaaatgaaaaaacacgttgaagctttgccattatatgaaagagcattaaagatttatgaagatagcctgggtcggatgcatcctcgagttggagaaacactgaaaaatttagctgtgcttagctatgaaggaggagattttgaaaaagctgctgaattatacaaaagggcaatggaaataaaagaagcagaaacatcactcttgggtggaaaagctccttcacgccattcatcaagtggagacacgtttagcttaaaaacagctcattctcctaatgttttccttcagcaaggacaaaggtaatagcagcagttagaattctttgcaaatgtaccttaagacaaaataattaaacattttggaacatttgaattttgaaactttaaaaaaatgttgtacgaaaattttactacggtgtgatttaacctgcctatttgtatgaaggttgtattgggattacattaagtttggaaattgggattatggt

SEQ ID NO: 369606 - DNA, 1184 bp, Homo Sapiens
  misc_feature (375)..(383): n is a, c, g, or t
  misc_feature (941)..(958): n is a, c, g, or t
tactttccaagggtgggggtggggcaaacaaaaatattggtgtttgatacaaggtactgaagctaagatgtgaaaccttccatatacactttaaggacttctttgtccctggaaagtgatttttctggggctccttaggtagagaggtgtattaatggtgccagtgttagaatccttggcagtctcttcttgaacctgcaactccagtggttaaatctcataggccatataaccattttctagagaattctgttcctactatctaatgcagtaactgacttaaaagtaagtattactgttagactctaacataagtggtggtatttgttttaatggaggtgggatcaggtatgtgttcacttaagctttacattnnnnnnnnntttatatgtgtaaataaatatatatgccttgtagaaaaattagccataatcttactaccagaagagaactactgttaactttgtgtgtgtgtatatgtggtggatggttttatgttacctcctggctctttttatgtttccaattctctaacacttgtttaattaattacttatattattaagataacaggctttgttattattttactaagtggaccatgattgaaactatcagtctccatttcaggtggtgaccaagatgagccctacgacaagtgggtggaatttaataggtttctagttggtatgggttgtcctcagatccaacctattcaacctacatgaaaatacttatttgtcctttacctcttaagcaatgaacttagggctgggagcactggtgaagaaactgggatggcattaggttcagctctgttgctggtttcataattttgttgctgatggaaggctaccaagggactagagatgaaccagtttggccctgcttagtggcaacagtaaaataactgcttgaaggcccaaatcaagacagtgacnnnnnnnnnnnnnnnnnnagactactcaagtgcagtagtcagaagggggggaaaagagtagaacaagaaattcccatctgtaactgactatgaaacaatccactgagctaattccaacagtgacattttaaaaacagaaaacttctgaaattagacagtccccaataaggtggtggacaaatgaaatttcccccttagtttcaccagtaaccttttttataaaaaaatattcaccttttccgga

SEQ ID NO: 369607 - DNA, 1581 bp, Homo Sapiens
  misc_feature (308)..(308): n is a, c, g, or t
  misc_feature (328)..(328): n is a, c, g, or t
  misc_feature (417)..(417): n is a, c, g, or t
  misc_feature (509)..(509): n is a, c, g, or t
  misc_feature (1065)..(1159): n is a, c, g, or t
  misc_feature (1446)..(1446): n is a, c, g, or t
  misc_feature (1478)..(1478): n is a, c, g, or t
cgagagagtggacatattattcatataaagggtgagtggatcgtgagtatgagttagtaatagatgaggatggggcgttagaaaagtatagtaaagagataaggttgataagaaaataaaaataacacataacgcgctatcaaggttgtataagtggggaagtataaaaatattgtgtggagcattgtgtgggagggggagggtaagactcagaactagcgtgatcatgtgtttgtacgagttttaattgaaacgcgagtaatctcaatatatctacaatattaatgttgtctatccttagaagattngggttaggggagaggcgtgntagcgaagcgtggctataataataaaatatgacatcattgttttcgttgacattatagaatatgtgttgatcatatatgatgatattgngttgggagctatttcatattcttaactgggcgggcggcagtggtatggcacacatatatcaatgattaaattattaggcagagggcggatancactgttatattatatcatctcttctgcaaagtaagtttttgcttattattattaattgaaggaaaagatcagctacctcatgattattacaatcaagtagcgttgagacggggttcgatacaaagtgtagtggggcgtggtagtgacacataagttggtcatgtgtttatatacattttatctgagcgttggtgtctatctgctatatgtgtatcgtgtagattgtggttttgttacaaaattggtggtggaggtgatggaatgttgaataatttttttatagattgggggtgtaatgtaattaattttggtatattgttgattattgttcgtgctagtgggaggagtgtctgtacataaatataagagataaaaaggggtaagatagtgaaatttggtcttgttattgcgtatgataaatggagtgtagattacaatggagatagtagcgttgtgggttgggggtgtgaaatacgcaggcaaatataattgtgtctgcgtggtgagaagaaccttgagttggcgttttaacatggtagtatggtagtaagaatnnnnnnnnnnnnnnnnnnnnnnnnnnnnnnnnnnnnnnnnnnnnnnnnnnnnnnnnnnnnnnnnnnnnnnnnnnnnnnnnnnnnnnnnnnnnnnnagtagtggctaagtatataaaagggctcagagcccaggccttcttaggggctgaccccagagggctaatgctactgcctggcagccccctgcggcccacctcctgggggacagcggcagggccccagggtccccaccttctgcctcagggaggtctgcagggaccaccagagggatggatgagacggcagaaaatgcaaagaccaccatccagcccaccaatcacaacttgcagcagtcatcacaggcgaatgcagagctaagtcagactgggccaagggtgggagncggcacgactgggggtcccaatacctgaagancagtaagccaccccttcaagaagggcccgctgaggaaacagaggcttcacacatgtgcaaaacgcatttggtcaaggtcaacatggcgtctgtcttttccatt

SEQ ID NO: 369608 - DNA, 566 bp, Homo Sapiens
cgacagcagacttttggaaaaacagacttgaaagtgcctgccaaagccaagctcaccaaactgaagatgccttctcagtcagttgagcagacctactccaatgaagtccattgtgttgaagagactatgaaggaaatgacccattcatgaccgcctcctttgacagcaatacatacgcctagtacagctgagccatccaagtttcctttccctacaaaggactctcagcatgtcagttctgtaacccaaaaccaaaaacaatatgatacatcttcaaaaactcactcaaattctcagcaaggaacgtcatccatgctcgaagacgaccttcagctcagtgacagtgaggacagtgacagtgaacaaaccccagagaagcctccctcctcatctgcacctccaagtgctccacagtcccttccagaaccagtggcatcagcacattccagcagtgcagagtcagaaagcaccagtgactcagacagttcctcagactcagagagcgagagcagttcaagtgacagcgaagaaaatgagcccctagaaaccccagctccggagcctga

SEQ ID NO: 369609 - DNA, 643 bp, Homo Sapiens
ttccatattccccccacgttgagtgtggcgcccctgctcacagaggtgagtatagcctcccaaatagccttccccctacaaaaggccctcttttttgcatattggcaatatcaatttgacatgccctagatttggggcatacccctcttcccccaaacaacacttaggatttatttaatgtcaaaattagcccctgcaaaaaaggggaaaaggggcaccacttcaggttcccctgaaggagcaaaagaagttgggaccactggcctgctccaagaagtttaatggttataagactcaggtattcataaaagccctaagggctaagctagtagcacagaaaagccgttaagggggatcacagcagaatacacagggcagaagagaagagttggcagcaggggaacggagtctcaaggtgaccaatagagagcacaacattctcaaatagtccttgaggtgctgattcctgggagtagtcagcagagggccagaacatctcccaggggtccttttggggaaggatgacttcacttagttttaggggtgaagagccactgagctgggtgcacagaaggccatggctcagaagggaaagactgatctgagaaatcaaaaggaagtgggggccaggagcagtgctcac

SEQ ID NO: 369610 - DNA, 961 bp, Homo Sapiens
  misc_feature (761)..(769): n is a, c, g, or t
ttgttttgtgccacaaaaaagagtgtttcagcgatttaggacggagggtgttagttccacacaccagagtgcttaacaccaaatgttgaaacataagccccgaggaagaggcttagcctgtaccagggaggttgtaaccgcggacattgttagccaagttttgtaccccctagaaataaagggtggccgcttctgaattaggggcttattgtagattctccaccctgcctggggccagtttggacttttttcgatgaatgagatatgtaaggaagctgaaggggtaaggttacaaccctttttgggtttactttctaagaacgataaaggattctctccatcctggtagggataacgattggacaccgttagaataactccctttgtaaccagactgtccagcaaccttccgaacaagtattttccctcctgaattatcaagcacaccactgtgtacggcagcgccacacacactggagtaggatgcatacacgtcagtgccataaacatggtatttggggtcttggcatcctgctggacatttcacaatgaactcaggatcgatgatctttccggctttgacatcgcagttgatctgaggcacagtgaacttgggccttttaatcttctttgccgtttctttgtttgaatgtactccagtcaccagcaaaacaaggaacatttcaataacagatgccttcatagtgagaacaacagtcctcataaatatcagaatgacacccttgtttgaagaaggcaannnnnnnnncaaaaaattttcaccacacagaatgaatattctttttcccttaggctttcctgcatcacaaatcccatccaaattattctaaggaagaaacagggagaggtccaagaaccttttctcttcttctcagaggagctaatcgaacagtcccatcaacctctcagtacttgaaaaacatccggaaaattccggacc

SEQ ID NO: 369611 - DNA, 986 bp, Homo Sapiens
  misc_feature (821)..(821): n is a, c, g, or t
  misc_feature (833)..(834): n is a, c, g, or t
ggtcatgagcgcggtattactgctggccctcctggggttcatcctcccactgccaggagtgcaggcgctgctctgccagtttgggacagttcagcatgtgtggaaggtgtccgacctgccccggcaatggacccctaagaacaccagctgcgacagcggcttggggtgccaggacacgttgatgctcattgagagcggaccccaagtgagcctggtgctctccaagggctgcacggaggccaaggaccaggagccccgcgtcactgagcaccggatgggccccggcctctccctgatctcctacaccttcgtgtgccgccaggaggacttctgcaacaacctcgttaactccctcccgctttgggccccacagcccccagcagacccaggatccttgaggtgcccagtctgcttgtctatggaaggctgtctggaggggacaacagaagagatctgccccaaggggaccacacactgttatgatggcctcctcaggctcaggggaggaggcatcttctccaatctgagagtccagggatgcatgccccagccagtttgcaacctgctcaatgggacacaggaaattgggcccgtgggtatgactgagaactgcgatatgaaagattttctgacctgtcatcgggggaccaccattatgacacacggaaacttggctcaagaacccactgattggaccacatcgaataccgagatgtgcgaagtggggcaggtgtgtcaggagacgctgctgctcatagatgtaggactcacatcaaccctggtgggggacaaaggctgcagcactgttggggctcaaattncccagaaagacnnacatcactcagcccctcctggggtgctttgtggctcctatacccacttctgctcctcggacctgtgcaatagtgccagcagcagcagcgttctgctgaactccctccctctccagctgcccctgtcccaggagacggcagtgttcctacctg

SEQ ID NO: 369612 - DNA, 932 bp, Homo Sapiens
  misc_feature (452)..(467): n is a, c, g, or t
  misc_feature (814)..(814): n is a, c, g, or t
gcagagtgacagtgctagaagaccccagagagagggcaagggctttgggcaagaagcactggtggtgttttagggaccgtccttctcccctacccagggaactggacctggcagggcaccgtgctcatgtggctccaaggacaagcatggcggtggccccttctgccttccaggagaggtcttgcttttgaaaccaaaatcatgttcttctaaagtgtcatcttctgccctccctgtcccaatagggaccacatcttatttgtctcaaacagggacttgtgagtacttggcaagttttgcagcctatttttgtattcttaatttggggagtaaagatgtttggtctcaaaaacctttgaggaattgccaagaatggcgagtgattgctttccttcagagaacagacacttggaatttctccttttagtgtttatatacgtgcagattaattnnnnnnnnnnnnnnnncacacacacatatacagtataaatactcatttgattctcgtaaaacgcgcatctggcgtgtgcagttgagaaacttggtggcacatgggtgttgggggagtagcctgtgttggagggacaccagtgcactaggcagctggggcggcccaggctgaagccatctccgggtgtctgagaaaccacccagtgcctcacctccagatcctgctggcatcaccctccagagccctgcatgcactggctgaagagttggtcctgtggagaggattttcttggttacttgtattcacgggttaatttacaaccccaaacagcaaaacacagttggtgggaacaatttcatgcanggacctacaggtgaccccgcccatgggccactaacctcatcttttcagttggaaaaagtaacatggctggcctgccccgggaaagggtttttcctatataaaagtttaagcccctgcc

SEQ ID NO: 369613 - DNA, 866 bp, Homo Sapiens
  misc_feature (168)..(222): n is a, c, g, or t
  misc_feature (837)..(837): n is a, c, g, or t
acagttcttcaattctttataccgttttacccacatgtggtgttaccaaagccgggcagaaccatgctagcggaagatgtgaaatccagatagctcattattgccaagagctaggcagctttgatctccaaattgttattgctttcatttttattgtaatggaattgnnnnnnnnnnnnnnnnnnnnnnnnnnnnnnnnnnnnnnnnnnnnnnnnnnnnnnncataagctaatgtaaatgaagaaaaaatgtcttctctgggctgtaggcctgagctcagcgtacacaggtatacatcctaagctctctatgttctctaatctgtggtgactgaacatgtgtctcaatgcacggggcatttctacctgtgtttctgcagcacccccactgccttgagtccccagcagtgctgttatttgcctaacacctgtagccatctgccacgcagccagacgtgaaacgctgagacagagaccatttaggttaaatacgacagcttatcctgctgggtggggaaagtaaaaaatatgctggttcaaggcctaaagtaaaatgatcaataatgtttgtagcattaatgaaatattttcaagaaatgtgtccagggggtagcactggctatgttgacgaggcctttggtaactcagagagctcttggccctgatggggacttgcccttacgctttctttatcaggctctgagttcacacggagcctctggcacttccctgctgtcttgggagaaaggaaactggttgcccgcggcagggtgtgggaatctgtttgctgggaaccaggctgggaagccccacctgggtagtgaaacagggccccaantgggggccaggctggggccatgttttgtg

SEQ ID NO: 369614 - DNA, 907 bp, Homo Sapiens
  misc_feature (243)..(264): n is a, c, g, or t
agctggaccggtccggaattctccgggatgaaatattaagaatgagaatctgcagtaagggtgattctgtgcccacagttcttcaattctttataccgttttacccacatgtggtgttaccaaagccgggcagaaccatgctagcggaagatgtgaaatccagatagctcattattgccaagagctaggcagctttgatctccaaattgttattgctttcatttttattgtaatggaattgcnnnnnnnnnnnnnnnnnnnnnngtattgaagagggttgttttccctttatttttcataagctaatgtaaatgaagaaaaaatgtcttctctgggctgtaggcctggctcagcgtacacaggtatacatcctaagctctctatgttctctaatctgtggtgactgaacatgtgtctcaatgcacggggcatttctacctgtgtttctgcagcacccccactgccttgagtacccagcagtgctgttatttgcctaacacctgtagccatctgccacgcagccagacgtgaaacgctgagacagagaccatttaggttaaatacgacagcttatcctgctgggtggggaaagtaaaaaaatatgctggttcaaggcctaaagtaaaatgatccaataatgttgtgtagccataaatgaaaaatattttcaaggaaatgtgtcccagggggtaggcaactggcctatggttgaacgaagggcccttttggggaaacatccaaaaggaagcctctttgggcccccttgaaggggggggaactttggcgcccctttacggcctttttccttttaaatccaaggcgttcctgtgaaggttttcaccaaccgggaaagcccccttccttgggggacactttttcccccctgggcccgggttccccttggggg

SEQ ID NO: 369615 - DNA, 918 bp, Homo Sapiens
tgggaaccagttattgtccccgtccaagaagaaaagaccaggtgacatcggttttggtcttacacattttcccaccatttaagcagggagactggcaaacagctgtatgacagcgagaccccgtccagccagggcgggcagtcacactggtaagggggccacacagcgacctccgttcagacagggaagaatgcagattgttcttcacagaggcgccccatccagccctctggacaggaacaagcatttgggcgttggcagatgcccccattctgacatggaaatcgacagacagctctgcaaataggaggtgatgtccatgttccattttctaaacaaacactcctcaggaaaccctccaacatgtatccactgtaacatgagtaggtgatcatgtctccatattgataatgtacgcctcgagcaattgcattttctacgtgagctggtggaccacatgagattttttcacatttggcgcttgtctgtgtccacgtctcgtcggggttgcaggtaatgatgccgtggccctgcagcagaaaaccttccctacatttgatggacacattctgatcaacataaaactccttttcagacagcagagcattctcgggaatcacaaaaggaacagggcatggatttggtttgcagagagggactgggtggctccaggttccattttctgtgcagtgtgcctcagatggcccttcaagactgtagcctctgttgcaggaatataccacgttgggtccagtcgtcctgttttcaatgtcagctttcccattgagaaattcaagtggagtttcacacctggtctctttgcatattgccacccctccactccactgtctgttctcctggcagacacgttccctgttcccctctagttcatagccaggctcacactgataaataatt

SEQ ID NO: 369616 - DNA, 1084 bp, Homo Sapiens
ttccctcgaagtctcgaggaggccattccacctatccacccgcctccccatctgtcagttcaagagggcgtgctgtgttctgctgagcattcagcactgaacaaagcaaggcagaaatccttgactccacggagcttacattctagtggggaggagacaggtgatggatgattattaatttactagaaacgataagtcacatcacatggcaggagcaggaccaagagagagagcggggaggagccacatccttttaaacaaccagatctcaggaagactcactcactatcgcaaggacagcaccaagggcatagtgctaaatcagtcatgagaaatccacccctatgatccaatcacctcccaccaggccccacctccaacactggggattacatctcaacatgagatttggagtagacatctgagctatgtcacatgtcagggaaggacgggctgagaccctggaggtctcagggcaaatgtgacacccgaggataggacgcaccagggcgagaacgtgggagcactctggtccagtagggccaaccttcacaagctttcggagagaagtgaaaaaagtacagacgagcctcttggcgtttagggaaccgaagctcccacggagaaaagggccttttcccagcgctcagaaacgcgaagatgaggggccaaatcccacagcgccctaagaccttccagaggagtgggtctctccgtgttgattccccccgtggaagcttgcccaaacccccgcccgccgataacactaaaaggccttcaaaacagccttcttctgacaaaaagactttatcacacgccccgccaccctggtacatttgggccgcctcctcaccgacaccccctcgaccggacacgatgccacagcctccacacaggtagcgagcgtcgacactgctaccataactagaaatggtcccaagcaacaagcgagccgcgagaaggggaacctgccgcagtgcggactcaaagaccaaccgcgctgtttcacaccccactgcgcgcagaccccccgggccaacgcacacgctgtcaccatcgtagcctggcaccgccgccgcactcg

SEQ ID NO: 369617 - DNA, 631 bp, Homo Sapiens
aatcgagctcggcccccgttcgtacagtgcgcgaatgcatcatgagcatcaacccccttgatccaatcacctcccaccaggccccacctccaatactggggattacatttcaacatgagatttgggcagggacacagatctgcatgacatcaccctgcatcggcctgtctctgtccctttaaacatagctggctttcccacgtaccatgcttcagccaccacagagaacctgtggtatcagcccctcttacactctggcttgttggtccgccaagcccctgctatgttccattcaccctctgctctcatgaacttctgacccctgccttcattctccaaccttctgggtgtccttccctaatttcctgaacctcagtttcccttctgactctcagttcttgctcagccccttaattatgacttgacccatcatttcggattaaaaagcattctgttaatctcctgctcccaagcagcagcctgccctgctggggatccgggcccctccttccccccacagacacactcacagctagtgggtgcacaacatttttggacgcagcttcagctcctagcaaacacttttcctgactagggtcactgttgcgtaagtcgcaactgtacggcgggg

SEQ ID NO: 369618 - DNA, 980 bp, Homo Sapiens
  misc_feature (737)..(754): n is a, c, g, or t
ttttctctttatgacttatgtaaatttcaactagaaatctccactttctcagacgcagcaaaggacttttgaaaactatgaaaagtcactgacatctatcatcaaatccaagcataaaatttaagaactaaaaaatacttgaaagaaataactgcttagcccctagctcctgagctaggaggatttggtctgtgaaacagggaggcccagcaacctgtcccagcacaaaagaaaatagactctgaggtagataactgatcatacacagctgaccagacaagtacacagttttggaagacaacttaatttaccattgcttttaaaacatatgcaattgccttaataaaagagctttaataacagtgaattatcttatatgtactaaagtagaaataactgtgtatttatgaatcaggaatttcatagtttcaaaattggttttctttacacttgaacacttgtagtgatgatgtaaagtgtggcactgcttggatccaaatcttccttcatgcttttttgtttgtgtgtgtccatacatcaattaaaattataaaacctaaatgcaaaggtacaaaaaaggcacattctcctaaccgcaaactggtccggcaaaaataaagagcacagaagatgtgatgctgagacaagttggagctactggttactggctcttcggtctttggtgaagttacctttaaaagtgccaagtcatttttatttttcaaatttacctaatnnnnnnnnnnnnnnnnnnctagtagccaatcgttttgcttctattcgttatctcagcttatgtttgaagataaatccttacttttagcttttgccactttgttgcaatagcaacatttttcggtttgccagatttcaggcataattctcattctaaagcactatcattagtataaaggaaggacaaaccctcgtgccgaattcgccacccagcctcgctaccatactcgtagagtacctgccgt

SEQ ID NO: 369619 - DNA, 1092 bp, Homo Sapiens
  misc_feature (720)..(720): n is a, c, g, or t
cccaccccccctttaaaaatggccccaaaaaaaatttttccaggggcccaggggtttccctttttatccacaaaaggggctaaaaactggcttccaggggtgaccctaaaaagaggtgggccaacgccttttcccaagttaaaacacattccagggtgaacacaggctaaggattggagttctccccacggcctttcctatcccgtctataatttactctctgcttttcccgggaatgtgcatgagaaataacctttccaaacatttcaaaagtcgcactttccttcctttattacaacgatgcccattttaaacgacactctcggtggcccctgacagctacctggtgagatacacagcatattgtgcccattgaatgaagatacttctgacaatgaggctttctcgtgaaataaagtttcccgtctcataaaactgagaattctctggaaagagctgagtggaaatggctttgaggagggcagtgattcactaagttattgagaactgaggtagtgagggtagagaccaagcccaaatgcagtcaagggtggaccgactgcaccctgacttttgttgtcaagcagagagcatctctagatcctgttatcctctaaacgatttagagcaagccctcgttgcttctcaaccaggaagtgaatcggtttagatcctctaagccacccacattccccaagccacctaaaatctttcttcccnaacgtcccacgagtagaatttctgtcaaacgctcctaggaagtcctgttaggatttaaagcagagagaccacagccgaggtgtttctcagatacacttcgccaagtccaaatgaaagtcagtcaccacgtctaaatgtttccttagccctacagaaatgggtctccatggcaaagcctcagaggtgctaaatacgtatattagtgttgttagcttcgtgatgggaggaaatttgcagtgaggtttaattctgaatagggtaggtctcacagcacctgtacaacacagctccagcgtacttcagaggtcttcgggcaagagcggagaccaccatcgagagtctactagaatgttattactgctcgcttttgcc

SEQ ID NO: 369620 - DNA, 812 bp, Homo Sapiens
agccgaggtgtttcctcaagaatacaacttcgcccaaagtcccaaaatgaaaagtcaagtcacccacgtcctaaatgtttcccttagcccctacagaaatgggtcctcccatgcaaagcctcagaggtgcctaaatacgtatattagtgttgttagcttcgtgatgggaggaaatttgcagtgaggtttaattctgaatagggtaggtctcacagcacctgtacaacacagctccagcgtacttcagaggtcttcgggcaagagcggagaccaccatcgagagtctactagaatgttattactgctcgcttttgccgacagcttcaagggtagaagtgacctctgaagaaagcccagaaggcgttggtggagaagttggggcgaggggctttaaggtggatttctatactctacgttttttgtgtgaggcactcaaatggattaagcataaatagaggcaacaaggttcaaacagcgtttccctttgaaaggaccagaggagatctccacgcaacaggaccacccaacaggacattgtctaactacacacaacgcccaccagctgccggattactgcaggaaccggtccagcttctcctggatgcgagcaaacgcgtccttccccatgtagtcgatacggccttcctcccacttcctcctctcttcctcggggctcaattccttcaccttctcttcgatggagatctgggaaacagagacggccaggtcgacatcttctgaacggcgtccttcaggtagggacagggtctcatccactatctgggtcggctccggaaggccctgagcaggct

SEQ ID NO: 369621 - DNA, 765 bp, Homo Sapiens
gcagatgaaccatgtttgggagacaagtccatattctgtcaaatggaagtgttggcacgatactgctccataccaggttataacaagttatgttgtgagtcctgcagcaagcgcagtagcaccctgccaccaccataccttctagaagctgctgaaactcatgatgatgtcatctctaaccctagtgacctccctagatctctagtgatgcctacatctttggttccttatcattcagagacccctgcaaagaagatgtctttgagtagcatctcttcagtgggaggtccaaatgcatatgctgctttcaggccaaacagtaaacctgatggtgctaatttacgccagaggagtgctcagcaagcaggaagtaagactgtgagactggtcaccgtaccatcctccccacccaccaagagggtccacctcagttcagcttcacaaatggctgctgcttccttctttgcagccagtgattcaataggtgcttcttctcaggcaagaacctcaaagaaagatggaaagatcattgacaacagacgtccgacaagatcatccaccttagaaagatgagaaagtgaaccaaaaaggctagaaaccagaggaaaacctggacaacctctctcttcccatggtgcatatgcttgtttaaagtggaaatctctatagatcgtcagctcattttatctgtaattggaagaacagaaagtgctggctcactttctagttgctttcatcctccttttgttctgcattgactcattt

SEQ ID NO: 369622 - DNA, 1005 bp, Homo Sapiens
tggctcagggggcacagactcagactcatccttcccacccacacccactgcagagaggagcgtggcaatatcggtgaaagaccagaggaaggctatcaaggccctgttggcgtgggtgcagaggaaaacgagaaagtatggcgtggcggtgcaggactttgcgggcagttggaggagtgggctggctttcctggcggtgatcaaggccattgaccccagcctggtggacatgaaacaggccctggaaaattccacacgagaaaatctagagaaggctttcagcatcgcacaggatgccctgcacagtccccaggctcctggagccagaagacatcatggttgacacaccagacgagcagtctatcatgacttacgtggcacagtttctagaacgttttccggagttggaagccgaagatattttcgattcagataaagaagttcctatcgaatccacttttgttcgcatcaaagaaactccttctgaacaggagagcaaagtcttcgttctgactgaaaatggggagcgtacctacactgttaaccatgaaaccagccacccaccaccctccaaagtctttgtctgtgacaagcccgagagcatgaaggaattccgcctggatggtgtttccagccatgcgctgtcagacagctccaccgagttcatgcaccagattattgaccaggtcctgcaagggggcccaggtaagaccagcgacatcagtgagccatctccagaatcctccattttatcatccagaaaagagaacgggaggtccaactctttgcgcgatcaagaaaacagttcactttgaggctgacaccctacaaggatcctttctgcagtaagaacccggtccctttgcttttgaaggggagcccaaagagtgggcaacggaatcattgagggcagggatggaacattgtcttggcaagttgaggttgctgagagaaaaaggaacacgaaacagggaatcctcgaagattccaaaaatcctcctctga

SEQ ID NO: 369623 - DNA, 1274 bp, Homo Sapiens
  misc_feature (394)..(394): n is a, c, g, or t
  misc_feature (451)..(451): n is a, c, g, or t
  misc_feature (1119)..(1119): n is a, c, g, or t
ctcggtacccccttgtactgtgggaccacttatggcataggatgtgtactgagatgctaggtagatatctgccacctttgtgtcataacaacctccaggacttgggttaggtgagttcagatcctcacggcagcagatggtattacaggggtcacctctactgtaaggatccttcttataattgttgtatcgcatgatatatttcatggatgccgtatcagtcactttcccttggtcacgccggaaaattttggctcgtggagctaaatcataagagtagtccaagcccagcttctgaactaacagtggatagccactccagttgtagattttttcatggaaaggaacattgtagggagggcccaatatcctttcccgtagaacatcagtttgnttcagaatattctacatatgtaggaatttgctccacaatgtacagagtgccttgtcnaagactgtggttcagcttacttttcttcaggtccagaaccatgtattgatgtttataggtgccagagttgtattttgaaaagatgtctgcccacctcttgccactatctgccatcatattggccacacggactctttgccaggacaggagagtctcgggtattacctgctttagcagggttttattaaacacactgtttgtggtctgcagcagtatcaatccactgctaagaatgtaaaaatcatccagagactccaaaaaccctgggtaactgctgaaagagaggcgactactgctggtatctttatctatgatgttgaagtcccagtgtttatatatcctgagcatggctgcatacgtgtaccagcttgagtgagcaaaaaggatgttctcaaatccaggaagaaccttgataagagcggagcaatgtcccatgtcccatctcttaaaaacctttaggctgccgttttttgtgggagagagtgagggaatcagatccaatagatctccaacactattcaggaactgaatctggaacagggtcattggctttgtcccttctaatatagccctcttctttgctcctacatagaggccatctatttgtgccatcacatagcctgtatgtctccaaaatgaatcagtcttgtattctttgatatttttcncgggtcccacttatcttgcttctccataaaatcctgcactttatccatgatggaaggtttcgtgatcagctgtgggtagaggtttgtgtagtggtcattcatgtgtggggcagtgaggtaaccctccaaaaagccagccacaaacatgatgatct

SEQ ID NO: 369624 - DNA, 1825 bp, Homo Sapiens
  misc_feature (14)..(14): n is a, c, g, or t
  misc_feature (219)..(228): n is a, c, g, or t
  misc_feature (246)..(254): n is a, c, g, or t
  misc_feature (1091)..(1091): n is a, c, g, or t
  misc_feature (1537)..(1537): n is a, c, g, or t
  misc_feature (1549)..(1549): n is a, c, g, or t
  misc_feature (1682)..(1682): n is a, c, g, or t
  misc_feature (1728)..(1728): n is a, c, g, or t
  misc_feature (1761)..(1761): n is a, c, g, or t
  misc_feature (1800)..(1800): n is a, c, g, or t
gcccccccctcccncccggcaacggcccgtaacggtctaagtagcgaggcctgggtggcgaattcggcacgaggctctcctgccccgcgcgccctccggcccctgcggcccccgaagagaacgagagggcgagcgagcgcggcgttcccgggccggcccggccccctcccttcaccatcgccggccctccgccgccttcctccgcttccacctcctctnnnnnnnnnnaagttgaggccccctccnnnnnnnnnaggcccgggaccgggacccgtaccgaattctcctaactccctcaacctctcctctcgcccggaccaaatgtgaggagaaagacccggaccggccaagcatcgtgtgtgaagaggaccccgggcgggcccactggacgcgaggggcctgcaatagagcccacgcgagcgacgaagacaggggagcggacgctgcccgccacggacggcaaaccggcaagggaaaagaacttgcctcaccacgcgagaggcgcgcagagaaacacgaaaagatcagaatccatgaaataggcgatccaacacagaacaagaaacacaaacgaacccaacacgtcggcaaccacaatccgcgcacgcaacagacaatcggcgcacgaacacgagcacacgacccaacacacgaaataaacccagacacgaacgaaataatcagcatcaaagaacacgagaagaccacccacacacgcggcgagcggcccccacgtgcaagaccctcacggccatcataccatgcttacacacgacaacaatcgcagccagataactcaccctgtcccggcccgcccgacagccacggaggtgagaatggaagatcctactcgactaggtccatcccgtccgacacaataagaacccgcacacaatcaaagtcaacggcatagacaacctccacttatagagcatatctagatcacctgaggtccgtgtgcaactgtgataaacacgttaactgaacaaccatgatgatacggcacatacactcaacatcagacgaattgatacaatcagacaataccgcgaggataatctcagcgtaacgcatgctcaccctgacgcaanatacgcaagtgtatcacaccctgactgagcgtgcgtcgcatcaacaagtaacaccaagccatgatcgagagaatcgcgcgagcgcacacaagacatatgcaatatagagcaatagcgacaattacgacataatacccacacgatcgccgagtgatgtgatagatgaccgtccgcatatcattacgcgacatcgcgacacgacatatacgtaccatagccgtagaacagctcagatacgcacaacgtggcggcacacagacgacgtgcgcgagattcacgtcgctaatgacgcgcccgcgtgggtgcagttctcacacaagatggtccctcgcgctacgccgtacgctatcatacggcgctgacatatactggctcctcaagagcaacgtcgaccgcagcctgcaaggacgagtagtgcaagaccaccgctacatcgtgtagttgancatcgcaacgtnaccgacggccaatagatagttgcgacaagccgtagcaccatgagaacgcacctcatggacgtgaacgggaatcgacccacaccgaacctccgctgaaattactcccgacggaatcagtcgaactgctcgcgtngactacatctgcccatttcaccgagagcgtccagcagcccgtgtgnggtcgtaacatcaggaaatacgtgagtactacntgtcactcacaaagaaatgaatgtaaatccgaacgcatngaaaccaaatgcgacgttccgaacg

SEQ ID NO: 369625 - DNA, 1047 bp, Homo Sapiens
  misc_feature (110)..(110): n is a, c, g, or t
  misc_feature (158)..(159): n is a, c, g, or t
  misc_feature (176)..(176): n is a, c, g, or t
  misc_feature (195)..(195): n is a, c, g, or t
  misc_feature (223)..(302): n is a, c, g, or t
  misc_feature (539)..(564): n is a, c, g, or t
ggcaggggcttgccaattattgctgtctttacacggggacggtaaaagaaaagtatccacttgggcccgcatctaaatatgaaaatactgaaaggtgggtgtagagaggngtgctaggggctttgatacagcgcttttctttctgagagagagaaaannccatcatgcttcccccngcccccgaactcattttancaaggctgatgggagtgaacaatttcannnnnnnnnnnnnnnnnnnnnnnnnnnnnnnnnnnnnnnnnnnnnnnnnnnnnnnnnnnnnnnnnnnnnnnnnnnnnnnngctctccatccaactcctgtccctagaggatctgctcaattcaagacaacctttactgagcacctatcataaagcaagcactattttagacgccatataaagatgagtaaggttccaaacctgcccttagggaatgttaagtctaacagagaactagatgaagtttcagcaagggctgtatgaaatgtgcatggcggtgttacagaggcaagaagaggggtcacttcacttagcttnnnnnnnnnnnnnnnnnnnnnnnnnnaagctttcctgaattgggtggaaccggggtggggttattccagacagaggggccaatgtgagcaggtacctccttcagggtacagcagcagtctagggcttccaagacatgaggcagggtcagacatggaaggctttgcatgcctctaaggggctgggatatatcctaggtcacggggagatggttattcaggcagcaggaggattgaggcgggggtgtaaagaatcagagagcccactcttccagctctaggaggtgggaaccaacccagcagcctgtgttgcagatgaatccagaggagaaatgatgagaaccttaaccagggcaggcgtagagatgaacttaagacctatctagcgcgtaaaatcgccagggcttgagaaccaactggatgtgaaggttgagaaaaagaaaagtgttatggtctgatgtatcccccaaatcatgttgaaatggaatccccagaatgatggtgtttggaga

SEQ ID NO: 369626 - DNA, 949 bp, Homo Sapiens
  misc_feature (37)..(37): n is a, c, g, or t
tttcccaaattgtaccaaagaataatctttccccaanaatattcaggagggagggaatccttctttgactcatttctatgaagccagtatgaccgtgatatcaaaccttagcaaggacacaatgagaaaagtaaattacagtccaatatccctgatgaacatagacgcaaaaatcctcaacaaaatactagcaaaccaatttcaccagcacatcaaaaagataattcgtcacgatcaagtaggctttattccagggatgcaaggatgtttccgtacatgcaaatcaataaatgtgattcatcacattgacagaattaaaagcaaaaaccatataatcatcccactagacaaagaaaaagcttttgataaaatccaacatcccttcatcataaaaaccctcaacaaactagacatcaaaggaacatacctcaaaataataagagccatctatgacaaacccacaaccaacatcatactgaaagggtaaaaactgaaagcattccccctaagaactggaacaagacaaggatgatcactctcttcattgctattcaacctgatactgaaagtcctatctagagcaattaatcaggcaagagaaagaaacaaaaggcgcccacattggaaaagaggaagtcaaattatctctgtttgctgatgataggatcttaaatctagaaaactctaaggactccttcaaaagactcctagatttaataaattaattcagtaaaatttcaggatacaaaatcaatgtacaaaaatcagtagcacttctatacaccaacagtaatctaacagaagaaaaatcaagaagtcaatctcattttcaattgcaacagaaaaatacctaggaatatatttaaccaaggaggtgaaagatcagtacaaggcaaaccacaaaatactgatgaaataagttgtagatgacacagatgaaggaaaaatg

SEQ ID NO: 369627 - DNA, 887 bp, Homo Sapiens
  misc_feature (34)..(34): n is a, c, g, or t
  misc_feature (46)..(46): n is a, c, g, or t
  misc_feature (496)..(523): n is a, c, g, or t
actgaattttcactttacctgttttgtggcatanctgctaattcantagttaatttcacaaattattttagatttctagaaaaaaaatccaattagtatgagcaaacaaaattgagaaataatttttttgagtgcagtacattgttggaatttatattttaagttataaggtataacaaggtgaatctgggaaacagaggtgaatggtaggttactgcctaatagtgagagtcctagaaagccacactaagccttctgggatctaatcttacttggaattctctatattgaaggtaccagccccatttctcctttggcttttcagcagagtatttttgaaagaagcaggaattgactggacagagcttttgatcaaatgttaagcagcttctgggatatttggcatttttagtaagtttactatttatttcaccagattctgatcaaattttctagtaacattgagctggattttcgaacatatttatctctaccnnnnnnnnnnnnnnnnnnnnnnnnnnnnatcttagatagctggaaccaattttaatagccttctgaactttacacatttaaaacttccattaaatgaaactaaattgacgagaaaagtttgttgtcaggattgataaggcctctcccgaagcttcatccttaggaaatctgggcttcagagattacttctcattgggctctttctccaggggtagatgtctttaatcaataggtaaagttccataagcatgtaatattaatgaaagaatatttctggagctgagtcaagtcagagagctgagcgaaatacaggggtacaggaagcagcagaaaggccctcggagctcactgggtccccaagcagcccattcctgcctggcaacacaaagatc

SEQ ID NO: 369628 - DNA, 1384 bp, Homo Sapiens
  misc_feature (541)..(548): n is a, c, g, or t
  misc_feature (550)..(567): n is a, c, g, or t
  misc_feature (569)..(580): n is a, c, g, or t
  misc_feature (583)..(585): n is a, c, g, or t
  misc_feature (587)..(592): n is a, c, g, or t
  misc_feature (594)..(594): n is a, c, g, or t
  misc_feature (597)..(598): n is a, c, g, or t
  misc_feature (601)..(624): n is a, c, g, or t
  misc_feature (635)..(750): n is a, c, g, or t
  misc_feature (763)..(814): n is a, c, g, or t
  misc_feature (847)..(847): n is a, c, g, or t
  misc_feature (1309)..(1309): n is a, c, g, or t
gcaccggccacatcctggtgcagtggtcgctgggcagccccctgcacttcgccggctggcactgctcctggtgcttcacgcccgagggcatctacttcaagctcgtgtccgcccagaatggcgacttcccacgctggggtgactacgaggacaagcgggacctgaactacatccgcggcctgatccgcaccgggggctggttcgacggcacgcagcaggagtacccgcctgcagaccccagcgagcacatgtatgcgcccaagtacctgctgaagaactacgaccggttccactacctgctggacaacccctaccaggagcccaggagcacggcggcgggcgggtggcgccacaggggtcccgagggaaggccgcccgcccggggcaaactggacgaggcggaagtctagagctgcatgatctgatagggtttgtgacagggcgggggtggcggcggcccctagcgctatctccctgcctcctgccggctccttggttcttgaggggaccaggagtgggtggggagtgggggtgggggtannnnnnnncnnnnnnnnnnnnnnnnnncnnnnnnnnnnnncgnnngnnnnnncncgnnacnnnnnnnnnnnnnnnnnnnnnnnnggcgccccggnnnnnnnnnnnnnnnnnnnnnnnnnnnnnnnnnnnnnnnnnnnnnnnnnnnnnnnnnnnnnnnnnnnnnnnnnnnnnnnnnnnnnnnnnnnnnnnnnnnnnnnnnnnnnnnnnnnngcgcgacgaaccnnnnnnnnnnnnnnnnnnnnnnnnnnnnnnnnnnnnnnnnnnnnnnnnnnnngcaggacgccccgcagaaaacaagcgcgcaggnagacctacaacactttaccgcaccaggaggaccagcgcagccccagcgaaagagaagcgcgcccaggcagaaaagcgtgagaatgacagaacgaggcgccagaagcgaacgaacgaagagcgtaggacgggagccgcgatacggaggatctgtagatccagctcttaaagaaccgcacccacacacagcggcgcgcgtgctggccacacccagcaatactccgggccgagacgccacccgtcgtcagcgatgctgaagaccacgatctagctcgaacaggacgagacctgcgctaagacacgccagcacagcgcagtggcagcgcggccaccacacaaacagctacccccgcgccgcctccacacatacgtgagcagacatgcgctcacgcgcgtcgcgcagcagtcacagaagctcaatgtgagtgacgagagaatcggtcggcgctcaaggcgcgtgcgntgctcatgagcagtgcgacacaccctacacagccgacgctctgcgatatgtcagcacgtcgaccccgcacgaccc

SEQ ID NO: 369629 - DNA, 967 bp, Homo Sapiens
  misc_feature (65)..(65): n is a, c, g, or t
gggatgagtcccccccgggcactcttctaacattttgtcttggcagagatcaccaatgggctccnatggcagccccgacccttcaggggctgatctgggcaggaatgctggagaactcagggttggacgcaaaggcacccagattgtccacagcctccagcagaggggctgttgctgctcggcactgggcacggttctcctctgtgaaggccccatctagcgccttgatggtcttgacaagattagctgtgctgttggccacctccttggctgactgtacaaactggcgcttggcagtaggattggtggtacgggcagaagccaggcgacagctgttacacagtgcagaggtgtgtttagccacaatggtggctgcagagagcacctgggcctgggtacagccaggctctcccaaactctggcaggccatctgaattgcctggtttgcacgggcaaactgtgtgggctccactagcccttgctgtccagcttggctattggggtcagagacaccaaccagatatgcagcctgtgcagctgcctcggtgaagccacaaagtgcctttgaggctgtggaaatggcatctccaaactctggcaggtttccgttcttggcattttgggagatgccagtcatggcctcgcccagcacctttgagttctccattacactgtccaggcaaccaaagtaggacatgtcattgatgggctggactgggttctccaggagttcccggaccgtctccaattcccgcagggcgttatcacactccttctggccgggtgcctgctgggtgcacatagtgatgagctgattgatgctgtcagttactgccctggcagctgcagccagccgactcttgaggttaggggcagcagggtccgtggacagggccttggcagccagaagaagtttgcttgaagacatggagatgcccttcaagttggacacaacttgggctcggtc

SEQ ID NO: 369630 - DNA, 902 bp, Homo Sapiens
  misc_feature (815)..(816): n is a, c, g, or t
  misc_feature (826)..(826): n is a, c, g, or t
  misc_feature (841)..(841): n is a, c, g, or t
  misc_feature (844)..(844): n is a, c, g, or t
  misc_feature (853)..(853): n is a, c, g, or t
aatccatcatagagcttacattctagtaaggagagacaggcagtatacaaatactataaatacactggaggaaaacatagtggggctgattatagtcgatttttgctcttttatttccggtaacagtaaaacaactctgataagaaaaggtttgaacatgaaggcagacctgaagcgagtgagggagtgagctatgcagctaaccagggaagagttccaggtagtggggatagcaagtgcaaaggcactgaggaaagggcacatgggagggggcagcaagaaggccactgtagccagagcagtgagtgagggaaaaggagaaataatttcagagatagcgagtgatcagcatgtatagggtattaagcataagaaggactttggattttatcctgtgtgagatgggaaaccattggagtgccagagtaattttttcttaaagctagtctgcttgtcatttcttttcttaaaaatgcctcagttccctgttgcctttggaataatgttcacgtactttactttggcacacaaggtccttcacagtcaggcctctgcctgtttatttagcatcatctgcttctttcccacatgtacccttcactttagccaagtgggatcacatgcagctccctggatgggtcatgatgctttgtgtcttcgcgtctttctgtaccgtttgccctgtgagaagccctccccctcagctcacatggtcactggctctgttttagagggtcctctttgtgctcttgctctctcatcatttccacccgggagccactttgcacttttaagctgcttaggctttgaaacgnntgctgtgttncttttaaccagcccntgnatttttacntccttgcccacaacctttggcccgggttgaaaagttatggccctatccc

SEQ ID NO: 369631 - DNA, 872 bp, Homo Sapiens
gtaaaccaacaggttaagtcttccctttttctttggcttccggtaccagatttgaaaaaggggcgcatctatacgttcatggaggaagtcgtcgtttctgtgaccccttacaagttgttgaacatctatggaagagacacaattgagcagtataaaggccgtgagctgtatgagagaccgcctcacctttttgctattgcggatgctgcttacaaggctatgaagaggcgatcaagagacacttgtattgtgatatcaggtaattggaggggatcccctgtatttccaaagtcacaatgtgtttaatttgtttgatactcaagaatccaaacaattgattaaatatttttttaaaggtagaagcctgagcaattctataggagagagaaaagtgatgaacgttaaataccaaattatttatatcatttctgatcatcctctaatcttggttcatttatgaatacatattacacttggatgacttctggccaatttgttagattgagctgacatggaaaatgtttccatctcaaacacataaaagtctggataaaatgtaacaaaattattttaaatagcaaaatgaaaccaacgaaaatgaaatattgaggtgtgaaaaggaagaatcaactcaaaatcagactggtgcttgggaactagtgttgagggacctactgaggcgtgggggccaaaaataagctttcagagctgaggggctgagttattgaagcccaacaaggggggagataggcacgagatagggtacacacctcacatgtttgaggactggagccaaactgcctacgttaaggggagcccttcaaggacccttatgtagtgaaatggggacaggaaaaatatctgttcactga

SEQ ID NO: 369632 - DNA, 822 bp, Homo Sapiens
  misc_feature (141)..(141): n is a, c, g, or t
  misc_feature (410)..(434): n is a, c, g, or t
  misc_feature (439)..(455): n is a, c, g, or t
ggagggaataaagaaggaatgtgaaaaggcttaaagcatttcaaatgtcagtgcctggttcaaaccagtgctcaggttttgctgtcttccacatcttttgcttgtgttctcatttgggccagcttgtatgttttagaggtnttagtttccatagaaaattactgcaaagctcagaaaacattgtgatctacttagaggttggggtttcagctttttaaagccataacactgtcctttgccaattggaggccttggccctgccctgacctgactttagctaatgaaatatagcaaatgcagatggatttagccttagcgccttttcgccgtttcccccacttttgcatcaaactctccagaaagcattattaatctttcattctccatactggcaatcatatgtgttcgannnnnnnnnnnnnnnnnnnnnnnnntactnnnnnnnnnnnnnnnnnattcacttccatctaatacctgctggtcatcagaggccacggtcagctcctcgctgtccccgagtgcagatggttactgcttggcactgagtctggacttggcatttcccagggcactgcctcctgtgagacctccccagtaggccctctttcccaactacattttagccctcaagtgggaaccttagagaccccagttaaagtaattataggcaggagatttggggctgactctgaaaccagatatctccatgcctggaatgtgggagggaggaaggtgagggtcgtgggatgcttgaaccctcccaacatgatcaccttaatcctcgcctcgtgatgaattaccacccgcctcgcctctaatatc

SEQ ID NO: 369633 - DNA, 998 bp, Homo Sapiens
  misc_feature (602)..(654): n is a, c, g, or t
aaactggtgggggaggggtggctgggatttgggaggagggctggaaccttgggttcctgaggggagtgggggctggaaggggtgggggtggagctgggggctggatgcctgggtactgagcaggaagctgggttcctggtcgagcccccccgacgggccccgcccatccctgtcaacttcctccattctcttcccacccaaacagcttgttcgagtctctctcgccccagggcagcactgagactgggaaaaactcctccagctgcaggagtggagggggctcatggtggggaaggactcctggcggtctcatctccagagccgtcagtagtcccctaatccctggctctgctccctccaccccacctcctcttctgctctttctgtcaacacaggaactagctacacaggaagtggtttcactcctcagaatccccctccccccagccaggtcccttccctccctaagatagaccctggtgtaggatttggccctcccgatcttccctcttacttaccgggactgggaggggcatggttccagtgggaagtggaggattcagatccagggatgtggagctctcaaatatatacataaaacnnnnnnnnnnnnnnnnnnnnnnnnnnnnnnnnnnnnnnnnnnnnnnnnnnnnntcatccctgacctctaggtatttaaaatctattcagggagagggccggctgcggtgggctcaaaccctgtaatcctaagcacttttgggaagctgaggccgggttggatttggccggagctcccggaatttggaaaacccatcctggggggaacattggtggaaaaaccccctccttgttctttaaaattccaaaaaaattttatcttgggggggttgtggcccccaatggcactccttgagaaaattccctacagcctaccttcccatggaagggtttgaaaagcgcaaaggcgaaaaatatgtcgctctttgtaacaccccccctgtaaagagtgctgtaac

SEQ ID NO: 369634 - DNA, 911 bp, Homo Sapiens
  misc_feature (96)..(129): n is a, c, g, or t
  misc_feature (137)..(181): n is a, c, g, or t
  misc_feature (567)..(739): n is a, c, g, or t
  misc_feature (789)..(789): n is a, c, g, or t
  misc_feature (800)..(800): n is a, c, g, or t
taatgtgtgaccttggagaagttactctgtaggcatgacagcagaggagaaaatcatttgtgatcttgaggtctgtcatgctttattatccattannnnnnnnnnnnnnnnnnnnnnnnnnnnnnnnnngagatggnnnnnnnnnnnnnnnnnnnnnnnnnnnnnnnnnnnnnnnnnnnnncaacatcatgggagaagacctaccttagcctgccctcagcagctcagctccgaggtccagcttgcagccgtcgtggttttgtgcaaagcagctgagtgtccctctgttaatgtgtgcaaaccatggtgagagctgagcctggatctcaagaccttgcgtaggccaaacatgctcaacacatgcagagagctcatctctcactatctgtcctgaagtcacagcgtcgctatggatctagccacctcaccagtgtctcttaaggctagggtcctgtcactagtcttgtggtgggttggctctcccatcctacccttgtcccttcaaaattcacatcctcagccctgagaggggacagccactttagacaaaagaaggcatgtttcagnnnnnnnnnnnnnnnnnnnnnnnnnnnnnnnnnnnnnnnnnnnnnnnnnnnnnnnnnnnnnnnnnnnnnnnnnnnnnnnnnnnnnnnnnnnnnnnnnnnnnnnnnnnnnnnnnnnnnnnnnnnnnnnnnnnnnnnnnnnnnnnnnnnnnnnnnnnnnnnnnnnnnnnnnnnnnatctcctgcactttccgggaaggctgggggtggggccggaatcaccttgnagggtcaaggnagtttcgaggacccaagtcctgggcccagccattgggtggagaggccccccgttcttccttaccaaaaaatattttaaaaattttttcccccggggccattgatatggggg

SEQ ID NO: 369635 - DNA, 1026 bp, Homo Sapiens
  misc_feature (968)..(968): n is a, c, g, or t
  misc_feature (973)..(973): n is a, c, g, or t
atggagtattcagagaaacttaagtctgggtgcaaaatcggaaatagcaacagataagctttcttttcctcttaaaaatattactcgaaagaatatcgctaaaatgatagcaggcaacagcacagaaagttcaaaaacaccagtgaccatagaaaagatttatccatattatgtgaaagcacctagtgattctaactcaaaacctataaagcaacttttatctgaaaataatttcatggatattaccatcattttgtccagagacaatacaactaaatataacagtgagtggtgggttctcaacctgactggaaacagaatatacaatccgaactctcaggccctggaactggtggtcttcaatgacaaagtcagtcccccaagtctggggttcctggctggctatggtattatgggattatatgcttcagttgtccttgtgattgggaaatttgtccgtgaattcttcagtgggatttctcactccatcatgtttgaagagcttccaaatgtggatcgaattttgaagttgtgcacagatatttttttagttcgagagacaggagaactggagctagaagaagatctctatgccaaattaatattcctatatcgctcaccagagacaatgatcaaatggactagagaaaaaacaaattgaaaccttagaacacagactgcaaataatgttaacatttgaattttttttaaaagcacaatattctcataagagctaagcatttctagttcgacggaaatggtttgtttctcttctgataggtagacaaaaggagctgatatccttctgcagtaaaagctaccttgcaagttaaggcactgttgaaaatgttatttgtaactccatttctctgaaatcagggctacttgctttatgttttagtcaacagtgtctcgcattctgattgatcatgtgaaggaaatcattttatggggccccccgtcccctnagagnaaaacagaagaaggagtccaggaaaagaaaaggatgccctggtggtttttcca

SEQ ID NO: 369636 - DNA, 1534 bp, Homo Sapiens
  misc_feature (205)..(222): n is a, c, g, or t
  misc_feature (250)..(294): n is a, c, g, or t
  misc_feature (435)..(545): n is a, c, g, or t
gtttggtggggaaatgaaaaagcccccttttatagtggtaccacaattaaaaactaccctaagaaaaagggtttccaaaaactttgaaacctctttcattcccaaggaaaaaactttttgggggctgggttgcttaccaaacctggaaacgtaggccaaataggttttaaaccattcaaaaggggaacttcaaagataaaggggnnnnnnnnnnnnnnnnnnccctaataccctataattcttaaaagcnnnnnnnnnnnnnnnnnnnnnnnnnnnnnnnnnnnnnnnnnnnnnccctccccattctctctaagctcagataaggtaaacattttacataatttaaaaccctagaaaattctgtagttgtttagaggcaaaaatgcaatggatagtccagggcagtgttcctccctgtatgcccccagctcaccnnnnnnnnnnnnnnnnnnnnnnnnnnnnnnnnnnnnnnnnnnnnnnnnnnnnnnnnnnnnnnnnnnnnnnnnnnnnnnnnnnnnnnnnnnnnnnnnnnnnnnnnnnnnnnnattttaaagtttgagaaccactggtctgtactgacaatgctgctatagattcaactcatcctcttagaaaattcctgggatccacaagaaatccaacttgctgttgcaatgtggaaggcagtgtaaaaccaacagcaaggaaatcacaacgctatttctagatcaaaacgtctttccttcttcagtggaaaaggacagccacattgttaaggcacgatatttgtcacagaagcagtaccatactgttatcatcgagtctcataatctgaagaccagtatgcaaacaaagcagacgtatgaaccattctaaataataacaaatatggggaagtaaaaaaggttcccagactggagaaagtttattttgaacatcggcactgggaataaaaattaggggagaccagatattcttgctgagacatctaacatatatgaaatgcaaaggtcaaaagctaggggtaagcctaataactcaaaaaagtgtttttactgtgaacaaaattaagaagagtgtggtcacatcaattgggagttcaagcttacttttctatggccagtctaatgtcttcagtgcagatctgtatcttctttgcttctgccccctttgatgctaacatatatatgttttccagtttctaagtagtgcttgatagtttcaattcaattaaaatatagtgtgtaagcaggtaacctacctggctcctaaatgtgtacttgatataggtcacagataaatgtattgtgtttgtcagactcggtcccctgaaagtgtagggtatcatattttcaaactgtataagatatagtattgatttagtgtactgtcacagcaaaatcaacaaccctcggttttatttaatgcctgaagccctatagcagacactgcccattgtatgggggctctgaaatctatttatgtgcggtataggaggatatgtatacctaaataaagatctgattacacataagtgcagtaacatcccttctat

SEQ ID NO: 369637 - DNA, 885 bp, Homo Sapiens
  misc_feature (284)..(834): n is a, c, g, or t
ctttatcccatatataaaaactaactcaaaatttatcaggaaccaaaatattaagagctaaaactatgaatttcttaggaggacttaggagtaaatctttctgtccttggattatgcagttatttcttagatatgattccaaaagcacaggcaacaaaagaaaaaataaataggtcatcataaaaatttaaaacttttatgcttcaaaggataacatcaagaaagtaaaaaaagcccacaaaataggaaaaaatatttgcaaatcatgtaattggtgaggagcnnnnnnnnnnnnnnnnnnnnnnnnnnnnnnnnnnnnnnnnnnnnnnnnnnnnnnnnnnnnnnnnnnnnnnnnnnnnnnnnnnnnnnnnnnnnnnnnnnnnnnnnnnnnnnnnnnnnnnnnnnnnnnnnnnnnnnnnnnnnnnnnnnnnnnnnnnnnnnnnnnnnnnnnnnnnnnnnnnnnnnnnnnnnnnnnnnnnnnnnnnnnnnnnnnnnnnnnnnnnnnnnnnnnnnnnnnnnnnnnnnnnnnnnnnnnnnnnnnnnnnnnnnnnnnnnnnnnnnnnnnnnnnnnnnnnnnnnnnnnnnnnnnnnnnnnnnnnnnnnnnnnnnnnnnnnnnnnnnnnnnnnnnnnnnnnnnnnnnnnnnnnnnnnnnnnnnnnnnnnnnnnnnnnnnnnnnnnnnnnnnnnnnnnnnnnnnnnnnnnnnnnnnnnnnnnnnnnnnnnnnnnnnnnnnnnnnnnnnnnnnnnnnnnnnnnnnnnnnnnnnnnnnnnnnnnnnnnnnnnnnnnnnnnnnnnnnnnnnnnnnnnnnnnnnnnnnnnnnnnnnnnnnnnnnnggtaaaaaaggaaatgaaagtggcaaaaaaataataacctggttaaccttt

SEQ ID NO: 369638 - DNA, 1484 bp, Homo Sapiens
  misc_feature (31)..(31): n is a, c, g, or t
  misc_feature (335)..(386): n is a, c, g, or t
atctgtaacgagaactattctcagtgtttgnaggtacaagggtgaaaaagaacatgtgtcggggatcttaccccattttaatggaactattttctcttaagccaattcgtatttcatctgaaacaatagaatagacatcattaacatttaataatacctcagtcatgtacttcatccatcatattcttatgaaacaaatcatgccatgtggaatcgtatgtaaaactgggccacgtggaagaatttcaacagacttggattatcaaaatgtttttataacattaatcttttaaatgcatagtctcggtcggtcgtggtggctcattcctgtagtnnnnnnnnnnnnnnnnnnnnnnnnnnnnnnnnnnnnnnnnnnnnnnnnnnnncacacagctaggattttaacctagataatatgactccacagcccatatacttagcaattatatatataatgttaagcatagcaatctcaacatatgtatgttacatgcttgtgtaacagtgactcttcctagtcggctaagaatgggttacaaatgcctcaggatagctatgtccaacctggctggaggctctcaagggctgcacccaagtatcctcctgcagtgagcagctgactcaagtcaccacagtgtgcttgctgtataaatgttattttttgtgagtgttgacaggaaaaagtttaggatgaaacactgtgttcagtacataacactacagttgcagtcttgtcactaattcttgtaaataccgaatttttaaaaaatctcttactttttttgtaacaaagagtataaactataggctttatttcttcttcagtactagtactactgaaaacacaactgcttaacataaaaggatcgttttctaattttagacacttctttacctcgggagaagttatcttgattaccccaacctttttttccctttatagtttacttgcaagaacataaatttattagggaaaacccttaaacaatgttggccccaagaacatgtctaacaaggggaaccaacttgggctttaacagactctcacccaaccccatcctttttttatttcaaaccctatatgcccgctcttttctataaggggttccacattggaagaatagctataataaataagtaacaaagggcgcggttaccttggaaaaacccaaaatctcttcacaaaacaaattaacttggttttttataaaccctctttttactgttttggctgacaatgtaatttatatatatcccccccctactacgcggtaatacaccccccctacgagatttttctggttgtaatattgcactgacccaccccccttgcgcgtaacatttgataaatggggttttacactcccccctataaatataaataatttcacatgtttacaaaaattctctcggttctttcgctaggaaacaataatatggctgtgcagggtacttaatagatacccccgcaaaacttttttttc

SEQ ID NO: 369639 - DNA, 1058 bp, Homo Sapiens
  misc_feature (965)..(973): n is a, c, g, or t
gaaatccaagggagtgtaaattccacaaaaaaaggggccaaccccctaaaatgtttggttaagaatatcctggttattttaccagtgttttggggtaatatcccttttaatcccactttttttatagggggattgtgttattaaaaagattcacaacacatttttctttcatctttttaaggaaaaacattcccactggagattggatgaacctgaaaacgagggtacatcccttgaacttccactatctttttagaaaaagtcttgttcctcattcccagagtgttgtcaagctcagcatggagaggataaggaaagactgtggcacattggaaaaaccagatctgcatcttcttcaagaaataaacccagtggacagagaggggctggtctaatcttatccatattcctacaaggtgcttgtggaaactgtgcttacaaatgcctgtgtggtgtatggaggtcgaggagacctgggatcatcaagagcctcctccatgggcagttgataaccaaataaatatttcaaactgggctacactgcaagtgtgtaaacaataacaagaagacatgaaggattcattttgccataggttagaaatagaaagctttcctagagaacaagaattattagtaaaaacatgtactacaaaagcttacaacaaaagcaatatattctgttgcctatactttgctcaagagagagaggatccctatacagctttgttttcagaaccttttaaaagtgtatcaaactgttccttgtgcttctgtcaggcttgagaacacatcaaactttagaaagtcaggtgcatgctctctgtgcttggacatttacacagtcatctttaactcaatttttaaaatcttctttagctgtcagcttcatgcacgagatacctgttgccaaaccaaaggtgggagggaagcacgtggaaagtggaaaagttgttcaggcatgtcannnnnnnnnaaatgatgcttttaaaaatagcactttggttttatacatataattttccaatatttctcctgagatgcttaacatcctgacaagc

SEQ ID NO: 369640 - DNA, 864 bp, Homo Sapiens
ttgattgaatacctcaaatgagagaaaaaagtgattaagttaaatgatgagtttagtagagtgggcgtgctaaagtaaataatattatctatgctccatcagtaactaaattaaaaatataatggcattcatggtgacaacctcttatgaattacctggagagaaatttttaaaagaataaaaaagtagatgatattggtgggagattaggagactctcttagatccctgcaggctcaaaagatgacactctgtatcttacttacagggcatcatttcattgtgaatgtggtgtcccaagtatatgtacccatatacattggtgtgcatggtttgtagacatcttgagagcgaaaagttttatagattttgagtagcttaaatgctaatcattactgaagtctaaacgtctccttgctttatctgtttcctgcccctctgcaaactatgtcccgtctgcttgctcacttgcctccaagtaggttcagccaatggaaggcattgacagacaactacaaaggctaaaggagtggggcatccaggacccatcttcccctgtctctcactaactcgggcagccttttttggcagtagttacttgctcgttagccagctcctaagagcccttgttgttctagttcctttctgatggagccagccctgaattctgataacattgtctcttcctttggtctttctagttctagggatgaaagtggctttttggatttgctcttgctaatcttggcttcttccctgtttccgttttgactgctgtgctctattgccgtctgcattaaaattttcctctacttacctaacccagccacaagcaccctgtttttctttgacttgggatgggtgt

SEQ ID NO: 369641 - DNA, 970 bp, Homo Sapiens
  misc_feature (661)..(661): n is a, c, g, or t
  misc_feature (801)..(814): n is a, c, g, or t
aggctggtccggtccggattctccggatataaattcatggtaatgttttcataaattattgcattaacatacaattgccatttaattatgaagtccatcagtattgacagaagacgttacagtgaagtgctaaaaccacactatatggtaattatattttgggttatgtagtaaatcaaatatgcatgtcattgtgacactttatgtgttaaaacatggtagataatcacattttctgggccctgtaaaatagtgttactgtaatactctgttttgcctcctgccttgtttacattaaacaggatatttggtaaatttttttgtattgaaagttgtgtaggttactgacagtgttaccagcgtctggaattcttggtccctccgtggagaaactcttcagatggtcattgtgtacctactctctcttcaaaggaagttgtgatcaagttcaactttttgtgctaacaatgcatgcaggactaagagggatgatctaaaaaataaataatgtaatttaaacaaaacgtcttatgtttttgtaaaattctaattgggaacattttatccaatgataaatctcaaacaatttttaactttttgcacccccagcacacaaagggatatggcaccctacaatcagtgggtctctatagtattctanggagagaacaaaaagcaatgtatctatttgtggaggagagatgtgtaacttgaaaaattccccccaggaaaacctccccttcccttcttaatatcactgcccaaaaggaaagaatgttaatgcacgtctcaaaaacaaannnnnnnnnnnnnngaagcagattctcgctctggttccccaggccgggaatgcatgggcatgattctcagctcactgcaacccttcgccccctggggttcaagtgaatttttcctggccccaagcctccctgagtagcctgggaattaaaagggggccctggcaccaagg

SEQ ID NO: 369642 - DNA, 1392 bp, Homo Sapiens
aaaaagtatataattatcgatttaagattcattcggttttcagagatgttagaaaattggggaaaaaaaagtatatgtgttaaaattgacaaggtgcaggcaatttctaggaacaggtgaccacttgtgcagagaggaagtgtttatattaaggaaggagcacgtggtttctgtatctaataatagaactgacttagaagtagcagtaggggatctccctctaaagtccgggggttctggcctggggatctgccacgagctacctgtggctccagcccgaggggacacagcctcctgtggggccagaacttagttacttggccatgcctgactgcaagggaggttagccaacaaaatctgtatttacagaggacttgtgctcagctaaaacttgggaatctaatattaaaggaaaaaggagaaaattaacttaggggggaaattagtattctcttccacagtaatctgtagccttggaaacttttttcaacagtacttattttgcagaattcattcacatcagaaagatgaaccagaaaatagattattgcagtaggtttgaactaataatatttcttccaataatgatacggagttttgacacctatttctgacactgctgtattgttgagtcttgactctaaaattatttaactcaaaaacatttttgtgaccttctaattaatttccactaacacagatatttaactgcatcttcttgtggggctaagttataaataaacctcatgtcacacgtatctgctgctttactattttctcctatcaactatctgtgctagtgtgtacttcttaccgtttttcctagtcctgaattttttcttcatatttatatctgcttaatttaatatgattctaaactgatgattattcttccagtcaaaattatttagcagctggtaagcaagatttgatatatgaaagcttaaaaatgctcaaacagaagacgctaagttgagaacataaaaccgtgtatctgacactctgtactatttttattcccgccagagaaatattctgaattttacgttcttttacatttgtcttttaatgatttttggttttcattaattgcactttattcattttcgttatccttgtaaataaaagaactttcgaaaagtgtgattaacattaagaatttttagaagattcagtttttcaaaagtagttgggctttaaaaataccagactctaaccttttaaaatttgtgtgcaaatgaaagttttgtagttatggttttgggggtggtgtggtaggcttatgtttttcccattaaaattgttcccaggaatattccccttaaatttccgaagataaattaaaaatgactactaattttaagcccagtaatttttcttttttaggtaaaa

SEQ ID NO: 369643 - DNA, 577 bp, Homo Sapiens
gattcggcacaggatgaagatggatcaatagaaatatttcagaattcccaacctgaaactgatctgtactatccaacagcatcacaagcttgtgaataccattagctggcatcatgagcatggcagccagccagaattgagctatctgatggcctctggctcccaacaatgcagtcatttacgtgcaacaacctgaagactgtcatagagagcagccctgagtctccagtgaccattacagagccctaccggaccctctcagggcatacggcccaagattaccagtgtggcgtggagcccacatcatgatggaaggctggtatctgcttcctatgatggtacagcccaggtgtgggatgctctccgggaagagcccctgtgcaatttccgaggacatcaaggtcgactgctttgtgtggcatggtctcctttggatccagactgcatctattcaggggcagatgacttttgtgtgcacaagtggctcacttccatgcaagatcattcccggcctcctcaaggcaaaaaaagtattgaattggagaaaaaacggctctctcaacctaaggcaaagccc

SEQ ID NO: 369644 - DNA, 445 bp, Homo Sapiens
  misc_feature (428)..(428): n is a, c, g, or t
gatgaagatggatcaatagaaatatttcagattcccaacctgaaactgatctgtactatccaacagcatcacaagcttgtgaataccattagctggcatcatgagcatggcagccagccagaattgagctatctgatggcctctggctccaacaatgcagtcatttacgtgcacaacctgaagactgtcatagagagcagccctgagtctccagtgaccattacagagccctaccggaccctcttcaggggcatacggccaagattaccagtgtgggcgtgggagcccacattcatgatgggaaggctggtatcttgctttcctattgatgggtacagcccagggtgtggggatggttttccggggaaggagcccctgttgcaattttccgagggacattcaagggtcgattgttttgttgttgggcntggttttcctttgggtt

SEQ ID NO: 369645 - DNA, 967 bp, Homo Sapiens
  misc_feature (117)..(204): n is a, c, g, or t
  misc_feature (881)..(881): n is a, c, g, or t
aattaacgtgtatagcaggaaattgggggtgggaggaggaaggggagtgactgctaataaggtaggggatttttggagggagggtaatgtaaatgtgctataattgactgtgacgannnnnnnnnnnnnnnnnnnnnnnnnnnnnnnnnnnnnnnnnnnnnnnnnnnnnnnnnnnnnnnnnnnnnnnnnnnnnnnnnnnnnnnntaaaaaaatgaaaaggcccggtgcacctgtattatctgtgcttgtgcttatggaaatattttaaattattggctcaaagataaatgctagcaagtctggtaagtataactctctgggctatgtcagggacctggctcaagtctcccctgcaaagatcttctccccctgtgttcataatcttaaacaagtattaattacacaaaaaaagttgtactcatgaagcctatgtgctacagtcttctgagaaaccatgctctaagaaaggatggtggttcagattaaaaggagaggaagattatgaactgaaaaatacagcttcatttttagtgtaaaaatggaatattctaatatttgcaagactgctgcttaacaatgtcagcgttgatttactccactgcagagctttaggctttttgacatttttatttatgactcaatcgtatttcaatctgggtattagcgggaagctgataccaggaaaaacctttaaaacccaaatcgtaattttctcctagtctttttggcaagtgtgccgtgggtagacagtaagttggagatggccattgctactgccagcttaaaataagaagtggtcgccatttgataaagagtgacaagttggaaaattaagaactggttttccaaatttttatttgtattttagtaatgtcatttcnttggtttgaggctttacatagtaccagggcaagattcacttatttcatttgtagaaatacaatctcagagctacatgataatgatt

SEQ ID NO: 369646 - DNA, 1000 bp, Homo Sapiens
  misc_feature (430)..(430): n is a, c, g, or t
  misc_feature (442)..(443): n is a, c, g, or t
  misc_feature (463)..(464): n is a, c, g, or t
  misc_feature (486)..(487): n is a, c, g, or t
  misc_feature (498)..(499): n is a, c, g, or t
  misc_feature (509)..(510): n is a, c, g, or t
  misc_feature (519)..(519): n is a, c, g, or t
gaataatattgtgtcccccctttgagaaaagtttatggttttcgcgcgggttttccaaaggggagggggagggttcccccaggggaacccccttgggaccggggcaaaaaaaatggttgtttcccccccacccggggcaaaaaagggggccttgcccttggaagggtaaccacgttttttctgttattccaggggggcccaatccattccatttcgtttctgggggggcccccaaaaaagcttgaaccctttttggttattccgtttccaattaggtttccaggtgaatgatgggggggatgtttgaaccccccaagtttgttgaatgggaatgggtttgaacgtaaaccatccccggtggcactgggggcttgtttatcctggaggaggggatctatcccccatttcctgggaggggtgtgaaaccccnttgggaattagnnccctgccaagacttccgatnngcttgtcatccaaactgcatanngatttgatgtnntgagtgacgnncccaagatngcattcccttgtccctgcagcggaaggtatcgtatcatcaatattattctgattggctgacaggataacgcacatgtcacagaggttgatgttgaacagcccttaaaatcagccccgactttaatggcgtaccacggcaatatggacactttggggaagttatgaagcgtctccccattcccgcttgaggtactcaatagagccccacaaacacaatgtgcttgagctcatggtaatgaaagttgctggcacggagcggcatcaccaggttccggaggccgatcagggctgagctgacgtcgccaaagatgcagaccacgacatggccactcaggacggtcatggcagcttcacttcgagtcaggatgactttctctatctccttgggtgcacaccagtgaaacatcccagtagagtcgtacttcttcacattggagtccatgttgtcaatctgatcattgccaggaattaacaaggggtc

SEQ ID NO: 369647 - DNA, 697 bp, Homo Sapiens
  misc_feature (54)..(54): n is a, c, g, or t
  misc_feature (108)..(108): n is a, c, g, or t
  misc_feature (405)..(405): n is a, c, g, or t
  misc_feature (475)..(475): n is a, c, g, or t
  misc_feature (511)..(511): n is a, c, g, or t
  misc_feature (543)..(543): n is a, c, g, or t
  misc_feature (559)..(559): n is a, c, g, or t
  misc_feature (598)..(598): n is a, c, g, or t
  misc_feature (629)..(629): n is a, c, g, or t
  misc_feature (643)..(643): n is a, c, g, or t
  misc_feature (655)..(655): n is a, c, g, or t
  misc_feature (663)..(663): n is a, c, g, or t
gatgccgctccgtgccagcaactttcattaccatgagctcaagcacattgtgtntgtgggctctattgagtacctcaagcgggaatgggagacgcttcataacttccncaaagtgtccatattgcctggtacgccattaagtcgggctgatttaagggctgtcaacatcaacctctgtgacatgtgcgttatcctgtcagccaatcagaataatattgatgatacttcgctgcaggacaaggaatgcatcttggcgtcactcaacatcaaatctatgcagtttgatgacagcatcggagtcttgcaggctaattcccaagggttcacacctccaggaatggatagatcctctccagataacagcccagtgcactgggatgttacgtcaaccatccatcacaactnggggtcaacatccccatcatcactgaactagtgaacgatactaatgttcacgtttttgggaccaacgacngatgatgatgaccctgatacagaactgtacctcacngcagccctttgcctgtgggacagcatttgccngtcagtgtcctggacncactccatgagcgcgacgtacttcaattgacaagtatcntcacccttgatacggaccctgggtgaccggnagagccacgccggnaagctgggaggntctgattngctgagggaaaacgcccttaggaggtggctacag

SEQ ID NO: 369648 - DNA, 998 bp, Homo Sapiens
  misc_feature (684)..(684): n is a, c, g, or t
cgagctggtaccgccgtgatctgagtgcatgccgcggactgaggatctgaagccccagcgaggcttccgaggctcccacagcaccctcagtcattcccccagccgtgagcgagtgcagccatgtgatggcccctgacgtcccagcaaccccagtggcccctacagagtcacagacagtgctggatgccctgcagcagaggctgaacaagtaccgcgaggcgggcatccaggcccggagtggtggggacgagcgcaaggctcggatgcatgagcgcattgccaagcaatatcaagatgctattcgagcacaccgagcaggacggaaagtcaactttgctgaattgcctgttcctccaggatttccccccatccctggcctggagtccactatgggtgttgaggaggacgcagtggcagcgacattggcagctgcagagaaactggcctctgcagaggattcagccccggctgataaagacgaggacgagggtgagcccccagcacaggccccagtggccaagaaacctgcacggcccacagtcccttcatcccagcgcctgcctgagcccagggcctcaagttctaaggagtcaccgagtccatctgtgcgggagcagctggcactgctggaggcacggaaactgcagtatcagcgggcagccctgcaggccaagcgcagccagngacctggagcaggccaaagcctatctgcgggtagccaaatggcttgaggctcagatcatccaggcccgatctggcagacctgttgatctgtccaaggtgccttcgcccttgacggatgaggagggtgacttcatcctcatccaccatgaggacctgcgactctcccaaaaggcggaagaagtgtatgcccagctgcaaaaaatgcttctggagcaacaagagaaatgcctgctgttctccaagcagttcctgcacccagggcaacgtgggctgaaaccacccgatttgagaaaacttgctccggaccgccaaga

SEQ ID NO: 369649 - DNA, 885 bp, Homo Sapiens
tccaggcagaaagaaactgtctgctgctcaagacccacaggacgccgggaagactaaatgatcactgcccccagtgaatatggtgaagaagctggtgacggcccagaagcggggagagacacgagccctttgcctgggtgtaaccaaggtggtgtgtgccgccatcacctactacatactggtcacgactgtgctgcccctctaccagaaaagcgtgtggacccaggaatccaagtgccacctgattgagaccaacatcagggaccaggaggagctgaagggcaagaaggtgccccagtacccatgcctgtgggtcaacgtgtcagctgccggcaggtgggctgtgctgtaccacacggaggacactcgggaccagaaccagcagtgctcctacatcccaggcagcgtggacaattaccagacggcccgggccgacgtggagaaggtcagagccaaattccaagagcagcaggtcttctactgcttctccgcacctcgggggaacgaaaccagcgtcctattccagcgcctctacgggccccaggccctcctcttctccctcttctggcccaccttcctgctgaccggtggcctcctcattatcgccatggtgaagagcaaccagtacctgtccatcctggcggcccagaagtagagccatccatccatgccataccacttgtcagggcacaggggactggctgggcccccagggctgctccccacttgcagcacaatgccttctccacctgcccctcccactcttccagtccaaatccaccgctgtcttctgttgcaagactaaccttttgagaaatcctttttgtgaaatcattgccctgctcaagaatgtacagttggctccccaatgcccttgggaagcca

SEQ ID NO: 369650 - DNA, 1005 bp, Homo Sapiens
  misc_feature (379)..(663): n is a, c, g, or t
  misc_feature (803)..(839): n is a, c, g, or t
ccccctccacataaaaagttcccgagggtaggtaatttaggggctgacacagtgattcccagtgattctgctccttcgtgccctcatccaacaaggtttcttgctgctcactacccagctacccctacgtgtggcccgtatcttcatggttcaagatggcagctagagctgctaggtagttaagatctctctcacacactttccttctgtcataattaacacagggttttagctcatgaggccaagcatacacattacttcccactggcacccctatgtaatattaaatgcaaagataccctcaggagtcctgtgctcaaaacaagtacaaaataactttttgttgttgtttgtggtgctggtggttttatttatttannnnnnnnnnnnnnnnnnnnnnnnnnnnnnnnnnnnnnnnnnnnnnnnnnnnnnnnnnnnnnnnnnnnnnnnnnnnnnnnnnnnnnnnnnnnnnnnnnnnnnnnnnnnnnnnnnnnnnnnnnnnnnnnnnnnnnnnnnnnnnnnnnnnnnnnnnnnnnnnnnnnnnnnnnnnnnnnnnnnnnnnnnnnnnnnnnnnnnnnnnnnnnnnnnnnnnnnnnnnnnnnnnnnnnnnnnnnnnnnnnnnnnnnnnnnnnnnnnnnnnnnnnnnnnnnnnnnnnnnnnnnngcatcaaaataactcggaaagtaggaacaattgcttgttgttcctgaaaactgtctcttcgacacttttcagactctgttacatgatcatgacaaaatatacacaaatagacatacagatacacatcagttaaagcctcnnnnnnnnnnnnnnnnnnnnnnnnnnnnnnnnnnnnngtggtattctgacacactgcccagaggtacccctgttcagcaattttaaaaactctttaaaaccacccctctccctctcactctcttctcgctcggccctcggtccccctcactctccctttgcacaggtctccctcttgcgcgtacgggcagtggatcctcaaga

SEQ ID NO: 369651 - DNA, 492 bp, Homo Sapiens
  misc_feature (480)..(480): n is a, c, g, or t
cagtttatttgtgcagatgctggaaccaaactagctgagtcaacaatcctgagcaagcagatgatagcctctgtacctggatgtgggactgcagcgatggagtgtgtgaggcagtacatcaacgaagtgcttggatttcatggcagacatgcacacgctgaccaaactgaagagccacatgaagacatgttcccagcctctgcatgaagatacctttgggggacatctcaaagtggggctggcccagattgcagccatggacatctcacggggcaaccacagagataacaaagctgtgatccgctatctgccttggctttatcatcccccctctgcaatgcagcaaggacctaaagaattcattgagtgtgtctcccatatccgactgttgtcctggggtgctgctggggtttccctcacttcacaatggcagtgttgccccaaatggcctccttttccctggcctgcccatttcctctnggatgcagggtt

SEQ ID NO: 369652 - DNA, 543 bp, Homo Sapiens
cacgctgaccaaactgaagagccacatgaagacatgttcccagcctctgcatgaagatacctttgggggacatctcaaagtggggctggccagattgcagccatggacatctcacggggcaaccacagagataacaaagctgtgatccgctatctgccttggctttatcatcccccctctgcaatgcagcaaggacctaaagaattcattgagtgtgtctcccatatccgactgttgtcctggctgctgctgggttccctcactcacaatgcagtgtgcccaaatgcctcctctccctgcctgcccattcctctggatgcaggctcccacgttgcagaccatcttattgttatcctgattggatttccagaggaatcaaagacctccgtgctggcacatgtgctccctcttccacgggtttcatctttggctcagttgtgggacagtttatttgcggaggcaaagtggccgttggtaacaaaatctcccaaaatcaggaatgaatttcaggtttcaagggggttattgacaggaataggattt

SEQ ID NO: 369653 - DNA, 947 bp, Homo Sapiens
  misc_feature (15)..(15): n is a, c, g, or t
  misc_feature (33)..(33): n is a, c, g, or t
  misc_feature (39)..(39): n is a, c, g, or t
  misc_feature (61)..(61): n is a, c, g, or t
  misc_feature (81)..(81): n is a, c, g, or t
  misc_feature (120)..(120): n is a, c, g, or t
  misc_feature (877)..(877): n is a, c, g, or t
  misc_feature (908)..(908): n is a, c, g, or t
  misc_feature (914)..(914): n is a, c, g, or t
tagcctgtggtggtncactggtcctaaaaaccngaagcnaaaccggaatcccccaaaaaantgcctgaaatttgactgaanccatggccaacccacatgggtaatcaacttgaacaaaanggtccgaaattgccatccctgcaaatccctcccattaaactaaatccacatggagacacaccatttcctaccatcactttgttaatgggccattagctgaaggatgctgggtgtcaccctactccaaaattctagtgctgtcagtatcgccgtgaagctgaattcattctgattttggagatttgtagcgacggcactttgctcgcaataaactgtccacagctgagcaaagatgaacgcgtggaagagggagcacatgtgcagcacggaggtctttgattgctctggaaatccaatcaggataacaataagatggtctgcaacgtgggagcctgcatccagaggaatgggcaggcagggagaggaggcatttgggcacactgcattgtgagtgagggaacccagcagcagccaggacaacagtcggatatgggagacacactcaatgaattctttaggtccttgctgcattgcagaggggggatgataaagccaaggcagatagcggatcacagctttgttatctctgtggttgccccgtgagatgtccatggctgcaatctgggccagccccactttgagatgtcccccaaaggtatcttcatgcagaggctgggaacatgtcttcatgtggctcttcagtttggtcagcgtgtgcatgtctgcccatgaaatccagcacttcgttgatgtactgcctcacacactccatcgctgcagtacccacatccaggtacagaggctatcatctgcttgnctcaggattgttgactcagtctagtttggtnaccagncatctggcacaaataaactgaacaagcaatgca

SEQ ID NO: 369654 - DNA, 1455 bp, Homo Sapiens
tttgaggaactctttttaagggggggtaccttaaaaaaacccaggggcttttatttactaaaaacattcccccaggcttccaaaagttcaaaaagttttgggcgggcatattcattttccaaaatggaaatcttaagatctccagctgccctcctcacgcccaagtatgaacaataaatcctgactttaacgctaaaatttgcaactgacttctgaggacatctaacagcagctgttttccagcgatgggaatagattacatggatgcatcttccaacaccctgtgacaaagaggtgcagtgattcatgatcaagcctctaaagtgaaaggcacataggcttttacaaggagaatgatctgtgttcaaactcagtgtgctacttgttagctgtgtgagcttaaccaaatctctgtgagcctgttttctcatctacctaatgggagtaacaccaccttgctcacaaggttgtaaacgctgtacataatatacataaagacccttggcatactgccttaatatagaagataataaaagttagccattattattcttattctctaagagtttaaatcaactaaagagtctgattttaaattgaatcttctcagaccgagtcatccaggactagaattaacatatgtatattctgtctgtaaggcagttaaatgcctgtagaggttacttagtggggttagaaaaggttagaaacctgaagtgaaaggacgttgtccctgctcccactctcttacacctgcagcacatgcaagcacgcacacaaatcacaccccccaggctaaacttgtatgcccatttgtgtatgtctccaacgctacttgatgaaaatacctgtagtccttcaacaggctgcaggtggtcagagaaaaaagaaagaaaatgcctgttgtcttaactgtttttagaaatttaagatgggaaagcgaggccccagggaactacgcatattccattagaagagaaagcaaggaagagagaagggactaactgctacattttcttgttgttagcaatataatggctcccacgtgctgggatcccagtctgatgagaagaaatgaaacgaaggtcatggatggaccttactgtccactgtgaaagctcctgcagcacctttaggccccacagcttcttctcaaagagaccaccatctccaacattaataggcatcccatcagcctcattgcgggggatcttgtattccaggagtatcattaactcctctatctggtatgcaaaggcagcgacttggagaagaagggtatgtatagcttgatggaagtcaccttcggttggggtaaaatgcacctgctggtcttctaagagcctggccaacaaaacatggaaggtacgataagcttgaaggttctcttggagtcgctctgcctcggtcagctcactccactgatcagtgcttgccactggcatcccatccgca

SEQ ID NO: 369655 - DNA, 938 bp, Homo Sapiens
taacaataggctaggtagcgaggccgggtggctgtaatcggcacgaggcttaacgagcaggagtggaaggagctcatcgaggagctgaacaggtcggtgcccgatgaagacatgaaggacctgtttaatgaggacttcgaggagaagaaggacccagagtcttctggctctgccacacaaacccccttggcacaggacattaatattaagacggaattctctccagcagcctttgagcaagaacagttaggctctccacaagtgagggccgggtctgcagggcagacctttctggggccttcctctgcccctgtgagtacagattcccccagcctagggggctcccaaaccttattccacacctctggtcagccccgggcggacaatcccagtccaaacctgatgccggcatcagcccaggcccagaacgcacaaagagcccttgcaggtgtggtattgcccagtcagggcccaggaggggcctcagagctgtcctctgcccaccagctccagcagatcgctgccaagcagaagcgcgagcagatgctccagaacccacagcaggccaccccggcaccagccccgggccagatgtccacatggcagcagacggggccctcccacagttccttagatgtcccttaccccatggagaagcctgcaagcccttccagctacaagcaagaattcactaactccaaactgctcatgatgcctagtgtgaataagagttcccctccggcccggaagccccctacctccagcccaagccatgtggaacctgctgagtcaccagccacccgagtaacttggaatccgaactccccgcgaatttcccaggggttctgtgcctggaatacgggcaatacaaaaccccccttttctcattaaaaaaacgggaactgtggggccagggcaagccccgggggtttggccca

SEQ ID NO: 369656 - DNA, 785 bp, Homo Sapiens
gggatgttctgattccacccaatatgccatgtacgcgaacagggaagaataacgttcttatcgtctgtgttccaaatccaccaattgacgagaagaatgccaccatgccagtcaccatgttgattcgggtaaaaaccagcgaggatgcagacgagttgcacaaaattttactggagaaaaaggatgcctgaacacgcaaagtcggctgcagaattattgccaagttgctgctgcttccaccgccccttaaagttagtcagtttttcttctcttctttgacattctaagaacttatagataacttaaaacttttgtgaggaagattaatgtggccaataaaacctttaaatgttaagtgtcaagaaactgcactctcccttcttaagaactgcctaaagtgtaaaatacatttgaatgcaatttttggaagattttttaatgttcgtttattaaactaaccctaagtgatttcttcaaggactgcaatcagggtatcaatttgctttcccaaaggctcttccaacccgtgggttttggggtccaccgccaccacgagagaggcttttgaacaggtgcctggctgtgttcagaaggaagctggcctgtgtgcttctctccggtgggctcagccgacgtgtgagacttgttctgttacaaaatgaaccgggctgccacgctgtgacaggcgtttgtcctctgctttatttttactttgaagctcaaatgcgagtactaagtgttcacctcagcgttcgaatcattggcctgtaacctgtggaaaagta

SEQ ID NO: 369657 - DNA, 815 bp, Homo Sapiens
cccggaagagtgccacttaaacatgagctggaaatgagtaaagagagtgagcatgattcagatgaatcctctgatgatgacagtgattcagaggaaccaagcaaatacatcaatgcatcttttataatgagctactggaaacctgaagtgatgattgctgctcagggaccactgaaggagaccattggtgacttttggcagatgatcttccaaagaaaagtcaaagttattgttatgctgacagaactgaaacatggagaccaggaaatctgtgctcagtactggggagaaggaaagcaaacatatggagatattgaagttgacctgaaagacacagacaaatcttcaacttatacccttcgtgtctttgaactgagacattccaagaggaaagactctcgaactgtgtaccagtaccaatatacaaactggagtgtggagcagcttcctgcagaacccaaggaattaatctctatgattcaggtcgtcaaacaaaaacttccccagaagaattcctctgaagggaacaagcatcacaagaatacacctctactcattcactgcagggatggatctcaccaaacgggaatatttttgtgctttgttaaatcccttaggaaagtgcggaaacaaaagaggtaggggaaatttttctcgagtgggtaaaagcttctaccgcaatggctaggtcaaggcatggttttcccacctttccgagcaatatatcatttcctaatatgaaggtcatttgccaagcaccctacccctggcttcggaactggtgcccattaaatgaaaaaatcaaccccttcaag

SEQ ID NO: 369658 - DNA, 861 bp, Homo Sapiens
tgaaggctactgcagctacttggcccccacaatggagagagatggttcgcttcgtctttgcttttccttcaatggcctggctggctgtgtccaaggcccaggagacaacctgttttctggctgttcgaggttggggagtctgggtagagaaaaacgttaaagtgctaaagcagcttctgcgagaggctgcaaatgcagatttggtcatacttgtctagggtctgaacctgcaaacagcaaggggaaaacctatgattctccaccagagtttacaagtccagaaagcagattttctctctctcatttttttaaggagtaaaatgctgttgctacaagtaaaaaaatgtaatgataaaatggtcagtttaccacagctggattttgcggtaattaaaaaagagaggttacactcctagaatttggagttaagattacaaaaaggaccatagcttgatattctgaatgaaaatttagtagcagctgcaagaagggaagagaccatgtggatcaggttattaaaaaaacatactgaaagtaatcaagactcctatacccttggtttagttgagagaaccttgcctagttggagagcaaggactgaactcggctgctcccactgtcttcagcctaaagggaaccatgtcacaccacgttacacacacgatggaataaaaggtcaggtttgttcatggctaatgacggctaaatgacacctccgttttctagcatttgtataaactgttagcacaatcccattaagagttgaacaaaaagcaaacatacccccaagctcatttagaactacccatctttaatacattttaaagtcctaccaaggaaaaggtttttaaaaccatggtt

SEQ ID NO: 369659 - DNA, 457 bp, Homo Sapiens
  misc_feature (76)..(85): n is a, c, g, or t
ccttgtctgcagtcatgagcctattgaaaaaggcctacagaagtaaatctttcaaggaggtaatagggagatgtannnnnnnnnnaaagaagtgcagttgatatctaatttacacagtgaaactaatgatagaaaataactaatgaaaaaaaatcagagactggtttccaattgattgacacctagatctgtcagcctctcttaaagaaaggggaaggagaaaaaaaatctcatcatggaaggcagacaagagtccacctgacagaggtggaatctgatggaatctgaccccatttcatgataaacgagaggaaacataaatgccatctcaaatactaaagcgatgtagtgtagcatgagtgactcaatgcaaattcacagaggaaaagaagttacggcttaggaagtaggacaataaatacaaatatttcatcttatttaatggtgcatgacttca

SEQ ID NO: 369660 - DNA, 408 bp, Homo Sapiens
caattcccaagtatgtgtgtgtatcacttttgtgttaaattttaaaaataaaattgatcagattggttttcaattgaagattcacttcaaatgaacaaacaataacaaactgcctgccagatcacgaatcctgactctagtgaaactaggtcattgattcattcagtaaacacataaatgtattttgatgcaatctgtggtgttggcatagcatgtatcatagcatatagctatgctagctgtgccaacaccatataccctggggtttacttcccccactttgggttttgtgcagtgtcacatgcacatagagcacagcgttctgctcccttgccgcttggcctttgatacagaagagcccagtgccatgggccaggtatggtggctcatgcctgtaatcccgcactt

SEQ ID NO: 369661 - DNA, 444 bp, Homo Sapiens
  misc_feature (403)..(403): n is a, c, g, or t
acatatcactccccaataccaccttctcagtcacggagtagagatcttacttcacaagaagtgagactcagagaggtgaagtgacctgtgcaaggtcacctattacagtgccagagttggaactaaaggaacttcagtctgtgaacttcagtgtctttccagtagcatatttgcagcagaagagtcaagaatgttgtgagctgcaactctcactagaaccaaatgaccttattgggagatgttagtccagccttaaaaacaagctcttcacctccatgaatggcaagtgtctgccctcttcaggccaaatcgagaatgacatctataactgaggcaaatcctcagaaacccaagtcagaccttgggattatttgctttttcagtaagttctgggtcccgggcntgtgtcttcttaactctttgctgttgggggacccttcaggg

SEQ ID NO: 369662 - DNA, 1239 bp, Homo Sapiens
  misc_feature (44)..(53): n is a, c, g, or t
  misc_feature (100)..(110): n is a, c, g, or t
  misc_feature (234)..(242): n is a, c, g, or t
  misc_feature (322)..(348): n is a, c, g, or t
  misc_feature (495)..(554): n is a, c, g, or t
  misc_feature (604)..(652): n is a, c, g, or t
cctgaggattccaaggtttccctctctttaccaagatgggtgtnnnnnnnnnntggaaatgtggttggacctccctctcggggcgaaacagatgtgtttnnnnnnnnnnnacagggggtttgtaggaaaaaaaagtggtagcaacaaagtttctccccaaattggcccagagggtgtggagacgagagaaaatttttacgccccccccagggttttatctcccggcgcccaaannnnnnnnncccccgcgcaccaaaaaggggggtttatccttttctgggggggagttataagggcccccaccggggggaaaaataagggnnnnnnnnnnnnnnnnnnnnnnnnnnntgagaacccccctgtgtgggcccataggggggggtccacccccccgaaaaaaagggtgttttccccttgggggctcttttaaaaaggggccccccaaaagggttctttgtggccccaagggcggggtaaaaagggaaagggtttttnnnnnnnnnnnnnnnnnnnnnnnnnnnnnnnnnnnnnnnnnnnnnnnnnnnnnnnnnnnngcgccaagggttttttgggaaaggccaccaaccccttgggcaatccaaannnnnnnnnnnnnnnnnnnnnnnnnnnnnnnnnnnnnnnnnnnnnnnnnaaggcgccaaaagaaacaggccgccaccggcctcctcgcggcagggggtgcatagcccgggacctggggcgctgactccatagggcagggccaggaatggggcaaacaaggctccacaagtgtgttctcagaatcgggtttcctcaggtaaatgagggcaacggcactcttgggtcccccgcaactttcctgtatggtacctgagcagtagctgggtgggggtctccaggggtgccttggaggcgatcacttcccgcaatgccaccccccagcgctcagcctctgcctggcgtggggagcagaggcggacactgtgtttccgaccagacacagtcactgaccacagacctgtctccttacgcctgcgctctgggccggtcaccgagcacaggctggtgagcacgaggctcccgagacgccgcgcccctttcccgctgctgctgaactgatccagggagtcccgcgtgagcacaaaccaggctcggcgcgggggcagccagggccgcgcccctcctccgcggggctcccggtacagccacctttcaccctcgtcccgcattcgccacccggcctcgctaccttaggca

SEQ ID NO: 369663 - DNA, 730 bp, Homo Sapiens
  misc_feature (431)..(439): n is a, c, g, or t
cccctcaagtatttggcttcaactttatgccgggcatgtagatgaaaagtcggctatgacctgtccttgacaagcagatgtaactccttgattgaggctagtaggtttttaagacctgaataattgagtttgcagaaacctactgtgtgccttcacgtaaatggagagtggggtttggtctagcaaccaaacaatctagaaggtcccccttggccttaccggctcctgttttaggtaagtctcactctgatttccacgtgactggcagcttcttcccgtttgtgcctgtcatcccttatttgcttatgaaaatgaatcatccatacggaactctcacaagttttttgccccccacaatttgcaacttagccggggggaaacttggttcaacaagcctccaagacatttccctatcctcaaaattacttttnnnnnnnnntaacctataaccacccccctcggaaacgtggcccctgaatctggaaagatgggccctcccaggggagcaatacctctctaaaaaaaggggtaaatttttgctttgcgttctgtgcgtcttttattacccgcccttggtccttgtccaagtccccacaattcgaacttccctgaaataatgtgcgcaaaaccaacataacctccctccccaaagcgaagataccacacacaactcggcctataaaacggagggcacaaaaggactaccaactcttcggcttataaaaaatag

SEQ ID NO: 369664 - DNA, 908 bp, Homo Sapiens
  misc_feature (263)..(300): n is a, c, g, or t
  misc_feature (337)..(366): n is a, c, g, or t
  misc_feature (449)..(572): n is a, c, g, or t
cgatagtaagcacttatagtaagtagagtgaccccaatggtaatgtctattcaatgggcggaaagagctaggccctcccaaagtgcagtaaatctcattattcattgacttctccttaagcgttctgctgcttaactaatgaccgttttaattcttaattcatagggtgccttgacaatgtagttttattcttattattataactttgagttgtaataaatatatcgagttttctgtgttactaaaattacactgaaatatcnnnnnnnnnnnnnnnnnnnnnnnnnnnnnnnnnnnnnnatagagtctcaccctgtcttccaggatggaatacagnnnnnnnnnnnnnnnnnnnnnnnnnnnnnncccggttccagcgatcctcccacctcaccttcctaagtaggagtgcggaattataggcgtgcaccgtcacatgcctggctaannnnnnnnnnnnnnnnnnnnnnnnnnnnnnnnnnnnnnnnnnnnnnnnnnnnnnnnnnnnnnnnnnnnnnnnnnnnnnnnnnnnnnnnnnnnnnnnnnnnnnnnnnnnnnnnnnnnnnnnnnnntggccttttaacattttaacttatgaattattttcatacaagataatagtctttttaaaatgcagcttaagtttattctgtggtatattttgctcatatttttcttactagcagcttcaggggataagttggttttgaaggaaatgtattttctttgataacttggcaacatgcaaacctgttctctctctcacagactttcatgtaggaaacaatctttcactgttgcagactgtaaggaagaagaaccaaagagagtcatgggcgaagccccaaagaccctctttaagagtacatctgatcatgtcacatgtctctaaaattacacatactcca

SEQ ID NO: 369665 - DNA, 967 bp, Homo Sapiens
aaattccccaaggggcattcccatttgggcttgaagggagggccccccagggtcccagtgttttggaaggctccttctgctctaccattaatattgattctcaaaatttctttaacttttctgggggacaattctggattgatttaacataataacagctaggttcccctaaaaataaacaaattccccctctttcggtggttagcaagtctaaagctctttgattttgaaggactactgctgctaggcagtgaagttgatcttgcactaacctccactgtctgttgggtttctgtactcctaaaattggagtattgtaggggctattgcatggttttaccaggccttgggcttttaggtccttaacaatcttttggagttgttgttgggcctcgggtttaagggggtactgcctttggtagggaaaagaggtggaatcctttagtttaacttgaacaggatgggcattctttgctcatccatattgtccttctgttgcccagacttcaggattattccttcctcaagtaggggacaacaaacgggtgttccttctcctatgttcaggtgtataattgcccctgcttttgctagaatgtctctccctaacaagggagtggggctttcaggcacaattagaaaagcatgtgaaaacagtaaagttccccagtcacaacttagtggctgggagaagtatctagtgactggccgtcctaggacccctctgatagtgacagatatggaggacagttgtccaggacaggagagtaagactgagaaggccacaccagtgtccaggagacagttaacctcctggccctcaatggtcaagcatacccagggctctgtgacagtgagggcatgggctggcacttgccccaggcaccctcagtcctgctgctggatcatctggttagtggcttctgactcagaggacctacgtcctctgggggccgcgcagagtttc

SEQ ID NO: 369666 - DNA, 930 bp, Homo Sapiens
  misc_feature (642)..(694): n is a, c, g, or t
gctggaccggtccggaattctccggatttctgtgcatgctcagcctgggctctgtgcgtgtgtgtgtttctgtgattttagaagggtaccaggcacaggttctgtcctagggcacttaccatttagtagggagatggaaccaacccaattaactctagcaatagcctcctaactggcctcctccattgattcagtgaaccttccaatgcatggctcataatttcaaaatacaggctggttagttactccctacctgaaagccttcataggtgcctctttgctcttctgccagtatcaaaacttttgaaggccttaaaggccctgctttgcctggcccatctgtctctccagcctcaccttgaactgtgttcctgtcactgcacgccagtcacaccggcctctaggtcctcctgtaggccactcttctttctggcacagggacctgcacacctggagtgcccttcctcccccactcgcctgttcacccctgcttttcctttacacctcctcctcagggaagtgcccaccctccgtacatctttcacagccctgattgcagctgtgttcactcaccaggtacctgcagaaggcctacagggtgccaggcacttctttaatgtgttctttctttatgtgattatnnnnnnnnnnnnnnnnnnnnnnnnnnnnnnnnnnnnnnnnnnnnnnnnnnnnnccctgtgcttatgctcaatattagctctcccttggcacagagtaggcactcaacaaatgctccccaaaaggctgagtggctgactgaattaagtaccagtgacatgccagtaactgctaagatagatgaaccctctgtaatgctccgacagttaacagactgaataaatttgggagacttccctaaaggggtggcatttctcccaggggggaaaacgccaaaactccaagtggtgg

SEQ ID NO: 369667 - DNA, 827 bp, Homo Sapiens
  misc_feature (130)..(174): n is a, c, g, or t
ccgcccaccacctgaaaaaatttcttgggggggagatttttttctcaaaatccattgggaagggccagccaaatggggaaagacccccccagttttggcttaatggggccccccaaaaagtgggttaccnnnnnnnnnnnnnnnnnnnnnnnnnnnnnnnnnnnnnnnnnnnnnttttaaggaccggaacctttaaaccaggctgaaaatttccccttacctttaaaataatccacggtgaaaactcgtggagaacaaaatttttgtttcccttcttgcaggttttactgggttaattgatgtttaacatttaggtattggattgtccaagtgttcctgtaggaatcagcagttcttacagctgagccccagagctagaaagggtttggcagcttccccaaggtccctactggtttcccacactacaaccaagtcatctctgattgtcctatttagaacatttaaaaataaaaataagattcacttcttacacaatccattgttgctataattcaaaccctgttagaactattctccatatttttatgtttaaatctatccacactccttttcccaaatttttatgaagatatttgttaataattcttaaaatgcagaccctaaattgggtacttttctgaagaaagaagcttaataagagaataaattgtttttcagctcatatgagctattctaagataaaataacttggaaatcaatgcccaggaccccagacactaagaaattaagattggaaagtacttttgacataatagcaaaaacttatattaatattaaagaaatgaaccaatagtttttcattccac

SEQ ID NO: 369668 - DNA, 907 bp, Homo Sapiens
  misc_feature (654)..(654): n is a, c, g, or t
tggcttggtgagtgaatctggtttacaccggctcctgccctgccttcactcttctcccctgattcaagactcctctgctttggactgaagcactgcaggagtttgtgaccaagaacttcaagagtcaagacagaaggaagccaagggagcagtgcaatggatttctcagtaaaggtagacatagagaaggaggtgacctgccccatctgcctggagctcctgacagaacctctgagcctagattgtggccacagcttctgccaagcctgcatcactgcaaagatcaaggagtcagtgatcatctcaagaggggaaagcagctgtcctgtgtgtcagaccagattccagcctgggaacctccgacctaatcggcatctggccaacatagttgagagagtcaacagaggtcaagatgagcccacaggaggggcagaagagagatgtctgtgagcaccacggaaaaaaactccagatcttctgtaaggaggatggaaaagtcatttgctgggtttgtgaactgtctcaggaacaccaaggtcaccaaacattccgcataaacgaggtggtcaaggaatgtcaggaaaagctgcaggtagccctgcagaggctgattaaaggagagatcaagaggctgagaagctggaagatgacatncagacaagagagaaccgcctggaagaatatatccagatcgagagacagaagatcttgaaagggttcaatgaaaatgagagtcatctttggacaatgagggagcaaaaaaagcttgccaaaaacttgaagaagggggaaggggaaatggccttggaaaaacctggggaggagcctataaaaaccaatggggtccacccaaagggcggggatggcccggccacgctttattttcaaaaatttcccagcgggaaag

SEQ ID NO: 369669 - DNA, 647 bp, Homo Sapiens
gtggcctcaggaaacatatttaatggtatcacttcataatatttgggattgcataaaaaagtatgtagttaccttttaaaataataaaatgatttcaatattaatcagtatgtgttggctgtcattataaatgtgctttcctttatgctaggcactggaaatggaaattgttgtaatacacaaaccttgcctccaagagacttagtgcctatgaagtcggaaacttagaataatttttataggttgaaagataaatgaatgatacagataataattgccattaaagtttggaagacacttaaaatcaaagatgattttctggaggaattaggacttgatctagtacttgaaaatagaaacacttcttgggtaagtagaattgagaaaattaaatcaagactccagaaataacatagaaactccagaaaattaaatcaagactgcagaaataacatattgactactgggagatcagttatcacccttgtgagtgtgatgggtttgttactctgtatgtcaaaggttttaaacttgaataggattcaaaaattttctaaaccccggaaaccttggtttggaaaaaatttggggttttttggggcaaccttcacttttttttaaagaagggccccttccaaaacccaaaa

SEQ ID NO: 369670 - DNA, 951 bp, Homo Sapiens
  misc_feature (292)..(304): n is a, c, g, or t
  misc_feature (814)..(824): n is a, c, g, or t
tggatgtcctatatttgttgtatagcctcctttgtggaagttatgtatgcatttgacttcactttatctaagacatctattttccttgaactcttgataggtctgctggtttcctcaagggaatccaatctagctggattttaatctctttgaattgtgtcctcagctataaaagttttagctgaggttttaatggctgcacttaagtaaatctaacagatataccagggggtgttccaattacatacaccattaaagggctttatgtgaggatttttaaaaattaccattnnnnnnnnnnnnngcatagtccatttgcagtataatttaccagcaggaaagatttcaatgtcctggaaaaattccctataaaaaggaagataggaaaacagaaaagtcacagtactcaacctacttcaagggaagattgggatctttttggctctctgcctctaaacaggtaaaaggctttgtattatttctagcacgagtttttcttctttagattgcatgctattgtatgtctacagggcatttgacagcccaagggctaaatccaggtgggacggtatctaatgatgtcctgtccttcactgtccttgccatcaccagccacagagatccaggctttggggactcccacagcttatcgaccagtgtttgaattaatttttaaccctcttttcccctcaaatgaaaaattactttgggaaacacttttcatttaaaaaattaaaagggccccccttggctaaggaaaggcatctggttcctgggaactaaactaccttttaaaaaagtggttgaggtcctnnnnnnnnnnnaaaatgggttcagccccacacattaatggctttggaaaaaactggaaagggattaatttgggaaaaattggttcttttaattacccctgggggggtaaccccattggtaaatagttaaaagaaattt

SEQ ID NO: 369671 - DNA, 897 bp, Homo Sapiens
ttagaaggggagccagggggaacccccagtggtttcaggtggcccctgaggtcctggaggcagccgtggatgtgatgcaattggctgtgggaccttagatgtaggacacaacttcagtgttcccatccagaaagacctcactcacagggttgtgctgagaatgacatggggctaagcatgcagagctccctgtaaactgtgaagtgtgatacaaatgtaaatgacagcagtgatctcggggtggcccccggcattgctgccctcccccacgcccatgcctgtggaagcaaaccttgttcatcagtatagctttctttcctgtaacccaggatctaccttggggggcttctcaatactgcattctatgtagccagcctctttaacttggtaagtgagccaccccattctagaacctggaaattggagcccctcaaaaacagttcctgttcaaggaggactgacctgctggggcaatgttgggtgcagtgcagtccctgcttggggtggtcatgtctaggctgttgctctgggcaaagataagttgcaagattcacagaaatggggaaaatgtgaccaagtgtgatcttaacaacttgacaaagttttgtaaccaacccaagttagaatgtgtgtcaaacaggaggtagtttagatatgcttccaagaacatgtctgtgttataaccataatgcctaagcagtgagctctggtttttgaagggcttttaagaaatatatacatggtctgtgtcaggtctataaacttgccctcctctggggcctgtttaaaagcattgaaggactggcattgaaccaccaagaagaaaaatgcaaaggccccttaccgggtttccttttttcttcaagccaggccgaaaattttcacttttggaagaaa

SEQ ID NO: 369672 - DNA, 1068 bp, Homo Sapiens
  misc_feature (468)..(468): n is a, c, g, or t
  misc_feature (543)..(543): n is a, c, g, or t
  misc_feature (912)..(967): n is a, c, g, or t
ggcctgggtggcgaattcggcacgagggagaccgtaagagacaggagacaaagagacaaaaagtgtgagtgagcaggtgaggagagagattgagaactatgagagacagcagctaagagacaaaggaggcgggagactgcctaggtgccgcagcacccacaccgtcctcttgcccccccgtcactgggaccccagagctggcccttgatggaggggagccgacctcgcagcagcctgagcctggccagcagcgcctccaccatctcctcgctcagcagcctgagccccaagaagcccacccgggcagtaaacaagatccacgcctttgggaagagaggcaatgcgctcaggagggatcccaaccttcccgtgcacatccgaggctggcttcataagcaggacagctcggggctccgtctctggaaacgccgctggttcgtcctctccggccattgcctcttttattancaggacagccgcgaggagagtgtcctaggcagcgtcctgctccccagctacaatattagaccagatgggccgggnagccccccgagggcggcgcctcacctttcaccgcagagcaccccgggcatgaaggacctacgttttggccgctgacaccttagaagacctgcggggctggctacgggcgctgggccgggcctcccgtgcggagggggacgactatgggcaacccaggtcacctgcacgaccccagcccggggagggccccggcggccccggtggtcccccggaggtgagcagaggggaagaggggcgcatctcagaatcaccggaagtgactcgactctccagaggtcgtggtagacccaggctgctcactcccagccccacaaccgacctccactctggactccagatgcggagggcgaggagccccgacctgttcannnnnnnnnnnnnnnnnnnnnnnnnnnnnnnnnnnnnnnnnnnnnnnnnnnnnnnngcgcggcgaccccctgccccctcaggagacacagcaccccctgcccgacctcacaccccggttgagtcccattgatgtcccgacctccctctggattgggg

SEQ ID NO: 369673 - DNA, 1302 bp, Homo Sapiens
  misc_feature (80)..(144): n is a, c, g, or t
  misc_feature (257)..(415): n is a, c, g, or t
tatgcccaatttctgcctccaaagaaagaaaaagtaaaaactaaagggcagaaatgacatccacaagcagacaccccagnnnnnnnnnnnnnnnnnnnnnnnnnnnnnnnnnnnnnnnnnnnnnnnnnnnnnnnnnnnnnnnnnttacagacattgtatagaaaagcactgtgacaatgcctttcctgttttgttccgatctagttactggtgcatgcagcccccagtcacgtaccccctgcttgctcaattgatcnnnnnnnnnnnnnnnnnnnnnnnnnnnnnnnnnnnnnnnnnnnnnnnnnnnnnnnnnnnnnnnnnnnnnnnnnnnnnnnnnnnnnnnnnnnnnnnnnnnnnnnnnnnnnnnnnnnnnnnnnnnnnnnnnnnnnnnnnnnnnnnnnnnnnnnnnnnnnnncagctcgatttcttggttccctgactgggaagcgaggtgaatggcggatggtcaaggcagctccttaggcggcttaaacccgccctggggaacatccctgcaggggactccaaccagcccgagcaaaacggatcctgagggcgcgcctggtttaggaatttgccccactggggaagcctcgccagaacactgtattggcaagcccccatggaggatcaacccagtggcctgaacacccggtaaggaacgggcacttggagtctggacatctaaaacttggtaagagtagtctttgaaacttgcccactccatttgagtggaagcatggcctgatcacccatggcgtgcctttattggcactttggttttggtttgaattgcttgacaggattggtcttgggaacttgcctactccatttgagtggaagtgtggcctgatcacccatggtgtgcctctcctggcactttggtttttatttttgacttgacttggattgcttgatactttggttttggttttgacctggcttggatttctggatactctgattttggtttggtgcaaactgcaaaactgtgtgtgcgccctttttaccggttctttgttttgtggtgtgtttgtggtgtgagcgtggtgttttgtcttgaagaagcataggtcaggcacgaataagcccaccccactaggaactatgttgacaaatttcaaaaaagaatctgaggggagactatggagtgctatgacacccaggaaaactttaaactttgtggtaagatagactggccagcattaaaggtaggttggccatttaaaaagaagcctggacagggtcccttgttttcaaaggtagggcacaaagtaaacctataagcccaagggaccccga

SEQ ID NO: 369674 - DNA, 1145 bp, Homo Sapiens
  misc_feature (1038)..(1063): n is a, c, g, or t
ggatactaggcatggcctcgctgacctctcagagctgcagctgaggactctttgcatagaggtgtggcccgtgctggctgtgataggaggagttgatgctggtcttagagttggaggtcggtgtgttcacaagcaaactgggcgccatgccacgctgctgggagtggtcaaagagggcagcacgtctgccaaggtccaatgggatgaagcagaaattactatcagcttcccaactttttggtcgcctagtgatactccattgtataatctggaaccctgtgaaccattgccgtttgatgtggcgcgattccgaggcctgacggcttctgtgctgctggacctaacatatctcactggcgttcatgaagacatgggcaaacagagcaccaaacgacatgaaaagaaacaccgacatgaatccgaggagaaaggggatgttgagcagaaacctgagagtgaatccgctttagatatgcgaacaggcctaacatctgatgacgtcaaaagtcagagtaccacaagctccaaatcagaaaatgaaatcgcttcattttctttagatccaacactgccaagtgtggaatcccaacatcaaataacagaagggaaaagaaaaaatcatgaacacatgtccaaaaaccatgatgtagcccagtcagaaatcagagcagtccagctgtcctatctttacctcggtgctatgaagtcacttagtgcccttcttggctgtagtaaatatgctgagctgttgctgataccaaaagttctggctgaaaatggccacaactcagactgtgcaagttctccagttgttcatgaagacgtggagatgcgaacagcccctgcagttcttgatgcgacacctgttggaagcgagccagtcatgcggtcccccctaaagagagcatttggggattaactgatctggaaacgagcgcaaggcccatgattctataaaattagtggtttcatggggcctttttggaagaaccagttttgggggggcaaaatttaaccaaggggaaggttatcctggannnnnnnnnnnnnnnnnnnnnnnnnngtggccggtttaaaaaattactgttcaataaatcgggccagaaaagggataacacttttcctgaaaattggaatttgataat

SEQ ID NO: 369675 - DNA, 903 bp, Homo Sapiens
  misc_feature (93)..(93): n is a, c, g, or t
cccacccctcatgaccccaacactcaaatctccatcagatctaggtcagcttcttcaaagccatagaaagactcggtctcactttcaccctcnaaagagctggtgaagactttcaggctcaattgtctcttcaggagatgatctgggtcgtggagtggaagactcagaatgttccccactcagcttcagttgctcctctagggaggcaattagctcctcctgcatgtcagcatttcttgtaggtgagttaatgttgccatcggggccaggcagaacactagccaccaggaaggagcgctgaactagctctggaccagtccccaaagacacctagaacttcacccagcccagacaagcacccagctgaagcaggacatcagaatcacatgcagtatctgccatttcccgagcctgttccttccattttttatgcaggaagttcctgacagttctttttgatgcatacatctaatggctgaattttggagctacagcctgctgggaccactgcaggcaaagtgctagaggcactaagcatagccagtacctcttctgacaagtgagtgcgatgacagtccatcacaagcatgcctttgctgcgctggcaagctgtgtgcttctgccacactcgagttgaccacagctccatgatctcgtcatcactgtagccactctcctttgcctctagcaatatggagtctggcatgttagcaggctgatccatctgccctctgtagaaaaccagggtgggaaggacagtgccatctgccagaatggctaggactacatcacaccaaggttcccctgtgcccactgtctgcagggcattctcctttcgatcatcactgctcagcacctctgtatccaggaacatagagatctcatcaatagccacaatcatag

SEQ ID NO: 369676 - DNA, 1109 bp, Homo Sapiens
  misc_feature (830)..(841): n is a, c, g, or t
  misc_feature (1055)..(1055): n is a, c, g, or t
ctaaggtagcgaggcctgggtggcgaattcggcacgaggccgtcaccgggccctgccttggtcaagctgccccggaatggcgaggcgcccggggctgagcctgcgcccagcgcctgggcgcccatggagctgcaggtagatgtgcgcgtgaagcccgtgggcgcggccggtggcagcagcacgccatcgcccaggccctccacgcgcttcctcaaggtgccggtgcccgagtcccctgccttctcccgccacgcggacccggcgcaccagctcctgctgcgcgcaccatcccagggcggcacgtggggccgccgctcgccgctggctgcagcccggacggagagcggctgcgacgcagagggccgggccagccccgcggaaggaagcgccggctccccgggctcccccacgtgctgccgctgcaaggagctggggctggagaaggaggatgcggcgctgttgccccgcgcggggttggacggcgacgagaagctgccccgggccgtaacgcttacggggctacccatgtacgtgaagtccctgtactgggccctggcgttcatggctgtgctcctggcagtctctggggttgtcattgtggtcctggcctcaagagcaggagccagatgccagcagtgccccccaagctgggtgttgtccgaggagcactgttactacttttctgcaaaaacgcaggcctggggaagccagcccaagcttttctggttcagcctaacaacgctaaccctccccccctggctaaacccacaaccccggggaattttcctggggggcaaaaatacccaggtcctcccaggaaacgtccccannnnnnnnnnnnccctagccggtggacccaatctggaccacaataagcgccccgccactctttccctcgacgacagccgtttctttccgtccagcagaacaagcccccacaccccgactgcagtccgcaaccgccagaggtgggcgtggtggagggacgccaccgtaggcgccgcaacggatcgacacctacacgcgcacaacaacacaaacaagtgggagggccncataaccaacagaaacaacccacaatagcgccgaaaagacaccgccaccgagcc

SEQ ID NO: 369677 - DNA, 928 bp, Homo Sapiens
  misc_feature (749)..(804): n is a, c, g, or t
gagtccatgttcatggcggggggcagcgactgcctcattcgtcgggggaggaggcggccaggcgctctacatcgatggggacctgaaccggggccgcacaagccactgcgacaccttcaacaaccagcccctctgctccgagaacttcctcattgctgccgtggaggcctggggcttccaggaccctgacacccagtgacggcctgtgccacggtgactgagccgtggtggggcggtgggccgaggctgggctgccgcctcgggcagcagagagcagatgaaacccccatgtggtaggcaagggttgggggacggcaggaccccatggccaagcctggcgttgcctggacctgctgctgcctctacctggggtttgggctgggcttccccagtccacctgcatctgggtcagagctggagggcctgctgtgcccccagccccacccagagctggcataggaagtaccttcctcactccgtggaggcgttccataggcccaaggccttgggagtgtctgggtcttgctgcccactgagcctctctaggcagcctgagccccaggggtgggagtacaacggcagtgggaacgtgcagctaagggtgggcctgtggtgccccctgctggtgccgcatagcatcgcgccctcctgagcagggccctgcagcctggctggctggcgactgaatcccagcgttaaatcccgagaacagactggcaccccttggggcctgcccccctgggcgggannnnnnnnnnnnnnnnnnnnnnnnnnnnnnnnnnnnnnnnnnnnnnnnnnnnnnnnccctggggccacccgtcttcaacattaaacccctttctttggggctggccctcctgaagggctcccccctggggggcttggcgtttttgggggaaccttgccttggggtttggggcaaagaaat

SEQ ID NO: 369678 - DNA, 937 bp, Homo Sapiens
  misc_feature (61)..(256): n is a, c, g, or t
  misc_feature (883)..(883): n is a, c, g, or t
tgaatgatgaaaatgagaatggcatcttgccaaatgagttatgcatcttatgtggtgtctnnnnnnnnnnnnnnnnnnnnnnnnnnnnnnnnnnnnnnnnnnnnnnnnnnnnnnnnnnnnnnnnnnnnnnnnnnnnnnnnnnnnnnnnnnnnnnnnnnnnnnnnnnnnnnnnnnnnnnnnnnnnnnnnnnnnnnnnnnnnnnnnnnnnnnnnnnnnnnnnnnnnnnnnnnnnnnnnnnnnnnnnnnnnnnnnnnnngaccgtgagccactgtgcctggcccttcattcctttttatggccaaataatattccactgcctggatatatcatattttatttatccatttgtcagttaatggacatttgaattgttaccactttttggctattacgaagcatgttgctgcgaacattcttgtacagtttttttgtggagatgtagttaaatttaattccacagccacttctgggataggtcctaatctttactcatttcatcctcgaggaaaagccttgcagacctgaagtaacttatgtcaggacacatagttcctgccaggtggaatggggtcctaaaccctgtgtcaggacacatagttcctgccaggtggaatggggtcctaaaccctggtcaggacacatagttcctgccaggtggaatgggggcctaaaccctggtcctaccagtcttctttaatggtcacaagtctgtaagttacacagaaagctcccctatcattcactaccccatctactgcatcttacccagtgccagttggcccacaacaaatacttgttacaggggtgaatgagtggtggtctgtcttcttaggacctagaacaagagcatcactctagtcttggatgcgccctgtgcctgtgntgcttgtctgggggcttctagggcaagtgtcttgtctaaatgttgatcactgaa

SEQ ID NO: 369679 - DNA, 1142 bp, Homo Sapiens
  misc_feature (44)..(44): n is a, c, g, or t
  misc_feature (153)..(254): n is a, c, g, or t
  misc_feature (337)..(393): n is a, c, g, or t
  misc_feature (709)..(709): n is a, c, g, or t
gaaaactggtttgcccacagccagtgacttttagtatgaaaggnccaagaggattggaaagtgacacacaggaggtcttcaaacactgctcttataaatggcctgtgtgtcctaatgccatcagaagtgataaagttggtactaggatgtggnnnnnnnnnnnnnnnnnnnnnnnnnnnnnnnnnnnnnnnnnnnnnnnnnnnnnnnnnnnnnnnnnnnnnnnnnnnnnnnnnnnnnnnnnnnnnnnnnnnnnnttttaaaaaattagccagggcatggtggtgcctatagtgtcagctactcaggcggctgaggtgggagaatagcttgagcccannnnnnnnnnnnnnnnnnnnnnnnnnnnnnnnnnnnnnnnnnnnnnnnnnnnnnnnngcacaagactctgtctcaaaaaataataataataataattcactacgatgaccctgacaatagtttctaatctcatttactaggtaagttacagtttggtatactttagattgcatttttttaaatgttaaatatttggatttatttggaaaaagtaactgatacagaatactgaattccttataaacatacaaattgtcattttgtggacacatgtgaagcttttttgccattttcccagaatagtaaagggcagaagatgggaaaatgagaggagatggaagatactcccaaaagtaacatgaatgaatttggnaaacaaaatggctagactggcagcccagtccatgctatattgtccttaactcactgaaaccacccctggtttttcccaatgaaagataagctccaaagtttatttcagctataaaagtttcattcttgaaaaaattccacttcaaatccagaaacctaagcctgaggaaactgactagctcagtgaagccacaagtaggagaagcaagactgaaccttaaatctcctaattcccagggagtttttttctgaatcagctaaatgaagtattaaaagaggctacttaggggactgggtgcatgaatatagacaactctcagcaaataagccctatggtccacaaagctatacaccagttctcttactaatttaccttctatttcccaataggtaaaggatattcattgaacacaaggacacttagaagttaatgg

SEQ ID NO: 369680 - DNA, 949 bp, Homo Sapiens
  misc_feature (900)..(900): n is a, c, g, or t
gctggtccggtccggattcccgggatgacaggggaaaggatactttttgtctgtgtctgggaactacctgcccagctgttttgggtctcccattcatacactgtgttacatgagagagccaatcttggacctaccacttgaaaccattagtgagctgactctgatgccagtatggactggagatgatgggagccagttggatagccccatggaaatccccaaagagctctggatgatggttgattacctgtaccgaaatgctgtccagcaggaagatctgtttcagcaaccaggcctgaggtcagaatttgaacatatcagggactgcttggatactggaatgattgataacctctctgccagcaatcattctgtagccgaagccctgctgcttttcctggagagccttccagagcctgtcatctgttacagcacctaccataactgcttggagtgttctggcaactacacagcaagcaaacaggtcatttctactctccccatattccacaaaaatgtcttccactacttgatggcgtttttgcgagaactgctgaaaaattcagcaaaaaatcatttgcatgagaatattctagctagcatatttggcagcttattgcttcgaaacccagctggtcaccaaaagcttgatatgacagagaagaagaaggctcaagaatttattcaccagttcctctgcaacccactctgagcctatctctcctcctattttacttgaggctgccaattaccagccccacctgtttcagctcaagagatgccttaagataattatgtgaggccactttggtagcaagaatggcagctatttcctgagcctagtaccccaattaagcccaccattggttagcacactcagcgctgtgagtcgtgaagacncgggagaaaatccaccataataaaactgacattcaattttcaactttaa

SEQ ID NO: 369681 - DNA, 1088 bp, Homo Sapiens
  misc_feature (55)..(55): n is a, c, g, or t
aatgccccagggtgaacaggaccccagtctcgggaccctgtcgctttttagaccntgaatggtccccctttggtttcatagggttttctgtgagcagtttacaccagatatgatggagtataacgctaatgaagatactttactacaacaaattaattggcatttaatactttcatgttcctactattttagtcagttctcttccttggagatttaagaaaaaaagaaaacatacccaaaggcaaactctacaaaaccagtatctctatttccaaaaacacacatgagaacctcagaatgacactttgttaagggaggaaatgaaatgtcccttctcatccacacaaaagctttcagacaggaaaaaaaagatgcctactaagggtaatttcaagtaaaatacaaagtattgaaatactgaactttgcattcttcctctttccaaagaagtgctgtagtctcaaaatttgtgtattttagaactatgggtcaaaaccctgtgtgttaggctaaacttagccaagggcaactggagtggacagctcctcttcctcaggcagagttaaatcggcttacaggacacccgggcatctcaccagggggcaacacagtttcatgcaggcaccaaaaagccacacgtggtgggtgacccaaaggtgcctgctctgggaactttcacatctgaataggtgtcatccttcaatggcatattcttgggtagccatccagcctaggagtcccaaagatgctgccttctcccttgggccccactttaagagttacctctttaagaactcaatcgtcacatcttagtttttgacctcagatgccatcagccaacttgactgaaccacctatcagcaattttggctctaaatgtcttagctgcttctgaaaatatacttcccctcaaaggaggaagatgtgtcagcgtttaagacattccactgaatatgttcccaattctgaaaacagttcacaaaaatatgcttccagtatgtgggagccatggccttaccacgggaacaaggcaagcagctctcagatggatgtgtatgtctgactgcacttgtcagaaacccaggtgc

SEQ ID NO: 369682 - DNA, 762 bp, Homo Sapiens
  misc_feature (165)..(271): n is a, c, g, or t
  misc_feature (294)..(479): n is a, c, g, or t
  misc_feature (486)..(717): n is a, c, g, or t
caaagccttaagtgttcagtaaaaccttccatattcttataacccagaagaaaggagggcagtgacaacgtagttgttgaaggccctatgtaaagatggagtgagctattgaaagttctttgaaaggaagcctgaacaatgcaggaagcctgcatggcttccagnnnnnnnnnnnnnnnnnnnnnnnnnnnnnnnnnnnnnnnnnnnnnnnnnnnnnnnnnnnnnnnnnnnnnnnnnnnnnnnnnnnnnnnnnnnnnnnnnnnnnnnnnnnctattgcctggctgttgagcccnnnnnnnnnnnnnnnnnnnnnnnnnnnnnnnnnnnnnnnnnnnnnnnnnnnnnnnnnnnnnnnnnnnnnnnnnnnnnnnnnnnnnnnnnnnnnnnnnnnnnnnnnnnnnnnnnnnnnnnnnnnnnnnnnnnnnnnnnnnnnnnnnnnnnnnnnnnnnnnnnnnnnnnnnnnnnnnnnnnnnnnnnncatcagnnnnnnnnnnnnnnnnnnnnnnnnnnnnnnnnnnnnnnnnnnnnnnnnnnnnnnnnnnnnnnnnnnnnnnnnnnnnnnnnnnnnnnnnnnnnnnnnnnnnnnnnnnnnnnnnnnnnnnnnnnnnnnnnnnnnnnnnnnnnnnnnnnnnnnnnnnnnnnnnnnnnnnnnnnnnnnnnnnnnnnnnnnnnnnnnnnnnnnnnnnnnnnnnnnnnnnnnnnnnnnnnnnnnnnnncccaataaatttaatgaaataaagtaaatgaattaaatttaaagg

SEQ ID NO: 369683 - DNA, 905 bp, Homo Sapiens
  misc_feature (814)..(863): n is a, c, g, or t
  misc_feature (869)..(869): n is a, c, g, or t
  misc_feature (871)..(871): n is a, c, g, or t
aggctggtacggtccggaattttccggatgtcagtgacattgttcaatagctacaataaattttgtttttattgatactattgtataatatggcacagggatttaaataactgcaaagaagaaatctataacacagtgttctgctgctactgttgttgctgctgacatgacattttgacaagaaatgcctttgagaggatgtgatccttcagcttagccttaataattactggcataaattcaccacttgtgggaggtaagaaacagttctaccaggcagaagcccagtctctctttttaatctaaagttggtacttaagaatggtatagtggttcggaaaataattggaaatagactataagacgtaaatcaaagggtctatctgaagagaggagttggggctcaggcaagcagataacaagccttgtagttcacactaaagagtccaagttatttttataaaaatcatgaaaaggtactgacatatattatattaagcagaagagcaagattatcaggattgggttttagaagaatttctctagtgccagaataaacacagtagcggaggagggatcaatagaaagggagacaagagacctgttaagaggctgactgtgagacctatctaccagactaaatgaccaaaacgttttgactgattacaaatgccagatgaataagcaagagagattgaatctagaatagctcacgggtttcctcttcagatgactggtattgtgctgccatttattccaatagggaagaaaataaagaagcagatttagagtcaagataactaaaggcggccgnnnnnnnnnnnnnnnnnnnnnnnnnnnnnnnnnnnnnnnnnnnnnnnnnncaaggncngggtgggattcaccgagggtccaaggagaattcg

SEQ ID NO: 369684 - DNA, 317 bp, Homo Sapiens
gctggaccggtccggaattctccggatggaaggctcatgacagacacgctggactctccacagcttcactgcctcaaactggcacatcaaagagacgatggaaggtccagaaaaggattgtatttgcacagttaatcaatcatgtcagcacaggaatccatgcatcaaagagacagagaagcagacacatgtctgtagtgggatttcagtccatcacgacctacgagtgtgagttcatgaacatgcaaaaaattattcaaccaacagtgtctttgaaggaaggaaacttgaatggagagtgtggcaacaggccacag

SEQ ID NO: 369685 - DNA, 289 bp, Homo Sapiens
ctggaccggtccggattcctgggatctagaatcgtcagaaggcttttgcttgcccacatttttagtggttaatgctggctgggtgcccatatggggctgctggtcagaatacaaacacgtggcctttccatgttgcatggacttcctcacgtaggggtggcactgttcgaagagcaggcatcgtgagaggaagcaagaaagagccagacagaagccatgttacctttttgaccgagcctcagaaaccatgcagcctcacttataccccattctactggccaaggcttgg

SEQ ID NO: 369686 - DNA, 875 bp, Homo Sapiens
  misc_feature (859)..(859): n is a, c, g, or t
tggaccggtccggattcccgggatctgggggcaaaaaactcaaggtagcttcagaggtgtgcgctaagtatactcacggctcttctggaattcccagagtgaaaacctcaagtctgatgcagaccagagctgggccagctccccagtcgtgggtatagaatcatagttacaagcaggcatttcttggggatggggaggactggcgcagggctgctgtgatggggtatcttttcagggaggagccaaagcgctcattgtctgtgcttctcctcctttttctgcggtccctggctccctacctgactccaggtgaacaagaccttccaggaactggctgtgttccatgatctggaaggcatgtgggaggaactcagccccaagatctggaccttcatggagaacagccaagaaatggaccttgtccgggtgagtgtccctcccattattaccatgtgcctgcttgatactggagaggtgagtttctggtcactttcccaggtgtgagtgaggtgagaattctttcagtttatctagctgggggaatgtagtgagcatagctaaagtcacagggcaccacctctccagaagtacaggccatggtgcagagataacgctgtgcatatcagcatccatgccactcacggtcaaatagcagttttctgcaaaacttagtgagggctggtgtttggaagtggagttgagtaattgcagtaccctattttccttttttggctgcagccttctcagccagccacagcatctccctgtgtcttggtaggttttggaaagaagtgtgggagcaaaagcatgatgttacatgtagactggccctgagatactcatttctcaggggcactgntgtgaatgaatgagcc

SEQ ID NO: 369687 - DNA, 884 bp, Homo Sapiens
taatatctactaagtgtgagaaaaaagacaactgataaaatcttccaaacttccaaaggtttaaattatgggatccaaagtcaggtttggggctgaaattaattttttatggttgttataacaacaaaaataatatttcttatgtggtcactgtgtactagaaagtatagtgaattttcaacatgcattatcttgatagttcttcataggacccccgaagcaggtatttttattatttccatgtgatactgcagggtactcagcctctcacaggtgaagtgacttgcccaagatcacacatacagagaccagggtgtgtgccccacccctatgcaaactttctccatcaatttaatcatggcatgattcaaactttctcaaagtgagagttgtgaaaaccaaatgtgatgatacacataaccatattttataagctgtaagacagtttctgcttccaagcacaagagaagctgttaggtaatttcacttttgatggctataactattattttttgcaattactcctcatatgaatttctacttattaattagttcccactgcctccattcaaaagaaaagattccttgccctatgcatttgttcaagtcactgtttacatctttatgtccccagtttaacctaattatatggtctccctctgggaccagctggggaagaaagatggaaaggagactcagcccacctgaagcggtctgttcaatgaatgacgatttcaccaactgctcaggagcctagtgatgggtgaaactttcctttaaaaacggaacattttttttctactgggctttttaaagtgtagaaaaaatcattggacccacctggctgaaaaattataattccagaaaaccacttccaggtttaa

SEQ ID NO: 369688 - DNA, 963 bp, Homo Sapiens
  misc_feature (761)..(769): n is a, c, g, or t
  misc_feature (932)..(932): n is a, c, g, or t
gctgggtaccgggtccgggaattcctcgggatctcagtcacctttatgacaaagaatggtgacaacattctttgtggggtcacaattttctcattaaaagatagtgattttaatagaacctatcctatagggttgaagattaagatactgcctgtaaagtttttagcactctacctgctacgcagtgaagttatctattatttttatattgttggtggggatgccatctgattttactcaccatgtgtatctaagctctaggacagtgcctatcatagatatttaatatttgttgaatgtaagtagtcaattttgtcccaaaaagcagttctacccaattgaaatcttactagctattgtgagaaatgcagagctagcgaagtcaaagctatagctaatattatttcacctactgaatatagattcaatatattcaaatattattgactctatttaagagagccatttcctccccgattgctaataaatagaactccaattttattcagcagtcagacagatggcaatgtgctcagcaaagatgagcccctccttccacaccacgggatgcattttgattggcttaaactttgattgctctaaaccagtggtcatgatttccattctctctgccagcaactggtttaggacaggcatgtaaatcacttttggctaatgagacattacaggaactcttactggttaagctttggggaaaatcgtttcttcccagattaaaaacaggccctgtaaagaggctnnnnnnnnntcaaccctccccgccccggcccagccccccaccatcccgggaaaggtaagggttgggggcatcaataggacccacctatgccctcgtctctagtcacttgcaatgggtcatttctatttcacgcctattcctcacctaccttcctttttttccccccacaaantaagaagttttgatacacttttatggttttc

SEQ ID NO: 369689 - DNA, 367 bp, Homo Sapiens
  misc_feature (230)..(257): n is a, c, g, or t
caatctcgataatcaacagctagactttgtactgtgaaacagcctcaggcaggtccttcaggagggtccaggaaaaggcattatcatagagatggcagctccatgcctgttatttcctctgcagaccttccagtgggatgagtcgtggaggcggaaggcagtgatgctgatggtcctgaccctgtgtaggtcaaggctaaagtgtgtgtttgtgactttgtttttaattnnnnnnnnnnnnnnnnnnnnnnnnnnnncaaataatttttttctattttgaaaaaagttcatagaataaagagataaagacaatatttttgaacagctgtacaatgtgtttgtgttttaagctatcttacaaaagggt

SEQ ID NO: 369690 - DNA, 418 bp, Homo Sapiens
gcataaacgactggcaatgatcagtcaacatatcaacaaaaacatagaagctcatattattaagtctctatcctttaatcagtgcaatagttaaggagagtttacatgtgtgctttacttctagtcaaacaaaagcaatcacctctttatctcctgatgaaattataccttatttgagcataagccaggcacattgttgctagagaaaggaaagagagatggtgttgaattttctaaacatttgtggctccatttgttgacaaaaccttaagatgtttgaaagctgtgtttctgttgctgacaatgatagttgttctattggaaatttaatcgtaaatggggtatgacacccaactcttaaaatttgctccaagtgacgttattctcagctattatcaaaatgtggcccaaggagggc

SEQ ID NO: 369691 - DNA, 908 bp, Homo Sapiens
  misc_feature (740)..(752): n is a, c, g, or t
  misc_feature (826)..(841): n is a, c, g, or t
ggatggaagtttctccagaagcacctcaatgcttccaaccccactgagccagccaccatcatatttacagcagctcgggagggaagagagaccctgaagtgcctgagccaccatgttgcagatgcctacacctcttcccagaaagtctctcccattcagattgatggggctggaaggacctggcaggacagtgacacggtcaagctgttggttgacctggagctgagctatgggtttgagaatggccagaaggctgctgtggtacaccacttcgaatccttccctgccggctccactttgatcttctataagtattgtgatcatgagaatgctgcctttaaagatgtggccctggtcctgactgttctgctagaggaggaaacattagaagcaagtgtaggcccaagggaaacggaagaaaaagtgagagacttactctgggccaagtttaccaactctggacactcccacctccttcaaccacatgggactcagacaaattgagtggggctgtgggagccgaattttcacaccgggtactgccagtccagccagtgagtagcatagaagaacaggggtgccttttctaaagctaagcacagagttggttacagaaggtatatgtttatgaaaaaaagttgtttaaagaccttccatttatatggaagggagggtgataaaataacttggaggaaataacctgaaaaaacaaagatgagccttattttaagaaaccaagnnnnnnnnnnnnnattcccttgtgaaaatcctttcttaatcccaaaccctttgaccaaaagccttaaaaaattaaaccctggagccnnnnnnnnnnnnnnnngggaaccacaaattcacggttctttgaaaaaaagctccagatggaattaaaatattgggaagaaata

SEQ ID NO: 369692 - DNA, 962 bp, Homo Sapiens
  misc_feature (733)..(775): n is a, c, g, or t
tatgcccgcacactgtgtgtttccacgtattaagggggggagagaacaagaaaaagtttccctagggtgaaaacgggttatatattggccgccttccccagggaatataggagggaaaaattggcaaagtttacgcccccgatgaaaaaagggaggattcaggaaaaaagttgggtggaaacctattaactaaaatggttttacctgcttaagtttcagaggggaaaattacccttttgggccagggttccttatttcttaatagaaggggggcttccataaaaagcctttacttgatttaaaagaccaaagggatgttactaaattccaagtcttggataattttaaaaggtgaaaggatgcacagttcagttaggttaatttatcttatattcttaaaagaaagaatgaagagtttttctacttgtgccttcatcttcctagtgaagacagcgagaagaaaataaattaattttatctaatgggtctcagcattctggataaaaatgatagtaagaactgtcatatgtatggaaatgccagtatgtgcctttctttagaggtctctaagtcttaatggtatttggagaaaatgtgatcctttgggatgaagtagataagatagaaatgcttcatatttgtgtgctgggttaccactagccaagtgcttttgcagctctctaattcaattcttgcggtgactttttgaagctggcagagcaattgtcctccnnnnnnnnnnnnnnnnnnnnnnnnnnnnnnnnnnnnnnnnnnnagccatacttatgtttacaactattaaatagctgagttgaaaacaaaagtcaaaattcttgacccgcagtccagttctccttctgttatacaattccatctaatcatataactaactggaggaacctaagcccatttgctgaaagaactgccatggaagtaaatccactgtaaataagtctgaacat

SEQ ID NO: 369693 - DNA, 980 bp, Homo Sapiens
ctggaccggtccggaattctccggatccaggctagacagaacccctcttcctggacaaagtgtcagacacaggcaggggcaagtcccctgcaggcccttcatggggactgctgtggaggccagggcacaaggcccttttccctctgaaataatctattttaaggatgtgagccttgggattccctgcgatgaggcctgacctgcagctcatgccaccaagaagagcgtggagagatggagggggtccccacagcagccctcaggcttaaagccaaaaagctttccagagcggggtgttcctccccacagaaatgtgaagaatacactaataaacttcaaagcacagaacagccggcattttactgaaacaacaaaaaatagagtcacacacaccctaagaccctcagctcaagggagcggcagctaacgttctgtcgtgtttgctttttccgccttgggtattcctggctctgctttccacttgtggctacaaacgccctgctcaggccggcggcaggcaccatggcagggcggctgaagcaggtgccaggacgtgcctggcccagagtctcctgtgaagtaggggctgactttccacactgcccacttcccagcagctcctgaggagcaatggcatcttgggagaggctggggagccgcctggaaaagctgtccctacacaagcacacggctccccaccacgtcactggatggcgtaaagggacagaaccgccacagcagccttgaggtcagaaatgctgactgagttgcaaggcagaatttggcaataatctatcatgaaaccagggagaacccacccagggcgtctttgcagagcagcaccagcagctctagcgcaaatgggaaagagaataagttctgaaagggcagaggcaacatgcactcatcagagccagcgcacaacagcagccaggcacccccaggagtagaggcaaccgcgtaggtggatactctggaat

SEQ ID NO: 369694 - DNA, 920 bp, Homo Sapiens
ttcggatggacagaattgtggttgccgattagcacagagcgagggagactttactacccgttataaagagaagtgcaggtgatgcaccgggcctcatggcctgagcagcctgttcttgcagatgtgggcccacgtgcagatgcatacgtcattcattcatttctacaggtgtttatggagcgcttaaggcgtgcccaacacttggggactacagctgtgtagactgttctgggtcctcaaacacctaacaaccctcaaaaatgatcacagcgcacaccttgatagtgctgtataatgtacacaacccagccattacctcaattcatcctaacagtcctatgaggtaggtgtttctttttgcagatcagaaaaccgaagttccgccttgtccccagatcacctaggattttgcccaggtgaccaggagagcttgtggaagaagtcacgcaagtcaaggatgggttgtttaaagtggcgccagggagctcaggcgacgatgccgttctttcctagccccgggacctttcagaactagttgtgtgggagaacttgctgggccaagagacagctccgagttctgtgtaggtggcatgaaggctcctgcctccaggacatgaggcggggctccagtgaggtgttggcccctaagggcaaccttatcctgcaggggttcttaacccgaggagaagtaaataaattcaagaatactgttgaacttggatgagaaaaaaatttacgtcctaatttttcaccaaccctcctgacattttgcacgtttttgccctttatgaaacgttgaccaccaaactaccggtacccgtagggaaaaagtattttatgaccttaagtaatccccttagaaaacccatagggttttttacattcccaatcaccagtttgtttgccagttatccccaaaa

SEQ ID NO: 369695 - DNA, 759 bp, Homo Sapiens
tcaatgatatgcctgagatctttggcctgcatgacaatgccaacatcacctttgcccagaacgagacgttcgccctcctgggcaccatcatccagctgcaacccaaatcatcttctgcaggcagccagggccgggaggagatagtggaggacgtcacccaaaacattctgctcaaggtgcctgagcctatcaacttgcaatgggtgatggccaagtacccagtgctgtatgaggaatcaatgaacacagtactagtacaagaggtcattaggtacaatcggctgctgcaggtgatcacacagacactgcaagacctactcaaggcactcaaggggctggtagtgatgtcctctcagctggagctgatggctgccagcctgtacaacaatactgtgcctgagctctggagtgccaaggcctacccatcgctcaagcctctgtcatcatgggtcatggacctgctgcaacgcctggactttctgcaggcctggatccaagatggcatcccagctgtcttctggatcagtggattcttcttcccccaggctttcttaacaggcactctgcagaatttttgccccgcaaatttgtcatctccattgacaccatctcctttgatttcaggtctgggcacagccagggccaggtcaggtgacaggctagggtacagccccagggaaggagaggctctgaggccaccgtttggttggcaattggggggaacccttaagcccagggcatggaaaaaaacccaagccc

SEQ ID NO: 369696 - DNA, 1091 bp, Homo Sapiens
  misc_feature (50)..(50): n is a, c, g, or t
gcatcctgcacaatagtggtcccaccatggctgccacttttttatactantttggagaaaagaccttgtataaattcgaggcccgagtgactaacgtctctgtcacacggaaatgggtacttggtggcatagagaaacacaattagccactttttcagctacacttctcactcagctgcaccctacacttctcactcaggtgcacccccttctgctgtcctttccccaacgtactgggtcccgagcgtggtgggtatttgccacactgggtgccagctcagcagccccccacctctctttattctctccaaagctggtctttctgactatcattgtggtagggggaggacagatgctaaaggtggaagctgacctggagaaagagacacacggggtgactgtggcaaaggacagctggaaaagaaactctatcacttcttcattggcaaccacaaggcacctgaggccatggcactcccagaggctgtgcgcagagccaagcctctcaacctcttctggccctgcgtcctgcagcgaagtctctgctgtaagacagtagactccttcgatgaggtgctcaaaaatgctacccggggtggtggtgtctggcttgcagtctggcccagttcagagaaagttgcagagatcaggggccaaggatgtcatagccccaggttgtcctcagggtcccaatcctagggcagggtgtgcatggaagcaagaactatggaaacctagctccagtctgcaggctctgagcccctagttcctcactccagcggggctccctcactgcacagaacccaccccttctgtgtgggcactgctgaccacacagatgacccagacccaaagagcctggcagaagctctgtggttggagctgggctccgtctccaggtctggttccagggggatccagaaggctctttttccacctgtggcttcactggcccttttgagatttccttatctcaccggtaacttccagttaccccttgcaaggggggccaagggaagttcaaggaaatattacccgtggttccctcccagggggtttttaaacccgggcccatggcccttttccccgaa

SEQ ID NO: 369697 - DNA, 663 bp, Homo Sapiens
ggtagtaaagtaatcaatatggattatctttctggtttaaaaaataaaatcagtattgccactaaaaaacttcagttttattattattaaaagtacggcaccatcaaatataaaatgccttaaaaatgtagtactaacaggtccatctggttttctcatgttttctccattcattaaaaaagaaaaattaaggtcttttatatatttaccaaagacaagaaaaaaaactacagtctctattagtaagaattcatgctccatgcatgagaagtttgacactgttttaaaggatcctgttcctgccacttgttgtcccccagggccaagtcctactgacacctgttggaatttcttgcacttaggagcggctctctatggagagaggtccacatcaaaatttagacgttgtcaccttttttgaactagataaaaccagtaaggatacagacaataataaaaggctttccaactcagcagaattaagaactagctcttggagtatatacatttgcactccaatatcaacactagcctatccactttgagtcaaaatttgaaaggtaagaatgtaattatgaaaatgtgcacaaaatgttaaatactagtggcaaataaatatatcttaatatgttctaacaagcaaacatatattcaagatccgga

SEQ ID NO: 369698 - DNA, 889 bp, Homo Sapiens
  misc_feature (670)..(670): n is a, c, g, or t
  misc_feature (677)..(677): n is a, c, g, or t
cttaactaggctgcataacagcttgaaaactggattatctactacagagtgttataacaccatctggagtcttcctgtagtggcaaaaaagaacagtgttgaaattggaaaggactttgtgttatttaggttgttagaatgagccttaccaataataagagccctgagcccagaaaaaaggactgtatagtttaaagggaggattgaaagggaggtaaaaaatcagattagaccagttcttggcctatgataagttccaaaaataccatttatctactatttgaaaaaagaagaggatatcccttcctacagtaaagggtatgtcagctacatgaagttgtaagaaaagcttccagtagagcttcttatattaaagaagttgatggatatttttgaatttctggtttgcctgaatccacctgcagttaccccgatccgtttgcaagaaccagatcgtacttgaaactatagtggccacactctgccttcctgagtcccttccagtcatgtgtgcatcatgtctctttgccaagggaggggagaaaggaacttttaaactgcagttttaactttttctaagctgtttcttgatgggagaggttctgtgcaaaactaccacattctgtccccaaaatgtggaatgcatccaaataggagtcttctgcctctntacttanaagaacataagaaattttgtttttgggtttctttatcatgctacagagagtgaatacactgggattcagaacaccgactctgaagctgctaggaaccctcattttggtccatgtgcaaaacgctggtattccaagggcctggtggaatggccagccctgaaggaaagtttttggcatggcaagcctggtggttttttccgaagcaggaaact

SEQ ID NO: 369699 - DNA, 894 bp, Homo Sapiens
aggctggtccggtccggattcccgggatggggctcttaagatcccaaataggaacaccacatatgtttttgtttgtctatgggaggaatatacatggcctgctgaacttggaggtagccatgtagcttcttgtggtcagtgaaacatgtgagtagttagatcacttgcagaaaaagccgtaaaggcatgtggtgtggggtagtgtcaagatgacagaagagaaagctccagaccctctttttcccatagagagaacagttcaacaacaacggaaggaccatttctctctgtgagaaatccagaaaccagttgcatcaaaggctggggaatttgtgacgctggctctccagagttcctccccctggcacagcaccatgtgatcgggaggaagctcccaactcctggcatctttctggggaggaaaaataagactggaacatatatctaatattcagacctttcaggaggctgctcaagggactggtttctgtcttgtctcacaggaaagggcaccaggttggggacctctgaggacaaatgggatggtgaaactagcacgtactgactcctcattgccctctccctgctcttctcgggagggaaggagttggagcatgagtccagcattctaggttttctggagtctgcccaagactctcgttcctgtctcactcgatgaagcactgatgggacctggcatggtctaggtccctgggggctgctgagaacaagagaaagctgggtggtttgtactgcgccagaaggacccaccgtacagtaggcagagtccagtgcacctcgaaagctgctttttgggtccaggggaaagaagtagagcatgtggtttcgccttttgggctttctcaagggggcttgccttgagggaactgggct

SEQ ID NO: 369700 - DNA, 1212 bp, Homo Sapiens
  misc_feature (131)..(271): n is a, c, g, or t
  misc_feature (315)..(327): n is a, c, g, or t
  misc_feature (720)..(735): n is a, c, g, or t
  misc_feature (1173)..(1173): n is a, c, g, or t
  misc_feature (1184)..(1184): n is a, c, g, or t
gggtttttgcccattttgggccagggctgggtcttggaaattccttggggcttccccaaaggtgctggggattacagggcatggggcccaccgtgcctggccccagaaaacacttatttgggtttaaattnnnnnnnnnnnnnnnnnnnnnnnnnnnnnnnnnnnnnnnnnnnnnnnnnnnnnnnnnnnnnnnnnnnnnnnnnnnnnnnnnnnnnnnnnnnnnnnnnnnnnnnnnnnnnnnnnnnnnnnnnnnnnnnnnnnnnnnnnnnnnaaaatgtcaattgtcactcacaaaatgaaatgctagtttggttnnnnnnnnnnnnnggtcttatatacagacagacatgactgttttgctaatgaagagaaccccccacaagtgatacattccaatatccatatactgtgtaatatataatgtgattctcttataatggtccccacagactagtttcttcccaaacctatatgtcactatgtatttggtatttatttattaaagtatgatatgagatttcttgatttacgttttccactaaaactaccacaatgaattttgggaaaaggggttgaccatcatataactcccggtgaccccaacaagttaaaactatcttgtagaagccatgtgctatttcatgtcaaaacacaggaaaagatactgcattctgccaaatgctcagtccagaaagtagaagaccatgattgacttcagannnnnnnnnnnnnnnngcctcagtaaacagtacagaaaatgatctgagaatgaaattattttttaaaagcccaaaggagaaaaagaataacaagatatcatagtctagcatttacaggccaaggtcaaaaacctgggtgcaatggatcccatcagcatgtaattacatagattttatatcccttctgcagttaaaatatttcatcttatcttaaaacacattgctgtggtctggagaccagcagtctctcccccacatctctcttcattcttgcttgtttcagtttcttatcttattcctctctgccccttctgtaaagaaagcaaagttatcttctcatggactacgtgattaaggggtatatataaggatgaattatacataaagatccatgtaaataaatttatgttaaaatatttaagttaaaccatttcgatagaaaaagttcatttcnatgggaagacngaattggcaatccacagtggtttttaca

SEQ ID NO: 369701 - DNA, 814 bp, Homo Sapiens
  misc_feature (465)..(473): n is a, c, g, or t
tatttaggataaataccagtgatctcttaggagatatagaagctatgctatatagcttgcccacttggtcaagacaacactgaatgaatacttaggattagagaaccaaaaataattactaattacatgaacacggaagtacatgcattttgtatctgagctctctgctgctacttgtccttttaaaaaccgtagctcaaagagaaaaggctagaaatatagcttatattttctgcactgtggaagtactcccccctttttactgctgtacatctgctatacattctgctgcaggtagacattttctaaacgcttgctagaaatacagtgttttttggaaaactgatgagtaacatgaggttatatcacatgttaaataatttctctttacggaaaagttcacaactttgatcaatatatgtcaaatcctcctaattttcaggtattttcttccttccaaagtcnnnnnnnnncgtagttatactcttaaatccactttgatggcttgaggccattcttatatttcaaaagcaggaacttttctgaaaatgatgcacaaagtaaccctaggttgaaagaacgtgggggggaattcgggtccccttcagatagtatttgctctactcaggactctagtcacactgcactctaagcgaatggtgccacctgggagctctgcaatgcacaacctgcagctgcctaggggcagctctaactcctcccaaacaattcacaataatgaagtctaggattttttagaaattttggggaatacccctaaatttttggtttgggaatttcaatttttccgggg

SEQ ID NO: 369702 - DNA, 769 bp, Homo Sapiens
ctgggccttaaggtggattccaaccagccttggggccttccaaaaagtgctggggattacccgggcatgaacccccttgtgccccccccaactggttatcgcttttaaaaatagggacccatggtttaaatctttttcagaaaaactcccaaacttgtccccagttttcaaagtaatatacactctttttaatataagggagtgcattcttatcattgaaaacttacgaaataaaaggaaacctaaagaaaaaaataacaataactcatataacacactgagagataattactattaagtttttggtatatatttcattttaatctttgctaccatcctcccctgatcacaaaccctcacagattataaagtatatttaggtctgtacccatgaattctgatgacaggaaacaagttccatgaaataatagttcatcacataaatacactttaatttttttaaacatagtattctattgttgaacatacagacatttgccatgaattaaacagaatttagataaaaaaatctttggacataaatcttgtccacatttttaatattttctatgggataaaactgtagaaggagaattatctagttaacgtatataaatatatttaagatctggattaatattgcaacatcattttccagagaatttttaccacttgcactcccagcaatatggaatttccctaactattccttaattagtaactagtttcttcttttttcctttaattctttggtaaaatgaaaacttat

SEQ ID NO: 369703 - DNA, 857 bp, Homo Sapiens
actcctggggctcaaaataatccttcgggcctcggccctcccaaaagtccaaaatttttgggcatgaaaccactgtgcctaacccccttggctcttttacactaaatttttggagactcttcaatatgagaaaagggagatctatctcatttttttaaacaacccacagaaacttgatgtgtgcctcttaaatttatctaagtcattttgatcaaatatatctgtggaagatttgtagaagaacatttaataaccatggacagatgttcataatttactaagtgaaaaaaagtaaagcagcagattacaaagtggttgagagctatattagtttataagtctacaataagtctctttccaatggttacgacacatatatacaatattcattcaaaagcttggcatttgccattacatattcctggaatgatacatcctctgtgctctttgtcctagtgagttggtctttgtagccagggaaacagttcatgatctaaggaaatattggggagacaatccagcaaaatataacacacagggttttattgttctctgagtacttggtgatcctgacatacttttcttttccatacttgaggtgaaccaaggaataggctgtaccgccttctcctttgcttgctaatatttagagttagaaatatatcagaggcatgcatggactaatcaatatcagaggtctgtcagttctgcagaaactataaaaccaactcttgcagaaaaactagtagtagtccctgggatcaggccctagagatcagtcggccccgccccacctgacttttccctattgatctcactctggctggatgtgccccctcaccaggaaacaatgacaa

SEQ ID NO: 369704 - DNA, 893 bp, Homo Sapiens
  misc_feature (105)..(113): n is a, c, g, or t
aggctggtccggtccggattcccgggatcatcagtgtgcctccccacctcacctggagcgtggcttcagtgcccccaccgccacccccagcttgtactgcagggnnnnnnnnnatcctttctctaagccagtgagataggcacagctgatagtatgaacctttctagctaagagtcagatcaagtgctggacagagacatgacaagttctctcaattaagcaaaatggtatctcgagacaggatttcaattctaatttcatattaatagcttacatttattcaacatttattgtgttaaagtgctgctacagtccttttcacgcagaatcttttaaccctccagaattgaacagcaacagcgctattatccctattttacactaaaggagctggctcccagagaggtcaggtcacccggtggacggagcaagaatccaaatcaaggcattcttgaccactaaccaatacttctccccctaccatcatccctgcccccacccctttttattttacaaagttaacccgtgtttattatggaacatcttaactctgatttttagaaatctgccttctgtcaatagcgcaaaatagagtgtttcattagcctcttaaaatgccagcaattgtaatgtatacagatgtgaaccttcatgggaagagcgtgtctttatgttagagaagagtgagtaaagctgcccagttgaggtcatatatattgacttatctgcaggaaatattcatttagatttgagaagttatgattgttatcagtctcatcctttaaatttaaccttttattttttatactcaatatttagatcaaaatctgttgcaaatctgaaaggaagctataatcatttactgtttatcaaatatacccttttctaggtag

SEQ ID NO: 369705 - DNA, 884 bp, Homo Sapiens
  misc_feature (270)..(271): n is a, c, g, or t
  misc_feature (438)..(438): n is a, c, g, or t
  misc_feature (440)..(515): n is a, c, g, or t
  misc_feature (753)..(835): n is a, c, g, or t
  misc_feature (840)..(840): n is a, c, g, or t
ttgatatgaacattcaagaacaagctgcaggacaattctccaggtcaccttagactcgcccagagcttccctctttctcacgtgtgttctcaacaataactgtagaatgtgctgggaatgcaacatcctgcgataaagagggactgacaagaacagctcacaggctctctctgttcctgtctgcctctgagaaacaagatgtccatcaacacttttgcccagcgtgtcatgtggtccccagggtattaaatccagtgtgggatgctttcnntagtgtcccctcagctgcagtgcaagtgggacacatgccccacttgtgagaatccatccaccctcggtagctttcttgagccttgggagattggctcacaatgaattccgggcttctgttgtgcctcagggccaatctgtaagtaataaacccacttcatgtaaaanannnnnnnnnnnnnnnnnnnnnnnnnnnnnnnnnnnnnnnnnnnnnnnnnnnnnnnnnnnnnnnnnnnnnnnnnnnnggggggcggctcaaaagtttcctcttaggggcccaaggttacacgttccccgttttcttgtaaaaaggggcccccataacggagtccgtattttaaacctagggccctgggccctcggttttacaaacttctaggactggggaaaaacgggccaaccttggggaatcttgggggaaaaggaaacctttagctcctgtgggggggtgggcgtaattttggaaaaaattttcccctaacnnnnnnnnnnnnnnnnnnnnnnnnnnnnnnnnnnnnnnnnnnnnnnnnnnnnnnnnnnnnnnnnnnnnnnnnnnnnnnnnnnnactanggcccgcgcctaaagcggcctcttgcccggcctttgtgaagaaa

SEQ ID NO: 369706 - DNA, 864 bp, Homo Sapiens
  misc_feature (66)..(81): n is a, c, g, or t
agttccgccatagattccttattataaaatgtgtttagctgttcatttcattcttttgaaagggcnnnnnnnnnnnnnnnnttatctcagaagaacactggtcaaaggtagcaacttgctgggctactgctttgacttaaccaggtcccatctaacatttactggaaatacataaacttccacttacctaaaatttgcactacttttaaaatcttttcaactgcctggaaatacctatttcccaaggcttctgcacaagctaattggtagctcaaatgatttgccaaatgatcaacatttgatctgatttgcattccaggatgatcaagcataaactgggtctggaagcttcattgatagagtgcctgcccataaatgtcacaggtgagaaagggcaagtgcctggcctgttcttggataacttcccatggaggcaaaaggcagagcagctttaactcactgtgtagattatactgtctctcaggatgtcagaggggtgagaaagcaaagatgtgaatttataacgtaaatgtgtgaaaagaaaagggtatgccaggttcaagagagatttactacgaagatttgttttagaggaagtgcattcagaaattgcgggcaccaaattttggtactcttggctcaaaaggcaatagggaaacaacatttttcggttacatggtgtacatggcagataaaaagtaggggtaccagatgaagtttctgtcaaggaaattagcaagatagttaagggagggctgcaggaaaagtttttggggaaatcaaggacaacaatctttctggaaaaaaacacctatttaagaaaccaacccctggaatggggttggggccttaataaattgaaag

SEQ ID NO: 369707 - DNA, 835 bp, Homo Sapiens
  misc_feature (714)..(714): n is a, c, g, or t
aacgccctttttaagccgaccatcgatagcatcattgagcatctccgggacctgtttcagaagaccgaggtgtccaccgtcaagttcctctttctggtgggcggctttgccgaggcgcccctgctgcagcaggcggtgcaggctgcttttggggaccagtgccggatcatcatcccccaggacgtgggcctcaccatcctcaagggtgccgtcctctttggcctggaccccgcggtcatcaaggtgcgccggtcgccgctcacctacggggtaggcgtgctgaaccgctacgtggagggcaagcacccgcctgagaagctgctggtgaaggatggcactcggtggtgcaccgacgtctttgacaagttcatctctgccgaccagtctgtggctctgggtgagctggtcaagcgtagctacaccccggccaagccctcccagctggtcattgtcatcaacatctacagctctgagcacgacaacgtcagcttcatcactgatcccggggtgaagaagtgtggcacgctccgcctggatctcacagggaccagtggcactgcggtgcccgcccggagggagatccagacccttatgcagttcggggacaccgagatcaaagccacagccattgatatagccacttcgaagagtgtcaaagttgggatcgacttcttaaattactaaccctcccgccccgctgcctgtccccttggnactcaacttatctgcatctgctgacctcaaccttgactgttctttccctaacttgacctcacattgccatgtgaatttcagcaggaagatgagaacaatcagggtagaaataattagtgat

SEQ ID NO: 369708 - DNA, 902 bp, Homo Sapiens
  misc_feature (392)..(400): n is a, c, g, or t
  misc_feature (450)..(498): n is a, c, g, or t
  misc_feature (503)..(842): n is a, c, g, or t
aggctggtccggtccggattctcgggatctggggcagagagggagtaaggaatgtctggtaccaaggctagaaaacctcctggaagagaacctggaacaagtaattgcctatggagtcccacctgagcttgatggagcatcaatgcctgtgctttcctgaggaaggagcccttgggtctggaattcctgtggtggtctgggtttcagcagactgactccctggggagtatctgggtagtctaatattgctaattttgataacataaaaccttggtctcagagaaattaagaagagcattgttgtatttacacagacctttgttctaatcctggcttcaccacttaaccagctatgtgattttaaataagtttcttaatttaccaaacctacnnnnnnnnnctgttttgtgaaatggggtaatatctacccacaatgagttataaagtttnnnnnnnnnnnnnnnnnnnnnnnnnnnnnnnnnnnnnnnnnnnnnnnnnacagnnnnnnnnnnnnnnnnnnnnnnnnnnnnnnnnnnnnnnnnnnnnnnnnnnnnnnnnnnnnnnnnnnnnnnnnnnnnnnnnnnnnnnnnnnnnnnnnnnnnnnnnnnnnnnnnnnnnnnnnnnnnnnnnnnnnnnnnnnnnnnnnnnnnnnnnnnnnnnnnnnnnnnnnnnnnnnnnnnnnnnnnnnnnnnnnnnnnnnnnnnnnnnnnnnnnnnnnnnnnnnnnnnnnnnnnnnnnnnnnnnnnnnnnnnnnnnnnnnnnnnnnnnnnnnnnnnnnnnnnnnnnnnnnnnnnnnnnnnnnnnnnnnnnnnnnnnnnnnnnnnnnnnnnnnnnnnnnnnnngttaattattgattgggttggtgatttaactatgaaagccctgggaacgttactatgccc

SEQ ID NO: 369709 - DNA, 669 bp, Homo Sapiens
ctggatgtagtttgctaataactaaacagcaaattaattgtaacatgcttacatatcaacgatgtctttcttctttaatcataaacctgctcactaagaagcgctgaagtccatggtagtgacaggtacatgtctgcatccttgtcctgacctgcatcttctttgattgtccccatctgtgtctccgactggcactgccgaaccggcttgctacctgatcaatgttgtactgaaccagactgctaactgatcaatgttgttgagctcactgcacaaagctgttcttacaaggtagatttctgcctggaatagtcatacttacactgtttatattccttactcctgacccatccaacgcagcacaagttctatttattgccatagaaacataggtcatttggaaacacctccttcatttctatggaatgttcaaacatttctgacattttggactctgttctagcctcttgttaaatatatccagaaaagagacaaagctttatgggggggctatatgcacacatatgctatagaataagctatctaaatgcttaaaaaaacttttccatctgggcactgcaaccttattagggtagaccgaaaattaaaggaatggggaaaaacccaatcgggaaaagaaatacgttataaaaataataatatcccccc

SEQ ID NO: 369710 - DNA, 583 bp, Homo Sapiens; identical to SEQ ID NO: 264741

SEQ ID NO: 369711 - DNA, 505 bp, Homo Sapiens
tgttcatgtgtaaatgagggtcatgtcatttagacaatgaccttcagggtatgttttaatgttaaaattcagagtcctcccatatcagataagcatcaactattcaatagtttatgctgaagagtacaggggacccaagagacccacccaaatgggttcatgagccccatcatgcccacttctttgttggatcactttgggcacctcactaaatttttctgagctaggtcctctgcaccttgcttgtctatcatcaaagggtcactgtgagactataataatataagaggaaagaaatcgtgattattaaggcatatactgaaccacatacctccattggcaacattaaacttcactccaaactctccccctggtcctccagggcagtggctggctgttagaatgattccaccagctgccttgatcttcctgataatgcaggagaccgcaggtgttgacaagatgccattctgtccaataatcagtcgtccaatctaaaccacgc

SEQ ID NO: 369712 - DNA, 950 bp, Homo Sapiens
  misc_feature (370)..(419): n is a, c, g, or t
cccgactgccagagggaggatggacagacctcttgccctcacactctggtaccaggactgttcgcttttatgattgtaaatagcctgtgtaagatttttgtaagtatatttgtatttaaatgacgaccgatcacgcgtttttctttttcaaaagtttttaattatttagggcggtttaaccatttgaggcttttccttcttgcccttttcggagtattgcaaaggagctaaaactggtgtgcaaccgcacagcgctcctggtcgtcctcgcgcgcctctccctaccacgggtgctcgggacggctgggcgccagctccggggcgagttcagcactgcggggtgcgactagggctgcgctgccagggtcannnnnnnnnnnnnnnnnnnnnnnnnnnnnnnnnnnnnnnnnnnnnnnnnntctttcctggcttgaggtaggggctcttaaggtacagaactccacaaaccttccaaatctggaggagggcccccatacattacaattcctcccttgctcggcggtggattgcgaaggcccgtcccttcgacttcctgaagctggatttttaactgtccagaactttcctccaacttcatgggggcccacgggtgtgggcgctggcagtctcagcctccctccacggtcaccttcaacgcccagacactcccttctcccaccttaagttgggttacagggtgagtgaagataaccaatgccaaactttttgaagtctaatttttggaggggtgagcttcatttcattctccaagtgttctaaaacctggatatggggtttgggccagccgtccatggaaaagaagtggggttacctggacaattttgggggaacgaaaccccttgaaaacctttttgatatggggggttttgcgaaaaagacaaactgggcacagcattatgtgggggtttttattacaaacaacggcgtct

SEQ ID NO: 369713 - DNA, 311 bp, Homo Sapiens
attcggttcagtgggatctggagctgcccggagtcccctcccctgaccttcaccagtcaggagtctgggaggaacagctcattcaaatatgcacccaacgtggattctccctccacccactgacagaaatggctaatggagccccaaaatcctgcagagtttaattaccaacctgcaaagacaggctgtcagctccagtcctaggtaaagacctatgggaaagggtgttaggtcaacccaaagacacacaacaatgtccacagcaggtctgtcatcatagccgcgtatggaaacaaggtgaagtccatcaa

SEQ ID NO: 369714 - DNA, 809 bp, Homo Sapiens
  misc_feature (564)..(574): n is a, c, g, or t
gtgtgagccaccacgccccgccttaattgtttattcttatttaccacattgggtattgtgctttcccatgaatagcgatcaaaacagcttgatttgcatactttcaaaactacctggatgaaactaatatgattttaatttactaacagtttaaattcttctatgtgaaataaacttttaaaaaaacaaatacaaaggacaaagagttgaaagcagtcagctggccgtggtgaccatgcaagcctcaacctccacacttctccagatgctcacttgcctaaaaaccacttcttccccaatgttccttcacctctatacctctttctcctcacagaatgcctaaaaaacctttatttaaatttttattcaaaaaagactggaataacttaaaaatcctttttggccaagcccccctgggggttctaggaattatttggcaaccataacaatttaaagactttagaaattagtaggttttttccggattttctaatataaagacggaactttattcccccattggaacactgcacaacaaaaaaattcataaaatctatctgcacnnnnnnnnnnngtcaggcccagaaaattctaacccttcacccttatgggcaaaagagaaactttatagatctgtgttgaccaccccttttttataaaacacacatcgatgcgacccctttgggctccaaaaaaccacggaacctcaaccatctgagaatcttgaggcttattctcttccacacaaagcggatatatggtcctcttcagagaggcgtgcacacaaaaatgggagaaccacaggaggt

SEQ ID NO: 369715 - DNA, 739 bp, Homo Sapiens
  misc_feature (75)..(85): n is a, c, g, or t
  misc_feature (274)..(422): n is a, c, g, or t
  misc_feature (485)..(493): n is a, c, g, or t
  misc_feature (607)..(643): n is a, c, g, or t
ttttcccccaaaaccccttaaaaaagggaaattttcaccccattttttcccggggatggggctttcctttttttnnnnnnnnnnnccaccctatggggcaggcagggggccttagcttgcccaaaagggttttaaccagcagggttgcccggacagaaagcaattctttgggaaggccctgaaggccaagcctgattcaatttcagattgatcggtccagtaagctgttcagttttggttaagggtacaaaagaatgtccactctcagctctgnnnnnnnnnnnnnnnnnnnnnnnnnnnnnnnnnnnnnnnnnnnnnnnnnnnnnnnnnnnnnnnnnnnnnnnnnnnnnnnnnnnnnnnnnnnnnnnnnnnnnnnnnnnnnnnnnnnnnnnnnnnnnnnnnnnnnnnnnnnnnnnnnnnnnttgaaaattagatagtatatttaccatataatatagggaaaaaataaagcaagtagaaagatnnnnnnnnnccaaggactggagggatggttatgattttaaatagagacgtttaggaaatctataccagaaggctctactgaatcagactcaatagtagtaaaggaatcaggaacagtgactcnnnnnnnnnnnnnnnnnnnnnnnnnnnnnnnnnnnnnagatcacttgaggccagaagtttgagaccagcttgtttgtgacagggtctcctatggagacccgctctctacaaaaatttaaaaatacccgaagag

SEQ ID NO: 369716 - DNA, 854 bp, Homo Sapiens
accgttaagaaagtgtacggagtgcctctcagcataatagtcaaagaaaaacacccaactttcaatgttgtaatcacaaagtaaaaaatttattttacaaaaataaaatgacagatttacctcagatgttatagaaaagatgatcccatacaatgattagagagtacttgaggaaaagggtttactttcactgctctactatccttttttcttggaaaactatgacaaaccttttggagttttgtagagcctaaaagaacttaccaacacaaacctgctctcactttgctcctttggcaaacactgagggggggcctgagagttaccttatttgcaggctaacaaattaaccctaacctcccacggtttcacagatactggtcaaagacacgagtctcctgggtcagacacaaaggccagtttcttacagcagtagcagtagccagtgcatttgcatttgtgcttatcccctgagtatctgttcctatgggataatgcagagaagaccagggaaagcctgtgcatgcagtgagttgtattagaggagaagaaccttggacttagggatccttattggacagtaagcagtctaccattttctcttgaaagaggcactctgtctcccaaagctgtttgttatacagatatccttgaaaagatgttgcaaaacaaaggcagtcattgcctctgctcacagataggtagaaagaaatctatggagaattgtcttcagcatcttataaaggggaggaatggtaataaatgtccacattcatttcagtcaaccccatactggagcactaaaccatgtcccctgggcccctgtttctagggcattggaaggataatggtgg

SEQ ID NO: 369717 - DNA, 929 bp, Homo Sapiens
  misc_feature (811)..(811): n is a, c, g, or t
gctggaccggtccggaattctcgggatgaaaatttatgcctacctacttaaaaatatataatctttagcacaaggcttgaacagtaatgatgcatattgaagagttggattataggacacattttctatttttgacatttcctttgtgttgttacatcaataacattcttgaaaaaggaagaaagaaagaaatggtgttctataaagtctcttcagtaccctgtgatttgggtactcataatagagtaaagtaaagggtttcattatgctttgttttgctaacggacgtctgatgtccttctcctggtgtgattttcattatagctagtttcaaagtgcttgaattgggattagttacttagtgagagtcttcatgttctgttagttactaacaccaatttttatgtggcttgaaatgcagaattcatcactattctgaattctttaaagtgtggaccaccatgaccttgaaaatccccaaagaggaagacctaggtttgaatgataccaccgttaaacaaggggttttagatccttcatccgcccttcaagcctattcctttcacagggcacaggactttataggttgatgtgaattgatgctgcttggttatggaagtgagctcactagaattaaagccttggccgcttatttcatggaaattggcaggtgccaggaaaacgaagctcttgggcaggggctttgttctttataaaaaattaatgggaaaaatatccccactgggttaaaatgacattttggtaccaaaaagggagtaccccctaaaaagggaattttccaatttccggnggaggatggttagaaaaccacccccatttattagaaccaattctcacaaaaaaataaattggaatttttgaaaagaaaaacaaagggttggtaaataatataaatggcccaatgtggg

SEQ ID NO: 369718 - DNA, 1429 bp, Homo Sapiens
  misc_feature (77)..(86): n is a, c, g, or t
  misc_feature (125)..(125): n is a, c, g, or t
  misc_feature (127)..(134): n is a, c, g, or t
  misc_feature (137)..(142): n is a, c, g, or t
  misc_feature (153)..(153): n is a, c, g, or t
  misc_feature (165)..(171): n is a, c, g, or t
  misc_feature (173)..(189): n is a, c, g, or t
  misc_feature (221)..(238): n is a, c, g, or t
  misc_feature (272)..(273): n is a, c, g, or t
cccccccacaaaacaaaataaagggggcgccccacaaaaaaataatccctcccccctctctctctggggggggtgtnnnnnnnnnngagggccggtcccgagaggactcctccccctcggggggncnnnnnnnnttnnnnnnccactactaanctcctttacttnnnnnnngnnnnnnnnnnnnnnnnncccccccggggggaacaaaggaggcccggggnnnnnnnnnnnnnnnnnngggcgcggccttttaacaaaggccttctagtggnnaaaattttttttcccatgcccccaaaagccccgccctttttggggggcccagcttcacccaaaaggtggccaggcttttccgggggctccctgcttcgggccaggagccgagagcttagcagggcaccacctctgtttcatcatttctttcctgtggatcccagggtccaccagaaggtgacagtgttgagagggtagtggcgtctgaaaaagagctttctctggttgtcagtcagagtgattccctgggcagagactttgaagtgaacgatggtgccagctggcgtggggtctgcagccaacgtctctagatgtggctttagagatggcctgtggcccagtgagtgactccatgtccacagagttgacgaagagcacattgcaggctgccccttgtttcagcaggtctgcagttgagttggcagggccggagctatctttcgattcatctgtggggtctcggtttggaatgaccagcttgcaaggcagggccaatgggatgatggagtgctggtagaccagggcagacagcgatccgaagtttggctcattggggcagcccttgagcttgactcctctggggccagtctctatcagaaaatgcctgaccagctcatgggtcatgtctccttttttattctgctgcatgatggttggaggtggcgaagacaccttcatggccagcccgtacgcgcctcggaaggagtgactgtcgcggatgatgaaggcccccggctcctggtccttgaggagcgcgatggcctgctacctggagatctcaggcttgtaccaatacttagaagtgtccaggacaaacttcactttagcccgcgtctccgggctgttgtctggcatggagtacttggagaagtcgggcagagtgtgggagaaggagacggtgctgcccccactgggactggacatgccgctggcgacaggcgaagacaccttcccattgatggtggcatagttggggaggctgcctgcccggtctcccactgacatccttcgcttctctggcaaggctggtgttgggctcccttgccggaaggctgcggagtctggtgacggggaggtggcagggctgctcaggccagggtagtaggcaggggagacagggaaggagggcgtggcctcgtgcagaattcgccaccca

SEQ ID NO: 369719 - DNA, 940 bp, Homo Sapiens
tccccctgcattttcactcctcacctggctcttttattcaagaaatatccccttaactggcattccgctctgtctgacacctcctcttaaatctgaacacaaataaaaccctgaaaaaatactcttcaagaaaaagaccattgagttaatgtcacctaccctaaacagttggtgttgagagagaggggagggcacaaattcatatatgtttcacaaagtcaaataattgtgttactgaagttttgtatttgatctgtcatattctaagaggatttcccactggactacagttctgtcaaattatacttgtagtgaacatttttgtttgtttgtttactatgtcatttcatacacaaaagcagaggactgctatatgttaataaattgcacttttctcatcagtgtaaaatagtcaatatttaagctatattatacatttttgttttaaattatattttgttgttgctactcttgcattgttcttgtttgcttcgagatgattgacattttaaagtatgctacactatctaattttttcttattaatatagtctctttggactttgattctaagttttgatgttttactctaatattatattagtttaggatatttatatcctatttgagaaccatatacagaagtgaataagagcacaaccactacaattctgtctgagtttatccctgttgtgccatttattgaatctaaatctaagttacttaaactctgtctcagcttccttggctatgaaataggcatataataaataccttttagaattttggaggcaattacataaattaaatattcataccactgtttgttatttggtaagtggtatattaagtcttatctatgatttctgtcccataagtttttattatcaaatttttagcaagaacatttgaagctttatgggtatgggacggataccgct

SEQ ID NO: 369720 - DNA, 893 bp, Homo Sapiens
  misc_feature (533)..(814): n is a, c, g, or t
ggaccaaaagatagtactctaaaaatttggacagggcttcattttgattttttctcccccaaatagttgatagcaataatcaataccagttgagataccaaagaggcagcctttccctgattcccacaccacttgtaggcctttgctagaatggtcattaatacgtatgaatcagttgagctaaatattatttagaacgtggcaaaatgctggctgtaaattaaatcaaagataagtaattcaaaggctttaactgaaaatttctgaaaagatgtttgctgtgctattaaagatgttaaataacaaaaattaaaagaactgagaaagactataccatgaaagtgcataatagtgaagaaaaaaatgaagttcccttggcgttagccaggtgcatgcaaatctttttatctgaatgtagaaatgcaaaaagtaccaggagaacatttctgaaagtagtcaagtatgttttaacatttatctccttataatatgcaaactgccaaactggagttatgtttttagttggtaattgnnnnnnnnnnnnnnnnnnnnnnnnnnnnnnnnnnnnnnnnnnnnnnnnnnnnnnnnnnnnnnnnnnnnnnnnnnnnnnnnnnnnnnnnnnnnnnnnnnnnnnnnnnnnnnnnnnnnnnnnnnnnnnnnnnnnnnnnnnnnnnnnnnnnnnnnnnnnnnnnnnnnnnnnnnnnnnnnnnnnnnnnnnnnnnnnnnnnnnnnnnnnnnnnnnnnnnnnnnnnnnnnnnnnnnnnnnnnnnnnnnnnnnnnnnnnnnnnnnnnnnnnnnnnnnnnnnnnnnnnnngggtggattatttgaggtcaggagttagtgatcagcctggtcaacatggtgaaacctcgtctcttctaaaaatgtgaaa

SEQ ID NO: 369721 - DNA, 1178 bp, Homo Sapiens
  misc_feature (72)..(139): n is a, c, g, or t
  misc_feature (555)..(567): n is a, c, g, or t
  misc_feature (747)..(1037): n is a, c, g, or t
agcgatcctcctgctgggattacaggtgtgaaccaccacacttgaccccaagttttgttattttttagagannnnnnnnnnnnnnnnnnnnnnnnnnnnnnnnnnnnnnnnnnnnnnnnnnnnnnnnnnnnnnnnnnnntggactcaagcagtcctcccacctcaagcctcctgagtagctggcactattggcatgtgccaccacgcgcacctaataatttaaaaaatttttttgtagagatgatggagtcttgtttctctgacttatagatcttttctcaccttgtcacagagttttaaacaaaccctgtctcagaactgtctctggaaaaatgtttagggactgtcccatgagtgaattatggactaagattagtagatttgaagtctaaacaccagaagcctccaaataatggaatttgtttaaaaataaatattaaaaaataacctgaaaagaaatcacaccccccttccctcccctggccccatttcttaatctgcaatagaaaaagaaggtcagaaaatgcacctagaatattctggagcagaatcaannnnnnnnnnnnnaaaaccactgtgtgaatatgaacaaactattctgggtaaattctcttcctccattaaacttgggaccccagattggctgctctccttttgggtgggtggatggtgggaatgcatgactaagagctgttgctcatattagaaatacatggaacagactggtggtcaagaggcaggttttgnnnnnnnnnnnnnnnnnnnnnnnnnnnnnnnnnnnnnnnnnnnnnnnnnnnnnnnnnnnnnnnnnnnnnnnnnnnnnnnnnnnnnnnnnnnnnnnnnnnnnnnnnnnnnnnnnnnnnnnnnnnnnnnnnnnnnnnnnnnnnnnnnnnnnnnnnnnnnnnnnnnnnnnnnnnnnnnnnnnnnnnnnnnnnnnnnnnnnnnnnnnnnnnnnnnnnnnnnnnnnnnnnnnnnnnnnnnnnnnnnnnnnnnnnnnnnnnnnnnnnnnnnnnnnnnnnnnnnnnnnnnnnnnnnnnagaagaggcggaatttttggatgatcttggcctggcgtctgaagtactggactccctcccactcacctgaaaagtcacttttgggccaaagtggactttccggggttttttgggggtctccgggctcccccacacccaagt

SEQ ID NO: 369722 - DNA, 893 bp, Homo Sapiens
ctggcccaggtctttggtacaaagggcagggaagggtagctctgagaacggggctttcagccgcagcactccgtgctcccaggtcgatgcagcacttgagagaaagcagagtctgcaggcccaggcagaattcaggactctcagcatccaccacctgtgccgagcacaccacagtctcctgccccagctgtagctccaactgctccacctgggttgggggcccaggggccaggtccccagctgaggcttttaggacccttttctctaaccccaggcggctgagacatccagcagagatccgattgtattgggtgcctgtgccaacggccactctaagcagctggtcctggcacttgcagttgaccagaagagctggaatctctgtcctgctggtcttcctcctgctctcctggccatgaatcaggtcctgcatccggggaggctccccctgaagccaattcgggtttccctccaccaggcgtctttggatcacactgcgcggctgcaagtccttggaggtgccgagcctcttgaggctgtccagcgggagcaggtcggccgagtccttgtgcaggaactgggtggcctgtttgagccggcgctgctggctcaggtgggctcggtctcgaagctgtgcctcctgccccctcgtcctggcttctccctcatctctcctggcctcctgcttggtgctcatggcccctgctggaggagtgggccaggggctgctcggtgggggcgtcaccgagtcctctctgcttcttcctgcctgtctctgtcccgtgctgcagctctctttccaacaggagggtctccacgggagggaaagaggaaaaataaataacatgcaggagcagccgcgtcagtctccaatttcccgagattgctccgct

SEQ ID NO: 369723 - DNA, 1171 bp, Homo Sapiens
  misc_feature (34)..(34): n is a, c, g, or t
  misc_feature (587)..(622): n is a, c, g, or t
tttcagaagaccaagagggtgacttaccagactngagtatttctggggacaatacaagtacctgggcatgaatttccatttcgattcagatgggactggaaacaaccattcaattttatgaatcttactggacattatggatttactggaattattccagacattatgccctttggttgtcactaccttgcaaatgtgtaagaggaaaatgtgctaatgtggcagtgactgtaaaactggcacatggcatttattaatcctgaagaaaagtacatgtactatttttcagtataaatataatgaacatgtcagaactatttcttgaaaacctttttattacttttgcgtgaatttatttaacaaagatgttttgtcttttgtgtaagggaggttctagaggctagatgtttaattgtaaatatgtgaggaaactcaatgcagaattcaggataaaaattttaaaagcacaggtatttgggaattgaaatgttaagatacccagaacaacattaaatcaatgagtgaacttgtgacagtggtagcatttcaaatttcaaaagacttatcctgtgtgtgtgtgtgtgtgnnnnnnnnnnnnnnnnnnnnnnnnnnnnnnnnnnnnaaatattcagcagcaccaagttttataactattgtttgtttgactttattaatactagaatatgtagtctcagccttaattttacatttacattattttgtaattttttattactatttttaaggggttaaagaggacatacattctcacattagtgtactttctggtagaaagttgctgcaaaaacatttgaaatgtatatttaacctaatggatgtcatatatatgtcttttgtgtaagttccaagactattgatctgtgaagttattttgtaaggacatacatttggtaagtaagtttgtgtcccaggaaatgtatgtgtttttaaaccctttctaaatatgcaggccattaataaataagattgtttcttccctactgaatagataagtgtttttcttttttaaaattggaagcttcataaaagttatcttgttaaaaaacgatgatgatgttaacctatctttataattggaaattatttaaactgtttgttgttacagaagaaacaaaatggtaattacagaattagctgtggggaagattgg

SEQ ID NO: 369724 - DNA, 1058 bp, Homo Sapiens
catatgatttcgctaggtaagggaaaaaaggggggaagtctgagtttaattatgggatgattaaggccggggttttaccgaataataacagagcgaacggattttttcgcggttataaaaatacgaacttggggggaaagggtacagggggggaaagaccagaatttaaacgttatttaatttacggcggaagaaaagggataaaaggggtggcataaaagaccatagagggggagggggtaaaagattaaaagtgggggaaagggatgctggacaggacgacctggttaaaaagggttacaagagacatatggcagttttgagaatcagattccattttatggatagattccattcgccaagtgcccaggcctacttgccaaccgtctgcgaacatgagagccaagttcaacaccttcgtgatagattctttcacaaagctgaccttttctctcagcagacaccggtcatggatggttgacagatacctatagtgaattttaatcaattgatctaaatccttggcttcctcgacttgatgttgaaactccagccctgtactgtgtagaatcctggtcatgatgtagttgtgcaagctgttcacgaaatgcatgagcttcactcttaagaggaacatgcgatgaatctgctgtcttactggttctttttgtggtccgaactgagcaactgtgtcttgttcatgtataaggccttctttaagtcgtggtttttctgcagtactaaccagttctataaaacattggaagagcaaagtggacagaaagagcatcaactcaaaccccactgcaccatgacgcctggcagaaacactgacggatgtggtcctggcaccacagaaagcactggcaggggtggcaggaaccgaacctcagtgcctctggaaggtgcagtgggaaaagtttcctgtatcacttttcctaatcaagttgttgcatttcagatcaactgtacatacaacttcctgatctttctttcaggcatttgatgtccataaaactactgctagaatacgcaccattttggcatttgtgtacacc

SEQ ID NO: 369725 - DNA, 1311 bp, Homo Sapiens
  misc_feature (418)..(438): n is a, c, g, or t
  misc_feature (1166)..(1166): n is a, c, g, or t
gctggaccggtccggaattctccggatcctccgactgctactacggccctgaggacccccagcacaagccagtcctctcctactactcattgccaagatcctttaagcacacccagcgccccggggagccggaggagggtgcccggcatcagcacctccgcctttccactagctctggtcgccttctctatgctgcaacagcagatgattcttcctcttccaccagcagcgacagcctgggtgggggatactgcggggctaggctggagcccagccttccacatccccaccatcaggttctgcagccccatctgcctcgaaaggtggacacagctgctcagaccaatagccgcctggcccggcccacgaggctgtccctgggggatcccaaggccagcaccttacctcgggcccgagnnnnnnnnnnnnnnnnnnnnnccttgctgcaccctccagagcccaagagccccggggaatatgtcaatattgaatttgggagtgatcagtctggctacttgtctggcccggtggctttccacagctcaccttctgtcaggtgtccatcccagctccagccagctcccagagaggaagagactggcactgaggagtacatgaagatggacctggggccgggccggagggcagcctggcaggagagcactggggtcgagatgggcagactgggccctgcacctcccggggctgctagcatttgcaggcctacccgggcagtgcccagcagccggggtgactacatgaccatgcagatgagttgtccccgtcagagctacgtggacacctcgccagctgcccctgtaagctatgctgacatgcgaacaggcattgctgcagaggaggtgagcctgcccagggccaccatggctgctgcctcctcatcctcagcagcctctgcttccccgactgggcctcaaggggcagcagagctggctgcccactcgtccctgctgggggggcccacaaggacctgggggcatgaacgcctttcacccgggtgaacctcagtcctaaccgcaaacagagtgccaaagtgatccgtgcagacccacaagggtgccggcggaggcatagctccgagactttctcctcaacacccagtgccacccgggtgggcaacacagtgccctttggagcgggggcagcantatggggcggtggcggtagcagcagcagcagcgaggatgtgaaacgccacagctctgcttcctttgagaatgtgtggctgaagcctgggggacctggggggagccccccaagagcccgccaaaactgtgtggggctgctgggggg

SEQ ID NO: 369726 - DNA, 863 bp, Homo Sapiens
  misc_feature (211)..(246): n is a, c, g, or t
  misc_feature (248)..(332): n is a, c, g, or t
  misc_feature (487)..(628): n is a, c, g, or t
gtgggacccccaaaccctttggaggggggccagtgataaaaattcccggggtttcaaattacaaaaatctttcccggcctttaaccggttggaggattctaaggttcctgggtttgggcttcagggtgcctgcctattccctatggacccctgggttcttagccccatttgggttggttaaggaatacctgagggctgggtaatttactgnnnnnnnnnnnnnnnnnnnnnnnnnnnnnnnnnnnngnnnnnnnnnnnnnnnnnnnnnnnnnnnnnnnnnnnnnnnnnnnnnnnnnnnnnnnnnnnnnnnnnnnnnnnnnnnnnnnnnnnnnaccactcatggcagaaagcaaaggggagctggtgtgtgcagagatcacacagcaagagagaggaagcaaagaagaaagggagggaggataccaggctcctttaaacaatcagcttccaggggaggaaaaatagagcaagaactcattactgcaannnnnnnnnnnnnnnnnnnnnnnnnnnnnnnnnnnnnnnnnnnnnnnnnnnnnnnnnnnnnnnnnnnnnnnnnnnnnnnnnnnnnnnnnnnnnnnnnnnnnnnnnnnnnnnnnnnnnnnnnnnnnnnnnnnnnnnnnnnnnnactcagcatactatattttatgaaaatcatcatataatcagaatatctttcccctgacacacgcacatccacacccaaagctatacctcttctgatacaactatgttctccataacaatagtgactgtgtgtctaatgcataaaatgagtttgtatgagaaatagcaacttcaagaataaaaggcctagcttaacaagaagtagcaaaatttccaaacttgggttccaagtggaa

SEQ ID NO: 369727 - DNA, 835 bp, Homo Sapiens
  misc_feature (481)..(524): n is a, c, g, or t
gagcgaggcctgggtggcgaattcggcacgagggttggcaagaccattttctgtattggatattcttcccaacagtgtccaccccaaaaggctttcagccaaaacatctgagcctaggtaggtttaccaagggaagccataagtcaagaagcatcagagtgaaaaggagcacttccttcattttacgcccggaggctaatgctccgagaggaatgtgtacttgggcaaagtcatgcaggaaggtcatatcagagctgtggaggctggagtgtcctgattcttggaccacagatgtctccctgagccattatttatttatttttaaaaagcacagttattccatcattttgagtctttgtatttcgcttatattggggggcaggactattttctcaggtgtctcatttggcagtcaacattgtcccctatgttccctatgactagttgaaaattcaagtgtgcccacaggggtgcacaaaannnnnnnnnnnnnnnnnnnnnnnnnnnnnnnnnnnnnnnnnnnngttgaacccgtgggtctatcaggacatcctaaaactccgtgattgacatttcagtaatttcaggggaaggtgttttccagggatggggtctcccaggttcagatagtgcctttggctgcaaatgctcctttagctaaacttttcctcaggaagaattcattattctagacattatgtgatatatctgttaggaaaggagtgaggccaggcacaaagttgcaaagggacctgggtttaccggccctgtgactgtagttcaatatgagaacggtgtctgagctatctaggaaggatgtgtgtgaccgtagtga

SEQ ID NO: 369728 - DNA, 898 bp, Homo Sapiens
  misc_feature (66)..(66): n is a, c, g, or t
  misc_feature (135)..(136): n is a, c, g, or t
  misc_feature (139)..(139): n is a, c, g, or t
gttggggagcctggattaccctgccccctgggcaggcatgacttcagacttgccatgaccaggtancgggcgtgtcccaggaatgatgtgccccaggcctctggcccgcctgagtcccagccccccacacaaacnnccntccaagctcccagcccctacaccataaaccatgagctctgtgccctctctgatggttccacatctgccaccttgggcatggagcctgttgtaagagcccccaggctcagccatggagaccttgagcagtggcactgagtcccgtggctcacagggagcaaagtgagacaaccagcagcacaaggacagaaagaggaaagagcaagtctgcagctctagaagggaggggcaggcagcctggctctgaggctccaggtatgccccctgtgtggagctggggcagcggggcgggcagaccattcatgcagcaggcagtgagacatgtacctaccatggctgacgctcctcaggggccactgatagtgattctgaaagacagcatcaaatcacatggcaggtcccatgcatgggtggggcaggcctgggggtggcagacacacgcacacgccagattgtgcacacacatgctgtgaggccccacggcccgcatgcacactctaacacatgcccacaaacaacacgcatacgtcgccctctccgccacctcccggtgcccagcaccctcaccggccggcacgtgccgcatggatctggggcgtgcagccacacggcacactgaagcacatgcgtgggcagagtcacaacacagatgctcacccgcacacagaggcatttgcaccagctccctgcacactcgtgcctggcgtgctcagaggaccacccatgctgctcagggagacagggcttgctcactaattcc

SEQ ID NO: 369729 - DNA, 484 bp, Homo Sapiens
  misc_feature (339)..(339): n is a, c, g, or t
gagaaatgacagctggactttagcgagcaagccctatctccatgagcagcacgggtgatcctctaagcacaccaggcacgagtgtcagggagctggtgcaaatgcctctgtgtgcgggtgagcttctgtgttgtgactctgcccacacgtgtgcttcagtgtgctgagtggctgcatgccccagatccatgctgcacgcgccgccggccagtgagggtgctgggcactggggaggtggcggggaaggaggcgtatgcgtgttgtttgtgggcatgtgtgttagcgtgtgcatgtgggccatggggcttcacagcatatgtgtgcacgcccgggctttgncgtgtgtgtgtcccccacccccaggccggccccacccgtgcgtgtgaactgccatgttgattttcgtgctgtcttttcagaattcattattcagtgacccctgaggagcctcaacattgccgatcgggtcaggcaagtccatccc

SEQ ID NO: 369730 - DNA, 890 bp, Homo Sapiens
ccggtccggaattcccgcggatcaaaaaatcaaacaaaaaagtgaatgcttagaaccttctcaaagcagtcacaagtacagacacttcacttagcctagggggccttccagggttcttgtggctgttgtcagagcaggagctgggggagggaagacttgttctctctttcttgaggggtggcattaggaacttacgaaaccagagacctttccctatgacttggcagtatgtgaatatcctctacacttagttattgataaacttcttaaagagatctgttattttcaggtagtgccataatctgcacttagcattggcttgcttcagttgtttctcttcccagccagtatgccacaggtgaactttcggggttgtcattaagtaagttgtgaaatttctgtaataacaaaggcagtccgcattcttccctttcccccaaattcctagggcaaaacttttttatggtgctgttaacatgggagtcacacaagccgcctgactttttctcattgccattagtaatgactgatggaaaacccagccaccactgtgatgcgaaatgatcaggctgttgcctgaaacagcccagtcctcttaactgaaacagcattctacttcttgttccaagatgagcctctgcaatattctggccaatttaatatacccccctacaaaagcactccacagcttttacactattttgactttgagttataactagtattattcatgttttcataaaaagaagttagtgacccagagctataatcatccatcaagtcttccacaataattcccaactcataaattgcttttcctaacaactagcaaaagctattgtttcataaatggcattttctaaagcctttttggggcactgttgtaccca

SEQ ID NO: 369731 - DNA, 938 bp, Homo Sapiens
agcgggtctttgtaaggagaccactgagacgagcgggagcgcggagcagcagcctctgctgccctgactttttaagaaatctcaatgaactatttgtagagaatcactgatccggcctgcaagcattttgcacggcaaaaatatcgatcagtgttaagtgaagatcacattttatatgcgatcttgacttttttgtcttacattatatttttatagattttgttataaacatggtgctgggaaaggtgaagagtttgacaataagctttgactgtcttaatgacagcaatgtccctgtgtattctagtggggataccgtctcaggaagggtaaatttagaagttactggggaaatcagagtaaaatctcttaaaattcatgcaagaggacatgcgaaagtacgctggactgaatctagaaacgccggctccaatactgcctatacacagaattacactgaagaagtagagtatttcaaccataaagacatcttaattgggcacgaaagagatgatgataattccgaagaaggcttccacactattcattcaggaaggcatgaatatgcattcagcttcgagcttccacagacaccactcgctacctcattccaaggccgacatggcagtgtgcgctactgggtgaaagccgaattgcccaggccttggctactaccactaaaattaaagaaggaatttaccgtcctttgaccctacagatatcaaccctccctcaatactggcacccgcagcaggcgcaaaaagaaaagacactcctgttgccggggtccggtaccccatggcccaatatttcttcaacgcgcccaaagattgaaaggccaggggtttcaataccccccggggtgacgccgcattctagaaatgttttgtatgaagagatcgccgaaactgcgcttcatctccgagaaaaggggaggg

SEQ ID NO: 369732 - DNA, 794 bp, Homo Sapiens
  misc_feature (43)..(79): n is a, c, g, or t
  misc_feature (476)..(484): n is a, c, g, or t
aagatgactatataggcgatgcagctcatcgcggggcggccgnnnnnnnnnnnnnnnnnnnnnnnnnnnnnnnnnnnnnatcaggccaaatcggccgagctcgaattcgtcgagagcgggtcaaggatggggtcagaccgagaatgctgggggagggttttccgtggaaaaattgcgctagagatttggccaaaaacaaacaagcaaaaatggcttgccctcaactaatactcggcagtgatgagtgctggaaaaacgggcgaatataagaatatttaacagctctgaactggttcatcctggaaccaaggaaagtatgcaaggaggcagggttacttttaaggagtctggcttcctgtgctgaatccggccctttccttctgtttctccttctagaagatccgcttccagtacccaccctcaacccgagagcttttccggctcctgtgctctgcccatgaggccccggggccagnnnnnnnnnttctgctgctcgacggcctagaagagtacctagcggaagacccagagccccaggaagccgcctacctcattgccttacttctagacacagctgcccacttcagccaccggcttgggcctggccgggattgtgggctcatggtggccctccagacccaggaggaagcaggtagtggggacgtcctgcacctggcactgctccagcggtattttcctgcccagtgctggctgcagccagatgcaccaggtccaggagagcacggctccgagcctgcctgagccaggcgggctgggcccagaacagagtggtg

SEQ ID NO: 369733 - DNA, 1165 bp, Homo Sapiens
  misc_feature (324)..(742): n is a, c, g, or t
  misc_feature (886)..(895): n is a, c, g, or t
  misc_feature (1047)..(1047): n is a, c, g, or t
  misc_feature (1078)..(1079): n is a, c, g, or t
  misc_feature (1098)..(1098): n is a, c, g, or t
tgggtggcgaattcggcacgaggtggaaagcctggagaaagaggatgaaatgacggatgaagcagttggagactctgctgagaagcctccttctacttttgcctcacctgagactgctccagaagtggagaccagcagaactccaccagcctgtgaaaccacgaacccttcaatcaagaaaagacctttgatcaggagaagacttctcgtctcatttctggggacacattcaggatttctccaaagcaggtgaaggtacgctcgagcgtggtcattgaggacaagtcgacgagagatcccgagtacatctacagtcagccttannnnnnnnnnnnnnnnnnnnnnnnnnnnnnnnnnnnnnnnnnnnnnnnnnnnnnnnnnnnnnnnnnnnnnnnnnnnnnnnnnnnnnnnnnnnnnnnnnnnnnnnnnnnnnnnnnnnnnnnnnnnnnnnnnnnnnnnnnnnnnnnnnnnnnnnnnnnnnnnnnnnnnnnnnnnnnnnnnnnnnnnnnnnnnnnnnnnnnnnnnnnnnnnnnnnnnnnnnnnnnnnnnnnnnnnnnnnnnnnnnnnnnnnnnnnnnnnnnnnnnnnnnnnnnnnnnnnnnnnnnnnnnnnnnnnnnnnnnnnnnnnnnnnnnnnnnnnnnnnnnnnnnnnnnnnnnnnnnnnnnnnnnnnnnnnnnnnnnnnnnnnnnnnnnnnnnnnnnnnnnnnnnnnnnnnnnnnnnnnnnnnnnnnnnnnnnnnnnncacacaaggggttgggccgcggtatccaccgccgggcgagagagctgatagacgcgcgcccctcggcaaagcgggcgcacccggacggtacgttccgacggcgatccgggagagcggttctcgggcgttccggggacgttggcnnnnnnnnnnaccggccgaggcggtgtacgacgaggcgcaaacggggggctggatgaggggcttgcgtcgtgtccgctgttgacgacggatgtagtcagacgaccggtgtcggggtgtgcgcgcataggttctcgcaccggtttgaggtggcctgtatagtnggaaagcagcaataggaggtggagtaggcgnnacggagcgtgaatcgcgtngcgacagctacgccgtgtcgcggcaaagccggtacggcacggtacccgatgtgtccgacgagtcgcc

SEQ ID NO: 369734 - DNA, 1072 bp, Homo Sapiens
  misc_feature (246)..(246): n is a, c, g, or t
aaggggggctccctcaccccttggaaaaagggtttcctctttcccccccggaaggggaatattttaactcattccgggtcttggaccacttattataagcatttttggtacgggtgggggggatttcacacagggaggggtcttcggcatgttggccctttcctgtccattctgctattaaatgcatgttacattactgggtcccatccattttggtaatatgttgcacaaagtgtaaagtcactngctcaccccgccttatacacatccttcttctctcccctgggtatgccatttcaaagctaggtaaactgagacaatctgtttttatgcatgatggagggtgagaccatttttctcctaagcattttgcaattgcaggcccatcaattccaaaaccttcaaaacatttgtacgtaacttcttctccatactgataactgtctgacatgtgagctacaacaccatgagaaatctcaggtggagatttacaaggaaggccttcacactgaggtggagaactccattttcccatgtagcatgttgtttcattttcttcagatatcctgaaaccaccctcacaagtataactcaatttagtcccatgtgcataactttcttgtgaagacctggatgaattaatggttcccgtgttcctatctgaggtggttgtgaacatggaattttttccaacacagagtggtattgactgccatcttccatctttgcatgtaatttcttctccttcctgaattagataattttcttggcaaagaacagatactttttctccatcccgataattcagtgtggttgtcatattgtgagaattgggaatctgaggtggaggtgggcataattgtatttgtgccattgagcagttcacttctggatcccatcttccatttatgcagactgtgtgtatccatccttcttttcctctacatctgtaccttatgttagaattatgatcgaattccttcttgttttttaaatgttcctcaagtataattaaatttgatgatttgcacttcttaagtttatctattgccacacactggggaagttgggt

SEQ ID NO: 369735 - DNA, 1743 bp, Homo Sapiens
  misc_feature (608)..(608): n is a, c, g, or t
  misc_feature (622)..(638): n is a, c, g, or t
ctttaagttttacaagaaaaaccatgtaaccaaggaaatttgttcattatgaagtactactttccacttcatttcatcacaaattgcaacttacttaacagaccaaaataactatggtactgtagtacatcaaatactccacacactgtgcttcaaactagggcactgggggtcactgcctgctgacagtggcctcccgcgaataaagacacacttacaatctgaacgctaaagggatgtttggatacatggaatttgaatatatatatttacaggaaggaaacaaatttaataactagtttaagtctccatttcaaataaaattccaaatacatttgtacaatgtttacaaagtaaaagcacaagaactgccaagatgatcattcaggtccaggcactgtgctcatactgggggaaatgtctacaccgttccctacgcacactcgtggggtctctcggaccttattctgtaatggagggggaagcacaggaatggcatttttgcacaatcagaatgtcatgcagatagttgacaacaggggactgagaaattactggtccattctcttccatttgctgttcacctgccacctgttccattttttttncagagatagatttnnnnnnnnnnnnnnnnnttgaacagggaaaggagcacaaaatgtttaaggcaaattaagcaaatatagagcagcttatcttgatgttgagtggaaatgaggattttacccaaaaccaaccttagaaacaaacaaacaaaattaagtacaacctcctgaggttgggtggtgtatatcatgtacaaatttttgaaaattgctttgcaccaaatatccttttgaaatgttaaacaaaagacttattgattacaaagtgcatggtttcatgtttctaaataaaacaacagtagctgaggtagttagatgtgaaacttatttacttaaaataactggagaattaagaacaaatattggtagcaaaaatccttgccatttgggagcaggtttatattgtgcaatggtttcatgctaagcacgatgtttctatttttctattagatgttattaattacatcagaatattagtggtagtagtatttgtttccaatctgcttggtaggatgttagtacagacgaagtttgtatccctagtcatgtcatttgtaactcaggctcacaccatttctgcattgaagctatcatgtaaaatggcattaattatcattacctagaaactcccaatcccaaactgcaaaaagaattaagtaaacactgagaaaaggaatcccataggaaggatgattttgctcttgctttaacaacatttttgtcatagcccctaaattccagcgtgcctatttggtttcaaagagagaagaaacctctggctcattggttgctgtctttgttctgagaatgggaaaaatgtaatttgcatatccttcatcgactctccctaggctattgagctgtctggctacagagaggaaaagcagaaactatttagtagaggcaaggttctcatccaagaatagctatggtctctttctgcgctctttaccaaagaaaggcttcagctgggatcttcaataagcaattgaccaaatgatgcatttttttcttatttgataccatctagatataaaaggaattttgtgatgataataatatgtcagcaatactaacacacgtaaactaattgggagacactccttttgatcaaaagagaatttccatatgtttt

SEQ ID NO: 369736 - DNA, 926 bp, Homo Sapiens
  misc_feature (68)..(354): n is a, c, g, or t
  misc_feature (777)..(777): n is a, c, g, or t
  misc_feature (862)..(862): n is a, c, g, or t
tctggaaagaggaggtggaggcagagagagggagatggaatcagtggtgaggaacacaggcttctcannnnnnnnnnnnnnnnnnnnnnnnnnnnnnnnnnnnnnnnnnnnnnnnnnnnnnnnnnnnnnnnnnnnnnnnnnnnnnnnnnnnnnnnnnnnnnnnnnnnnnnnnnnnnnnnnnnnnnnnnnnnnnnnnnnnnnnnnnnnnnnnnnnnnnnnnnnnnnnnnnnnnnnnnnnnnnnnnnnnnnnnnnnnnnnnnnnnnnnnnnnnnnnnnnnnnnnnnnnnnnnnnnnnnnnnnnnnnnnnnnnnnnnnnnnnnnnnnnnnnnnnnnnnnnnnnnnnnnnnnnnnnnncgaaacaacaccagcttctctcccaagaaatgaggttaacaataacaccatctccccttgtggcaaggatgggtctagatactgcatgagatgtcgttagcatggtgcctgaaatgcaatcagcagttggtaaaaatgaattattttgttgagagttaaaagtgctttggaggaggacactgagtcttgttatctttgcaccaccccagcccccagagtcagcaccgccttcacatgaacaccgtgccccaggatgctagctagataaggtgtcacagacagggtggcgaggagaagcaagccccagcctgagcgggaatgactggaggaaaggtcagagacagagcagcccggaggtgcgctggtgcgcagagcagacagtggagggttcagtgggcagtgctcttcaccccgggtctgaantatgcccgggggcttgggaggcccctttggctgggcactttctcagggtggccatgctgagctgctgacccccagcccctcctcntccagctcccttttatcattcaccgtggagtgttcattttaaacctcagccagaacccctggcc

SEQ ID NO: 369737 - DNA, 1197 bp, Homo Sapiens
  misc_feature (719)..(736): n is a, c, g, or t
  misc_feature (1152)..(1152): n is a, c, g, or t
gtactgtctgtgttagtctggcttggagggggctgtcttagttatctgacggatctggctagtttgctggcgttgttgcccacgtcctgactgggattctggtggtgcaccgtttgctcttgctgtagtgaaaaggtcacagtttttcagtaaagagcgcaccgagtcacctagtgccagtgcattggtccaacctccagccaacacagaggaagggaagactcattctgtaaataaatttgtggacatcccacagcttggtgtgtctgataaggaaaataactctgcacataatgaacagaattcccaaataccaactccaactgatggcccatcattcactgttatgagacaaagttctttaacattccaaagctctgacccagaacagatgcgacagagtttgctgactgcaatccgttcgggagaggctgctgccaaattgaaaagggttaccactccatcaaatacaatatctgtgaatggaaggtcaagactcagccattccatgtcccctgatgcccaggacggccattaaatgttaccctgccacaccactgcacttcacttccacttcagaccaacttcatactaatggaacattttggcaaatgtatattcagatgtacactaatatattatctattaaaatattagaatttgtgttgtggcttttaatgccagaagaaaagttaccagaatttataatttatagtaannnnnnnnnnnnnnnnnngccttaagagttgaatatgctgctttagaactttaaaacaaggtgtaaatgattttcattttttacaaatgaaaaataattcctttgtattgatttcacttaccagcacattctctacaatggtgacttagacaaaagtataagattcatagactttatatttgtatgacatacaactaggacaaacatagatatgacatttgctgcctcagtgtagcaattggaaatatttataagttatatgaaagcctgttttgggctgaaagatgatttagaaaactagtgataccaaataagtatattcagttcaataaatatttttcatgatgaatcacttaatggtgaaagactttgcctggggtaatcttttatggtaattacaaatcactggtccattttaaggggaagcttcatanaattttaataattttatttaacatgggaactcctgggtttttttc

SEQ ID NO: 369738 - DNA, 1006 bp, Homo Sapiens
  misc_feature (82)..(108): n is a, c, g, or t
  misc_feature (829)..(829): n is a, c, g, or t
  misc_feature (962)..(962): n is a, c, g, or t
cccctctcagccggcagcacattccgtcgccttgccgccgcccggccccacagttgtctttgccggagctgcagtcgcgctnnnnnnnnnnnnnnnnnnnnnnnnnnnagaggagaaggccgcggcggaggcaggtgagaggaggaaggaagcggcggcgcggcgggcacagcagctcaggcggcggcccggttcctgggagtgtcggtgcggcgcgttggttggggcggatcccgcggggcccgggcgggggaaggagtcaccggcccggccatggcggacaacgagaaactggacaaccaacggctcaagaatttcaagaacaaaggccgcgacttggagactatgagaagacaacgaaatgaagttgtagttgaattaaggaagaataaaagagatgaacatctcttaaagagaaggaatgtaccacatgaagatatctgtgaagactctgatatagatggtgattatagagtgcaaaatacctctctagaagctattgttcaaaatgcttcaagtgataaccaaggaattcaattaagtgcagttcaagctgctaggaagcttttgtccagtgatcgaaatccaccaattgatgacttaataaaatctggaatattgcccattttagtccattgtcttgaaagagatgacaatccttctttacagtttgaagctgcatgggctttgacaaacattgcatctggaacttctgaacaaactcaagcagtagttcagtccaatgctgtgccacttttcctgaggcttctccattcaccccatcagaatgtctgtgagcaagcagtgtgggcattgggaaatatcatangtgatgggccccagtgtagagattatgtcataagtcttggagttgtgaaacctttactttccttcataagtccatctattcctataacattcttaagaaatggttacttgggttatgggtcaacttatgtcgnccacaaaagacccccccaccaaccaatggaaaaccattcaagaa

SEQ ID NO: 369739 - DNA, 952 bp, Homo Sapiens
  misc_feature (824)..(875): n is a, c, g, or t
gcctgggtggcgaattcggcacgaggctaaagcaaggaagtcttcccctggaagctccagcagatacggcctcatggctttgctagaaatgggtcatctcactcctgtcattggcaaagcaagtaagatcatccatcaggagtggcttagattaatgaattatcctttgagtcgtgtagactagaaagttcagtcatgtctactagcaagaaaggagataagggctgttggataagcagcatctggtctcaaaggtacttcaacttttacagatgagaaacatgaatcagagtgactttcccaggctcacagcaagtaagagagggccttcagtgttagctgtgtctgtccctaaagcccatgttttatattgtatcttgctagagtataaagtaacttactttctaccttgtagaaactgatggtctaggagaagagatttgaactcaggtgcccagttgactctaatcttggcccatgtgagaggattgtactcagttgctctcctcatccagtgatgtttcttgtctaacacaagaagcctaggagtagaaagtcctaagcagagtagaataatagcggcagcagggagggaagtgtgaactgtgtgtccctgagcctgacttactgggcagggacatgacacttaaagcggcagctggccactctgtctttcctgcatgcactgagtatttggtagctcattagtgaccagtgatattgatcatcttttcatgtgctcacttactatccccatatctttgttgtttgcatcttttacccattgtatttgttgtttttgagacagtgtctcactctgtcannnnnnnnnnnnnnnnnnnnnnnnnnnnnnnnnnnnnnnnnnnnnnnnnnnntgggctcaagcaatcctcccacctcagcctcctgagtagctgggcttacaggcgcacaccaccatgcccagctaatt

SEQ ID NO: 369740 - DNA, 1115 bp, Homo Sapiens
agcgaattggagagcagaaggatgagttgagtttctcagagggagaaattattattcttaaagagtatgtgaatgaggaatgggccagaggagaagttcgaggcagaactgggattttccccctgaactttgtggagcctgttgaggattatcccacctctggtgcaaatgttttaagcacaaaggtaccactgaaaaccaaaaaagaagattctggctcaaactctcaggttaacagtcttccggcagaatggtgtgaagctcttcacagttttacagcagagaccagtgatgacttatcattcaagaggggagaccggatccagattctggaacgtctggattctgactggtgcaggggcagactgcaggacagggaggggatcttcccagcagtgtttgtgaggccctgcccagctgaggcaaaaagtatgttggccatagtaccgaaggggaggaaggccaaagccttatatgatttccgaggggagaatgaagatgaactttccttcaaggctggagatataataacagagctggaatctgtagatgatgactggatgagtggagaacttatgggaaaatctggaatatttcccaaaaactacatacagtttctacagatcagctagaggagaagcttgtctgtgttccttggcacaagaactcacttgaactatcaccttgactatcagatatgtttttgcactattttttttaactgaaaaagaaatatctaagctgtacatggtacactagaattttctgaaagcagaaaacgttcagattttgtagttaattttcattacaatagaaacatgcacatggaaacccatgagctaggattctaccgaggaaaacatctagtgggattagcaaggtgaagggaaagcatctggtggcatggcagcatggggaggctcacacacagaagttgcacgtggacatctgttttaatcagcacaagtgaaataaccatgccttcttcatttttttactttagttaaaaaagaagacatttaatattctacatgctgtaactatcaggacatggtttagcaatctcaattttcaattttttgatattcaaaattaaattctttacaccttggagc

SEQ ID NO: 369741 - DNA, 881 bp, Homo Sapiens
  misc_feature (766)..(766): n is a, c, g, or t
cactttccagtggcttctgcaaattacttcacctcttagagcctcaattttcttacctgcaaaatgcctaagagagttaccttcatgattaaatgagacaacttgtgtattttctaccagacagaaccgaagtaaataactgacacttcaaaacattagctcacttttgggaaaggctacagaaaaatccaaagacttgagtgagaatagtgccccttaagctcaaactgcaatcatattgattggatcactgccgtttaaaaaattagtccttttaaaaatatattttttcagggtttaaagagatctatattttaaaatcacaaaacaattccacagtaaggaccaatatcttctgagttggccaaaagtcccctagcagaacataagtgacattggcctgggccagtggcctttgctgtctaatgtaataggaaatggagccattcagaaggggatgtggactttaggggcacctgtctcacttaccatctgcttcccattccccctgtgatcagtcaaaacattttcaaaatattttacccaaataagacacttgatagacgttgctttcctgaaattttaatctgggaaatgatgtttgtttagctacaggaatcttcaggtgcctagaccacattcaaatttagggttgcaaaatttcatttctggcaataattacataggcgtgttctttattttatttaatatctatttcccggtgttttatttagctcccagaaccacacagagtatgtcatcaccngcgacagaagtggttttgtaaaccccactaaggtactactcactaggaatgccacagactagggctgttataagaaacctctttaaatatacagacgagggccacgctggtattt

SEQ ID NO: 369742 - DNA, 870 bp, Homo Sapiens
  misc_feature (779)..(779): n is a, c, g, or t
tgttctccctgagttgtcttcctctggatttttctgcagaaaacaaaaagtgaactggtattaagacaacagacaatgtggtatgttagaaaaattaaaaatatataaactttggcagttggtcaagaaatgaatacaaatgacattaagtttctaactcctgacctgatcaaaacccttggtgcttctgagaccttttactgccatttattagttttacatggagcagtctaacattgtagtaatagttcccaactagaatgcgcagataagcttagttaacagaaatagctttgaacaggaatagagtcaaacataaaagttttatgttgtgctttgtatttactcaaaaagctcccaggtttctgaaccctcactactgtaaccaaggactaggtcacaaaattactacagaaaaaaggaacaaagtgctttatacatttcataatatatccccttttattataattagttaattcccttttatctaaatggcctaaatttgccatgatggtagcagtgtccaaagtgaataattactgtcagtactgcatcacagagaaaggaagggatccctcaggagacactgctgtctccttctgggttgtgctaaacaacatagggaggaaagctggacctggagtcaaaggaattgagttagtgtgctggctctgccatacttacggcacccttgggcaggatatacaaaggttcctcacttataaaatgggacagtctaaaactaccttttagtagagaagtcaaattgagaaggtatngtgaaaaactcttgtcaacctaaattataaaggacctaaataaattttggggtaattaaagaagggcctatgttttggagaaaagccccac

SEQ ID NO: 369743 - DNA, 887 bp, Homo Sapiens
tgtttccatgtttaaatatacaaataccaccgtgttataactgcctactcagtacagtaacatggtgtataggtttgtagtctagaagcaataggctgtaccatatagcctaggtgtattgtaggctatgccatctaggtttgtgtgattacactctatgatgtctgaacaacaaaatcaccaaacaacacatttctccgaaagtatcctcattgttaagccatgcatgactgtattttggatattaaccccttatcagatgtattatttgcaaatatcttctcccattccatagactgtctcctttgctgtacaaaagctttttagtttgatgcaatcccattttgtatatttttgctttcgttgcttgtacttttggggtcatagccaaaaaattattgtccagatccactgtcaagaagcttttcccgtgtgttttcttctagtagttttacagtttcaggtctcatgtttaagtactaagtatattttgagttcatttttgcagatggtatgagataagggtccagtttcattcttttgcatgcggacatccagtttttctgacacaatttattgaagaaactaccatttccccattgtgtgttcttgttatctttgttgaggatcaattgactgtaaatgtgtgtatttatttctgggccctttattttggtccattggtctacatgtcctattttatgctaaccacaatatttttgattactaatagcttcacaggtgtaattttaaaaatcagaaaagtatggggccggggccgccggtggcctcacccccctggtaaatccccagccactttttggggaagggaccccaagaggccggggccgggaattccccgaaaggggtcccagggaaaaaattct

SEQ ID NO: 369744 - DNA, 339 bp, Homo Sapiens
taagaggaaaacccggtaatgataataaaacagccttattgctgatacgaagtgatctggatagatgatcaaacaagccacaatgttcccttaagccaaagcctaattcagagcaaccctaactctcttcagttctatgaaggctgagagaggtgaggaagctagagaagaaaagttggaaggtagcagaggttggttcacaagatttaaagaaagaatccatctccataacataaaagtgcaagggaaagcagcaaatgctgatatagaagctgtagtaaactacctagaagatgtagctaacatcattcatgaaagtagctacactaagcaacagac

SEQ ID NO: 369745 - DNA, 750 bp, Homo Sapiens
  misc_feature (668)..(668): n is a, c, g, or t
aaacttcccgggcccttcaggttgattcccacttgcctttggggcttcccaaaaggtgccggggaatttacaggacggtgagcccacccatgccccgggtcaaaatttacctttttagatttcacatattaccaaccagaagaaatgcttcctctgacaactgagccggtactccatcccccagagccctttgtgcagactattattgcagtttcctaacttgttatgacactccagccttttcctccaggtcatcatacaatccatttttagagtgattgttctaaagcacaaatcttaggtcactcccctgctcaaaaaccacccactgctcccccagttccacagaagagagctcaaatttcttagcttggtattcaagaccttccatgataggatccctgtctactactcagcttacctcacttctcccctcctccagccaaatgaaactgttccctgtgtatgttcaggctccctagcttctgctcacagccttctgaatatgaagaagggaaagtcccttaccattccatccgtctctacctgtttaaatcctccccagtcttcaatattcatttcagaggctgcgtctttcaggaggccaggtacaatttctctcccttctccatgcacttctcctgcggcctgtgccttacattctagcntgtgcgtatttgtatacttccctgttacacccttggtaacctcatcaagggagagactgactctgacattccagtgtctgaa

SEQ ID NO: 369746 - DNA, 1360 bp, Homo Sapiens
ctggtaccgggtccgggaattccccgggatgaaaatcttcaggaaatgttgggtgaactcttcactcctgtagaaacacctgaagcaccaaacaggggattctttaaaggcttatttggaggtggtgcacaatctcttgacagagaagaactatttggagaatcgtcctcaggaaaggcttcaaggagccttgcacagcatattcctggccctggtggcattgaaggcgtaaaaggggcagcatctggagttgttggtgaattagcacgagccaggctggcactagatgaaagagggcagaaacttggcgatctggaagaaagaactgcggccatgttatcaagtgcagagtcattttctaaacatgctcatgagattatgttgaaatacaaagataagaagtggtaccagttctgacaaccagaatccaataagtccaacttcagccagaaggaaaaaagttttccatttttattacattctttaggaaagttaacgttaaagggatgttcgtcactgaatactgttctttcctagcacagtcatgcactgttttacctcagtcatgtggctttaactgaggagtgttcacacgcactcgaaatggagtatatggtgtgtgccagttatgagttgaccatttgggaattaaacaggtcacacgtgacagatgaagaaaccaagggggctgctgaggagacctggtgcagggactaatcctggatcattcctgtattaaactttcatatgccaaaagggtttgtgccgttttatctgccatcagtgtttgacctgttttagggcagaggcaataagtcagaagtcttgaaagttgaaatagttatatgtgtgtcattggactggattataaacagctgtcttggactttccctctcttaacactgactggtcatcagtatcattagtgaaaaagaaacaaattgtttgttatcatctctttagacagataagctgaatggtgggctttaaataataaaaacatacacatagttgacttgtgtatgagctactcttggattcttgttattatagacttgtatttagttcatattttgtcaaaagcaaaacaagaagatacatcacttttcattgaaaagaaaagtgtagagcatgactgaattgctcatcatcctgggagtttcccatgtagtggctatgcagtgtggaaagtgagaaaaacctccattgtggtgaggagaatacttcaatgtcccttgtccttgttctcattaattcagctaaaggtggatttgaccaaaataatgctggttaaatttgtagaaatgttgaaattggctgtgttttaaattttgcttgaatttttataaaatgtttaacc

SEQ ID NO: 369747 - DNA, 921 bp, Homo Sapiens
ctggaccggtccggattcctcggatgtcaggagcagagccaggcccaggtggctccagctgcctgtcctgtcccctttcctaaagctccactgcacatagaggggagaaaaagagaatttaggcaactccactcccccttcacccccaaccctgtattctactctcccgaaaagagaagagaatcgcatgagtagcaagactgctgccaccagccacctgcttgtgaggccgccacttggcatgaagcctccacagctccccgcctgcaggggcaaagaggtcgacagcaatgtgtgatcccagctctctgccagactgagagggcaagccgtcttgtttgctgcaaggatgcttttgaggttggacaggaggttctggtcctgcctttggggccaacgctggctctgaagtgtctttttcagaggaattggactggagtgaatgggcacaggggtggagcgcagggcagccccagtcaccacgagctgtttcatttgtgtaaatacgatgctgaattttatgaggctgagttaagagtgggcactgacgggcccctaatatgtgacatgacgatttggcatagatagggatgtgagagtggagtaccttcctttctcaagtctcgagatgccagtgaaaccagtattccctgacttgggtttcacactttatcgaccaccccatggaggtcctgtgtagcctttggccacgcactgacactgcccaggccaagcaaaagcagagtgtggttaaaagacaaggggtctatgtcatcatccccttttgctttatggtaagtggggctaaacataaacaggcccccttttctcaaagccagaaggaccttgggcccccctgggggcccaagccccaaaatgtggaaaaggggccctaattccttttaagccccaagccttggc

SEQ ID NO: 369748 - DNA, 317 bp, Homo Sapiens
ctgtcagtcaagaattttttccagcaagtaaaatcttcataaatgagtgaaaaaaaacaactttcagagacaagaaaatgttgagaaaattcatcgctactagactagccctacaagaaatgcccaaaatcatttcaaacatgaaagtgaaaaatgtatattcaccatcatgaaaacacatgaatgtgtaaaactcacagggcttataaaacaatgacacaatgtagggagataaaggaatcaaatatcaacatggcagatttttaccaaaccacagaggcatagaaaaataatcccgggaatccggaccggtccag

SEQ ID NO: 369749 - DNA, 986 bp, Homo Sapiens
gctgggtaccggggtccggaattcctgcggatctcctactaatttaaatgagctttacctgttgtgaaatcttcatgcttagaactctttgtcattcactattataaaggctacgctacttagcttggcacagggatggcctcaataagtcttttgcctgaacagccagcctcatctcttcacctacgtctatcacactgagctgctcattcttctgggaacatggcatgatgacaaaacacatccccttccctctacctggaatatctttccagcttacctccatgaagtcttccacattggcaaggtgtttcatcacttctcctactttgttctcatagcatcctgctgacccctttttttcttcttatctcaccatatgttagtgatccatcccaccatatgttgtatatctgtatgtcccattaaccatgggcctcctgagagccaaaaactcatctaattcttatttcatatctctgtctgctcctagcataatcataagcacatggtagagactcaattaatgattgtcaagtgaataacagagataacagaggtgactggaagtgtttgacagttattggtagatacattattttctgatgaataccaagaaaatcatgatttctcctctaagtgagaatcaaagaatcccaaaggcccacccaaaaaagacaggacatcgtgattcacaacactttatgaaatcctttcatttggacaaattactgaagcaaccctatttaatgtgtccatgggttccaaagttgtccaggggaccattattcccgcaaaaaaagggtggggacaaggccccaacaaattttccccaatggcgataatctaacaattccttttttcgaaacaaaaaaaccccaatctggattcacacttacaaagttactactaaattatcacgctcggagttcagaggggataaacccttgccaccccatgtccgcactggcatttaacaccaccca

SEQ ID NO: 369750 - DNA, 808 bp, Homo Sapiens
  misc_feature (49)..(443): n is a, c, g, or t
  misc_feature (481)..(530): n is a, c, g, or t
gggaggagacacccctcgtattgtcttatgcccaatttcttcctccaannnnnnnnnnnnnnnnnnnnnnnnnnnnnnnnnnnnnnnnnnnnnnnnnnnnnnnnnnnnnnnnnnnnnnnnnnnnnnnnnnnnnnnnnnnnnnnnnnnnnnnnnnnnnnnnnnnnnnnnnnnnnnnnnnnnnnnnnnnnnnnnnnnnnnnnnnnnnnnnnnnnnnnnnnnnnnnnnnnnnnnnnnnnnnnnnnnnnnnnnnnnnnnnnnnnnnnnnnnnnnnnnnnnnnnnnnnnnnnnnnnnnnnnnnnnnnnnnnnnnnnnnnnnnnnnnnnnnnnnnnnnnnnnnnnnnnnnnnnnnnnnnnnnnnnnnnnnnnnnnnnnnnnnnnnnnnnnnnnnnnnnnnnnnnnnnnnnnnnnnnnnnnnnnnnnnnnnnnnnnnnnnnnnnnnnnnnttacctatggaagcaaaccttccattcccctcagatcnnnnnnnnnnnnnnnnnnnnnnnnnnnnnnnnnnnnnnnnnnnnnnnnnnacagcttaaaatctgagaggggaatcctaaaatcaaaacagggcaattaatccacccagttttcaggcaagtaatatccctgagtaagataatttttttgcaaggtttaacttgaaatgcaacaacagcaaacaataaatagcaacacaaaataaatcaagaatttttaaaattatttaacatagagaaatagaatataacactaaaaagatgaagaggggacataccatatttaagacaaataaacaaccaatactgactaatttttaaaaattaat

SEQ ID NO: 369751 - DNA, 990 bp, Homo Sapiens
  misc_feature (599)..(915): n is a, c, g, or t
  misc_feature (970)..(970): n is a, c, g, or t
aaggccaatacagcgtgtttggcggagtgagtaaggtggagaggccaaaataagatgggttcactgacaatatataggtcttaatgttggggtcccaggggtgggtgtcaagagagggggccgagagtttctgagggttgggaaattttccgggagtggggattccgttccgaaatttccgactcttgtccctttgggccgccaacaattggggcgaatgccctctttgaggggttcagtccagggcttcattttttggcggtctgataaaggccgggattagccaagtccccagatccttcgaaccctggttttcccttctgccctgctaatggggatgttttggtaatgtttgctcctgccacagaggaggggcagggaacaacggtgacattcacagtgggaaattttcatactggctggaagcatccaccaaaattaaatgtatggattatttgtgggtttcagttttcagactgttcctgttccccactgacacaaataattggaaattgactatagtagctctttgagaagattatggaaacacagtgaacgattgatgcagctggatgaattgggaatgtgggtcttctaannnnnnnnnnnnnnnnnnnnnnnnnnnnnnnnnnnnnnnnnnnnnnnnnnnnnnnnnnnnnnnnnnnnnnnnnnnnnnnnnnnnnnnnnnnnnnnnnnnnnnnnnnnnnnnnnnnnnnnnnnnnnnnnnnnnnnnnnnnnnnnnnnnnnnnnnnnnnnnnnnnnnnnnnnnnnnnnnnnnnnnnnnnnnnnnnnnnnnnnnnnnnnnnnnnnnnnnnnnnnnnnnnnnnnnnnnnnnnnnnnnnnnnnnnnnnnnnnnnnnnnnnnnnnnnnnnnnnnnnnnnnnnnnnnnnnnnnnnnnnnnnnnnnnnnnnnnnngtgtgtgtgctaataaaaatttttaatgtatagctttcaatcccgaggaattccnggaccggtacccaagccttc

SEQ ID NO: 369752 - DNA, 878 bp, Homo Sapiens
  misc_feature (65)..(73): n is a, c, g, or t
aggctggaccggtccggattcccgggatgtactttcaatgacaaatgtttgttagctgtttaagnnnnnnnnntcctgggtatttcaatgaggaaagtgtttaaatgatctattctagtataagactccaactagtctctgccaaccactaaacaaaagttctctaaaaatcacacctggtaggcactaaccagaaagataataatgaaagcaaagttgtattaagcacgtactatgtcctatgtatggtgtatttacatgaattgttatcatcagtccttatagggactcaacatgtgaccgtatgctttacagatgaaaatagtttaagtaatttgtccaaggtcaccaggtggtagtaaatggtaaaccaggatttggcctcaggcaatctgattccagcatatgctttcaatgaccgtgttattctgtcagtcaaggtctgctagttgttatatttttcttttctacagttaaacagattcctttttctcctccagcaataatatataggcaattgtatgagaagctattaacaacggtcattgtggttagccaacggagttttgctagaacaaagaaaataaaatacaacattccttttaaaaatctgttaaatcctttcttctctctctttacctagtgcttatcattcagaacaatcaacagttaggggaacttaatgctttcttctttggagagtgcaatatcctacaatccaattaagttaaaccaattaaaatgccatttgtaaacccaagatgtttccaggaagcttgctataggctgtgggaacatttttcaaaaatcatggcaaagggagaaaaaagaaatgccctaccatttagaaagtacaatttttgtggaaacttccaggt

SEQ ID NO: 369753 - DNA, 153 bp, Homo Sapiens
tcagcagcacatttctatttatagtttctaggtgatttattttctgcagactttcttgcatatggtcaagcccaatcatttcatttaagttttataaacgtctgtattagaggatggcattttaaaattctttcatcccgggaattccggacc

SEQ ID NO: 369754 - DNA, 1107 bp, Homo Sapiens
ttgggaaagttggagagatattcgctcccctaatttaatgtttccacgtgctgctttatcgagctcaaacaacctgggttgaattgggggagttttctcgccacttggtatttcccgatcacaggacctctccctttttctatcgaggggtttacaaggagtccccgtggggattcttacacaggggggcggctacctcggtaaaaagggggagggccaagggtgaagtgggccctaggtgagaaaattacgaccgttggatcaggtgtgccaaacagggggggattgggggaccggttaagggtgtgcccaggagatcccagggggggtggtgaatagagggagttcccccctctgtttttccggggtcacaggggtaagtggattcctggattcccccagggaggaaaggcataggttcggtggtccccccaatgaggggttaggcgggaggttcgtgtgggaaccccaggggatgcccttgggggccctcctcgttacccccttgttcccattgtaagtgtgaggagaatcgtctcagccacccaaccggagagggtttgatttccaagagcccagacccctcaggaaggaagatttcagtcgcatttccaggtaatttcccaaggcctcgttcctgtgctctgacatcctcagcagcattggtgcagaggccctacttcttctcaggctgttcccagcgggtgatgggtcacaccagggacaccaaagcaggaccattcctgggacacagaggactcctttgatggccaatagtggctggaggactcttccacggccttgatcaactctccttagattacctgtgttctagaatgcatccaaaacaccttctctccttctgcccatcacttgggggcacacttgcatctcagtctattgccttttccagagttgtaatgtaaaaatgagatcatttctgccttgattgtaattgtaatctgcccaggtctggatcagggccacggctcccgagaacagcaggaggagggttcgggactccatgacccgcaacttggatccgggaattccggtccgtcccagtgcgggggggagcccaacaagcacaccgaaaacaacaataaa

SEQ ID NO: 369755 - DNA, 1320 bp, Homo Sapiens
tttgaggcaacccccaccggagattcctttggtgatggcctcccccattctcaatccagtgagcccaggcctttccccaggctataatgtcatgttcaggggatggctcttgtctgcaccctatattggagcccacagagtggcatgtctgaggaagcctttgcacaggtgaacggacagggaaggcaggcagcccatccattgttccatcaatatgcagggcctgctatgtgccgggcttcatgccacgatacactatgtgtgataagtctcacagaagcccatgtccatcagaagcttttctgctcctcaaggcaagagagaaattttcgtgcactcagactttgggagggcactcatgtctttcaccttgttctatgagttctccaatccttagtgatttatttattttttgattgattggtgatccatgctaagttacgtcctttctggagctcagtataagatgaaaaaattccatgagctgggtcagaaatagacagtagcttttgctttcatgtagacctccttttatcagggatggaaggaacagtacaggattgtggccacagacactgaggatggctcctgggtgtggacagggcacagacaagggcctggtctgagggggtcctttgtgcaaggtgggacagagaggggcccagagccacgtctgtctgcaataaccactccaagtttggttgctgcaggagcaggtccctgctcagagagttcatcctgagtaacgtgaaaagaaaggagaaaatgacatataactgaacaaatggaaagctaggattttcctaccttctggaaaaacaaggtttgtatcttttttaacaagtaggaacttttatgtatagaattatccaagaataatgtatttacaatgtgcatggtcttgattgtgttaatgaagctattattcacacataaaatgaaaatcatctggctttggaggcccactttgctgatggtgtttttttctgagacaagcaatatgatcagttatgcaagcaggaagagaagaatcagtgccagggcacagtggctgggccagacaggcggggcagtgccggcgcggcccttcagcatgcacatcaccctggaccaggatccgttgttgggcagcggggtgatgcccaccacattgcacatgacattgtagacgtccaccgacctgataggagcagctctgaagttggatttgaaatcaggtccgaaggccaggaagatgccccgcatgtccatgagctcgttgtcgtagccgtgccatccacgctgccaaccttcccgcctgccggtgaatctggtccggct

SEQ ID NO: 369756 - DNA, 905 bp, Homo Sapiens
ctggtaccgggtccgggaattccctgcggatcccaagagccaccccctgcattgataggtcagagattgtccagatccttagtcagtgcattctctgaaatgtggagagaaagtaatttgaccacttgcttgccctttgctgttccccatcatcaaccactgtcttcaacagcggagggtcccagatgctgcagggagggggagaactgcagggagttcaaataaaacattcacatttcacttcacacacactgtcccttagactttctcttcctatttaagcacatacatccaaccacactcaatcaaatccctgactgctccatgtgagagttctgcttccagcatgacgtggtctgaaagttcatctgaagacagctgctcactcccgggggctaacaccgccccttgcatgctgatgtccttgtagtcattggtctgatgccacaataaataattcctaaggctgatgctctatttctgccctgagactctcccctttttctccaagctgtgccccattccttgtcttagtccaggttccctacactccccaggccaatgcttttgaataaatcttgacgtcattgaatgaagtagtggtgactgctgtgcttgcttccaactgagacactctcctgctctcactcatcacccttaccacgctactcctacctatctccccttttatactaataatcttattgaggaaacaaccgccccagcctatttaacatctcctcgtaacatttaaaaaggggcggccgcctcttaaataatcccctccggggggcccaagccttaacgcggaacccaaagcttttcttttgtaaaaagagggggccccccaaacagaggaagtccggtaatatttaaagacctatagggccctttgggcaccgtcc

SEQ ID NO: 369757 - DNA, 853 bp, Homo Sapiens
  misc_feature (713)..(713): n is a, c, g, or t
gcggctgtccgtggagatcacgggcctagagaaaggcacctcctacaagtttcgagtccgggctatgaacatgctgggggagagcgagcccagcgccccctctcggccctacgtggtgtcgggctacagcggtcgcgtgtacgagaggcccgtggcaggtccttatatcaccttcacggatgcggtcaatgagaccaccatcatgctcaagtggatgtacatcccagcaagtaacaacaacaccccaatccatggcttttatatctattatcgacccacagacagtgacaatgatagtgactacaagaaggatatggtggaaggggacaagtactggcactccatcagccacctgcagccagagacctcctacgacattaagatgcagtgcttcaatgaaggaggggagagcgagttcagcaacgtgatgatctgtgagaccaaagctcggaaatcttctggccagcctggtcaaatgcaacccccaactctggccccaccacagccgccccttcctgaaaccatagagcggccggtgggcactggggccatggtggctcgctccagcgacctgccctatctgattgtcggggtcgtcctgggctccatcgttctcattatcgtcaccttcatccccttctgcttgtggagggcctggtctaagcaaaaacatacaacagacctggggttttcctcgaagtgcccttccaccnctcctgccccgtatactatgggtgccatttggggaggaactccccagggcccacccagggcccagttgggacaaggcccctaaccttcaaggtggccaatccagggtggaaacgggggcccttgttgccctaaatggggg

SEQ ID NO: 369758 - DNA, 859 bp, Homo Sapiens
  misc_feature (234)..(287): n is a, c, g, or t
gctggtaccggggtccggaattcctcgggatcatatacctacagagggttcaactaatctgtctggggcagttgtgggaaaagaaaagggtgataagatttggaaaattttgttttctttttctggtaagagtcctgaaataatgttcttgaaattcttatgcattgcgtgtattaccacactagcctataggcttttatttcataacattgagggagtgaatattatcattcnnnnnnnnnnnnnnnnnnnnnnnnnnnnnnnnnnnnnnnnnnnnnnnnnnnnnnagtgctaggcctggcagcctatctctgggaactgactcggtcaaagactgggggtgaacgtggagatggtcctaatgtcaagggagaatttctgccaaatctggagcctgttaaaataccagaagcaggtaagttattcattaaaaatgcaaattatggggtttctgttttcaaaaatactatatattttataatatagaggtaccactactgctaatataatttaacagagttcatatataaagattctttgaaagatagttcagtccccaaaagcctgactaataaacaagcaccatcatagatcctaccacattgggtcaaagccacattcaattataaaatgtgaaggtattttcttactttttagtatcagttcctaaaccaacagctagtaatatcagatacttttataaaggtctgcttttaataaatacctaatgaatttgtaacagatattcactgtatgaaacatgctgaggcaattaagtaggctctaatccaagctcctaacaaaattcactgacttttgggcaaattccttatctttctaaacccatatttgctcctaa

SEQ ID NO: 369759 - DNA, 569 bp, Homo Sapiens
  misc_feature (452)..(452): n is a, c, g, or t
ccctccttggcaaaatctcaggattattctctactttgactggaggacagaagaagctgagaagtggaggtactactttcttgtcagggtcgtggggccccagagaagactgaattcataacctcagcaaatctgccatggcaagctcaggtctctgaacaccagggccaggataccggggccagtgaacatggaaatcttgactccctagatgcctccaaccctctgagcctacaggagtggcctgtgtgtcccattaagggctaacatttgcattgcttgagaccttgcaaggtatgccctccacgtaaacgcagaatccatcccccaactccctccaggtcataacaggccttcaattaccaaagggacagcatctgcaaagggaggcagagactttacactgagggggggagacaggacttagcaaatctttcgcagcagggagccangaaggcttgggagggtgggggttggggattcccaaggggtgttttcaaaatatattgggggggccaagaacactggggttaaaaaagaaggggaaaagtcccacctggaataatggg

SEQ ID NO: 369760 - DNA, 494 bp, Homo Sapiens
  misc_feature (40)..(40): n is a, c, g, or t
gtaattataaagggcacttccttaccgggggacaaggggncacaagggaaaggccaaacatggagaagggagcccacaggcccccagctgtcctctagctggtttattagccatgaggcctgcctctgggctggggctcagaactaggggcaaggaagatccagggaaaagagagaggctggtttgcagcttcacggccaataggagggagccctcctaagagttaggagttgctgtgagttgctgtaggtgcctgaatcttctactctgggcaacaaccagcttcattcaaagtctggaacttcattcaaagtctggaacttcattcaaagtcttgtctttctaacaagacgaacaggcagtggcttctcttttcacagggaaaatccaaagcaaaacagcagttgtctcacttgagtttagcaatgctttccatcacaccagcggccactttacgaagacagtgccacaaaacatgatcatttggaacttac

SEQ ID NO: 369761 - DNA, 524 bp, Homo Sapiens
  misc_feature (153)..(167): n is a, c, g, or t
ctggtaccggtccggattctctcggatacaaactagaacacccacttcttggcaacaaactttttgctttgtgacatccaccaaccaaacctcaaatataactttaactttaaccctgactagaactgccacatttgtgattcttttaatttnnnnnnnnnnnnnnncttgatgttataatggtagcttttcttcccgtaaacctatatacctttgcacagagcaccagcttagcctgtttgggtttggcatggtgtgttcccgtgcgttgtctttgattctataataaaataaagtcttccaaattggcctcatttaggacaccttcaccctcagacttctactctctgcaaatacagttctgcctgaactctctgcctggatccattctatcattagctgccataactacaacctcaataccccatcttgttgtttcttagctcttaatttgttcatttaattgccttacttgaagtttctctatttcttctttgtaaactttctttagctggtgttcacag

SEQ ID NO: 369762 - DNA, 945 bp, Homo Sapiens
  misc_feature (880)..(880): n is a, c, g, or t
ctggtaccggtccggattctctggaatttctgctttgctcttaacgcatggtgctgtctccattctttttgttttaactgagctctctttatttgatcctttgaattctccctcatccagccctctatctattcacagtgataagaatgtgcctgatttcaaacacaggaaaattaggattaaaatggagaagcccaatttattttcaaaaataaaactttataaccagaacaaattttgctccacaaaatattatgtcttaaagagacataataccatatccttaaaatttcagattctgtattaagatttgtacattttcttaaatgtaacaaaattttgccattatgtgtttatcctacttgcatgatcaataacctccagcattttcctcatgaactcctatattttccactggggagtcagcgttgtgttcatccattcatttgttcatgcgtttgacaattatgaataaatggaatcattcaataatagcatattgtatccctcttgtgtgtcaaatattatccaaaacactgggaataagatggtaaatgatatgctacccttaccctcaagaaactggtcattttcttgatgacagtgaagtcaattgatgattccatttgtgcctgtgtcttctgctctgtgcaatccaaagcttttttgggaagtgtttcctccctatcagaagtcacagatgacttggtaaaagaaaggaattataaattaagaaaatggaccttgggaccttggagcccataggagacataaggttggagtttttcagctaaccaaaaactctggctcttagaaactctggggaagccttccctcaatcttggggaaacaaactggtttgaaaataaacccctaattnttttaaacaagaaacggggtggggcctttatggggtctctttggggggtaaacaccaacccctca

SEQ ID NO: 369763 - DNA, 842 bp, Homo Sapiens
  misc_feature (622)..(622): n is a, c, g, or t
aaaagaaaaggtacatcagacatgactgcctgcatgaagtcaaacagggtaacaccagtgaagctcaagtcaagagctgtggatattttgtctaaccaacaagaagtctcaagaaatcaggcagtgcagctgcctgcttctcagctatcgtatccagccaaaagatgcatgatgatggagtggtgggggaaggccagttcagtatcctatttaaaagtaaacttcctggaataatgggatatatgtgggagatacagacataggatatataggatacagctgttaattattttaggcctcaagtgactttctccattgctttcacgctatgccactattttgcttctttaatttttttaaccttgcttagtattctatagtttgcccaaccagttttacgtccaaggaaaattagccaatgcataaaatatacaaactatgaaaggcaaggatcaggaaaccagagactttgccaccaaatctcagattattagaaactaggtgtcagggtttatcaagaaggccaggaaggccttttggggtaagccttacattcatgaagaacctcgagggtagatttttgagagcattccaaatgaatggtctctggtcaaatgaatgnatgggtcaaatgaaataaatctgcccctcacagagatacaaaaggaaaaaggaatataattccataccatttgggtttaagcccttacatttcatgaaagacccctcaaagggtagatttttttggagaatcattccaaaatgaaattcgaaatcctgccccttccccgaaggaccccaggaaaagggaattaataattccataacccctatttgcgcat

SEQ ID NO: 369764 - DNA, 947 bp, Homo Sapiens
  misc_feature (90)..(90): n is a, c, g, or t
gctggtaccggggtccggaattcccgcggatgtatactctatagtgcacagtgcatactcaccccaaaatatgtttattcatgttgttantcttcccctcccttttgtcattttgtctgtttcaagtgagagactgaaaaaagtgggtgtaagtaagggagggaaacctgacaaatggagaaggaatgggaggccatttgctgagctgcaaagagctctggcctgtgagctgactgcagccatcagctctggatcttgccaccataccatgaagctacctttccttatctccaaaacaagggagttgagccaaatgctctctggagtctcatccaacacaaacattctaattccccagacaccagcaggaggacattaaaaaactagctgatgaccaaggactactgacacttacttttagaggcataatttctggaagtgacctcagaaatccactgattttttgccaaagaaataggctgtgataagtaagttagtatcagtctcttttctcatatcaactgcttgccatgtttctttggtgagtttggtcacagtctgttcaactagaaaagcagttctggcagcagggtaggaaaacaagaagtgtcaggatgactaaccacagtttcagagaagtagaagatggcttttgacagataaaagcaggattattattttggagtgttgcatgcctcctggttcatgcccttggtccaaaaagagattgctatcatttttctccagttgcagacaccaccaatcagcttttttgccttaaaaaggaattttgacctaacaaatttgaatatttagaagggtcaaaaaaaccaccttttataattccccttatcctaaatcaagttcagatccccccaggcctcctttttttggttaaggaaacaatttttaagccctgttttttaggggaacaaaagaaaaaagct

SEQ ID NO: 369765 - DNA, 910 bp, Homo Sapiens
ctgagcaggtgggtctacgcgtggctttgcggttaaaaatatccacagtaggcctttaaaacaacattttaaaacgggaggcacactaaggggtttgaaatattcaggtccctgttcaccccccccgggcccatggcttttccatttttactcccctccaagggaggaacatgggggggtgggaataaggtaggacttggcccctagggactgggggggcttcttggtggggaatttctcttccaacattcccttgggctgtccagggaagttgagaaagtcgccctatactcttcggtttgggaatgttgcttaccgggtcatggggtggtcataacctagggcccaggcaactgtttgtggaatcccaggtggccaagcccacacagcggacgggaaaggggtagtgtatgaagaatttctagcataaaatcgacacccaccagagacagggttgtaagtaaggatggccaggagccttgggtaggtcctagcctgcaaaagctgaaatgaagctgggtggtgggaaaagacacacatttggttccaaagtctgattaaggcaatctaatattagaagcacacaagtctggtttttacctaaaaatacttaatagagttttcctagccccataaaaaggttttgggcttgtgatacaatgaaataatgcctaatggaaagagtgagtgactcaactatgaagagtaaaatgctcttttctgctatcatgaccctccttacgctgatcagtttctgttggtgctgcttccagaagcagaacattctagactgttggaatattaatagtaatgactgctactgtgtagccgctacaggcagacacatcatatatattatttccacttaagacataaaacaatcatcccgggaatccggaccggtccagcc

SEQ ID NO: 369766 - DNA, 863 bp, Homo Sapiens
  misc_feature (108)..(235): n is a, c, g, or t
  misc_feature (254)..(283): n is a, c, g, or t
  misc_feature (776)..(785): n is a, c, g, or t
tggcagggcaggattcccccctggaggttccgggagttttgaggacccagccctgacccaacctgggagaaacccctgtttcccccttaaaaattccaaaagtagccnnnnnnnnnnnnnnnnnnnnnnnnnnnnnnnnnnnnnnnnnnnnnnnnnnnnnnnnnnnnnnnnnnnnnnnnnnnnnnnnnnnnnnnnnnnnnnnnnnnnnnnnnnnnnnnnnnnnnnnnnnnnnnnnagaatgagactctgtctcnnnnnnnnnnnnnnnnnnnnnnnnnnnnnngaattaccgaatcatactgacattttgttctctctgatcataccaagcgaagaactaaacaatctcttttaacgtatataattgtagaacttaaactatccttcccatattagaagaaattcaagtggtagaatctagggtgttgattagagtggaactccgcctttctctgtttattcataaatcttcttttccctcaaatctcagcagtttttgccttcttagcaaacagtgaagaccttgtaatcccaattgttagtaaatgttgcatttccataaaaatgcataaatcatcaatgcaggatttctgctatgtggttattaatgcaccatgagttaatttatgttataatttagtatactacttaggtaaagactacacactggattcagtgtatactgctcgggtgacgggtacaccaaaatctcacaaatcaccactaaaaaacttactcatgtaaccaaataccacctgctccccaaaaacctatgnnnnnnnnnnggactaccattttatccatcaatcccactaccggtatctacccagaacaaaaaaagttattatgtgaaaaagatgctt

SEQ ID NO: 369767 - DNA, 911 bp, Homo Sapiens
  misc_feature (710)..(710): n is a, c, g, or t
tgtttgccatcaaagaagggcgggtgaccacgggcgtgtccagcatcgccagcgaagatagccgcaaggtggcatctgtgctgaacaacgcctactacctggacaagatgcactacagcatcgagggcaaggacacccactactttgtgaagattggctcagccgatggcgacctggtcacactaggcaccaccatcggccgcaaggtgctagagagcggggtgaacgtgaccgtgtcccagcccacgctgctggtcaacggcaggactcgaaggttcacgaacattgagttccagtactccacgctgctgctcagcatccgctatggcctcacccccgacaccctggacgaagagaaggcccgcgtcctggaccaggcgagacagagggccctgggcacggcctgggccaaggagcagcagaaagccagggacgggagagaggggagccgcctgtggactgagggcgagaagcagcagcttctgagcaccgggcgcgtgcaagggtacgagggatattacgtgcttcccgtggagcaatacccagagcttgcagacagtagcagcaacatccagttttttagacagaatgagatgggaaagaggtaacaaaataatctgctgccattcccttgtctgaatggctcagcaggagtaactgtttatctccctctcctaagggagatgaaggacctaaccaggggccactgncggcctggggctgcttttaggggaaccaaagtgggccaagaaaagctcaccatttttttgaatttcaaaatggctactggtccaaaacgaagaaagtcccctccatcctttgaaattagaactaaaagcccccggcttgaaaaatttcccggggggaaaacccaaaccccaacccgaatgtgaatggaacaggaacccccc

SEQ ID NO: 369768 - DNA, 937 bp, Homo Sapiens
  misc_feature (533)..(533): n is a, c, g, or t
  misc_feature (669)..(697): n is a, c, g, or t
ctcctcgataccccgcagcgccgactctcaccgctacttgtttcacgcgagcccttgcaccactgcccgcaggccagcccgccgggcccgcgcacgtgcgggggtgtcgtgcggggacgcaaatccatcccggcgcagagtcagaggcagtccgctcaatccgctggcgcggggggcgggctcccactccctccgctcccgccccgtcccggttcccgcccttttcaaagtcgccccgctagccgaatagctgctcggtcacctactccttcatcacaccagagcatcttcagactcagcatccgtttcaatctgcccactaaacatggcatgtgtagaacctattttgtaagaaactcgtccatatattttccattttaaaaaaaggtatcaaggaatttcgtcgacaatgtaaaaaactactctatgcacttagaaaaatcgtgaattcgaaaagttggagaaataatttttcctaaataaataatcattgggcagtaagttctattctacctaaaataatttgcttgaanatgctgtaacagctacttcttatcaaggaataaagacaggcatcacatcctggtcaaacatgcaaaaccactcccaccccaccccatcctaaaactaaagaaaccttaggctgtcacacgtgaaagtgttatgacnnnnnnnnnnnnnnnnnnnnnnnnnnnnnaagagtcttgatttggtagtgagcaatttcatttaaacctatcgtttgccgtgcgtcgtgttcagcggaacgcgaatgaatgggcgggatgaagccacaactgcttgattcgcaagcccccttcccacaagtgagacagaattgtccgattgggcgcgacgaactgttccagccacggcccgacatttctccgacaaatcgtggaatagcgaactggcgagtactaaaattaacgaaagc

SEQ ID NO: 369769 - DNA, 1160 bp, Homo Sapiens
  misc_feature (502)..(604): n is a, c, g, or t
gcgggggcacggcgagcgggcacggagtccgggaacggagccaagagacggacccgccccgagacccgcaagcagcagctggtccggtccggaattctccggataatttcttaaataaatacagacggggtctcagcatactgccatactgcctcctcaactcttggcctcaagcaatcctcctctcttagcctcccagagtgctaagaggatagctgggaggcatccaaaaccttgtcaatttacatcaagggtaatgagaatgtcctattcaccatgactcacagtaatcttacttctggggagacaatgcaatctaaacaaaaggtcatctgtacacacacagtaaaaatctgggagtaactgaagacagagttggtaagtgaaataagaaacagttataagaaattaaactatggtatcaataggcaccaggtaaaaggtcagttgatgttagctgctactttttttgttgttctgagacaaggtctcactctgtcannnnnnnnnnnnnnnnnnnnnnnnnnnnnnnnnnnnnnnnnnnnnnnnnnnnnnnnnnnnnnnnnnnnnnnnnnnnnnnnnnnnnnnnnnnnnnnnnnnnnnnagaacatgcccccacactagggctaattcatgtatttttctgtagggatggtgactccctttgttttcaaggcctatcgcaaactcttggcctcaagccatccctcctggcctcagcctccccaaagtatttggtgattacccagtggtgagcccaccacaaccttggggccagccttgctacctttttattccaattaattatttgttccacgttccaatttgaaaaattttaataactttctccaaagggcccattgccaaaccagtgatggttattccgcaacgattggtaaaaaaacctttattaccagatccgttcccctccatgtattaccaccaaatttaagtgtcccagaccccccccactttggcgtgcctttttaccccaaaaaatccaatggccttaatccccacggttttgtgggtgttccacccccctccctgggaaatccccccgtattggggaaaaaattctcccaaattacttaagtttgggggcccagagagtgggcgaaaagcaaccccgtggggggcacccgaccaccccaccaaaa

SEQ ID NO: 369770 - DNA, 555 bp, Homo Sapiens
  misc_feature (378)..(476): n is a, c, g, or t
ctggaccggtccggaattcttgcgatctgcacctagcccactgatcactctctctgcttacagaatatcagaagtcattctagaggcaaatttgaagagtggaaaaatcactttttctgaatgatcttgtttttggtgtagatgtttttattgtgtgggttagtttaatgaatacataaagactaccagtaccattctgtctttactccgtggcatctgtggaataaccctgctaatgtaacacgtgagaaagcctttggtcatgccacccactctaccagttgtccccaccatcccccgccctcctccctgtgagacactgggccaaaggctcactacccctgtgcgttgtccagcacacagacactatgtgcattnnnnnnnnnnnnnnnnnnnnnnnnnnnnnnnnnnnnnnnnnnnnnnnnnnnnnnnnnnnnnnnnnnnnnnnnnnnnnnnnnnnnnnnnnnnnnnnnnnngtaattttaatacataataacctattggtgtttttatgatcattactaccattttgtgttgccattagtgcaatttttt

SEQ ID NO: 369771 - DNA, 526 bp, Homo Sapiens
  misc_feature (494)..(494): n is a, c, g, or t
  misc_feature (510)..(510): n is a, c, g, or t
caaaagatttatatacaggcttgaatccagaaattaaggttaaaagcataaatattgataatttcaactaaattcagaatggtttcagaaagatatgatacaacaatttagaataaaacaaagcagaagagcatcatattttggtttgcttgagatatatataaggtgcaacaactttttctcttgaggatgctgtgggacaaatgttagtgtagatggtatctgctggcagattaaagtacacactatagcaatatgattttccaaaataaaaaagaatgagagaaattgaaatgaaaatgataacaaaaggtggggtcggagagcactaatattggtctgaaatatttgtgctaacgaatgttgttacctgaaaataacaacactcctctccagcagattcagggcatgagaagcacaattattgaaatcaagactttactcagagaatcgacaaggtgagtctaagggactataagccttgcaggatttcngctactctcagtgccnaaccgccttaaaatta

SEQ ID NO: 369772 - DNA, 915 bp, Homo Sapiens
ctggaccggtccggattcttcgatatttcgagatttaccgagttcccatacaccctaaatctagttttctctattaacaccttatgttatatggcacatttttataattaatgaaccaatattgataactgaagtccatagtttagattttcttatattttacctgatatccttttgctattttaagatattattgagattactacatggcatttagtcattatgtctctcgaagcttgtcttggctgtaatagttcctcagattttccttgttattaatgaccttgacagttttaagagtactggcctagtattttgtataatgtccttcagttgggatttgtctagtcttttttccttttatcattattaaatatgggttttttagtgatagaccacagagataaagtgccattttataaaaagtattattaccttatgtcaacaacacagtgtgtactaccaacattaattattacaattgatgtttacattgatcacctggctaaggtaatgtttgtcaggttagtgcactacaaagttactctgtttttcctcttcaataccttactttttgggagaaagttatgctgcagcccacagctcaggagtaaaacttacggcttttatctagcccaatggccaattatctataataaataatctccaaaacttatttctgcattcggaaaatttgtccaccttccccttctcacttgctccaaaacctcccacataatgcccaatgcccgcagtctttgcaaaaacaattccattcggactaacttttcggggtcaccccaaattaaatccccgcccttggcttaaatttttccgcgggtccacctttttttctaacccctttgggccaatctgaacagccctcctttccacccttgcaccccagggtttcct

SEQ ID NO: 369773 - DNA, 933 bp, Homo Sapiens
ttcttggttcggttcaacccagggctgggagttgcagtggccaccaattctccggctttacttcaaggctctgcccttttcagggtcaaaattcaaaccaattcttcgccacgcaaaggcctttttgagtactggggggaccacaagatggtgcccccactactcttgggctaacagttgttattttgcatagagaccagggttttttccatgttacccagactagtctcaaaatcctaagaactgtaggtatttttctttgttgttactatagatattaccaagaataactactattacatataaaaccctgcctctttatggctccctatgtgttttattgatgtcacaaattatatcattttgtgttgtgaatctgttggcacagatttatagtcatttttaagtctttgttgtctcaaatatataacagaattaaagtattctgtgcatcttcattataattacaaagaatattatgattgtgtacataattttctctattagaaaatgtcatattttacataattttgtgttgctctcatcattatttcattttttaatgtgaatgactatttagcattttttaagacaggcctagtgggtataaatttatacagtttttgttgatcttgaatattctttatttttattttttaattcatttgaaatgatagttttggcagacatagtgttcttggctggtacttgccattttttcagcactttgagtatgtcatcctacaacctcttacctgtaagtttttttgctgagacatctgctggtcatcctgcaggggtaaacttgtacatgctaagtcacttttttcttgctgacttcaagattctcggtgttttaacttttgaatctctgattataatgtgtcttgtcatgggtctccctgtgatcccgggaatccggaccggtccagc

SEQ ID NO: 369774 - DNA, 586 bp, Homo Sapiens
ggatgatgccaggtttcagcatactgggtgggtgttggtgacgttcactgtaaggagaaaggctaggaaatctaggaaaatgaagctctggtttcagatgttcattttgtgacacctgtgtgacatcacgtggggagcagggcgaggctgcctagcaggctgggccagaggaccacatggagctcaggttgaaaggcaaaggcactctccttttcctttagggagcagcggtttgtctctggaattgcttccacccaatggcctccctgacagctccccttgagtgcccccaagtcagcatacccaaacagacctgctagtctaccctccccatcaccacagtgggctccctcccagctgtccagtcataggcactgccttccaccttgccacatggccagcacccaggcatcctcagaaccttgcacatgtgtctgaagtccccaccagccatgctccatcactcctgcctggacagcggcccctcggcgtctgctctccacctgttctcctgccacaggggacccttccacggcacaactctgaaattcatgccccccaaccacaagggctttcccccctccag

SEQ ID NO: 369775 - DNA, 1108 bp, Homo Sapiens
  misc_feature (134)..(134): n is a, c, g, or t
  misc_feature (794)..(794): n is a, c, g, or t
  misc_feature (800)..(800): n is a, c, g, or t
  misc_feature (802)..(802): n is a, c, g, or t
cactagacacggaggacccacgccacacgtcgatgtgcttctctgtacatccttcgccgcttgcactcgccgccaggttcagccctcgtcgtatctcagctgagcacggcgccgttagcttgtggtacgatcgncctcgatcgatgctccgtcccggtgcgccgacggcgacgtagtgcgcggcatgtgtgcgctggcgatcaggtaggagagaatgcgctctagtcgtgcatcattctcgtgtcagccgcgcgggtctcccgcgctggtgggcttcccccggccggcgcggcgcgccgtgaccctatgcgatgtcccacagcgggcacgctaggcccggtgcccgtgtggctccccacctgagtctcgcgtcgctaggtagttgataagagtcagcctgatggaatgccgcctcgcgcgttcgttcagcggctagcttgccgccgctacacttgcggtgccgctgcgcgggggacgcgcgcgtctgccatttcatataggggcgcgagccttccacccccccgcacccggccaagcagcaccgggacgcccgttcttttcgcgctgcgccgccgcccccgtgccgaccatccggcctcatggccgcccggcgccggcacgctcggcctgtccggccgagcggtccgtcgaccgccgtcggtaccccggtctgcgttcgtccgcgccacagcggcacaatcgcgcctctcggcacgccgcgccggggcggggagcggtgtccccctcttttaaaaggataatttggaggttaaggacccacatttaaggtccangggganangcctgaaaaaggaaactaaagttagagacagaaactaagtaaagataagaaaaatgagctttacaaagctactctagtggcatctgggagcagaaaaatccaatttgtttctaagacggtaatgaaagtgaaatccaagatcaacaatcttgtcataaaattaacaaggaatttaacatacaaatgagggaccaggagtagctgtcatttgatatgtatcgtagctatagcaaaatgaaataatgtgcaagcctctcacttattgagtttagtggcataggaaatctttgtttgcaagcacatgat

SEQ ID NO: 369776 - DNA, 1620 bp, Homo Sapiens
aaaaagaaaattttgccaaccaatgggtttccctttttcctatgaaaaaatgtaaattttcagattaagttttaacccccataaggaccgcatgatttgttacttccatatacccataggttcagaagaacttagctatctagttggcctcttctctgttccattataacatcagttaccttagcctggatcactaagtgtgagtctcacccaccatactggtaccttcagctattacctgtgttataaatctcatgtcccattcaaagtactaaatgactggatggcacatatcccaataagtatcagaaatgttgacagccatagtgcagctgagtttagaagcaactatgacaacatagggaagtaaggataaatcacaagaacacctaaggtggtcagctccttctggtgtgcctgggacttgttttgagtttagcaaaaactttacaagattaaaaatcagagcaaatgaatttcttaagttcaagatatgtactctcaatggagaatcgcttttgggcagtggttaaggcctctgatgtgctacttatcagaaaaatccacatatatacaaaactctgctaaaagttttgtatccagggaaagtcccgcatccagggaaaccctcaatcccaggcactttagggcagctggtcaccctgagaacactacccactcgttccttaatatcactagagaaaaggtaagaactttcaagggcataacctttaagggcatcagtccccaaaatatttttacatcactagctaatggctagttcctctaagcttgctgaaaggctaggaagtccagaaataccttatttaaacgtgttaactttaagaagagttggtagtaatcaagcaaattagtgagcaggtgtataaaagctcactcttgaaatctgttttcagacaaatcttctaaaggttcttctagctttgtccagttatatggtattttactgtattctctttttgcaattaatccagttttgtatgtcttttctttcttttttaggtgaaaatattctatgccaactgttttccacagtcctgcattatatattaaaacaaaggctgccagctggagacacagccctccgattacaaaggcccagaatgttacttttaactgtgctccaccaggaggtctggccttgggaaaagatggcgaaaggaatattctcagatatgaacattttttattctgcctacaatgctgtgatctagttcaacaactgcagaactgttctcatcttaatcgctgtagtttttctttctttactcttttgtataaaaggttagtgtcacagcttcactatcactaataaaaagatacaaatatgcctttcaagtcagggttggaaaagcaaaactgaggtgtgaggttacactggtcctaagaaaagtacccaatttgggttcctatattttgtcaaacagttgggtttttaaaaaaattcaaaactcatgcatgttacctacttgtcatgtgtgaattatttctcacaattttaattaatctgtgtgtatattagttatataaagcaatggatttccacattcttaaagcaggaacctatattcaccagaaaaggatcctcctgtttctcat

SEQ ID NO: 369777 - DNA, 1337 bp, Homo Sapiens
  misc_feature (245)..(278): n is a, c, g, or t
  misc_feature (973)..(973): n is a, c, g, or t
  misc_feature (1053)..(1061): n is a, c, g, or t
  misc_feature (1241)..(1241): n is a, c, g, or t
gaaaaacgacctaccccgcccgcttaaaaaacaagctggtacggtccggattccctggatctctgtggaaaactttttcttacacaacgatccactgtggacggttactttcatctgtttatttattgcccatgcagagctcttaaggtttacaggtgggagcttggggctgtataaaaaaataatccctgccctgagttgacacctgcgcttaggaaggaatggctgactatggggctgcagtnnnnnnnnnnnnnnnnnnnnnnnnnnnnnnnnnnaagggttagatttgatgaccaccaaagttcagcccttttcacgaaaaggagaaagcagcttttgactttttaaaaaacatatgactacagctggcatctagtattgtcatgttgctctaggtccatattctgaatttattcatttccaatagcctaatacaaagagtatatattgagcactttcttcccttttcaggtaagtctctgaatgcagcccaggtccaaaggaattttgatgacacagtagtacctatgttttaagctatatttttaatttagaaaaatggataccaaattcaaaccgaactcatcagaaggaaagatttggaaatcagacctttttccaaaaagggtcatcttgaggtaaagggctaagaaccggcactttccctcctgcctgggggggtgaaggcctggtgcaagaaccccacccaaaaacagttggcccttttggggccaaatcaagccttccacaacattgcccaaggggaaagacccccccaagagggtggaatatttaaccctttcctttttcttttggcccctggggggggccccccccaaagaggacctcttcggcacacacccccctctgtgaaaggggaaaaccctccccacgcgttaaaaaacatttacatactgtctcccttccgaaatgggagggaaaatctgatttttccccccggggtgagtcnagagggggcgcttctttttccccaagggggcctcttctcttgtgggagccctccttatcatgggggatgttggccataannnnnnnnnccacaatctctttttgggaaaacacttgtctataaggggagacccccggttccccctgtgcaccaccttcaaacctccctaaattgtccgagaaaaaccctgtggaacctttttgagaatcggtgtgcaaaaaataggaaaacatacaccctttgggtgtgtcttcaccccaccaattcnttgtgtggtggggggaaacaaaaatattcctctcaaattgcatggtggacacccctttaaaagggtgtaatccgcgcaaaaactccttctaacccc

SEQ ID NO: 369778 - DNA, 1173 bp, Homo Sapiens
  misc_feature (182)..(549): n is a, c, g, or t
ctgagagacctctcatttggggggtggctatttttccccagcaatgggttttagggtaagtttttcaaagttccaccggggattaagaattagggaggtttccgccacccaagaattccagttcagttaaaaagacccttggtttaaaaaaaacagggctgccaaaaaagggaaagcttgcnnnnnnnnnnnnnnnnnnnnnnnnnnnnnnnnnnnnnnnnnnnnnnnnnnnnnnnnnnnnnnnnnnnnnnnnnnnnnnnnnnnnnnnnnnnnnnnnnnnnnnnnnnnnnnnnnnnnnnnnnnnnnnnnnnnnnnnnnnnnnnnnnnnnnnnnnnnnnnnnnnnnnnnnnnnnnnnnnnnnnnnnnnnnnnnnnnnnnnnnnnnnnnnnnnnnnnnnnnnnnnnnnnnnnnnnnnnnnnnnnnnnnnnnnnnnnnnnnnnnnnnnnnnnnnnnnnnnnnnnnnnnnnnnnnnnnnnnnnnnnnnnnnnnnnnnnnnnnnnnnnnnnnnnnnnnnnnnnnnnnnnnnnnnnnnnnnnnnnnnnnnnnnnntaacatctttctggtgaccatggaaagaaccatagtgtggaaacccttgactcaaaggtttactttggttaagtgatggggtcctgtaacatctttctggcgaccacagaagtgacaatagtgtggaaaccccagacccaaagagtaactttgggtaagtggtagggtctggtaacgtctttctggtgaatcatggaagggacgatactgaggagacccctcaaccccaaaagaagtagactgcaccactggttagccgactttgaataagtggtggggtacctgggtaaaggatgggattggattagaggcccaacgtaggggagttagagtctgtcctaagacacagtgggttagaggcccctcttaaggaaaggaaaggaccattgctcaaccttgggttagaggcccaactcaggagggttagagtcccttctcagatttagggggttagaggcccctctcagtaaggtccctctcagtaaagtcgcttctggctaagagcaggtttggcactatgggatgttaactgctattctcttgggattaatctgccttgcactctttgctgatggctgtgagtgacagaattagccacgtacaggattgtaggacttggggcgt

SEQ ID NO: 369779 - DNA, 1070 bp, Homo Sapiens
  misc_feature (81)..(81): n is a, c, g, or t
  misc_feature (569)..(855): n is a, c, g, or t
ccagccagatgatgaaacagatacctcctattttgaagccaggaatactgctcagcacctgaccgtatctggatttagtcngtagcacaaaaattttccttttagtctagcctcgtgttatagaatgaacttgcataattatatactccttaatactagattgatctaagggggaaagatcattatttaacctagttcaatgtgcttttaatgtacgttacagctttcacagagttaaaaggctgaaaggaatatagtcagtaatttatcttaacctcaaaactgtatataaatcttcaaagcttttttcatctatttattttgtttattgcactttatgaaaactgaagcatcaataaaattagaggacactattgagagtgagccactagcttgattttctttctcctctgatttcagttcactgttcagtttagcattaaaataataaaataatcatacagttccatttgattgtaatttacttgcatatgattgccttcaaaagctgtgttcttgagggcaatcatttaaggccatacttgtgacctcagaaatgcagctggaannnnnnnnnnnnnnnnnnnnnnnnnnnnnnnnnnnnnnnnnnnnnnnnnnnnnnnnnnnnnnnnnnnnnnnnnnnnnnnnnnnnnnnnnnnnnnnnnnnnnnnnnnnnnnnnnnnnnnnnnnnnnnnnnnnnnnnnnnnnnnnnnnnnnnnnnnnnnnnnnnnnnnnnnnnnnnnnnnnnnnnnnnnnnnnnnnnnnnnnnnnnnnnnnnnnnnnnnnnnnnnnnnnnnnnnnnnnnnnnnnnnnnnnnnnnnnnnnnnnnnnnnnnnnnnnnnnnnnnnnnnnnnntaaaggcagctggaaaattccttcacttagtaactccctttgggggaataaggaataaacaaaaaagacctaaggcttttcactttacttttactaaatggataacgggtttttgcccaccctttaaattttcctattgggggccggtagttcccacaaataaaggtaatttttggttttaaaaattgggtacctggggaaaggaacccggggta

SEQ ID NO: 369780 - DNA, 867 bp, Homo Sapiens
tggtccggtccggattcccgggatggctggctcactgatgagaatgtggaggcatcagcaaggatctcggtgggttgctcagagaggaactgcactaagccttaatcctggacaccagtacccctgcagcatggcttgctcaacaacagtctttgagtggcatagaattccaaagaaaatggtgctgggtggagaatggagagagcatgatggagcagagtcccagtcactgaccaactaactggtcgtttgattaggaaacagtttggccaaagtaccaccttggagacctaagatctttggataactttgagaagagccactgagcctgaagttgaaatatttttagcttagtcatctgtgttagctataggagaaatagtaacacaagaaataactcctttttcacatgatcatttatatctatatacatatatatacttgcatacactatcactgcattaaaaaatgagtttgggctgggcatggtggctcacacctataaatcccaacactttcggaggccaaggagggacaaacgaaccctttgaggccaggagttgcagaacaactttgggcaacacaggggcgacccccattctctccaaaacataaaaggattttttaaaaaaatttagccagggcatgggtggccacatggcctggtgggccaccacctaacttttgggaagggctgaaaggccaggaaaaaagccatttttaagcccccagggaaggtcaaagggcttgccaatgaaggctttttgtattacaaccaactgggcactttccatccctgggggtttacctaagccaagggaacccctattcatttcacacccctccctaaagaaaatctcgggaagg

SEQ ID NO: 369781 - DNA, 1330 bp, Homo Sapiens
ggattgacgacatggtggagcaatagtatattgtatgttgtaaagtgttctgtcatttacaagatgtgattcatgagtgcagaactaccacctttcttttagcaccaatcccaacatgaaattatattactcagatttaaagcactatcattaatctttcaatctaattattcaccaccacaagacctattaacaagacaaaatgcctctatcccacaagccagatgcaggtctggggttcaaaataactctttggatcctacagagatagcctactgagggcaaagaaagtccttagataaagagagaatattgtatgggccatcaaccatttacttttccctgaatgttagaaactacaaaaccactaccttgtacccccatcaaaatcccacctgaaccatctaatcctataaacataaaggggtaaaattggaactctccagatgaacaaagacatctaaatatctgtagatagaaacatttatctatctaaatatattgatagacctgtcattgtattgattaatgacaaaaccctttagataattatcttccattttaaataaaattttatttcacaaatatgagccaagaaagaggaaagttgatttgaagtgaggattagaagtgaatgacaataaagtctggcagccaagcacgaaccaagactggcactatttttcttagtgtatataattgtttaaactgcaaggttgacatttattgtgttgtgtctaagttaatttcgatctaatgtacctgattctagcctctgtgaacaacaagaatatgtttgtgtatgttcacatggtgcttataatatttcactatcaattcaattaattcacataaattccatgtgaaatgtattcaacaatggaatattttctaaaacatttagtatacatttgaatgtattttaaaccatgccaaactactgctttaatgtcaagtttgcagaattgtctctgaaaataaaaaccctgactttagttgtaaaacaataaaagttagctacttggtatacggagatgttaatttgggatatggaggcatttttatcttctgtcactactacttaaaactctgatgattatgttagatttttttgccaactaataaagatttcaaatgggcatcccaaactggtgcgcccttcatgccttcgcatttttccttgtcggccggccttcggcccctcaagaaagcttttctagaaccatttccttttggcccctcgggcccccattcagtaaagtgaaacgtggggcataacctgtgttcccttgagaaaatcttgggccattgacccagggggttggggatt

SEQ ID NO: 369782 - DNA, 1964 bp, Homo Sapiens
gggtctcttcttttgcttctagttaccatcctcaaaggattggctaaaagcaagcaactggattgaacaccctaagaagaaagattcacactgcaccaggagacatcagaaagaatgaaaactctgccgctgtttgtgtgcatctgtgcactgagtgcttgcttctcgttcagtgaaggtcgagaaagggatcatgaactacgtcacagaaggcatcatcaccaatcacccaaatctcactttgaattaccacattatcctggactgctagctcaccagaagccgttcattagaaagtcctataaatgtctgcacaaacgctgtaggcctaagcttccaccttcacctaataacccccccaaattcccaaatcctcaccagccacctaaacatccagataaaaatagcagtgtggtcaaccctaccttagtggctacaacccaaattccatctgtgactttcccatcagcttccaccaaaattactacccttccaaatgtgacttttcttccccagaatgccaccaccatatcttcaagagaaaatgttaacacaagctcttctgtagctacattagcaccagtgaattccccagctccacaagacaccacagctgccccacccacaccttctgcaactacaccagctccaccatcttcctcagctccaccagagaccacagctgccccacccacacctttctgcaactacacaagcttccaccatcttcctcagctccaccagagaccacagctgccccacccacacctcctgcaactacaccagctccaccatcttcctcagctccaccagagaccacagctgtcccacccacaccttctgcaactaccctagacccatcatccgcctcagctccaccagagaccacagctgccccacccacaccttctgcaactacaccagcctccaccgaccttccccagctccacaaagagaccacagctgccccaattaccacacctaattcttccccaactactcttgcacctgacacttctgaaacttcagctgcacccacacaccagactactacttcggtcactactcaaactactactactaaacaaccaacttcagctcctggccaaaataaaatttctcgatttcttttatatatgaagaatctactaaacagaattattgacgacatggtggagcaatagtatattgtatgttgtaaagtgttctgtcatttacaagatgtgattcatgagtgcagaactaccacctttcttttagcaccaatcccaacatgaaattatattactcagatttaaagcactatcattaatctttcaatctaattattcaccaccacaagacctattaacaagacaaaatgcctctatcccacaagccagatgcaggtctggggttcaaaataactctttggatcctacagagatagcctactgagggcaaagaaagtccttagataaagagagaatattgtatgggccatcaaccatttacttttccctgaatgttagaaactacaaaaccactaccttgtacccccatcaaaatcccacctgaaccatctaatcctataaacataaaggggtaaaattggaactctccagatgaacaaagacatctaaatatctgtagatagaaacatttatctatctaaatatattgataaacctgtcattgtattgattaatgacaaaaccccttagataattatccttccattttaaaataaaattttattttcacaaaatatggagcccaagaaaacaggaaaagttggattttgcaagtggaggcattaaaaagttgaaatggatcaataaagagttttgggcaagccctaagccaccggaatccaaaagacttggggccaactgctttttttccccttaagtgggtagctaaaaaatattgttttttaaaaaacttcgcccacagggggtctgtaacaatttttgttatttgga

SEQ ID NO: 369783 - DNA, 819 bp, Homo Sapiens
ggcagcagactgtgcagtggggcaaggatttcatgagcatcctcctctaaacgcgtgtcaagacaaaagatgcttcagctttggaaacttgttctcctgtgcggcgtgctcactgggacctcagagtctcttcttgacaatcttggcaatgacctaagcaatgtcgtggataagctggaacctgttcttcacgagggacttgagacagttgacaatactcttaaaggcatccttgagaaactgaaggtcgacctaggagtgcttcagaaatccagtgcttggcaactggccaagcagaaggcccaggaagctgagaaattgctgaacaatgtcatttctaagctgcttccaactaacacggacatttttgggttgaaaatcagcaactccctcatcctggatgtcaaagctgaaccgatcgatgatggcaaaggccttaacctgagcttccctgtcaccgcgaatgtcactgtggccgggcccatcattggccagattatcaacctgaaagcctccttggacctcctgaccgcagtcacaattgaaactgatcccccagacacaccagccctgttgcccgtcctggggagaaatgcgccagtgaacccaaaccagctcatctcaattttcccttggctggggacaaaaccacaggcccaaattcatccaaccaaagttccggtggaaataagccgggggattcaaacaccgcctgaaaaaaagccccttggtaattcgcttccccttgcgctggcaaaaaaagggaggaattaatgtgttcccccactgggaatcccgcgcaattattttctctattcc

SEQ ID NO: 369784 - DNA, 506 bp, Homo Sapiens
  misc_feature (389)..(460): n is a, c, g, or t
ggggccagcagactgtgcagtggggcaaggatttcatgagcatcctcctctaaacgcgtgtcaagacaaaagatgcttcagctttggaaacttgttctcctgtgcggcgtgctcactgggacctcagagtctcttcttgacaatcttggcaatgacctaagcaatgtcgtggataacctggaacctgttcttcacgagggacttgagacagttgacaatactcttaaaggcatcccttgaaaaactgaaggtcaaacctaaggagtgccttcaaaaaatcccagtggccttggcaaactgggcccaaaccaaaaaaggccccagggaaagcttgaaaaaaatttgcttgaaacaaaatgttccattttttttaaaacttgggttttccnnnnnnnnnnnnnnnnnnnnnnnnnnnnnnnnnnnnnnnnnnnnnnnnnnnnnnnnnnnnnnnnnnnnnnnnctttcccccccctctaaatattcccttgggggaaagaattttgttc

SEQ ID NO: 369785 - DNA, 1226 bp, Homo Sapiens
  misc_feature (1055)..(1055): n is a, c, g, or t
  misc_feature (1157)..(1158): n is a, c, g, or t
gggatcccagcagactgtgcagtggggcaaggatttcatgagcatcctcctctaaacgcgtgtcaagacaaaagatgcttcagctttggaaacttgttctcctgtgcggcgtgctcactgggacctcagagtctcttcttgacaatcttggcaatgacctaagcaatgtcgtggataagctggaacctgttcttcacgagggacttgagacagttgacaatactcttaaaggcatccttgagaaactgaaggtcgacctaggagtgcttcagaaatccagtgcttggcaactggccaagcagaaggcccaggaagctgagaaattgctgaacaatgtcatttctaagctgcttccaactaacacggacatttttgggttgaaaatcagcaactccctcatcctggatgtcaaagctgaaccgatcgatgatggcaaaggccttaacctgagcttccctgtcaccgcgaatgtcactgtggccgggcccatcattggccagattatcaacctgaaagcctccttggacctcctgaccgcagtcacaattgaaactgatccccagacacaccagcctgttgccgtcctgggagaatgcgccagtgacccaaccagcatctcactttccttgctggacaaacacagccaaatcatcaacaagttcgtgaatagcgtgatcaacacgctgaaaagcactgtatcctccctgctgcagaaggagatatgtccactgatccgcatcttcatccactccctggatgtgaatgtcattcagcaggtcgtcgataatcctcagcacaaaacccagctgcaaaccctcatctgaagaggacgaatgaggaggaccactgtggtgcatgctgattggttcccagtggcttgccccacccccttatagcatctccctccaggaagctgctgccaccacctaaccagcgtgaaagcctgagtcccaccagaaggaccttcccagataccccttctcctcacagtcagaacagcagcctctacacatgttgtcctgcccctggcaataaaggcccattttctgcattantaaaataaaaaacaatccaaccccaagaaccctggtcgggcgccttcggccccctcgaaaaaacttttctaaaccatttccttttggccccccggggccccnntaggggaaatggaaacatggggtcattacctgtttctcccaaggaaaaatcccgggtcaatgaaaaaa

SEQ ID NO: 369786 - DNA, 739 bp, Homo Sapiens
gggacctttatttgccgtctttcaactggcaagagtcattttgaccagcagattaatcaactgtaagacggatcctcacacaaagaggcaactgaaaggatgaaatcactgacttggatcttgggcctttgggctcttgcagcgtgtttcacacctggtgagagtcaaagaggccccaggggaccatatccacctggaccgctggctcctcctcaaccttttggcccaggatttgttccaccacctctcctccaccctatggtccagggatatttccaccaccatttttccctgtaaattctccaactgatcctaccctccttactcctgcaaccctaaggtccaccactccatcctgatgccccaagttatccacagcctccttcccgaccaagaccctatccacctggacctccatttttccctgtaaattctccaactgatcctaccctccctactcctgcaccccaaatatgaacaactgcagcaggtgccaccaccaccacaaaagacaccactacccttgtaactactgcttctgctacccaaaatatgaattccaacactgcttccaagagacatttacataaaattgcttccatttttggatgagaatgaaaaattccaaaagtgctgagctttggggagaaataatcttagaaagaaattgtagaaaaaacccatgcagacataacatttataccaaatgagccaaaataaagaattgagcacccaaaaa

SEQ ID NO: 369787 - DNA, 811 bp, Homo Sapiens
gggttggctccaaattcctttaatttttggccctccatttgggtataaaatgtttatgttctgccatggggtttttttcttacaatttcttttctaaggattatttctcccccaaagcttcagcacttttggaatttttcatttctcatcccaaaaatggaagcaattttatgtaaatgtctcttggaagcagtgttggaattcatattttgggtagcagaagcagtagttacaagggtagtggtgtcttttgtggtggtggtggcacctgctgcagttgttcatatttggggtgcaggagtagggagggtaggatcagttggagaatttacagggaaaaatggaggtccaggtggatagggtcttggtcgggaaggaggctgtggataacttggggcatcaggatggagtggtggaccttagggttgaggagggggtggtggaaatatccctggaccatagggtgcgggaggaggaggtgggattctccctggaccatagggtggaggaggaggtggtggaacaaatcctgggccaaaaggttgaggaggagccagcggtccaggtggatatggtcccctggggcctctttgactctcaccaggtgtgaaacacgctgcaagagcccaaaggcccaagatccaagtcagtgatttcatcctttcagttgcctctttgtgtgaggatccgtcttacagttgattaatctgctggtcaaaatgactcttgccagttgaaagacggcaaataaaggtgaaaagggacaagaaatcttagctcttatatattgtaatggatttctgttggcccc

SEQ ID NO: 369788 - DNA, 734 bp, Homo Sapiens
  misc_feature (237)..(344): n is a, c, g, or t
ggacctttatttgccgtctttcaactggcaagagtcattttgaccagcagattaatcaactgtaagacggatcctcacacaaagaggcaactgaaaggatgaaatcactgacttggatcttgggcctttgggctcttgcagcgtgtttcacacctggtgagagtcaaagaggccccaggggaccatatccacctggaccgctggctcctcctcaaccttttggcccaggatttgttnnnnnnnnnnnnnnnnnnnnnnnnnnnnnnnnnnnnnnnnnnnnnnnnnnnnnnnnnnnnnnnnnnnnnnnnnnnnnnnnnnnnnnnnnnnnnnnnnnnnnnnnnnnnccactccatcctgatgccccaagttatccacagcctccttcccgaccaagaccctatccacctggacctccatttttccctgtaaattctccaactgatcctaccctccctactcctgcaccccaaatatgaacaactgcagcaggtgccaccaccaccacaaaagacaccactacccttgtaactactgcttctgctacccaaaatatgaattccaacactgcttccaagagacatttacataaaattgcttccatttttggatgagaatgaaaaattccaaaagtgctgagctttggggagaaataatcttagaaagaaattgtagaaaaaacccatgcagacataacatttataccaatgaggcaaaaataaagaattgagcaccaa

SEQ ID NO: 369789 - DNA, 734 bp, Homo Sapiens
  misc_feature (238)..(331): n is a, c, g, or t
gggacctttatttgccgtctttcaactggcaagagtcattttgaccagcagattaatcaactgtaagacggatcctcacacaaagaggcaactgaaaggatgaaatcactgacttggatcttgggcctttgggctcttgcagcgtgtttcacacctggtgagagtcaaagaggccccaggggaccatatccacctggaccgctggctcctcctcaaccttttggcccaggatttgttnnnnnnnnnnnnnnnnnnnnnnnnnnnnnnnnnnnnnnnnnnnnnnnnnnnnnnnnnnnnnnnnnnnnnnnnnnnnnnnnnnnnnnnnnnnnnnaattctaaggtccaccactccatcctgatgccccaagttatccacagcctccttcccgaccaagaccctatccacctggacctccatttttccctgtaaattctccaactgatcctaccctccctactcctgcaccccaaatatgaacaactgcagcaggtgccaccaccaccacaaaagacaccactacccttgtaactactgcttctgctacccaaaatatgaattccaacactgcttccaagagacatttacataaaattgcttccatttttggatgagaatgaaaaattccaaaagtgctgagctttggggagaaataatcttagaaagaaattgtagaaaaaacccatgcagacataacatttataccaatgaggcaaaaataaagaattgagccacc

SEQ ID NO: 369790 - DNA, 613 bp, Homo Sapiens
  misc_feature (127)..(188): n is a, c, g, or t
cgccccccttggggggggccagagtttgttttctcaaatatttttggggggcgggccccccgaagaatatttggggagagagggggtaaaaaaactcccatgttgggggaggaaaattttttccccnnnnnnnnnnnnnnnnnnnnnnnnnnnnnnnnnnnnnnnnnnnnnnnnnnnnnnnnnnnnnncggggaaaaggaggggcctttgggaataaccttgggggcattccaggaaaggaaggggggggacccttaagggttttaaggaaggggggtgggttggaaaatatcccctggaaccataggggtgcggggaggaaggaggtggggattctcccctggacccatagggtggagggaggaaggtggtggaacaaatcctgggccaaaaggttgaggaggagccagcggtccaggtggatatggtcccctggggcctctttgactctcaccaggtgtgaaacacgctgcaagaggcccaaaggcccaagatccaagtcagtgatttcatcctttcagttgcctctttgtgtgaggatccgtcttacagttgattaatctgctggtcaaaatgactcttgccagttgaaagacggcaaataaaggtgccc

SEQ ID NO: 369791 - DNA, 696 bp, Homo Sapiens
  misc_feature (666)..(666): n is a, c, g, or t
gggacctttatttgccgtctttcaactggcaagagtcattttgaccagcagattaatcaactgtaagacggatcctcacacaaagaggcaactgaaaggatgaaatcactgacttggatcttgggcctttgggctcttgcagcgtgtttcacacctggtgagagtcaaagaggccccaggggaccatatccacctggaccgctggctcctcctcaaccttttggcccaggaagaatcccaccacctcctcccccaccctatggtccagggatatttccaccaccccctcctcaaccctaaggtccaccactccatcctgatgccccaagttatccacagcctccttcccgaccaagaccctatccacctggacctccatttttccctgtaaattctccaactgatcctaccctccctactcctgcaccccaaatatgaacaactgcagcaggtgccaccaccaccacaaaagacaccactacccttgtaactactgcttctgctacccaaaatatgaattccaacactgcttccaagagacatttacataaaattgcttccatttttggatgagaatgaaaaattccaaaagtgctgagctttggggagaaataatcttagaaagaaattgtagaaaaaacccatgcagacataacatttataccnatgaggcaaaaataagaattgagcaccaaa

SEQ ID NO: 369792 - DNA, 692 bp, Homo Sapiens
  misc_feature (348)..(455): n is a, c, g, or t
attaaaaatgttttttaagcccccaaaagtttcaaccacttttggggaaatttttccattgttcctcccaaaaaatggaaaggcaatttttatgtaaatgttctttttggaagccagttgttggaatttcattttttgggtagcagaaggcagtagtttacaaggggtaggtggtttctttttgtgggtgggtggtgccacctgctgccagttgttcatttttgcgatgcaggagtgggaggggtaagatcagttggagaatttacagggaaaaatggaggtccaggtggatagggtcttggtcgggaaggaggctgtggataacttggggcatcaggatggagtggnnnnnnnnnnnnnnnnnnnnnnnnnnnnnnnnnnnnnnnnnnnnnnnnnnnnnnnnnnnnnnnnnnnnnnnnnnnnnnnnnnnnnnnnnnnnnnnnnnnnnnnnnnnnaacaaatcctgggccaaaaggttgaggaggagccagcggtccaggtggatatggtcccctggggcctctttgactctcaccaggtgtgaaacacgctgcaagagcccaaaggcccaagatccaagtcagtgatttcatcctttcagttgcctctttgtgtgaggatccgtcttacagttgattaatctgctggtcaaaatgactcttgccagttgaaagacggcaaataaaggtccc

SEQ ID NO: 369793 - DNA, 826 bp, Homo Sapiens
  misc_feature (496)..(589): n is a, c, g, or t
cccagacgcaactccagataatattgtaatacgtgggctcaggcgggaggcggagataattatcaggggataagcccaagcccgtggttatttattttattgttggtgggagcgagaacgattaatattacggtagtagtcttgtggcggaggcatccaaataggaagggtgggttatttatatgtaagcatgtgggaggagatgaaaaaagaggatgtggatagggtaatatggtgggaggagggccgggggtaaggaagttaaaactagggagtaagcgcgggagcagccggttgcaaaagggtagagatcattggtgtgggtggggcgaggcaccgggtgcggtggttataattggggtgcaggagtagggagggtatgttcatttggaggattggcagggaaaaatggaggtccaggtggatagggtcttggtcgggaaggaggcggtggataacttggggcatcaggatggagtggtggaccttagtgttnnnnnnnnnnnnnnnnnnnnnnnnnnnnnnnnnnnnnnnnnnnnnnnnnnnnnnnnnnnnnnnnnnnnnnnnnnnnnnnnnnnnnnnnnnnnnnaacaaatcctgggccaaaaggttgaggaggagccagcggtccaggtggatatggtcccctggggcctctttgactctcaccaggtgtgaaacacgctgcaagagcccaaaggcccaagatccaagtcagtgatttcatcctttcagttgcctctttgtgtgaggatccgtcttacagttgattaatctgctggtcaaaatgactcttgccagttgaaagacggcaaataaaggtccc

SEQ ID NO: 369794 - DNA, 767 bp, Homo Sapiens
  misc_feature (526)..(526): n is a, c, g, or t
gggtcacctttatttgccgtctttcaactggcaagagtcattttgaccagcagattaatcaactgtaagacggatcctcacacaaagaggcaactgaaaggatgaaatcactgacttggatcttgggcctttgggctcttgcagcgtgtttcacacctggtgagagtcaaagaggccccaggggaccatatccacctggacctccatttttccctgtaaattctccaactgatcctaccctccctactcctgcaccccaaatatgaacaactgcagcaggtgccaccaccaccacaaaagacaccactacccttgtaactactgcttctgctacccaaaatatgaattccaacactgcttccaagagacatttacataaaattgcttccatttttgaatgagaatgaaaaattccaaaagtgctgagctttggggagaaataatcttagaaagaaattgtagaaaaaacccatgcagacataacatttataccaatgaggcaaaaataaagaattgagcacccctncacgaatgttgttcgctgataacctaaatggcctctgtattgcccaaacggcgggtgaaccccacatttgttctcacaccacgctgtaatgacgccttatcccccaacccagtgtggcccccctgtttgggggccgcccttgaggcccttagaaaaaattttttttaaaatattcctttattggcccccgggccccccctggaaggcgatttgaaaaagcgcggcataaagccgttttccc

SEQ ID NO: 369795 - DNA, 1009 bp, Homo Sapiens
  misc_feature (614)..(614): n is a, c, g, or t
  misc_feature (734)..(734): n is a, c, g, or t
  misc_feature (823)..(823): n is a, c, g, or t
gggcaggttgatagaaacatcagagaagccaaagagaaactggaggcagaaatggaagcagctaggcatgaacaccaattaatgctaatgaggcaagatctaatgaggcgtcaagaagaactcagacgcttggaagaactcagaaaccaagagttgcaaaaacggaagcaaatacaactaagacatgaagaggagcatcggcggcgtgaggaagaaatgatccgacacagagaacaggaggaactgaggcgacagcaagagggctttaagccaaactacatggaaaatagagaacaggaaatgagaatgggtgatatgggtccccgtggagcaataaacatgggagatgcgtttagcccagcccctgctggtaaccaaggtcctcctccaatgatgggtatgaatatgaacaacagagcaactatacctggcccaccaatgggtcctggtcctgcccatgggaccagaaggagccgcaaatatgggaactcccaatgatgccagataatggagcaatgcaccaatgacagattcctcaaggaccaccatctcagatgggttcacctatggggagtagaacaggttctgaaacccctcaagcaccaatgagtggngtaggtcctgtgagtggtggtcctggtggctttggtagaggaagtcaagggggcaactttgaaggccctaataagcgtcgtagatattaaacattcgttcattcctggctatctagaaanaaaaaagtcagtggtatgcctttatacttttacctgttatctggaagaaatggttttattgttaatgtatgtagacttaaaagtttttntttttggtaaaacttgaggtttttgtatttttctttattcatgagctttgtagattagaatggtaatgatgctcatcattttgaatgttgaaatgtgtttgtgactttagctaaatataagtattccatagtactgtgaaatctatgtagttaatctcaataaagaaatcattttggataatttaa

SEQ ID NO: 369796 - DNA, 1990 bp, Homo Sapiens
  misc_feature (62)..(62): n is a, c, g, or t
  misc_feature (169)..(169): n is a, c, g, or t
  misc_feature (237)..(237): n is a, c, g, or t
  misc_feature (1706)..(1716): n is a, c, g, or t
ttctccgtttttgatgtcggtgtcgtgtctcgtgatatctcttgtgtggtggcgtatgtgtnagtcgtcgttgtggttgtcggtgtccttgtgcatgttgtgcgtctggtcgtgctgtacttctcattttgtctctctttccgtggtatgtgtgtcaggtttattgttnattgtattccttatgttttcgttttctgtttctttgcatgttcttggtacttcttttgtccttttttnatttgaaggtaaggccgtgtcgttctcggtcgttttcgttgtctttttaatactttttttatattttgtggagggtgattggtttggtttttcggcgcttctgtctaggatatcaaatcgtttgatttttagcgtaattaggagcaaaaattggacatttgacaattacacaattttttaaaagtgtcgtaaactctcaattatatacaaaacattgtccacttaagctgcctgcttttcaagagtaactctcctcccatgcaaaggatactgttgcacataaaagatatcctcatctgcatgttttccagtacctctttctccaccctaaacagttgaaatttaattggtctcaaatttcaagtgaaactgatacatggcaaggctgacaccactgtatcatgtaggttttctaaataaagcattttatgtataattttaagcattaaagtaagtagatagggatgccatttctaatatatcagcatggctgatggcagtgaaaccatccaagatagaaggcccacttttaacagagtttaaccagtatttatgggccttataaaataaaaagataattttaaagtaacattacaaacatatactactagtgtctcccagtacaaggagcagtctcttgactcaaaaaatgaaaactaatatgtggaaactcttaaagttttcccactaatctatttaaatgtaaatatctgtcttctagttggagtccttcatgtttttgtttccaactcagagaaaatgagaataatgaagatactcttccttgctcgtttttcttaagagtacataaagataatatataatgtatttcattgaggaggaagagaagtagcaaggatttcaatgaagacataatgattacaaaccagtgtactatacagatttcagaagcagaaaaaatgctgaacagcctgctcaagttttaaataaactgtcttctcactcaaagtactgatacaacagagaaggtatgtaaacaggaacagtttgcatggggattggaaaaatgtataggaaattaatatttcttaaaagctccctgcgataggaagtcgaaaacccaatcactttgcatctttctgcaaaaaaaattcccccacccaatcaaccatataaatgcattgccacagaagataaataatggatggctaattttcaccttacagtgcagtacacaattagttgagaaaaaaaataaacataagatatatattataaaatgttttgtcaacaaaaacaaactttgagaaacatggcgcactataaaagctaagaaactcattcacgaagcactgcttgtgtacaccacatattccagactttttccaagtaacattctatgttaacagtttagagctactaattcagagaggtcttatttctcactgcttgcattttaaagaaatatgtctaaagcgcattgtaaaccactaatatttacaatagcnnnnnnnnnnngctcataaaatgcattttggccatgtttcagagaatacttaacaggtcaacatcgttctgtgttgtggttggccttgtgtcttacatacaggagatgcctaacatctaataaccaagagtttcaactgaattatataaccattttcttcaatacttacatgtgccaattttaggcagaaaccacagtatgatattccaggtggtgtggtaatcccaaccttgaaaaaaagcccaacgaatgtaattttttgttttctaggtacaaagcataacc

SEQ ID NO: 369797 - DNA, 811 bp, Homo Sapiens
gagggaacccgggtttgtgccgaagaaatttttgaggttaggttatttttccaagtaaggatggctggccgggggggtttggttggcttaataatggaaggttgggccagggcttctggttgttagaaagagaataggttacctgttggagggaggctgatcgttcatttgtgggttttggtgaaggtgctggtggttgcttgttgcagtggtggggggattttgtggtgattgttgtatctgcggtggtgatgtttatctggggctcagggttagagataggaaggtaaatagcaagaaaaaaaggaataggaggaaatgggggttttaatatcctaataggtcctacatagtaaggtcttagtgggaaatgtaggtttggataacccggaaagagtcgaggttgtctaatagattccaatggaaagagttgagatagaatgactgcttggctaaatcgagagaaagaagatggtggaactcgccctgggacaaagggaagagaaagtggtgaattaagtcttgagtcatagggaggtgggggacttggtggaacccatcttggcctgtagagtggaggtggtggcagctggccaggtagatatggtcttctggagaatctttgactctcactgggtgtgaaacatgaaataagagccaacaggcccaagaagaaagttaatttcattctttaaagttgctccttggtagaagattcttctttggaacaaattactgcttaatcttactcttgccagatactcaatttaggtagccacaatttaaaagtccaagaagagaaagaaccccc

SEQ ID NO: 369798 - DNA, 681 bp, Homo Sapiens
  misc_feature (57)..(95): n is a, c, g, or t
  misc_feature (120)..(151): n is a, c, g, or t
  misc_feature (157)..(261): n is a, c, g, or t
  misc_feature (279)..(367): n is a, c, g, or t
ctatagggaatttggccctcgaggccagtaattcggcacgaggcggcacgaggcgcnnnnnnnnnnnnnnnnnnnnnnnnnnnnnnnnnnnnnnnatcatgtaatcttgctccttctaannnnnnnnnnnnnnnnnnnnnnnnnnnnnnnntaaccnnnnnnnnnnnnnnnnnnnnnnnnnnnnnnnnnnnnnnnnnnnnnnnnnnnnnnnnnnnnnnnnnnnnnnnnnnnnnnnnnnnnnnnnnnnnnnnnnnnnnnnnngtaaatgaaatttcattnnnnnnnnnnnnnnnnnnnnnnnnnnnnnnnnnnnnnnnnnnnnnnnnnnnnnnnnnnnnnnnnnnnnnnnnnnnnnnnnnnnnnnnnncgaatttaaagcagttcagtggtaggaagtgattttcatcttcacttggtggtctgttatgtgcctgcattgcagatatgattttgattcataagcatagctttgcttttctcagaaatcttttcctgctgagtcctcccttccctgccatccaagtacagaagagagcactcagaggtgctcaaaaaataaaagagcatgtgttgtttaaaataaaagactgctacaaatgtctacctgctgcttcagaaatgttccacctgctgccccagattcagcatctggcagcccacgtggttaaagaatgtcagcag

SEQ ID NO: 369799 - DNA, 860 bp, Homo Sapiens
  misc_feature (23)..(23): n is a, c, g, or t
  misc_feature (30)..(30): n is a, c, g, or t
  misc_feature (411)..(411): n is a, c, g, or t
  misc_feature (419)..(419): n is a, c, g, or t
actatagggaatttggccctcgnggccagnaattcggcacgaggcggcacgaggaatatcagtgatatgcaagaatctggtatggctgagaagactggaaaggggcaaatataatacttttaataaagtagaagatttatttttgcaaactccacatcagtaagtttggtagaggatgagggcaaagattctaaaatcaattattaaaggggatgtttgtgagcactaaggaaaaacagtgatagctcatatagaccacactttttcataaaaggcaaacaatgaattcattcagtgtagtgtatgtggacttcagcccagtgagtgaaggcagcaaaggggatcagcacatagttgaagaacttgaccaacagtactgacaaatggatcaacgtcaatctagagaaaggntctagtancctgcccaagatctcacggtcgttctattcatcatgaagattcaggagcaaaacagacaactaaacaaatacatagctggcaacaagctgggcagaatgggtaaactgagaagaaaaaatacagattcaaaaataattagaaattgaagaggtaagagatcttgcaactttttgaatcctagagatgaaatacacaagtcagaggtacagaatatgcaatttagggagaagcatttgtgaaaaaacaggtatacttagaaattttagttaacacagtacttaatcccagctctggaactcacctatataaaaatgtatgtgtgtgtggcggggctgggggctaggttattctctttaacttagagaatgcacacagcgtccctcgcatatgcatggcacttggaagctactcaataaatattaacttcctttccttccctc

SEQ ID NO: 369800 - DNA, 763 bp, Homo Sapiens
  misc_feature (304)..(304): n is a, c, g, or t
  misc_feature (311)..(311): n is a, c, g, or t
gggaagcagggcggtcgggggagtcatactccatgggtttatgtgataaatgatcttggcatagaagagaatttaaagaatgatggcttcattccagcgctccaatagtcatgacaaagtaaggagaatagttgcagaggagggtcgtacagcaagaaacctaatagcttggagtgttccactagaaagcaaagatgatgatggaaaacctaaatgtcaaactggtggaaaatctaagaggaccattcaaggcactcataaaactactaaacagagtactgcagtggactgtaaaataacatcngtctacngactgggagataaacactttgataaaagtcccactaaaacaaggcacccccggaaaattgatctaagagctccgatactgggcatttccttttgataatcttcgccgagcagtagatgaaatctatgtaacttgcgaatcagatcagagtgtggtcgaatgtaaggaggtgctaatgatgctggataactatgtaagagatttcaaagcattgattgactggattccgcttcaggaaaaagctagagagaccgatgctcaaagcagaccaacatcattgggatggggaagtaaagaaaaattctcccgggacgccaatggggatttcaagtccttccaccggaatgaataaatgttacatccaattgcttcgacgaaaccttaaaattttgggaaggtttcaattgggcacgatggccagccccccctcgtccgggctccccccggggtgtc

SEQ ID NO: 369801 - DNA, 789 bp, Homo Sapiens
  misc_feature (479)..(479): n is a, c, g, or t
ggcatctattctgtaagtttcagttgtgatatttcttaaagattcaaagatggatcctgggaatttgatttagcctccatttcatctgggagttaatcctcacagcaaccctgtgagataggttaataattaaaccctcctattcacacatatttcattaatccttacagcaacctgagagatagtttaataattaaacctactccacagatgaggaaactgaggcccaagaggttcagtgattcgcccaaggttataacagcaagaattggtggcgaaacaagaattcaaatccagattggtcttaatagtgagctctcatgtgtgatagaaattagataccactttgaggactttgggagccagtggtgaatgtacttactttaggctctaaatactctgtgtaatttcttggtcattttgttcttagagaggtggtgatcttaataaagttttgactttattaagtaattaaaagntttttacttatgttacaactaaaacaattctttaaaactttcataacttgaagttttaaatcctaaaattagttgaaaaagatgtaattgccagtgtatcataaatactggtattttaaaaataaagctgctttatcacttttaaggaaagcccttgtaatttaatgcattgtaataagtgtattggagctgattgtccaccatgattccatgtaaacataggtggaactatgcaaattacaagtttttcttcttgaaaatgttacatttcctctacaacactttatgctaataaatgtttatgaacctc

SEQ ID NO: 369802 - DNA, 904 bp, Homo Sapiens
  misc_feature (128)..(149): n is a, c, g, or t
ctttgcttcactaagtttctcttgccattatctcattaattcagatctgtacctcattgctgctcacacatatatgtttcttaccttagcctgaaccttctcaggccttgaagtcattattctactcnnnnnnnnnnnnnnnnnnnnnnatggcactagagaatgaaaacctaaggtcttagaaaatcttaacttggaaaaagtctctaactggcatgatttgattacttttttcccctgtgggacaaataattttctttcctatataatagatttttagtaagtgaaacctttgctgctgctttcctgggtttacattagttttttcctgcccttaagaataatttatctgtgcttctctgatgactgttaatttctaatagtgcaggaagggatgagcttttgatttcttctcactcccctcctcaccctacttccaaattacacactaacttctaactcttacagcctgttggcacatacacaagatccacgagaccatgctcctcagaagctacccatgtcctttctcaccatggtgtggctcttggagccctgagtatctgtgactacccactccaaaggttgactgtaagaggagagcggccttcttaattttgcatttcttaattttgtttttctccattcctgttttatgacttggccttcagatgcttcctactctggcctcctccttttttctcctaggaattgtttccaggtaacctaccatgtgcacttctcagctgctctgctcacctttgcccaccttcccgtgacccctgaaagacagatccgaaaaatgtggcctgtggcagagctcagagaaactgttgaggactacccatgcccggtcagaactctgcctcaggggacagagaatgggatggggtaaaatgggtgc

SEQ ID NO: 369803 - DNA, 981 bp, Homo Sapiens
  misc_feature (368)..(368): n is a, c, g, or t
  misc_feature (743)..(743): n is a, c, g, or t
  misc_feature (920)..(920): n is a, c, g, or t
  misc_feature (929)..(929): n is a, c, g, or t
acctttagcctcatttcctgatcgaacagcctcacttgtgttgctgtcagtgccagtagggcaggcaggaatgcagcagagaggactcgccatcgtggccttggctgtctgtgcggccctacatgcctcagaagccatacttcccattgcctccagctgttgcacggaggtttcacatcatatttccagaaggctcctggaaagagtgaatatgtgtcgcatccagagagctgatggggattgtgacttggctgctgtcagccttcatggtcagcggagaaagaagcggtgtcggccccgcacaaaccatactggaaaaccagcgggaagaaaggagccagcccccccaacaaaagaaggacaaaaangaaaatccctgacccgtacgcgataagaccactgccgcaagaaaacagaaagggaaaagggggggccccgtacagcggacaaaccggcaagatggagagccgcctccgaagaacaagcccagtaacggtaataaaaagatctagatccaaagaaaactcgggcaagaataaaaactggacaccagacacaggggacgcaccctctctgcccccaccacccacgaataagatagaaaggcaaaatgcgctcatccccaacacataggaagcaccgcgcagaaggaatgccctaaaaagtagaacgaccaacgccgaggaatcgaaccgccgcctacgacaatacgcactaccacaatggacatcaacgcgcacaangaaaacaaaaaggctataacacgccgcaccgacaactatggcacatcgaatcgatcgatattataaggaggcaagaagcgccccaaatacgcatacactatacaatataatgtccgtatgatgatcgggcgatatcacgttgagctatgcgccgcggctaagtggaagaagtatgantacttcagngaatgccacacgagcagctaaacacaccactccacgacagacagaacatcag

SEQ ID NO: 369804 - DNA, 757 bp, Homo Sapiens
gggagactcaacaagagctccagcaaagactttcactgtagcttgacttgacctgagattaactagggaatcttgagaataaagatgagctctgaaaattgtttcgtagcagagaacagctctttgcatccggagagtggacaagaaaatgatgccaccagtccccatttctcaacacgtcatgaagggtccttccaagttcctgtcctgtgtgctgtaatgaatgtggtcttcatcaccattttaatcatagctctcattgccttatcagtgggccaatacaattgtccaggccaatacacattctcaatgccatcagacagccatgtttcttcatgctctgaggactgggttggctaccagaggaaatgctactttatttctactgtgaagaggagctggacttcagcccaaaatgcttgttctgaacatggtgctactcttgctgtcattgattctgaaaaggacatgaactttctaaaacgatacgcaggtagagaggaacactgggttggactgaaaaaggaaccctggtcacccatggaagtggtcaaatggcaaagaatttaacaactggtttcacgttacagggtctgacaagtgtgttttttctgaaaaacacagaggtcagcagcatggaatgttgagaagaatttatactggatatgtaacaaacccttacaaataataaggaaacgggttcaccttattgacctattataaatgggaacctcagggaaaatctggggccaatggg

SEQ ID NO: 369805 - DNA, 807 bp, Homo Sapiens
ggggagtgaagagagacccagagggaacactgaggtgcctgcccaaccactctgtcccggtttccttcagcaggaccagccatgctggtcgttcagatgcctttctcctttcccatgtgcccacttcatcctctttgtctttacggtttccactatatttcacgttcagcagcggctagcgaagattcaagccatgtgggagttaccggtgcagataccagtgctagcctcaacatcaaaggcactgggacccagccagctcagggggatgtggacgatcaatgcaataggccgcctggggaaccagatgggcgagtacgccacactgtacgccctggccaagatgaacgggcggcccgccttcatcccggcccagatgcacagcaccctggcccccatcttcagaatcaccctgccggtgctgcacagcgccacggccagcaggatcccctggcagaactaccacctgaacgactggatggagggagaataccgccacctcccggggggattacgttccgcttcaccggcctacccctggctcctagaccttctaccacccaccttcggccagggagatcctcccaggagttcacccttgcaccgaccaccttgcgggaaggactccccaaaaatttccctggcgggggcctggcaggtggaacggggagcccgggcccgggcaccctttttttaagggggccccaggttttcgcccgaggggggaacttattgttccattgttcccttgccccaaaagttttgtggaaagggggggttgggttggacccacaaaccggcgcgatt

SEQ ID NO: 369806 - DNA, 697 bp, Homo Sapiens
gggacaaccagacgcccagtcacaggcgagagccctgggatgcaccggccagaggccatgctgctgctgctcacgcttgccctcctggggggccccacctgggcagggaagatgtatggccctggaggaggcaagtatttcagcaccactgaagactacgaccatgaaatcacagggctgcgggtgtctgtaggtcttctcctggtgaaaagtgtccaggtgaaacttggagactcctgggacgtgaaactgggagccttaggtgggaatacccaggaagtcaccctgcagccaggcgaatacatcacaaaagtctttgtcgccttccaagctttcctccggggtatggtcatgtacaccagcaaggaccgctatttctattttgggaagcttgatggccagatctcctctgcctaccccagccaagaggggcaggtgctggtgggcatctatggccagtatcaactccttggcatcaagagcattggctttgaatggaattatccactagaggagccgaccactgagccaccagttaatctcacatactcagcaaactcacccgtgggtcgcctagggtggggtatggggccatccgagctgaggccatctgtgtggtggtggctgatggtactggagtaactgaatcgggacgctgaatctgaatccaccaataaataaagcttctgcagaatcc

SEQ ID NO: 369807 - DNA, 1420 bp, Homo Sapiens
  misc_feature (102)..(102): n is a, c, g, or t
  misc_feature (203)..(203): n is a, c, g, or t
  misc_feature (221)..(221): n is a, c, g, or t
  misc_feature (316)..(316): n is a, c, g, or t
  misc_feature (326)..(326): n is a, c, g, or t
  misc_feature (349)..(349): n is a, c, g, or t
  misc_feature (416)..(416): n is a, c, g, or t
  misc_feature (450)..(450): n is a, c, g, or t
  misc_feature (456)..(456): n is a, c, g, or t
  misc_feature (465)..(465): n is a, c, g, or t
  misc_feature (470)..(470): n is a, c, g, or t
  misc_feature (497)..(497): n is a, c, g, or t
  misc_feature (613)..(613): n is a, c, g, or t
  misc_feature (643)..(643): n is a, c, g, or t
  misc_feature (661)..(661): n is a, c, g, or t
  misc_feature (1061)..(1082): n is a, c, g, or t
taaagctctatcgagaatatccccacacacgagcgtgtgactgacatagtcaggttcacgacgaatcaatgaacgtatcgcatcatgtcgactacaggtagngcgacagagtacgcggcgtatggagtgtacgtaaagatgtgaattgtgagtgtaggtgtggagatagtgatgagagtagagtgcgtgagagatgacaaacnacaagcaagtgtgcaagntcgtctcacatgcagagactgtcagcagaggcatataacataccgtcgctacacattaagggcagacaaatgaggatctacacgaattcgagagngtgcgtattnaagtatatataatttatgaaagnagtagatcgtgtgagatgtgtgtctggggaggtcagctaacgagagagcagaggtcgacgacaacgntgctctcatgatactagcaagatagagtcgtatnaagacnatgagacgngttangaggtgagcagatcagatgatatgtancgtgtcaagcgcttggatagcgtctaagtcgaagtgagtgcagaaagatatgatgctgtagtaaaagatatcctgtgagacgcagaacaatagaacacagcatcgaacgaggacgngcgcagagagatatcataggcgtctccgcnacagcagagtacacgtcntcgaagacgaatacgagtagcactaggtgcgtgcaacggcggtagagaaattatggtgggcagattctacgcgatgtgatgtcgacacacgcgagcatatcccatacaatggatttggaggtggcgagatcctactagatacaatgccacgacggtcgtgggcgggaataataagaacaagtcgagtcagaagacggaggttaaaagcgtcgtatgacgagctcaaagatgaataaaaacagaagacaggctgaggagcaaagagcattacattaataagtagtgtgagggaatagggcaaaagaaggatatgtctaccgaatggagagaggcggaggaggctaagagtgcaccatcgctctacagcctgggtgacacagagagatgcgtctcagaaacnnnnnnnnnnnnnnnnnnnnnntaccaatacacggggagttctaagcacagaaaaataacctaaggattatttttcaatttattcaaatgaaaccaaagatgggcttgccgtggttaactagagtctttctcaaaagaaagatttcaatctggtgtatgtttaggaggcttgtacactctcagcttctcagttaagtgtctgccaagactcttttctctgactacacattgagcctccaaaccatgactgaaaaaccacagcttcatgggcagggccctgtgcaggacaccctatttccaatgaacaagaaatgaaagtgagataaaaaaatattttaaagtaccgtgtggagagaaggt

SEQ ID NO: 369808 - DNA, 1017 bp, Homo Sapiens
  misc_feature (998)..(998): n is a, c, g, or t
gggggtacactgttggagagatgagacagtcacaccagctgcccctagtggggctcttactgttttcttttattccaagccaactatgcgagatttgtgaggtaagtgaagaaaactacatccgcctaaaacctctgttgaatacaatgatccagtcaaactataacaggggaaccagcgctgtcaatgttgtgttgtccctcaaacttgttggaatccagatccaaaccctgatgcaaaagatgatccaacaaatcaaatacaatgtgaaaagcagattgtcagatgtaagctcgggagagcttgccttgattatactggctttgggagtatgtcgtaacgctgaggaaaacttaatatatgattaccacctgatcgacaagctagaaaataaattccaagcagaaattgaaaatatggaagcacacaatggcactcccctgactaactactaccagctcagcctggacgttttggccttgtgtctgttcaatgggaactactcaaccgccgaagttgtcaaccacttcactcctgaaaataaaaactattattttggtagccagttctcagtagatactggtgcaatggctgtcctggctctgacctgtgtgaagaagagtctaataaatgggcagatcaaagcagatgaaggcagtttaaagaacatcagtatttatacaaagtcactgggtagaaaagattctgttctgagaaaaaagaaaatggtctcattggaaacacatttagcacaggagaagccatgcaggccctctttgtatcatcagactattataatgaaaatgactggaaattgccaacaaactctgaatacagtgctccacggaaatttctcaagggagcattcagcaaatcccaacgctgcaagcccaggttcttacctgcccctgatggggaaaagacccttctttggaatatttaaccaaaagacttctttcttgcccgtcttctgccttcagggtaaactttccacatcntcccgcttggatggagccc

SEQ ID NO: 369809 - DNA, 691 bp, Homo Sapiens
ggccaggaggctcccggggctgagtctaaatcactcatcattggttaaagccgagctcacagcagaataagccaccatgaggctgtcggtgtgtctcctgctgctcacgctggccctttgctgctaccgggcaaatgcagtggtctgccaagctcttggttctgaaatcacaggcttcttattagctggaaaacctgtgttcaagttccaacttgccaaatttaaggcacctctggaagctgttgcagccaagatggaagtgaagaaatgcgtggatacgatggcctatgagaaaagagtgctaattacaaaaacattgggaaaaatagcagagaaatgtgatcgctgagatgtaaaaagtttttaatgctagtttccaccatctttcaatgataccctgatcttcactgcagaatgtaaaggtttcaacgtcttgctctaataaatcacttgcccctggaaaaacactccaacccgacaatccccgcttccttctttttttcaccttttccacttatgtacctaataagatctatattaaaccggcatcattaaagtgacatttttcttttaatttcccgctttatcccttgatatcgaatcattttcctaaacacatctttttcatattaagccacattcttattcccctcacctaattgcaatttcctccctcctaaaaacttccctt

SEQ ID NO: 369810 - DNA, 384 bp, Homo Sapiens
  misc_feature (59)..(59): n is a, c, g, or t
ggggctttccaaaatggcgcgggtgctgaaggctgcagccgcgaatgccgtagggcttnttttccagacttcaagctcccattccaacagtaagagcttcttccacatcacagcccttggatcaagtgacagggtctgtgtggaacctgggtcgactcaaccatgtagccatagcagtgccagatctggaaaaggctgcagcatcttcataagaatattctgggggcccaggtaagtgaagcggatccctcttcctgaacatggagtatctgttgtttttgtcaacctggggaaataccaagatgggaactgcttcatccattggggacgtgacagtccaattggcaggttttctgccaggaaaaacaaggctgggagggaatg

SEQ ID NO: 369811 - DNA, 1186 bp, Homo Sapiens
  misc_feature (362)..(362): n is a, c, g, or t
atatcgactttatgattcggtggatgagcagcgagcataataaatataagtggggtgaaacgagtgtatctgtggcggagcggcagagcttggatagaacgaaagcaagagaagagcgcgtctcacggggaccgggagcgtgtagagacacaagccaagaggcgcgcgcagcacgagagaagacgggaggtgtatatgagttttgatagtgttagtgtggattattgtataagttgtgtaggtatatatagagtgtgacgcaacactagtcgcgttctggtcgtaaggcacggggggaagtagtaatatgtgagatgtgttaaacagatcagaatccaacagcaatttgtcgctagaatagntgtcgatcaaaataggttcagtgtcgtaacggcgtgccgatagtgtaattcagcgcgctagggaacagcaaatatgtgatatactgtctccgcgcgtagagacagggaggaatagtcacctgttcgcataatggcgtgcgagtttaggatactgggagtgatcgagagaataagaataccgaggcgttgacgaccgtaggcggcggcgcgcggattcttatgctcgtgtgtttaggcttcgttaaacatagtgtttaagactagggcatataataacagatgaaaaagcgggaaatagagaggaaaccacgcaggacggacgaaggggaggcacgttgaagagcgatagtatatataagtataggaattagtggtgcgtttgggtgggcggatagtatggaggatgacgaccgagaaggaagcagtccacagaagcatggaaaagggcgctactaaaggagaagaaacagagttgtagatagtgggaagtggtagatgggattgcgcttcgcgctgtccatgaggaaacgagaaaagatggtatagcatgatgcttcagggaggtccataatatttcttacacatccacggtggaatgggctttcaatagacgttgttgtgactttaaagtgcttgtatctcctggcatgcattctttcatgtgtagtaatacctaaacatgatatctggtacatctgacacatgagtaatacagccacccacatgaagtggaaaacactgttcaggaacatccaaaacatccaaggtgaacacgtggcaatctgagtaatgtatgtccaaaatccatccttggtgtaagtgcc

SEQ ID NO: 369812 - DNA, 843 bp, Homo Sapiens
gtgctagcttggctcccacacttgacctcacattttgagacccacatccggtcagaggaacaaagttcaatgtcattgttctctggtaagtattgtgtaagattttctcttaatccttgatgatctgtcagtagctagattcctgcccttgcatcaataactacttcataagactcattcttcaccttcactgaccttcaactctacactctacctctgcctcacccttgcttcccactctgcacttcctcccaggcagtctgccacctggcttctctaactcctgccttgagccaaatcccgacaggacttgttactttcacttgctcttttttcctcccattttagcagccaaggatgggaattacacagcgaaatgcaggctaatcagctaaatctagattaaatatgctagtccttggggaccttgagctgaattaatggaaaccgaggtttttaatgttccagactaattttggaagctcacttccagcagaggcaaacttcaggctgtccaaagggagcagatggcaaggctttctccaggtgcccatcctttgaaacagccctcggcaaaaccatgaggaagggaggaggctccatgatcttaccttcccaattatgaagtaagcaacgatgacctcttaaactcgtgaatctaacagtggttgggcatagataattgctgtgaaatacttgatgactgattagctttgataaagaattctgagataatttttatgctgttgttactaatcccaccctcagcattctttcaaaaatgagattatttgtctttttcttcatggccttggtggaaatataaatttctttttaaccctc

SEQ ID NO: 369813 - DNA, 1318 bp, Homo Sapiens
  misc_feature (712)..(720): n is a, c, g, or t
aaaaaaaatataagtctcgaggattgcgtttggcggtttgactcacaaaagtggggtccatgtggaaaaaattttttgaaaaggaagcttgagggccccttttttggggtgttcccctttgtggggaaatggaattcgagttttctcctttaattcacaaagctgtaaccggaaggttgtggtccattttttgttagatttcacctaaaaggattttcttttgagagaagggttgggagtttaaatgaaaaacgggggataattgataatataaaatttttatttttaaaattaacgaagggggttgttcctttcccatttccgtttttttacccctgaaggtgggaattcttcttgtttattttttggggggccagaaaaaaccagattctgccatgggggtgggtaaatttttactccttcccattatgaatatatgtatctccgtgatggtgcttgttttatctaatagtaaataaaattattcactttctaattatccacaacatggacaagctttttctttgtgccttttcattagataatttttcagggtgttgcagatacacataaggttagcagctactttgaggtacaccattttaatcatggtcagaaggctaatcaaaaaagtattttacaagaattgttttttaaaaaatatattaaatattatcaaagacaacgttggcatcttttgagatggtcatannnnnnnnncctctgctgacttcattatccaaaacaaataatggacattccttaacattcctagaatcaagtctgcttggtcatttaactcatatatcactttaatttgttttaaattattaaaagtgagatttatagttatcactgttagagtagtcatatcaaaaaattttttttcaagaacttggggtatttctcttcttttcagcatcttgcataaatcagcatactaaaggactgcctgttaatgaggaatcttccatgaaggtgcttttgggaggagtgaattctccattaaatttcaccatattttacttagatattaactactataatgagtttaatatatttttaaggtcattttgtatataagtcactccatattgtgtatctgtaaaaactgtgttcagtttttcatgtttgcttttcagaatgtaggaaaaactcatcttttaaaacacttgtttaagctttacctgattactctgaagattatctgtttcccttattcttccagaattttcacaatcttttgccaattttattggattttcaagaagttattactgttagttcaaaatttatgaatcatttcttctcattcacc

SEQ ID NO: 369814 - DNA, 971 bp, Homo Sapiens
  misc_feature (97)..(149): n is a, c, g, or t
ggcatatgtaaattataagagggacttcaattaagtcactcctgagaaaatatccttttttctagaagaaagaagataaattttgaggcaatttacnnnnnnnnnnnnnnnnnnnnnnnnnnnnnnnnnnnnnnnnnnnnnnnnnnnnngttcaactaagagtgcttatttcttcttgaaggttaacattatgtttattaagtatcaaaatggaattatcttttaaaaaagaagacaagttttccatactgtcacagtaagctccaaagaactttgtctttctcataaagtaatattctttatttgcatccatttactatgattccgttaatttgttgaattaaatgcctttataaaaatatttacaaatgttttcttgccttaaaatgtaacattttctacttaaatttaatttccaagagagtgattatttgcattacaaaggaattcttaataattcctgtaagcctaggaaataggaatgccaaagtaacatttaatgtacttctctataacttttcataatcagaaattttaaattatgtttatataacccatttacttttattttaatgtgaatatatattcagaaattatttgatgtaaatttcaaaatgattataggaattaagctgaatcctaatttttttgcttagatttagaaatatgtatgtgaaatttaagaatttatataatctgtgatttagtggaaataagaacatcccctactttggttcctaatgagtatattatgttattgttttgtttagtttgtgaacaaccatgtattagctttacttagctgatgtcagtaaatgtttctgtctcctaaatgtaaggactgtactcattaatttgtgtaaaagtaaaacactacagtagcagaaaaaattgcactggctctttagccaaaataagcactgtaacatggatgtattactattactgccaaataaaaaagtgatggtaaa

SEQ ID NO: 369815 - DNA, 1109 bp, Homo Sapiens
  misc_feature (730)..(730): n is a, c, g, or t
  misc_feature (782)..(782): n is a, c, g, or t
agcagacaaggatcaaaagaaattatatctgaatagagttgggtttaaatgcactgaacgtgaaagcatttctctcaccaaattagaaagttcacccaggaagcttcataaagataagagacaggaaaataaacataagacctttttaccggtgaaaggtaacacagaaaaatcaaacatgctggagtttaaattatgtccagatatcttactaaagaatacaaactctgtggaagaacggaaggatgtaaagcctcatcctaggaaggagcaagcccctctgcaaggttcaggaataaaaagtacaaaagaagacttggtaaaatttggtgctacaaagaaaaggacacagaaagacagccaagagagagataatgttaattcaagactctcgaagagaagcttcagtgcagatggatttgagatgctacaaaacccagtaaaagattcaaaagaaatgtttcaaacctacaaacagatgtacctggagaagagaagcagaagccttggtagcagtcctgtaaaataattacaagatgtggttttgtaattgccactgggaaatttctttccttttctgttcaaaatatttcgctgaaactaatgagaaatgccatgataaagatttctcagagtttggttcccactttcattgtatttcattgaaagtgcttaattaaaatggcttgagaactttgggtagccatgtgtaagaaatggatggtattcnaccggggaaacaaggtatttgaatttctactttattgaacccagatttaccnattattttaaaaggaatgcttatacaaatcaatttgaaattctacccatcttgagggaggacccgttcctcagttaaggacttgtttatttaaatgggactgtaaatatgttttggtttctaagctatattagcaaaatttatttttcaaaaatgcccactgtgatgtgaatgtcaaaatatattcttaagtgttttataactaattgtaaactttttttcagaagtcttattttatacttgtgaaactgaacacaattttgggacaacgtttaaacattacttttcatacttgaaataaacatttattttttaaaaaactaatttg

SEQ ID NO: 369816 - DNA, 682 bp, Homo Sapiens
gggagttggtgtcatgcaagaatctattcacactgactaaagatattggaagagtgaagatcagagaattttaagtctgaaatttggcatcactgccctgaacaatataaccttagttggcataaactactcatacagacaaaggcattatccatcacaataagtaactttttgtctttatttcaaccggacaatcgtgattagaaaagctcctgtgacaaaattcaagaaaacctgacataaatgaacaacaatacaacatgtattcaaccatctatgatctcttccatggctttaccaatcatttacatcctcctttgtattgttggtgtttttggaaacactctctctcaatggatatttttaacaaaaataggtaaaaaaacatcaacgcacatctacctgtcacaccttgtgactgcaaacttacttgtgtgcagtgccatgcctttcatgagtatctatttcctgaaaggtttccaatggggaatatcaatcctgctcaatgcagagtgggtcaatttttctggggaactcctatccatggcatgcaaagttatgtttggtccagtctccttaattttttaagttgggattggccaataaacccgcctatgcctaacctttaatggcaaaaagggatttccttccccaaggaagacctacctttcctggcctattg

SEQ ID NO: 369817 - DNA, 988 bp, Homo Sapiens
  misc_feature (763)..(763): n is a, c, g, or t
  misc_feature (927)..(927): n is a, c, g, or t
gggcttcattacagatgtgcagcaccatgagggccctggtgcttctgctgtccctgttcctgctgggtggccaggcccagcatgtgtctgactggacctactcagaaggggcactggacgaagcgcactggccacagcactaccccgcctgtgggggccagagacagtcgcctatcaacctacagaggacgaaggtgcggtacaacccctccttgaaggggctcaatatgacaggctatgagacccaggcaggggagttccccatggtcaacaatggccacacagtgcagatcagcctgccctccaccatgcgcatgacagtggctgacggcactgtatacatagcccagcagatgcactttcactggggaggtgcgtcctcggagatcagcggctctgagcacaccgtggacgggatcagacatgtgatcgagattcacattgttcactacaattctaaatacaagagctatgatatagcccaagatgcgccggatggtttggctgtactggcagccttcgttgaggtgaagaattaccctgaaaacacttattacagcaacttcatttctcatctggccaacatcaagtacccaggacaaagaacaaccctgactggccttgacgttcaaggacatgctgcccaggaacctccagcactactacacctaccatggctcactcaccacgcctccctgcactgagaacgtccactggtttgtgctggcagattttgtcaagctctccaggacacaggtttggnaagctggagaaattccttactggatcaccgcaacaagaccatccacaacgattaccgcaggacccagcccctgaaccacagagtggtggaatccaacttcccgaatcaggaatacacttctagctctgaattccagttttacctacataagaattgagaaattncttgactacttaagaagagcattgaactgagggaaagctaaaaggaaagattcaatattaa

SEQ ID NO: 369818 - DNA, 497 bp, Homo Sapiens
gaaataagaatcactaactgctcttatagaaattatgatattcaagtaaaataatgaaaaataaagcactttagtttttcaaattattagtatttttttctctgtagatagtcttcatctaattttaaaattgcaatgataatataatagtttgagtatttgtatacatgatgaatttgagtatatatgatgaatattcatgtactttttatagaatctatttattagagatcccagtaagacctatatattatagattaaccattagtgatttatgtataatgagtagaaaaagacagcagggaattaatatttttgttgttaaagattattttttaatagtagttatgaaagtaattttaaatccaataaactttgaaatattgttaaaaatttaattttaaataaagtcacatttgaaaattttaaaaatcttccagggcaataaccctatcctagaagacttaacttagaggtaatacttaaaaacccagaaa

SEQ ID NO: 369819 - DNA, 515 bp, Homo Sapiens
  misc_feature (185)..(185): n is a, c, g, or t
cacagagattagagctccctgtgaaattcaatcactgcctttaggatctcccacaaagacctggtcctcccaatagcacatgcgtttcctctgtgagctgtattcgcatccagcgccggagccctcagaaagaatgcgtgtttacactctgtactctccaatgggtaatatttatcatagaaatnctaatacatattcttcagtcttgaatccaaacttctggtacagtagcatagcggggttgcttgctgaaacgtgaagggttacgtccttgcccatgcaggtctgaatcagatgatagatcatgaaagttgcaatccctgctcttctccattcagggtggacgaacagaaatgaaatgtaagcttcattgtatttcacatcaggaaccatgaagccaaaggcaatgatgacttttttataaagaacaacaacactgaagtctgggtactgcagacactcagacaggtcaatgccaggccaaaaaaactcctgacacatggagttgatcgttg

SEQ ID NO: 369820 - DNA, 867 bp, Homo Sapiens
gaatttggaaaaatgtgaaccggttatattttaggtcacccaggtttgggctttggttggaaatttattggcgggggaaaaattaaaatttccatattggcggaaacccctgttgaaacctctacaaggacccagggaataacagggaaccatgcagatctgtataagaagattgtcaactttcacagcagaaagtgaaggaaacaggagtaaatgggaaggcatttcatgtcctcagttgggaaaataaaacatttaaactaatttcagggtttaattatattataaatttttaaaatttaatgcattatattttagatttcaatgtagttctaacctaagaataaataaatagcaaagcatgtttggaggttgtggaaatcttgagtatgtttcctaccagatgttaaaacatgtttaaaatgacaatgattaaaacaatgtactgttattgacttacttgaacagatggcacacacaaaccgggtgacttgaggagagttgaataaaggaactgtttataaaagtgtaggcagattttagagaaacgactaaggaattatatgcaatactccaggccaaccttagacatgaaaggtggtgaggagacaggggcagttataaatccactaatggaagaacagtggaagacagacacctggcaggtgctgagcccttctagagggacaaactgacccatggccagaaggaagctaaggcaacaaatgctccaacataccttacctccttcctctgtctcctgtgatatatttcactggtcaaatccaaccagaagccagagagcaaaggagtccgtggatgcagtccctaggcattagcagacaggggacagataagagtggaccc

SEQ ID NO: 369821 - DNA, 203 bp, Homo Sapiens
ggcagcagagagtgaagaggaggagttgacggctggatctgggctaagagaagatctcctaagcctccaggaaccaggctctaagacctacagcaagtgaccagcccttgagctccccaaaaacctcacccgaggctgcccactatggtcatctttttctctaaaatagccacttaccttcaataaagtatctacatgcggtg

SEQ ID NO: 369822 - DNA, 1004 bp, Homo Sapiens
acatcagagtgcatctgacatgtcttgggcgttgacaggagccaggtgtatttccaggtgcagtggatattgccataaggccattaagtgaaatacttgggtttcgtgagcagagctaatccattgcaggcatttgctagaagaaaagtctccactcagggttaccaagtgttatgtccaaatgcaggtcgttcaatggaccattcagatgattgcaacggcaattgaaaggtaccgtatgccacggatgtacaaggagagcgatatggaattagctccgtggatctctgccaaactttcttttgacatgagttagatcccactgaccatgtcatagttctgacatgaagtgttcacgctgctggcccagctgctttagagataaggagcaccaccaagccccttcaactggagggctattccagctgtcatgtacaagcccccctggctgtggtaagcagagggtgctgagtgcccaccaagcttccagcacctgcatagcgatggttgctgagctcgtcagctcagcaggcagcgaaggctcatgaaggacactggggtaccccacgatcttctccgcctctgacacctacctgattccagtgggccggggacttggaggaccgaccacgccaagagcccaccgaggagatggtgtcgagggacggggaccaccacaggcgactgcaggggaacccgaggctccaagataacgtggcaagtgcaacagcagctgccgaaagttcatggtttgagtctggaagggtctgggacctgggggtatccagaagtgccgcgggaaacaaaccaggggcagaggaggaacttacagtaactaaaaggaagcggcaattcttgaccctcagagtaaggtggcttcctggagcagtgaccagaaacgaactttaactgctgctttctgcagcccaggctgggcaaacaacagtcccagctcagcactgcccccggccacccggggtagaaaccacagccactgcctatgc

SEQ ID NO: 369823 - DNA, 497 bp, Homo Sapiens
aatgcagcggactcggcactaagaggctgagtgggccgaaagttgtctcccaaaatcccatcacagccttccacaagttctgcccccttaacatgtgtcctcagccttcgaaattcttctatctgtagctgggatatagttaaagggtatcggaataatatcccaggtgacaccttcactgcaaggtgggatggtgagagagccttcatacacccagtaatcccgcagcagagggtctggtaataaagtgttaggattaaagcaaggtattgttttggacttccccttatactgaatatcttggaggatttcagtcacagccttcaagccaacatgttcctttcctatctgaacaaacagagcaatgatggcgattccgtgcggcttccccacagcctcatcaatgctgccaaacagagtggagttccagtggatcagatggagctccatgggaaaagctttgaaattaaccgtgtgctcagaaccacgctggtttt

SEQ ID NO: 369824 - DNA, 492 bp, Homo Sapiens
ggggagtcacttgccatttctcataacagcgtcagagagaaagaactgactgaaacgtttgagatgaagaaagttctcctcctgatcacagccatcttggcagtggctgttggtttcccagtctctcaagaccaggaacgagaaaaaagaagtatcagtgacagcgatgaattagcttcagggttttttgtgttcccttacccatatccatttcgcccacttccaccaattccatttccaagatttccatggtttagacgtaattttcctattccaatacctgaatctgcccctacaactccccttcctagcgaaaagtaaacaagaaggaaaagtcacgataaacctggtcacctgaaattgaaattgagccacttccttgaagaatcaaaattcctgttaataaaagaaaaacaaatgtaattgaaatagcacacagcattctctagtcaatatctttagtgatcttctttaataaacatgaaagcaaaa

SEQ ID NO: 369825 - DNA, 1018 bp, Homo Sapiens
tcacatagatataatatcagatttcattaattataaaaagttgcccagttctgtaattactgaacagagggaatgactcaactaattggctacatgttgcaacaaatttaggcctttagagttgaagcactgacttaaaacgacttacatttctgttctttggtcaaatgaccatacatgatatgggacaaattgtttcattttgtttgttttttaataagggaacttggtaaagtagttcctgtcagataggattttctcaagagacaatttaacgttataaagccttctaaaagtgaactaaatattttataactttagtaatagcttgggatggttttgagaaaataacctgtatttatcacattgtcaaacagaatttttctttgaatcagacaagttcaagctctaaattgatgtgctatatacttaaaatcctaggaagttatctgtaaccagtctcttgtctcaggctcttcaccttgttaccaatcctcgtaagtatgtaaaggaaacatatttttaacagaagcttaacagtaagaaaaaattactaaaagatgcaattcaaagataggtcccagtttaacactgaattgcttgacttctgtggcttttctttttctggccacatttatttatttaagcaatttttgtatgccttgttatttcatttccatagagattatattgtatcagtgtttatgtaagctggaatcatcctcagttttttgctgataatttttcaaataaagatacatggataaattgtaaaatacactaactcttagggtgttgtagtagctgaaacattggagatgcgtagctgtcatgctttttctgaatggacaggagaaacataagctacggagtattcacttctgaggatgcttttcccggaaaaaagaaaggctaggaaaatactcgcaacttcctcagaaccctctttcttgttaaccgggtatcttccgacgggaggggttgctctttacattacccgatagactatcctatatga

SEQ ID NO: 369826 - DNA, 636 bp, Homo Sapiens
  misc_feature (40)..(40): n is a, c, g, or t
  misc_feature (90)..(90): n is a, c, g, or t
  misc_feature (109)..(109): n is a, c, g, or t
  misc_feature (130)..(130): n is a, c, g, or t
caagaaaaatccggtggcaagggaaaatacgggtatttcncaaacccacccagcctattcctaaggtataaaatattggtcactttagangccttaaaacgttaaatgncccctgaggaaaaccccaccngacggaaccaccttacccagtcccccaattaaaaaacaaacaaatgaaaacaattggcccccaaaccatgtatggtcatttgacccaaagaacagaaaatgtaagtcgttttaagtcagtgcttcaactctaaaggcctaaatttgttgcaacatgtagcccaattagttgagtcattccctctgttcagtaattacagaactgggcaactttttataattaatgaaatctgatattatatctatgtgaaaaagtcaaataagatgaaacattaaatgaactgtgcaacaaacactttaaatattcaactggatctaattgcttacttgctaacaattgaactttttcagtgtacaaagggatgaaaggggccctgagtttttaagtaacatgatgtctgtagaatgcatctaaaacatgaagatgtttctgaaatctaaaggtataaataaaatggataaaacccacatgttgccttttaaaactgaaaaccaaatcaagttgta

SEQ ID NO: 369827 - DNA, 887 bp, Homo Sapiens
agcggggggtagccgcgcgcggggaaggagggtccaggcgtgccggacccgcccccagaacccgcgcctagccctcccttccgcgcgcttactttgtttataacttgaaaaatcctctccgtctcccttccctgcctcctttcctttccctttcctctgccagtacaactagacccggcgtctggcgtccccggtgcccagcattctgcggggcaggcggattaattggaattcttcaaaatgtcaggtgtggtacccacagcccctgaacagcctgcaggtgaaatggaaaatcaaacaaaaccaccagatccaaggcctgatgctcctcctgaatacaattctcattttttaccaggaccccctggaacagctgtccctccacctactggctacccaggaggcttgcctatgggatactacagtccacagcaacccagtaccttccctttgtaccagccagttggtggtatccatcctgtccggtatcagcctggcaaatatcctatgccaaatcagtctgttccaataacatggatgccagggccaactcctatggcaaactgccctcctggtctggaatacttagttcagttggacaacatacatgttcttcagcatttagagcctctggaaatgatgacatgtttcgaaactaataatagatatgatattaaaaacaactcagaccagatggtctcacattgtaaccgaaagacacagatgactttaccaggaaatgcctatcggacactaaggcccttcgtcctccgggtcactgattgtatgggcccgagaaatcatgacatgcagagacccttcagaatgcacctgctgttgcttctgttgccccttctggcaaacaagactgtaggtcaatgtcctcc

SEQ ID NO: 369828 - DNA, 786 bp, Homo Sapiens
agcgggcgcggtgcctgcgggcaggcgcggaggttgcgcggcgtcctgcgctagcagttcccggacactgcgctcgcgtcgcatcctcaggtggttgcagaagtttcgtggtgtcgggcgcgcgtctgcactgcagacgcagagggtttgggagcgagcagtttcctgcccagggatgggggtcctggctgcacttcacgggggcggccctttcgtttcgctctgcgtgacaggtctcgcttgattgggtttctcatgggtctctggcgtttctacggcgcggctctcacggactcaggccaggccactcgcaggattaattggaattcttcaaaatgtcaggtgtggtacccacagcccctgaacagcctgcaggtgaaatggaaaatcaaacaaaaccaccagatccaaggcctgatgctcctcctgaatacaattctcattttttaccaggaccccctggaacagctgtccctccacctactggctacccaggaggcttgcctatgggatactacagtccacagcaacccagtaccttccctttgtaccagccagttggtggtatccatcctgtccggtatcagcctggcaaatatcctatgccaaatcagtctgttccaataacatggatgccagggccaactcctatggcaaactgccctcctggtctggaatacttagttcagttggacaaacatacatgttcttcagcattttgagcctctggaaactgatgacctgttttgaaactaatcatcgatatgcatataacaccaatcagac

SEQ ID NO: 369829 - DNA, 859 bp, Homo Sapiens
  misc_feature (696)..(696): n is a, c, g, or t
  misc_feature (699)..(700): n is a, c, g, or t
  misc_feature (719)..(720): n is a, c, g, or t
  misc_feature (758)..(787): n is a, c, g, or t
ggatggaactatataatggaatcactcctgtgccacttagtgggttgatacatattattggccatccatatggagaaaaaaagcagattgatgcttgtgctgtgatccctcagggtcagcgagcaaagaaatgtcaggaacgtgttcagtctaaaaaagcagaaagtccagagtatgtccatatgtatactcaaagaagtttccagaaaatagttcacaaccctgatgtgattacctatgacactgaatttttctttggggcttccggctcccctgtgtttgattcaaaaggttcattggtggccatgcatgctgctggctttgcttatacttaccaaaatgagactcgtagtatcattgagtttggctctaccatggaatccatcctccttgatattaagcaaagacataaaccatggtatgaagaagtatttgtaaatcagcaggatgtagaaatgatgagtgatgaggacttgtgagaattcagtctactggatttaagggaatggcttatggagttgttatttcataagcattgaaaatggttttctaaactccaaaatggtcatcttatcaataataataatatttgaccatttccctatctggccaggcattttttctaagcccatggaagaaattatagtcctaaacaacacctatggagaatgggacctataaacctgggcccagaanatnncgcgtttcttcggccggtnngggaaaaccggaaagcctccacttcctggtcccgcctnnnnnnnnnnnnnnnnnnnnnnnnnnnnnncggaaatttccaagcctcaacctggggaaaactttttcccccccttcccccagggggttttcaaaagcggat

SEQ ID NO: 369830 - DNA, 1105 bp, Homo Sapiens
ccccacccgggaaaaaaaaggtgtttttcaaaagaatttggccccatttttaacagcttcccccttggggggtaggaagacttttcccaccgggggtggttagccaattttattgaaccggggggccactgggggtgatggctaaaccactcattaaccaaattgctctaaagggcctcagtatcaaggtgtgctttctgtacccttaatctggactttatccctgcagaacctcagtcttaccatgtttaacagcattgccatgtacgatatgcctttatcctacactgtatatatactctttatgcagaagtatatctaactgaaaagtataaaaatttaatggtggaaaacaaatgaattaaaaaatgtatcacggccgatagcccaggtaactgcaggtgaaatgtagccagaagtcagaatcttggggcaaaatcaagtatagtcttatgggctgtgccttcaaatggtttagttctataccctcttaaggcagaatcaaagttctcttaatgttttggcaagtgtttttcttcctggaggttcataaaagtaggtggaagaatcagtctaatggcttgttggcatgctaagggaaggatgtcaagttgacatccttggatacttggttaaaaactaaggctagtaggtgaagaaaaacaacagaatagtttttggttttaaatttgtacaaaggctacttattgaatactggaaaaaatgacaacagtgttttaccatctttgcataagaaaaaaatgattttccttttgaaactgtagctcaggatttaatcctgagtcacgtcatcatgtggtaaaaacaatctggattttacaataatttatataaagcaaaaaaagtcataaaaatgctaaatgatgcagagctacaaatatgatgaaacatgagcagaggggtcaaatcagatttttactccaggcaggtgttaagtttgtgaaaagtgatgcaatttgttatacattcaaatgcaaattagaactagctgccttacgatgagatttcactgtcatttttttagcaccctaatttttgtcggttctgtaggtttcaagtagcagaaacttacatctatttcccc

SEQ ID NO: 369831 - DNA, 751 bp, Homo Sapiens
gggcctctggatgtcaaaagtaaaaagattcatgtagtggacagtgggctcacatttaacctgccgtatcccttgatactgagacctcagagaggggttgatctcataatctcctttgacttttctgcaaggccaagtgactctagtcctccgttcaaggaacttctacttgcagaaaagtgggctaaaatgaacaagctcccctttccaaagattgatccttatgtgtttgatcgggaagggctgaaggagtgctatgtctttaaacccaagaatcctgatatggagaaagattgcccaaccatcatccactttgttctggccaacatcaacttcagaaagtacaaggctccaggtgttccaagggaaactgaggaagagaaagaaatcgctgactttgatatttttgatgacccagaatcaccattttcaaccttcaattttcaatatccaaatcaagcattcaaaagactacatgatcttatgcacttcaatactctgaacaacattgatgtgataaaagaagccatggttgaaagcattgaatatagaagacagaatccatctcgttgctctgtttcccttagtaatgttgaggcaagaagatttttcaacaaggagtttcttaagtaaacccaaagcatagttcatgtactggaaaatggcagccagttttctgatgcttaaggcaattttgcaatccccatggacaaccggggatttaaaagttcaggttcagaaaaggccctaa

SEQ ID NO: 369832 - DNA, 999 bp, Homo Sapiens
taagatactgacggctgatgcggtaggaagttagtcgttagtgagaccgatgaaggaaagacggtataacaaatagacaaggaatagtgaaagagacgacttttcgggttcagaagtagaacaacactgtgaccaaatgagcaattggggaatgagaaagtaaaccacaatttaatttcttctatagtacacattcgagggttctcaaccagtttttgttcagaaatccaggttgtaaaaaccattttttaagctaccaagtggcgttctaaaatatggatttatttttcagaccttctactttcaatttcaaagtaagtctctgttaggcaaggcctcttgtttaatgaaaagcatacttaaccctaggcaaaaatcatttctataaggcagccacttttagaagtttttaacttctaaaaagttaaaacttctttaacttttagtttttcggaagtttttaacttctaaaaaatgaagtataatatcctgagctgtcatatttttcctaactctaaaaaaagtcctacaatgattatatgccaataaaaattaaataatctaaaacaagatcatataacttcctaattcagtgttacccttttaatgacatgaaaactaacaattaaatgacacatctaaaagtcacaaagtagtttaaaatctgaaatgctggaaggctgtatgcttcattcttacaaataataaaatcttatctctttgattcaaacttcagattaatacttactgagaaatatcagtatgtctccttaagatgcacattttataaagtgaatcttctagaatagtaaaaagaagataatgtagatttgaagttttattattccactagaaaaggaaatttgaacaatctacgtgtagaatcctcacttctggtatctctatacaatggaatacagattgcttgattcatcgatgttccaattacatctgctggctttgcaaacactgaacgaagggggatgaccgaggatcctc

SEQ ID NO: 369833 - DNA, 910 bp, Homo Sapiens
ggagaaaaatgctgacaacaacagcagtgcattcactgctttgtctgaagaaagagaccagcttctctctcaggtgagggaacttagcatggtaacagaattgagggctcaggtaaagcaactggaaatgaaccttgcagaagcagaaaggcaaagaagacttgattatgaaagccaaactgcccatgacaacctgctcactgaacagatccatagtctcagcatagaagccaaatctaaagatgtgaaaattgaagttttacagaatgaactggatgatgtgcagcttcagttttctgagcagagtaccctgataagaagcctgcaaagccagctgcaaaataaggaaagtgaagtgcttgagggggcagaacgtgtaaggcatatctcaagtaaagtggaagaactgtcccaggctctttcacagaaagaacttgaaataacaaaaatggatcagcttcttactagagaaaaagagagatgtgggaaacccctccaacaaaccatccaggaaaaaggatcaacaagtgacagaaatcagctttagtatgactgagaaaatggttcagcttaatgaagagaagttttctcttggggttgaaattaagactcttaaagaacagctaaatttattatccagagctgaggaagcaaaaaaagagcaggtggaagaagataatgaagtttcttctggccttaaacaaaattatgatgagatgagcccagccagacaaataagtaaagaagaactttcagccatgaatttgaccttctggaagaaagaaaatgagcccgagaaagaggaaagcttccaggcaacctcttattaaccggaaagggagctttctggcaaagaagtcagtaaaattggaaagaaaaaattagcccccctttaaaagatggaatctct

SEQ ID NO: 369834 - DNA, 750 bp, Homo Sapiens
  misc_feature (148)..(166): n is a, c, g, or t
  misc_feature (285)..(301): n is a, c, g, or t
  misc_feature (357)..(491): n is a, c, g, or t
ggtaggtttcaaggctaccccagggaggacggagctgggacgggttcaaaaaggagccccatggggtttggcgggtggcatttgagcccatggatggcaccactgcaaatcccaggcctgggcaaccagagggaggacccatgtctcnnnnnnnnnnnnnnnnnnncctagctaggtgtggtggcatggccctgtagtcctagctattcagaaggctgaggtgttgggaggattgcttgagcccaggaaatcgaggttgcagcaacagagcaaggccctgcttcnnnnnnnnnnnnnnnnncattttcggtcaagaatactacacctcaggaggcagagattgtacctgtatgggtnnnnnnnnnnnnnnnnnnnnnnnnnnnnnnnnnnnnnnnnnnnnnnnnnnnnnnnnnnnnnnnnnnnnnnnnnnnnnnnnnnnnnnnnnnnnnnnnnnnnnnnnnnnnnnnnnnnnnnnnnnnnnnnnnnnnnnntttcaactgagtcaacaattgtattaggagtgacaaaatgatgattttctaattctattatgcattccttattagctgcattcttctgtaagtagcccctgctcgtattttagatgatcactatggagtcatggaacactaatattttttaaataaattcaattaaattaacctatcatctgtgttaaatatacatacatctcatacatacaggaacatagatagaacacatctacccatctacctctacctatatgcc

SEQ ID NO: 369835 - DNA, 901 bp, Homo Sapiens
agaaccgcgaggtaatggtcaccttgtggggaccccgagaaggggaaggcccagtttaggggcttttatttcccaggccccctgtttggatttggggggaagccagcctccaaccgaaacctcccttggaagtttcttctcccaccaggcacgggggtaccaaagtcaaggcccaggggggtttgcaaaacgggggtactttccgggagaaactcataagggtagttgggatttcctgatctgatgaagtgggaaaagtactgcaggattttcagggacaggctctctcctccagagaaaactgcccctcgtaggctgggtaaaagggaagcccccaaggcaaaactgaacatcccccagcagctccaggctgccatggccgtagtttttcaggagcatggtacatgaagacgtttcctcgggccctctttgcccaggcactggccatgtcgattataggggcagatgataaagtagtcccgggtggcattctccagagcccgggagaaggaggcatagtcatccgtggagtgctccagagagtaataccatgtagcagcagcctcgacgcgggcatctgagtcctcgccacccagagaattctgcagtgcctggtaaaaggctgttttgctactggtccggccttgactttcctcaaattgcttcacagcctttgctctgttgatgagcccgtcgtcctgagaactcccaatgagcagatcgacctctacccgtaaagacctcttcagtgctctggctggaggctcacggaggaagtggccatcgatcacaggaccccagtagtggaaagggccactcacggccaagagcttggtctgggcatcattgaggacattggcaggcttctggcggaggcaggacaccacttcttggctggacc

SEQ ID NO: 369836 - DNA, 771 bp, Homo Sapiens
gggggctcagcagcaggcaattgctttggcaaaggaggtcagttgccccatgtcatccagccaagaagtggtgtcctgcctccgccagaagcctgccaatgtcctcaatgatgcccagaccaagctcttggccgtgagtggccctttccactactggggtcctgtgatcgatggccacttcctccgtgagcctccagccagagcactgaagaggtctttacgggtagaggtcgatctgctcattgggagttctcaggacgacgggctcatcaacagagcaaaggctgtgaagcaatttgaggaaagtcaaggccggaccagtagcaaaacagccttttaccaggcactgcagaattctctgggtggcgaggactcagatgcccgcgtcgaggctgctgctacatggtattactctctggagcactccacggatgactatgcctccttctcccgggctctggagaatgccacccgggactactttatcatctgccctataatcgacatggccagtgcctgggcaaagagggccccgaggaaacgtcttcatgtaccatgctcctgaaaactacggccatgggcagcccgggagctgctggccggatgttcaggtttgcccttgggggctttccctttctaacccagccctaacaagggggcaggtttttctcctgggaggaagaaaaaaccctgttcgcctgaaaaaatccatgccaagtaactttttttccccacttttcttttccagaattcaaggggaaaatcccccca

SEQ ID NO: 369837 - DNA, 877 bp, Homo Sapiens
ggggaattttcttatacttcaaggcatcatggaaacacttttttcctgtttggatattgtggaatttaaacgttcaaataaataaatggcataactaagtgttccaaatttttttacaatgtctttgaccctattcaaacactttaggtatttactgaccgtctgatgtgtaagatgtggaataaaactggaatcaattaattatttcactgtgttatcagcgcaagatcaaccatctgggtttcttaaagacacccgaaggattgaattttgtttcagtattgataatggcatagtctctatgtgctacatggaattacatcatttatccctccagtgccctatatgttgataagtatgtcagtttgacttagtatacatatatacagagatttcattacatttacctaataaatacaaaatacatttcgagtgttactgatctcctatgttacatgagcctcctgtaatcattgtgcattgatgttccaatgttttattgtttgtatgaattttaatttgaaaacaaggaaacaatccaaaagcagaaaaaatagcttttcttaaaattttcagtgctacattttcccctctgaggtcccatagagatttgaatgtataggagattatccgaaaacagctattttgattaaaaaatatatctcccaggattcaaccaacttaatgatgaagtactattgtctactgctttatacataaaagggaactttttatctgcttgtaaagggatttttatgtgtatttctgcataatcagatcgacttctattgtgttttctactgatgaaattctctgtaaaatgtctttttcttacattatccaacaggcataaagaataacagtaaagacttttgtg

SEQ ID NO: 369838 - DNA, 786 bp, Homo Sapiens
  misc_feature (194)..(210): n is a, c, g, or t
  misc_feature (322)..(370): n is a, c, g, or t
  misc_feature (539)..(623): n is a, c, g, or t
gggaaatgatcattgcatggaggcatgtataggtatgatctgtgtaaaatctgacataaaaacagtgctattctgagtaaaaatttttttgatgtgcttacataaccatggtgattaaaatgagtttatattttttctcaaaaattttagcagtgtgtaaagtaagtaatctttaactgaactctgaccacttnnnnnnnnnnnnnnnnnttgaactacctatagtagtctgtgtttaaagtgaatttttaaagacaaagcattctaaatgaactcaatataaaaacattcatttggaatgtacatactgaaaaatacaggnnnnnnnnnnnnnnnnnnnnnnnnnnnnnnnnnnnnnnnnnnnnnnnnncctaagtgccaacaattttctagatattatatacaacacaggctttgatcttggggacttttcccatatatttcacactggagtgaatgaagttgtacttcatttctagagaaaagttatacccaggtccccaattgagaatgtcttgcttgattgaaaacgacatcannnnnnnnnnnnnnnnnnnnnnnnnnnnnnnnnnnnnnnnnnnnnnnnnnnnnnnnnnnnnnnnnnnnnnnnnnnnnnnnnnnnnctaaagatagaatggcttctctgtttttcttctgaaatacaaccagaaaccatgtgtctatttctgaaaagataggattaatgatcactacaatgggtttaatcctgaattctggtttgtaaatctgggttacagcctaaactagggattataatgcctgccc

SEQ ID NO: 369839 - DNA, 442 bp, Homo Sapiens
  misc_feature (130)..(131): n is a, c, g, or t
acccccatttttttaagggggtaaccccccacccaggtttttatttccctggaaacttcattccaaaatgaaagggtttccggttattccctttcaccaaatttttggggtggctattttgaatttgtannttcattggtcaaaaaatgatttatagcaaatacaaaaatgaaacgggcagaaaaccacaaaatcacacataattggacacaccccaatcattgcgtaaatgattcatttcttcacgtctctgtccagcctttgtccttttgtgaatggatcaaattactagtactattttgaagcccttgtattttttaaactttacctccaaagcactttctgtcttagcatatactctggatcagcacagtactgcagaagacaaacggatctagctaagtggccaatgtgaaacactgaaacagaatgctgaaataaa

SEQ ID NO: 369840 - DNA, 1109 bp, Homo Sapiens
  misc_feature (702)..(702): n is a, c, g, or t
taaacacatggggcacttaaaaatctcttttcttttggaaaaggttatcttcggaaaaatttatattaatagccttcccaaaaacttttttaaatattgggtattgcccaaaccattttggtttaaaaggatatgtttcccatcatttatttttcaaggaagttatgttaaatacaccataaagtaaaccctgaaaagttcagcttggccttaatttttaggcttttacaaatcatatgctgaggtcttcatgcgccgatcagtacacacacagatctggaaacttcatctcatagactgggacagattggtattgggcatgcccagaagtaatggtcagtgttcctgatggactgggaggaggacgtaaggtgagttccaatatttgcgcaagtctatcatgaagcaaatttgctttggattcacactgtgctgctatttcttcaaaaggtgctttctgaatatttctctatcacaagacgcctcttttccttttcctgttcttccattccactggtatcaattgctttcttcaatgcttcaaaagtgatttcttcagtgttactaaccacatcatcagaaggaacattgttggataaaatatccacctgaatggatacggtgtccacaatgctttttcttctagaaagtcgatcttcatctgttacttgtggtaacatacggaactggacaatctcctcnaacactatatcccacttcccacctagcgactctgcaatcttgttggtcagaaagtacaaatctttttcatgcttcctctaaagattttggaagcatgcacttatctctgaagatatgctctggtagaaaataaggggcttccatagttcgaatttcaataaccttgctaacatgctggcaaaatgcagggacagctaccatctgacttacaaagttgaggtatgctgcaaccagtgccatgattccacaacgatggaacattggcaaattatcctcattgataattgcactgtcctgtaaagcaatggccagtcgaatgagatcaataactacttcttcattagccagttcaatagttataagagcaagagaagtataaagtagttcatagtttttctgaacgttgt

SEQ ID NO: 369841 - DNA, 936 bp, Homo Sapiens
  misc_feature (43)..(70): n is a, c, g, or t
  misc_feature (189)..(197): n is a, c, g, or t
  misc_feature (774)..(801): n is a, c, g, or t
ggatctgtgccatgatccatacactggctaatagagtacatannnnnnnnnnnnnnnnnnnnnnnnnnnnacttactactgaaggatctcagatgtaaaattatgtatttggtttgagatggccacttattgtccttaaaaatccatactgatatatgcagtcattttgaattggacagtgccttctcnnnnnnnnnctcctcttcttccatctccctcacccatgcccccacccaatctaaagagacagtgctgtacattctcatagagatagagaagatctaaaaagttgagactactcaatccagttaacaacagcaggagcactagagtttgttcatttattctctctgtaaaacaagctgtgctttttttcttctgcctttaaaatgccacccgtgtattcaaaccatggccacttgatacttatgtagaatccatcgtgggctgatgcaagccctttatttaggcttagtgttgtgggcacccaatgtccagccatcgttgtgacttgtgctggatgattctcactgaagaatttcctttcagccaaaaaacagtgaagtctgggaaatattcccaaagtcatgtcctctgaatatggtgtccttgacatgcaagcttttgtaaaaccccatccccgccttaggtgcgagggcatcaccttctcacaagtgtttagtttcttttaaccacaagtatcattcttgggtgataatatagtttcattctacttagggattgtttagaaaacaaagaaagagccaattaaannnnnnnnnnnnnnnnnnnnnnnnnnnnatgtatacttagatgagtattttaagctgtcgacctttagtttgccatacgggtaggactgtatttcatgttaacaactggtggtaatgataagccttcttctagcgtattttctcttctttcctgtcactttcc

SEQ ID NO: 369842 - DNA, 254 bp, Homo Sapiens
tgacaacccgtgcctggccggaaatgttcttttgatgcaaagaaaggtcagacattggatgaatcctactttattatgcatgtttacttgttgtagtaaaaggtaccttcccagaatagcaaaactccaaaaccaaaacttaaaaaatatttttaaaagttattttccttataagaaagctgcaacaactctatgtgtgatgtagattaaaactagcagcacagtaaacaaaacataatgaccatcaggatacc

SEQ ID NO: 369843 - DNA, 1232 bp, Homo Sapiens
  misc_feature (47)..(47): n is a, c, g, or t
aaagatatgagtagcgccgatatataccggtaggagagagaggcggntataacgtggagggaggtgtatcctatttattgcggtgtgagggagaagacagttaatgagaggtattatgccagaatagagaaagagggggtgagataaggagtaagacgcgggcgcagggtggacggaaattcaggaagtacgtaatacgtgaaggggtatctaaggaaataaggagtgactgcggattaagcaggtcggtagaaggggggatataaaattggtaataaacggtggttaattggagcaggtgattaaaaagaggggcgggggacggaacagagtggtcgcacttatgagatttttattacgaattacgggtataaaggaaagtgaaggggatatgagggaaggcattgccgggagtataaaagcaggagtcccggaattgtgagttaagatgtactgaatggaacaagctgagtgagttaaaaaagaaaaattaaacgatgttagtattgggaatggtatctatgcctatttcatttaattatagtaatagtcacatcaaatataattaaggttataggctttttggagattaaagaaaaaagagaatgttagagagggaaatttgaagaaaggaattcgggggtacggaatagtagggaggagataaggacttcgagacggtcaggagaaggcgagagtacgacgaggaaagtggatgggtggtcggaagaacgagaatagtcacacggtatagggctaggtctggcgataggagggtaaggatgaacgcgtactgcatgagttcctgcgtccgcatagacaacttgtcacagtaatcacacgtaagattcttcctccccagtgtggataaccatgtgggactcccaggtgagccttctgggtgaaagacttgtcacacaaggtacacctgtagttcttctgacctgtatgtatcttgaggtgggtccgcaggttgctgggatcactaaaagccttgctacagaaatcacacttgtggggcttcatacccatgtgacccataaagtagacatgaagtttggaaggagagataaaagcttgggggcacattgagcacttccacttcctttctttgctgtgacttggcccatgctgccgctatgtccctgggtaggaagatggttatggatgtggctggtcagatgggctttgaactctgtgtaagaattgcactccttgccacagttacagag

SEQ ID NO: 369844 - DNA, 796 bp, Homo Sapiens
ggggacgtgtctgcagttcctccgcgtctactgcgagtcaggccgtgatggcggacgcctgggaagagattaggcggttggcggccgacttccagcgggcgcagttcgccgaggccacgcagaggttgtccgagcggaactgcattgagattgttaataaattgattgctcagaaacagctagaagtagttcatacactcgatggaaaggaatatattactccagcccaaattagtaaagaaatgagagatgagctacatgtccgaggtggtcgagtaaacattgttgatctacaacaggtaattaatgtggacctgattcatattgaaaatagaattggtgacattattaaatcagaaaagcatgttcagttagtgttgggacaactgatagatgagaattatttggatcggttggcagaagaggtcaatgataaattgcaagaaagtggtcaggtcaccatatcagaactgtgtaaaacttatgatcttcctgggaactttctgacacaggcactaactcagcgacttggtagaattatcagtggacatatttgatcttgataatagaaggagtaattttttacggaagctttgtagctcgacataaagcacgtatccgtggactattcagtgctattacccggcctacagctgtgaattctttgatttcaaaatatggatttcaggagcagcttctttactctgtgcttgaggaacttgttaatagcggacgcttaacgaggcactgtggatggtgggagacaggataagcgggtcgccctgaattctatcca

SEQ ID NO: 369845 - DNA, 932 bp, Homo Sapiens
gggacccacagacacacttggacgattcctgcagaaatcagtgaggcagtctcctcccaggggcttggcgcctggctcgaggcgaggctgccggcccggacgctgactgcccagtgccacagacatggccaacgggaccaacgcctctgccccatactacagctatgaatactacctggactatctggacctcattcccgtggacgagaagaagctgaaagcccacaaacattccatcgtgatcgcattctgggttagcctggctgccttcgtggtgctgctcttcctcatcttgctctacatgtcctggtccgcctccccgcagatgaggaacagccccaagcaccaccaaacatgcccctggagtcacggcctcaacctccacctctgcatccagaagtgcctgccgtgccacagggaacccctggcaacctcacaggctcaggcgagctcagtggagccagggagcagaactggcccctgaccagccgctacgacaggagagctcctccacgttgcccctcgggggtttccagaaccaccccaactctcctctgggaaaatgaccctcaagggggggtcccctcgtcaggagcaagcccagcgagcctccccctggagacaggacctctcaattgcagagctgatgtcagtaaatcgtggccatagctgagtgaactggtgaaatcaagccaacctggacacatacgttcctcgttcttcttagaggccatttgcatgtagcagaaagggcgcctaggtcaagtgcaactagagcaggagcatcctatgcctttgacaaagattgcagtggcccctcgagtgcagaggtcatcccaggtgttgctgagtttattgagcacacctagcctgcttgcttactgcttatatttgctcagggaagagtaggaaaataaaatatatgcaaaaca

SEQ ID NO: 369846 - DNA, 735 bp, Homo Sapiens
ccctggggttcattagaaaaaggaagcttctagggcacattaggaaacatttccagtccatttaaaatttttctagcttaggaaaggttcaagttaaggcctttccaaacaatggagtttcactgcggcctaccatctgcaactttttcatgccatacactcatttctgatgggcacatctaattctgtcttaaaatacaagacaatactgaagacacacaaacctatacatccaacttagactctgatgctccatggttggattccttcttattcactgaacagctcttttggaagccctcagacagctctaaatcaagcctgcctctctttagggattccttatcttggttaacaatatctagaaaaacactctgtttaatacaagtaagaaacttggacacagttttatcttttcttgcttcctctcctcaccacttccttttgttctccaggcttcactgtggcctctccatccatctcagtccagaaacaagatccaggtggacttttcttctccttatgagatgcaggtgtttggacgacttctagttgctctcctttaaacctggagactcaagtcacttctctttggattttattatttataagaggaagccagtcctaatcccttgtcattcttactgtcacttattcctgaagaacttttccaggagtggtaacagtagcttcaaaaaagaaaacactgatccatatccttcctcctcttgtccc

SEQ ID NO: 369847 - DNA, 925 bp, Homo Sapiens
  misc_feature (809)..(824): n is a, c, g, or t
ggggaggataaaccgactgccggacaaaaactcagcttccggtcacccacactgtttcttttgccaccttgaactcggctctgaccgggaagtgccttccagatttgccaatcacgtgaatgtcgagttcagcatgcccacaacttctgcctccaaagccagcgtgagatctatcgctgtagaagacaagactgacgtcaggaagtgggtcaattattctgcacactacagctaccaggtggaaattgagcaaaaaaagagtttgaagccggactttgaaggagatgaaatggaaaatcccaaggagtgtggagtgcagtgacaaagccttgcggcaaggaatcctgatcccagagtcatgatagggtgtcttcctgagtcatgatagggtgtcttcctgagtagctgaagttgcagtcaatacctgctgtggccactgcatgttgggaacagtataccagatcttcctgtttgcagttacttgtattttaccaggaaaccctgagaatggtggcttgtggagaggctctttgattctggtcatgcctaaagcacgaggttcacctgactgttggagcttactgtataattaagccctcttggccttgcctctgcttatctcacagcacttggtatgtggtttggttgggaactgtttccagtcaggaaaaagaaaccttcccacatcagtggttaggccggtgctggtctccgcgctcgagatgtggttgagtccttggtcgggccccccctctcgggccccttggagaaaatccttttcttaaaaccccatttcccttttggggcgnnnnnnnnnnnnnnnngagaagggggaaaaatgggaaaaaattgggggccccaatagatggggttttttccccaaaggggagaaaatttcgcggggggccacacgtggaaacaaaat

SEQ ID NO: 369848 - DNA, 987 bp, Homo Sapiens
  misc_feature (704)..(704): n is a, c, g, or t
  misc_feature (731)..(731): n is a, c, g, or t
ggaatgaaaaaatagtggaaacatacaggggaaaggaaacagaatatcaagcgttacaagagactaacatgaagttttctatgatgctgcgagaaaaagagtttgagtgccactcaatgaaggagaaggctcttgcttttgaacagctattgaaagagaaagaacagggcaagactggagagttaaatcagcttttaaatgcagttaaatcaatgcaggagaagacagttgtgtttcaacaggagagagaccaagtcatgttggccctgaaacaaaaacaaagggaaaatactgccctacagaatgaggttcaacgtgtacgtgacaaagaatttcgttcaaaccaagagctagagagattgcgtaatcatcttttagaatcagaagattcttatacccgtgaagctctggctgcagaagatagagaggctaaactaagaaagaaagtcacagtattggaggaaaagctagtttcatcctctaatgcaatggaaaatgcaagccatcaagccagtgtgcaggtagagtcattgcaagaacagttgaatgtagtttccaagcaaagggatgaaactgcgctgcagctttcggtctctcaggaacaagtaaagcagtatgctctgtcactggccaacctgcagatggtacctagagcatttccaacaagaggaaaaagctatgtattctgctgaactcgaaaagcnaaaacagcttatagctgaatggaaganaaacgcagaaaatctggaaggaaaagtgatatcattacacggaatgtttggatgaagcaaatgctgcattgggattcagcatcaagacttacagaacaagttagatgtaaaaagaggaccaaattggaaggactttaaagaacaaaattgagcttcgcacaagaaatgccttgaatgatgttacaaaaagaaatttgatggagcttaagccaaaccggcctcccgaaaggaaaaagtttgaccaaaggtccctaaa

SEQ ID NO: 369849 - DNA, 974 bp, Homo Sapiens
  misc_feature (516)..(516): n is a, c, g, or t
  misc_feature (697)..(697): n is a, c, g, or t
attcagtatgggtggagcatggtacagtcttggtgccatagaaggagtagttgcatagtcacacatcatttgataagttggatgttccattacatagaggaacacaaaattccagggtttttggaggaagggattagatagtgactaagccgccagaattgaggtggccattcctttttgtataggctaagaaacaggttatcagtgaaaagttaattatggctttggcactagaatagcactgttgcaaagtatttaagcaccccccatctcagccctttattttatctttcatgtgggctaatgtgaggataatcttacagatattataggaatttcttttctatctttatgaaaacaacgtatataaaatatatctagaaaacctttgtttgagactcttatttaatgggcttttgattctaatgataattgtacctttatctttcaaaagctgatatttcctacctaagcatctcccgagaaaaatatctcattaaaaagcccataaataantaggggagaagaaagccttaggtatcaattccaaaacagtgattgaaatttcccaaaataattatgggcttctgtcatctccagagataatctgggcttggtttaccccataatctaatttcagaaaagaaagctttattttaacactcatctgaatcaacattaaagccttttctctcanagcgtttattgagaaactcaaatgaatatactttttgaattactgtcatcaaaagtgtacggcttcctgtgctgcttgtgtcaaatggaacctgccctctaaagcactttctttcctttacttgcatggtttcatgtaaagctgtgctgttttagaaacaaacatctcagacttttacaaagaaatggacaaaggaggggcaattgcacttttttaaagggaatatcgacaaaggcagttttcctggtttttcttaaaagggaccaaaaattcccgt

SEQ ID NO: 369850 - DNA, 1016 bp, Homo Sapiens
ggcactcgcctgccgttccaaaaactgatggggatatccattagaaataaagtgcccatgtctgaaaaatctatttctaatgggttctttgaatgtgaacgacggtgcgatgcggacccatgctgcactggctttggatttctaaatgtttcccagttaaaaggaggagaggtgacatgtctcactctgaacagcttgggaattcagatgtgcagtgaggagaatggaggagcctggcgcattttggactgtggctctcctgacattgaagtccacacctatcccttcggatggtaccagaagcccattgctcaaaataatgctcccagtttttgccctttggttgttctgccttccctcacagagaaagtgtctctggactcgtggcagtccctggccctctcttcagtggttgttgatccatccattaggcactttgatgttgcccatgtcagcactgctgccaccagcaatttctctgctgtccgagacctctgtttgtcggaatgttcccaacatgaggcctgtctcatcaccactctgcaaacccaacctggggctgtgagatgtatgttctatgctgatactcaaagctgcacacatagtctgcagggtcagaactgccgacttctgcttcgtgaagaggccacccacatctaccggaagccaggaatctctctgctcagctatgaggcatctgtaccttctgtgcccatttccacccatggccggctgctgggcaggtcccaggccatccaggtgggtacctcatggaagcaagtggaccagttccttggagttccatatgctgccccgccccctggcagagaggcgcttccaggcaccagagcccttgaactggacaggctcctgggatgccagcaagccaagggccagctgctggcagccaagcaccagaacatccacgtcttcctggagttcagtggagctgctccccaaaccaacagggtcctggaaaaaaagccgaaatgcttcttttctgggttccaaagtaa

SEQ ID NO: 369851 - DNA, 1491 bp, Homo Sapiens
  misc_feature (387)..(424): n is a, c, g, or t
tttcatcatgccacattatctgatccagtcctcacatttttaaatataaaactaaagagagaatgcttcttacaggaacagttacccaagggctgtttcttagtaactgtcataaactgatctgaatccatgggcatacctgtgttgcaggtgcagcaattgcttggtgagctgtgcagaattgattgccttcagcacagcatcctctgcccacccttgtttctcataagcgatgtctggagtgattgtggttcttggaaaagcagaaggaaaaactaaaaagtgtatcttgtattttccctgccctcaggttgcctatgtattttaccttttcatatttaaggcaaaagtacttgaaaattttaagtgtccgaataagatatgtcnnnnnnnnnnnnnnnnnnnnnnnnnnnnnnnnnnnnnnatcatctgagattctgtaatgtatttgcaaataatggatcaattaattttttttgaagctcatattgtatctttttaaaaaccatgttgtggaaaaaagccagagtgacaagtgacaaaatctatttaggttctctgtgtatgaatcctgattttaactgctaggattcagctaaatttctgagctttatgatctgtggaaatttggaatgaaatgcaattcattttgtacatacatagtatattaaaactatataatagttcatagaaatgttcagtaatgaaaaatatatccaatcagagccatccctaaaaaaacaccacaactccaaccacctttaaacacacaccttcaaaaaaaattctaacattaaaggctagcaaaacctaacactaaacccataaagaatttggggcgcccccccgttcccccgtaaacgctcctttttgccaatattttcttgtggccccgtggcccccaccatgctaaattccaatacgcgtcattccgtgttccccccataggcaaattcgggcttaagaaacaggcgtgtcttgcctttccccccttacataaactaacactcttcggtggggaaaaactacaggctttctaaaaaaacaaaccgtatcgataggcattctttaagcgttcattttaacggggcggttcttcccaaaagcgggtgctccacaacgcacttgtcccttaacatttataaacgttatccgcccgcccaacctgtaaggtcacaaaaaccgttggatattggaatcgttcgaaataacgcctcctaacaccggctttctccgtttctcctaaataagtgggattccccccttttacaacaaaccgtaacacattctctgtataaatcgctctatagatgcctaagcgtgggggcgcagtaataacgccccatattttgtataccgcgccttatgcccgcccaaaactcaactctttttatctacctcgccacggtgtataaatataacttcctgggccggcgctccacaagatgactatgtctcttattccacctccgaattggtggtaaaaacgtg

SEQ ID NO: 369852 - DNA, 793 bp, Homo Sapiens
  misc_feature (198)..(208): n is a, c, g, or t
gggagatctgtcacactccatttctttctgcttttgaatatgccatagattaaaatattttctgatcataactgcataaatgttgacctttaaacagtttattctagttccaattctgtgggaagcatataggatttaaatctttaaaaaaatcacagcagtgttttcagttactaatatataattaagataatttcnnnnnnnnnnnaaattagttggttctgtcagtcaaaaccaagggagaagattgttcccaagtggcatgaaaagccctacgagtggaatcaggttgatccaaagctggtcatggagcaggccgaccgtgagagcagcagagggaagaacacctttctctaccagctccacaaaactggtttgtgctcggcacctgaacatgtccacaggtgggcctccagcacaccccctcaggaagctgtggaggctggattccaggctccctccgcagactgactttcctctgtgtctgggtgttacagtctgtgcccactgcatcctaaaggccttttctttcttcttttctctttgggtgatagtcagagagtggtgttttgttcaggtgggaaggattggaaactctagtcttttctagaaacagaaaatcactgtattaaatatttcggaaagattgttctgaaagaagtctgttggataagagctgtatttggctttaaatttattaaggtaatataagtagtaatcttagattgtaaggttccagaatgtgcttacatatccggtctgtacagtgatttaaaccagtagtatagaaaaa

SEQ ID NO: 369853 - DNA, 552 bp, Homo Sapiens
  misc_feature (364)..(372): n is a, c, g, or t
ccccacttgttgatttgcagaaaagatagctgtgttacaacctgtcctaaggtcaggtatgaatacttgtgcttcttccttggctccccaagccagagggcattcctatgcccaggtgagagagcacggagtgttactttggcagcacagtcagttaccagaggtaggaaaagcaaaggccagcgcaggacatgaggggcccttgcactggctggttctccctgccttcaccaccctccaggtgaatgactgggtgaataatgattgactgaggaggtaatgaataatttatggacactgctggacctcagtctcctcatctgaaagatgagtggttggagaagtttaatggttttcaaatgcnnnnnnnnncagtcttcaaataagtgtttacgtaggaagcaccatatctgaaacaggtgacagtgggaccagtctgaatgaaatgagggttgggcaggcctgagctccaaaaccttctgatttgccccaagccctccttgtctttgctttggattatcttccacacaaattgggggaacttggacaagg

SEQ ID NO: 369854 - DNA, 735 bp, Homo Sapiens
  misc_feature (415)..(568): n is a, c, g, or t
agcggggtccatccggcccgtgggctgtggggccccgggcggcggcggctacgtagctgccgccggccttggccgcggccgggcgggcggatatgtggcttaaatggcgcaggcgtcggggcctagaggctgaagggctggtcgtcctaaaaactcgtggacgtcgcgcacggttacccggacgcaggcccgcccctctggggaaccgcgagctcctcgcagctgggtggggaccgtcctcgcagtggcggcctccaccctgccttctcgcttagccaaggcttctggaaggctcgcaaagtgtctgttgttggaagaagccgggccctgactggcgcgacggattctcccagccgctcagcagagcgtctgtaggtcggaagtgggggttgtattggaatatgctttttgtctnnnnnnnnnnnnnnnnnnnnnnnnnnnnnnnnnnnnnnnnnnnnnnnnnnnnnnnnnnnnnnnnnnnnnnnnnnnnnnnnnnnnnnnnnnnnnnnnnnnnnnnnnnnnnnnnnnnnnnnnnnnnnnnnnnnnnnnnnnnnnnnnnnnnnnnnnngacaagaggagagcccttcacgatggagaagggtgatatggggcagggagggggggacagacgactcgttcgcaagccagcgatggtagcggacaggtacgaggcggcaaagataaggtcagcgcccgcgcccgagggagcgcaggcacggtagcagggcagggccg

SEQ ID NO: 369855 - DNA, 991 bp, Homo Sapiens
agaatggtgaaggtaaaaagtctagacaaagaaacggctaggggatggagtgaaaatatttattgcggcaccagaaaaagttagtgatagcgacaaatttttttaaaaaacggggccaaagtactggtgtgctatacaatgaacaaggggcaaagtgaaggggtcccaggttccaatgtcccttcatgaacctcaaacctcgtccaaatgcgcgtacgaaaagtttttcttttaagccaagcccactcaatcaatgaagcctccaaccggtagtggacatcaggcaaatgggggcggggttttaaggacccgtataaaaaggttaataaggggtggcttagggctatctacttcccccctgttgccccccattctactcttgagaaataaacactggcttttttctaaacaagtggtttctcattgacaagttctggtcatttagtgaagtggaatgaatcttagctcacttccttgttttgcaggacatttaactccttgcttcttttaaaaactccagtggtttttaggcagccactacaataaattctcccccctttttcaatttacttccctttcttttccctaaggtagaacttctgtaaacctaaaaacatatggtaatttaatatacaaggtttctcaaagtgcaaaatatgttacagatagtttcttaggcctcatttaaacacagcattttaatacaatacagtacagtttgagatttcctgctcataaattatacccacttaacagacaactactttaaaaggactgaccacctaagtaacccaatgtcttcttacacacgttaatacaatggaactttacaaggtttgttcagaccaaaataaagttaatcttacattcagtcacatatatacatatttttaaatgctccttaaatgcctaagcatagacaaatttgcctatcaataggcaaattcttatgaattatcttatagttcagttttggagttacacataaaga

SEQ ID NO: 369856 - DNA, 917 bp, Homo Sapiens
  misc_feature (183)..(203): n is a, c, g, or t
  misc_feature (697)..(697): n is a, c, g, or t
  misc_feature (734)..(734): n is a, c, g, or t
gggcccatttgtaattcagacttgcagagtgaggagagaactgcttcagccttactgtcttgtagagagatttggtgaaaatcatgttactttagacccagtagttttcaggaccgcaacaggatgcggggcacctggcttcccgggtaaggtcacatagtctcttaaaattctgtcactaannnnnnnnnnnnnnnnnnnnnaaaaaagccacctcctcatgcctgtccaaaatgaaccacgcaactggttacctttctctgcctaccttttgggctggggaagaggggcacctttctcatcactctcagggaagtcctgaggaactgtgcaagccaggaagcatgagtcgctgaattggtgatggaggggtgtccacttttttctagttcctcagctgcttctggagcagtgttcacaacgggaatgtttttactgtccttggtaggctacaggttcacagcttcaaatcaaggcctccaaggattttattctcttacatcacagttttgaccaagtaagccttttaaaaaacaacatttgccaaaactggtctttaagcgacgtgagtcagaggtaacaaaggcatatatatacccaaacaaaagtgcttccggtgcagtggaaaagaacagtattagtgtcgcaagcacaggagtgcagacagccccgccttcatcgtgatgcctgcagcacnccacgattatcatgagaggtcaagattttgatttacnaatttataatcttatttccaagcaaaacaagtcaatttcatgttacaacttttttcttgtttctttttatcttgtttggcctgagggttgggggatttgggggagttgtcagctgcacaatctttgaagtgtaagttaatttttatgtgatatttcagtatatattttattgattaaatttat

SEQ ID NO: 369857 - DNA, 869 bp, Homo Sapiens
gccccaccaccgggaaggtcccgagaattaaagcgggtgcattcacattgtggggaaacaaccctccgattttgaaaaagccggaaaaggaccaatggttgtgggtccacccctccccggaaccgggggggccgtgtggtgaatcccgggttttaccaaaggaaggccggggggttcccaccctttgagggtttggacggaaagccgttccctccttggatctggaagggaagcccattgtggcccagggacccttgttggaggcggcccccttctgggggtggtattctgttgggggcaagcttcctgtgaagggccccgtatttgtttccgccaggcaaagtgtttgggcattttgggggcagcatgtaagggagaacatccagacatgtttgcaatgatgctcagcagatcttctgataaagcatccgttggatgctgtgattgttgagttttcaggtggacttttcttttcatcccttgtattgatgtttccattatctctgctgctcgggcaatcactccgcttgttggctcaggaagtttggaaaaagacagaagctgagctgcagaaaggactcctcttttcttgaggtttctctgcatcgtggcgtacatggcggtgtccaccaggcgcttgctttcctccaagacgctagagacacgagactcctcaggctttccccaaaggagttctttccctctcgagatgaaggggaagaaggcttctgtgcaggccataaccagcgtgacagacagcacagccagcgctctcattctgaccttttttcctcttctcagccaactgcactgctgagtaattttcacggctgtaactcttctgaaatgggcgccttaattgccttccc

SEQ ID NO: 369858 - DNA, 881 bp, Homo Sapiens
  misc_feature (670)..(682): n is a, c, g, or t
gtgataaaaaacaggtagtaactgccattgtttgtttgttttcctaataaggcctgaaaacagccattccttgttaagaaagtgtacaatgtaacatatttgctagagttacatggattatatatttcttaaagggaaaaatttgagagtatcatggactaccaccagcattattattacagtagttactcagatttggttaaggaagcccaagcaatgtatagtgaaaggattattatctctctgctaagattcagatattgtttcagaaatctcagctccagtaattccacaacatctaaaaacaaatgtttgtgatcatgtgtaagcatgaaattgttccaagtaagtgaggatattttagttatgtgaaagacagtttcatggaaggtatttgttttataccagtggctggggatggtgggattggggttatttctacaattattcttagacgattactaaactgttaagaaaatgcccccatatcatttttgtatctaggaaagaaaaaaatcagtttcatactgttgtcatctgtcagaaatgctcattttattttgaattaaatgtggcttttgaagtacctagttaccttgaattcctggtgaccacatgtttttatctggaaaacctggagaaagttatctgtcccatctcccctgcttgnnnnnnnnnnnnngtttggttggagctgctgtttagatgatgcttttactatgcaagagaaagtttttgttaaagaaatatttgaaaattggctttttcaaattggtccttccttctttgaccatggcaaaatgtacagtaaatttttcctgaacattgcaaatttacttgcataagactttgttaagtcttctggtttaaaaaattaaaat

SEQ ID NO: 369859 - DNA, 558 bp, Homo Sapiens
  misc_feature (352)..(352): n is a, c, g, or t
  misc_feature (383)..(383): n is a, c, g, or t
  misc_feature (429)..(429): n is a, c, g, or t
  misc_feature (478)..(478): n is a, c, g, or t
  misc_feature (511)..(511): n is a, c, g, or t
  misc_feature (516)..(516): n is a, c, g, or t
tgataaaaaacaggtagtaactgccattgtttgtttgttttcctaataaggcctgaaaacagccattccttgttaagaaagtgtacaatgtaacatatttgctagagttacatggattatatatttcttaaagggaaaaatttgagagtatcatggactaccaccagcattattattacagtagttactcagatttggttaaggaagcccaagcaatgtatagtgaaagggattattatctctctgctaaggattcagatattgtttcaggaaatctcaggctccagtaattccacaacatcttaaaaacaaatgtttgtgatcatgtgtaaggcatggaaattgttcccangtaagtgaggggtattttaggttattgtggnaaggacagtttcctggggagggtatttggttttatacccgtgggcncggggttggttgggatttggggggttatttcccaccattattccttagngcggtttcccaaaccgttaggggaagccccccnatccnttttggattccggggggagggaaaaatccggtttcaaccgtg

SEQ ID NO: 369860 - DNA, 727 bp, Homo Sapiens
tgaaaggactaaagggaattacggggatgttctcttgtcttctttctgtccaatagtcctagcaagcatcttgctgaggcttaacctgggatcaaagaccatgaacccccagaaaccaggcagaattctgtgtacatttttctgggagcaggcccatgagtaggactggcaggtgagtcagtgtcctagggggagagttaaggcagaagtggactagtccctcaacttctgaaaaaaattatttggtcataccaaactcttgtcatgatttgttggcagaatttgtcttgtttttgcctactcaaattttcaaactaatttctcctattttaaaatgaaaatccatatttgctcttattttagcaaggaactagcttcatctgagcagaataaaaatcatataaataatgaactaaaaagaaaggaagagcagtcgtccagttacgaagacaagctgtttgatgtttgtggtagccaggattttgaaagtgatttagacaggcttaaagaggaaattgaaaaatcatcaaaacagcgagccatgctggctggagccacagcagtttactcccagttcattactcagctaacagacgaaaaccagtcatgttgccccgtttgtcagagagtttttcagacagaggctgagttacaagaagtcatcagtgattttgcagtctaaactgcgacttgctccagataaactcaagtccacagaatcagagct

SEQ ID NO: 369861 - DNA, 991 bp, Homo Sapiens
ggttcaatacccttggtggtttggaaatgtaaaaattaaatgtaccccatttcagaaaccagtttgaccagttcctgaaaaggtttaaacagccatttcccttctgacggaagcaattttgttcctagggtatatatccaagaaatatgaagataaatgtctaccaaaaaattgtacaggaatgttcataacagaattattgataatactcaaaaagtagaagcaactcaaatgtcaatcaactgatgatggataaataaaatgataaaatgtggtaaatccatatgataaaatattattcagcccataaaaaggcacagaagtactgacaaatgctacccacatcaatgaactttgaaaaacctcatgctaagggaaagaaagctgtcataaattactacatgctgcatgtttccatttgtatgaaatgtccagaagaggcatttctggaacagaagctttacccaattgcagtccatatgttttctgggatcccggagttccctttcaacaatgtaaaatacaaacttaggtcaaaagttcccatgtctgagaaaactcaagccaaatcagttctcctccaaagttgacaggatttatgctttaaaaatacagatacagaattctctttggaaagatctaccaaattcctgtaagaaacagtctacccaaagtaggggaaaggctatatgaaaagttacaaggcacttcttaaaaatatatcttaggtttttagggaaaggtaaacagacaagtttccagacccgtgggtggaatggatgtagcagattcactgagaggctcacagcgccgtactaaagggagtctactgcttaaagccaattcacatccttaaaaggtcaaatggagagaaattaaacttgggagaagcattttaagactgtgctgttataaaacctcgggccacttaactgattaatcatggcaatgagggcagggaccagaaaagagtctttagaacctgtcatcc

SEQ ID NO: 369862 - DNA, 757 bp, Homo Sapiens
tagttggaaggaaatttggaaattttttaaaaggatgaatttggaaaggaccaaaatggtaatttaaaacctataaccccgttttttgaaaattattaatggataacccttctgtaaatttaataaaggaagaaagaaggcaaaaatctatttacaaaattaggtgaaaatgagattataaaaatacagaatgcattttaaaatatgaaattgatataggctaaaacatacagtatgtataaataataaatttgaaatcttcaaagaaattaattattttctacacgaaaattactaaaactgaaagtagaggaactagaagaacacaaatatatttaaggaagaaatcagagatatccttaaagaacatcaacaaagaaatccagaataccaagtctctcaattttgcatggaatcaaataatgaacattcctgtaatgagacaaatctaaacctaacccaaaacctgattaacacctaaaacctacataccggaatatgtacaagcacacaccacacaaaccctacaggtcagcctccccaatgaagataaatataagttttaaataaaatgttagaaaaatatccagcaatgtaataaatcacacttagtccaaggaaggtttattctcagaacaaaatagcagttccataagaaaatctatataccacatcaataggctaacataatttctgattatatgaacaaatgctcaaatgctatttagtaaattcaacaaatttttaacacatacac

SEQ ID NO: 369863 - DNA, 863 bp, Homo Sapiens
  misc_feature (197)..(197): n is a, c, g, or t
ctgttcaccatttcacctagcattcttctatttaagagaaataagagtgtatgtgtaatatattaggttatttccttcactttctgtttatataatgtagtatatatgaaacgaaatatctagaaattttaatctaccatatgtaattgtgtgtatggcagtgtctgtatattttgccgtatgccactctacgtatnctgtccaatcattttttgtattagaacagtctcgactatattaaaacgactttcatcaaattttatttataaatatacccccatcatttcatgcaagtcctttaaaatttggcggaaaaataatggtgaaagcaccttcccctatactcataggattaatgaggtttatattgaaaaaaccattccttttcattggacaaaagtagaactccttactgaaggagagtaccttgttaaggacagttacactattagttctgtagaaccaccgtatgtcgtaggattctcaaattctagctaatgatctaccgatttcaagccatatatggcacgaagcaatagccatataataaaagaacgtggccagtcccttagaaattatcaggttgaaatcggattccgtgactcttgcggcggcctctgggttcctaaagacttctggaaatcatgtctccctacagggctaaacagcacgcactcgcgccccttcccggtaacccgcccccatcccaccgctctgtgcccttatcatgtttttcccttctatttgctaatcccaaaagagtaatttcaagtctcttatccattagctgactaacctgcccataaaaaacgctgttctactttcattccccggccattcaatgttgtataaccttatgtacc

SEQ ID NO: 369864 - DNA, 752 bp, Homo Sapiens
  misc_feature (271)..(321): n is a, c, g, or t
ggggagtcagaaccaggtacgggatactgtttgtcagatttctctttgaagtcttagtagtagtactaaaatagagagttactgcagaaaggtaattataaatgctagacgtgaaagagtgtacctttaacatttgaatatttttctctattgtcagagagtggtcaaaggctggcctcaaagtgagaggaatcacgtgcttcaatatactttcattggcttttaaattagaaattttgatttaattgggcagagctcaaatagcctgcannnnnnnnnnnnnnnnnnnnnnnnnnnnnnnnnnnnnnnnnnnnnnnnnnnaatttactagccccagatgagtcaatcactagttaaacgaaacctgcagaacttttagtccattgtttctaaatctttttttgaccagagcccctctttttagttaacattgtgaaactctgaaggaacttaaaagctgacctacaatatactgcttttgtacacaatagaataatagcagtgacaattttattagaaggtttattgtcttgcatttcaaaaacagcctattaaataagtttgtttttaatgttcagaaacttaatcttggtattataggattagaaattaaatttattatttttttgaatagaatcataagtcctgaacttcccaaaatcagtttctgagaatgaaatacattttttgaatgtgagaatttaaatcactgaaactaaaatctgttatttgtgatgttccactttgtataa

SEQ ID NO: 369865 - DNA, 1194 bp, Homo Sapiens
  misc_feature (411)..(419): n is a, c, g, or t
  misc_feature (1113)..(1149): n is a, c, g, or t
cgttagtctgcactggtgtcgtagccggggcgcgtgtcttactgcgcggaagataaaccgcgcaacctatactgcacatactcgagcctggagcgtcggctgtgcgaaggcgcatgccggcacaaaggatgcgcaagtctcacccgagcgtccgcacgagactgcgcgcaaaggtaccaaagcgagtgagttcgtcttgcgtcggagacagagagtgtgcacgtgcgtgagagacatagaatggggtgagcggggactgcaggcataaagggtcctacttgtaggatcacagtttgatgcagggaattagagtatatacgcgggagctggtaggagtatagtattgtcattccacagagttttagattatctgtggaagggccaagaggggattcgttttttttgccagannnnnnnnnttctagcttaggggaatccctttaagtcggtattcaaagtctggcttctccgtatctacgtaattccttggggttcgtaatagtggctttggggttgtccatgttccgttataaaacattgtttctttgttcattatggatttcacttttgctacatgtttgagatacttcttcaacttgaattaaaagattctgattttcaagccttgttttttcattagcattcttcatttctagaagatcagactgcagggcctctttttctgactgtatttcttctaactctttccttaagagaactttctcttgctcatagtctctcaataaagacttaagttcttcacactgaactacactctcttcttgaaggcacttaatctctttttctaactctaatactttttcatcacgctgaaaagccaggttgcatttttcctcatttatttttgccaaggattcaccgactgcctgtaggacattaacaacatctttctcttcactgtcttctgaaacttctgatcccatttctttaagaaaaccatacaactgagttttaacaaataacttctgaacttgctcattttcaagcagtttatttaaattatcttgctcttcaaccattaactgaagtttcttttctaattgcccggccgtaatggccgaattcccgggcatatgtccggcacctcgactnnnnnnnnnnnnnnnnnnnnnnnnnnnnnnnnnnnnnccgcttcctcgctcactactcctgcgctcgtctcgtcacacaggg

SEQ ID NO: 369866 - DNA, 813 bp, Homo Sapiens
gccaaacttgatctataagcttatctcagggtatagtccaaataacacttatgactccaagcataggcagccatgcttactactctctaaagaagccagtacttctgatgaggaattgaaagtcaagatgggagctctgcttttgtatccattccccataatagagttcagcttatatgttaaatgaattttcacataaatttgtccacttgaacttctgcttctttttgatagttgcctagagatggttctggagagtaggttcttttcccatcgtgatcagcaactgctcttcaaagtacaggagctggtccacttcaaaacagtcgctggcttgaggcaccactttttccaaacactcgcggatctctgcttcgctagcattctgatgccttgctctcttgaggtaattatagacctcttcaaatacttctgtccccagcttctgcatggctgattccctcatgcgtttcatcttggtcctggccaacacactgttgaaaattggtggtcctggggacatgtcttcagccatggtggtgatggtctttgtgtctagagaagtgcaacccaggacattttccaaacacctggccaacgcttcgatatcactgtcctgttggtttgttctgtaagcaggctgggatccctcattcctgatttctttctctggtctttctaacgctatttcttcttcctcctcatcactctctacacaataggaatcaaatgcatcagcgtagtactcttcagccacaagtgggtcttctgggatctcatggtatccaaggtcagatgtggcatcctctaccc

SEQ ID NO: 369867 - DNA, 736 bp, Homo Sapiens
ttttccaaaaatcgcttatgggattcttccccgttcctaaagggctgcccagcccctttttcccattcccaactacaaaaaggccttaagagcccaggaaaaatgggtgtttccctgaacactgcaaaacaaagcagtcagcatctggtgctagagttttgcttggtcattaaactcttagaacttacttgcatcattaacatttttatcccttgtgggcatgttatacaacctttcatcttaagataaatctgtcgtcccgacgatgggtcttggttcactaaaaaaggcagtgtgaatataatgcaatgctaatggatgcaggccttcaaaacactgcaattatatagtgagttcaggtttcaaaattcagtgtttatcagaaaatatctcataatcatatatattcaacaaattattttccaaagatactcatgaagctaaacaaaaataatttttgttcaaatggctcgatgagtttaagaatatgatttgaatatatttgatataataatttagccaagaagtggtctcttagactaattgtaaaacatgaaaagttgtcagcttcacaatttgaaccccatcctttcatcttctccctgagagcctgctaatggtggtctctttctgaagcacttttagaatcttatttttatatggagtgttttactgactatatatatagcaactgagtccctcggttaaataaattataagctcctttaaccctccc

SEQ ID NO: 369868 - DNA, 996 bp, Homo Sapiens
gtttattctacttttatttcacatatataaaaacagcttataattgtactgaacacaaaatacaaacaaatacattttattgcacataaaaatattttaaatgaagtattgaagtattgcacgtaatagaattgatttaggaaagtcacaaacctattataagactagtattattctaggtctgaagattacagaatatttcctaatagagatttgccacatcacatattgcacattttccaacactattctatgtcttgcaaatattcctcatagtctttgcttatgtcttttctctgtaagacactgtataaaagattataaaggcaaagaaatatgtaccatcgaaaaggaccctgtctacagctgaggaagtaaaaaaataaatacacgatcatcccattctttttggggaaaaataacaaagtaaattggcaaatttctctaaaaagagagaaatattacaaatcttaatttcataagcatttgtccatttataaatgctccctgagtttaagggattcaattagactaaaaacctatgttaccagccataattcctttgtttacattcagtatctagtaccaacatctaactccttccaatagtgcaaatgcatgaagggctctcactgttggtagtcattcagcaataaatagtaagtccacgcctagttatttcattatttctggattcaaaataatataaagtgcatccaaaggttgcatagtcattcttctcattcttgggcatggttattggtcaccctgtgatgcttctagctcatggcaataaaagcccacagtgcagattttcctggaatttcttcctttttttccatagttctgtttggaagaaaattcccaagacactataaaattttttttcacaaagtctctatggaagacttcggaccacagagcagcatccactgacacagatttccatgagttccattctataatagtcaataagtgaacacgtttccttattat

SEQ ID NO: 369869 - DNA, 803 bp, Homo Sapiens
ccctaagtaatggaggaagaaatagcattcttttaaaaggggcttttctgaagagtaaaatgtaaatacaggacatgtggggagggtggggccgcctgcaaaatgtcctgaagatggacaaatagccttttaaattctactttttaaccatctttaccgtgtgtgcctatttgtattgcagatgtgaactactatttttggaggttgatatcagtatgttttgaaactgaattattacataaaatcagagtaacctctttctccatcctccttttccacactattcttgccaaatatttctactgaaacccagtttcagcaaggcaaaatgatgggactctcaaacctccctcctcatcttcccttcccctctgtcttatgcctggcctggccttttttgttgttgttggcttttcataagtaagaaaaatttattgtagtatttcaagactgcagaatttcaagtgtatatctataaatctttttttaaaatcttcggctacacagtaacatcaattaaaacagaagagtgagtctaagtctgtaatatgctgtaggaccagataagattttgaatgagactaaacttgactgccatattttaagaggaaattgaaactttatggtggagaatggatgagagcaagtctatgatatatatgtagtcattgtataattagaaacaccaaatgctgaatcctatcactgtgttctttgggggccaggccttggatttggttgtcatttaaactccttgaagattatatgtaattataatgagcagaaggcaaataaagtttttg

SEQ ID NO: 369870 - DNA, 1009 bp, Homo Sapiens
ccccgtgtgggtctcatgccctcataggacctgaccactactacaaacagtccccaccacacctatctccttaggcaagactttgcctctctcctagtcctgagtataaatcctgtgcatagattcctctagaaaggcatcaaaaggctcaacagactgaatggcctcttggtctgcgaaaattcagttgcaatgaggatgaagtcactatcctagaggctgcttggcccagaagagccaggcacagagctgcagttgggcacgccaaggattccaaaggtggaatgagagagtagggtcaaactgtcacagtatctgctccataggtttctgtttttaatttcaatgttaaatacaactacaatatgagcgagaactgcactttctggggtgtggagaacttgtaccatggacttcagaccgcctggcagccgtatgctgcacaagcgtgtacaccccctgggcagcctcaaaaccccgcttacagcagcaacacaggagatcatctgtccattttagaaccattaatctctttatccattgctgaacgactgtgactattcagtaacgaagtaatagtaattaattagtatggtataatctttaataaatttcgtgccaaaatgcatggttttccacttagcattcaaaatgttgcatagagagtagttttcaatttcttatgtactcttcgaaagtaagttgaaaatcagtttctacattttaattcgtttcctgttaaatctgttgcactctcctgggctgtctttttctccagcagacccctgcatgcagttgtgtaaggactttctctaattcttgtgaatcgtctcacccgcagtaaccactgaacgtcaatcagccctccatggggttctttcgatttttggtgaagtattttgttacctcagtcttgtatcaagttgctgtatttttcagcttgttacattgataataattatttcactaattaaatactttaatgtacaaacatctttgtttactttga

SEQ ID NO: 369871 - DNA, 790 bp, Homo Sapiens
gggagaatcttcttccttcatcacaggatcaacacatttcatctgggcttcttaaatctaaatctttaaaatgactaagttttcttccttttctctgtttttcctaatagttggggcttatatgactcatgtgtgtttcaatatggaaattattggagggaaagaagtgtcacctcattccaggccatttatggcctccatccagtatggcggacatcacgtttgtggaggtgttctgattgatccacagtgggtgctgacagcagcccactgccaatatcggtttaccaaaggccagtctcccactgtggttttaggcgcacactctctctcaaagaatgaggcctccaaacaaacactggagatcaaaaaatttataccattctcaagagttacatcagatcctcaatcaaatgatatcatgctggttaagcttcaaacagccgcaaaactcaataaacatgtcaagatgctccacataagatccaaaacctctcttaaatctggaaccaaatgcaaggttaccgggctggaggagccaccgaatccagattcattaaagaccttccgaacaccctgcgaagaaaatcactgtttactgttcctaaattcgaaaacttttgccacaagcccaagtttactaacaaccggcgaaaccctttttatcaccccaaaaacattggttctggtggcaaggaaaattcccaaaaggcccagaaaaggattccctggttaaggggtgaacctcacggggggccccccttgaattcggataaagggggtctctcca

SEQ ID NO: 369872 - DNA, 555 bp, Homo Sapiens
gggattccccagaccttctgcagattctgtggttatactcactcctcatcccaaagaatgaaatttaccactctcctcttcttggcagctgtagcaggggccctggtctatgctgaagatgcctcctctgactcgacgggtgctgatcctgcccaggaagctgggacctctaagcctaatgaagagatctcaggtccagcagaaccagcttcacccccagagacaaccacaacagcccaggagacttcggcggcagcagttcaggggacagccaaggtcacctcaagcaggcaggaactaaaccccctgaaatccatagtggagaaaagtatcttactaacagaacaagcccttgcaaaagcaggaaaaggaatgcacggaggcgtgccaggtggaaaacaattcatcgaaaatggaagtgaatttgcacaaaaattactgaagaaattcagtctattaaaaccatgggcatgagaagctgaaaagaatgggatcattggacttaaagccttaaatacccttgtagcccagagctattaaaacgaaagcatcctt

SEQ ID NO: 369873 - DNA, 885 bp, Homo Sapiens
  misc_feature (65)..(73): n is a, c, g, or t
  misc_feature (98)..(98): n is a, c, g, or t
  misc_feature (149)..(158): n is a, c, g, or t
  misc_feature (225)..(260): n is a, c, g, or t
ttcacttttttccaggaaatggaaaggcttttttcccagtaatttcccactaacttagccagttnnnnnnnnnttccacaggcccacaaaattatttnggatattcgggtcaactcctcatccccagctgaggttattttacaatgtannnnnnnnnncgaaaggcaaacaccaagcatactcaggatcaaactgtacgttgagcctgaatactgccattcaacnnnnnnnnnnnnnnnnnnnnnnnnnnnnnnnnnnnngttttggatggactggtggcattatgtaagacttagggtgggagaactcccacaatatttaaaatcctctttccagcagaatcatgatcacttggcacatcggacccttctgcaagccagtttgtttttaatgagcttaatgcctgcaatatattccaattatttggtgtttgttttttaaatacattcataatgaagtaagaattccacaactgttttccccagaagtgagatttctactgtcagttttctgattgagaacattcatcgcccaagaaacagctcatgatcctttaaaagtttaaataccctaaatttccgtacagctggatcaactgctgagaagacagttcttagagcaaccctgtagaattctccagaatttaaatttcctttacaattttgtttttggccaagtgctggtttataaacatagatctttctattaaaaactatacaaatataccatatttctttctacaggtatcttgagcttcacgtaagcaactactcaaaaattctgagaacttgaaatcccttagtatacattatattctacttcattgttccttggcatataacacattctcatttgcagcttgctcatgaatttgtttttaaatcc

SEQ ID NO: 369874 - DNA, 910 bp, Homo Sapiens
ggggatggctctgtcaagctaactgactttggattctgtgcacagataaccccagagcagagcaaacggagcaccatggtaggaaccccatactggatggcaccagaggttgtgacacgaaaggcctatgggcccaaggttgacatctggtccctgggcatcatggccatcgaaatgattgaaggggagcctccatacctcaatgaaaaccctctgagagccttgtacctcattgccaccaatgggaccccagaacttcagaacccagagaagctgtcagctatcttccgggactttctgaaccgctgtctcgagatggatgtggagaagagaggttcagctaaagagctgctacagcatcaattcctgaagattgccaagcccctctccagcctcactccactgattgctgcagctaaggaggcaacaaagaacaatcactaaaaccacactcaccccagcctcattgtgccaagccttctgtgagataaatgcacatttcagaaattccaactcctgatgccctcttctccttgccttgcttctcccatttcctgatctagcactcctcaagactttgatccttgggaaacccgtgtgtccagcattgaaggagaactgccactggaatgactaatcagaatgatgggccatttctaaaataaagaattttcctccccaatttcatgggaatatggaggggtgggttttattgaattaagaggttttaatataaaattaaaatgttttcctaaggtcctttcccggtggtgttcaaaaaaatcctttaacacttccctttttctataaaccccatttcctccccaaccaaaattataaaattttccctttggcaccccattgtatttaaaatattttttaatgggggtgttttctgagataaaaaaca

SEQ ID NO: 369875 - DNA, 759 bp, Homo Sapiens
  misc_feature (458)..(458): n is a, c, g, or t
ggagcatcgtcttgttcagcctcagctgggaacatgtgtactgggtgactcaaatttttcacccatttacacatatccacaaatgactgcaaaagtgccacggatatcaatttgagggttataaattttagcaagttggtaaatctcacaaatacataaccttgaataatgaggatcaactgtaccatattcaataaagcacaaaacccacacagattgtcttattacagcatttgataaaatccaaaactctttcataaaaacactcaacaaacttaggaataaaaggaatcttcctagatatgataaatataacatctatgaaaagcccacacctaacattatacttcatggtgatagactgaaggctgaatgttttccccttaagattgggaagaaggacaaggatgttcactcggcactacttctattcagcattgtacttgaagttctagccncagcagttaggttaggaattcaaggtttgttcaacatctaaaaatcaaataagctaataaagaaaagaggtttatactgcaaaagaagtgaaactatatgtattcacagttgatacatagttgtatatagaaaatgctaaagaatccataaaaagtaataaatgagttcaacaggttgcaggaaaaaaagatcacttttaatttcccactaaacagccaaacattctgcaaattgggaattaaagaaatccctccgataccagtaagcatttaagaaaataaaaatccccaacccgttttg

SEQ ID NO: 369876 - DNA, 308 bp, Homo Sapiens
ggggatatgaaattggttatcgtgggatatttaaaataaaacaaagaacagtttactttcaggcaaaaagatgccagtaatcaatattgaggacctgacagaaaaggacaaattgaagatggaagttgaccagctcaagaaagaagtgacactggaaagaatgctagtttccaaatgttgtgaagaagtaagagattacgttgaagaacgatctggcgaggatccactggtaaagggcatcccagaggacaaaaatcccttcaaggagctcaaaggaggctgtgtgatttcataatacaaacaaaagg

SEQ ID NO: 369877 - DNA, 738 bp, Homo Sapiens
atcatcatttcccggttaaaaaattaggctaggaaaaaagcataggtcatacttggaaaacttcagacaaaactcatttcaactaaatggggtctgatactttaaagaattatttccctttaagacgttactaggtggcagtctacttactgcctttcacaatttttatactagcccattaaaccctttaatttttctcaaaacaacaaaaaagtgagctttgcattttatttcaaaacatgagatgtaaaagtgaacgaatattgtcttttaatcatatcacacacagatgtttcttagccagcaaccatttcataaataagaaagctctttggcaaattatctgtgtgaccttggtcaagtcataacccccagtcttttgttatctcatcctactctataattctgtaattctaagttctaaatactttaattagcagtccgttaacaacattttggatttgaattaacccaaaaggtaacacgccatgaaaactaaagatagtccgtaagtaagcacaggtggttgtagccaagtgttacataaattagtttctatatccacaaagatgttgtttcacaaattcagattcctcaggcacaaggcaaccaagagaatggaaaaggctcagtaccttctattactaacacgggagaaaaatacgcattcgaattcccaactgtcagtgctgttagatgtttcctggtagtatatggttaacatataaaataatatcc

SEQ ID NO: 369878 - DNA, 985 bp, Homo Sapiens
  misc_feature (301)..(301): n is a, c, g, or t
  misc_feature (310)..(310): n is a, c, g, or t
  misc_feature (319)..(343): n is a, c, g, or t
  misc_feature (879)..(879): n is a, c, g, or t
  misc_feature (882)..(882): n is a, c, g, or t
cccaagccacagaggggctgggttatatggggggaccccttttgggggcttttatttccccatttttgggaaaatagaatttttgtggagggaggagggaaaccacgttttcccgccaaggggtattttgaaatggttttttccagaaagttttaggggaatttgatggaggggtggcttgatttcagttttttgggagttaagttccccggtaccctaaaaaggaattccacttaagcaccaaaatgttttagggtattttgggaagaggtttctaccccatataaaaatgcttcagttntaaattgangggagggcnnnnnnnnnnnnnnnnnnnnnnnnngtatcatttcagcataagcactactctaggttttaatttgtcagcccagatcccagacagagatgatactccaaacatgaaaagtcacctccaagtctcaattcactactgagaacccaaagctcaaaatatcccctaaaattccataaaaatcaggaaagaccctagctattgccccagggaagggcagaccatgagacaggtctcttttagctccaaactgaaagttgttcagcagctaaaatcctgaagaaaaaaatattgcaattaattaacttgaaagctacagatatgcctgtccaaatcttttgttaccaagacacaattttaagatcaaacaagtgtcaaggtaggccatggcttgttggcagtagtaggggccctatggcctatttccaggtatgggtggccccttttccttggttatctggggaatctgccacagcaaacagcaaaaggtaaaaagcatccctttaataactacaccccactccagcaattgaggtttattcaggggtgggtcaaagtagtacaanacnaaaatagcttagtgaaatggttagaatccagactgaggtgccagactgcctgcatctgagtctcagtcccaccatgtatgagccgtgtgaccttggggtgagt

SEQ ID NO: 369879 - DNA, 929 bp, Homo Sapiens
  misc_feature (54)..(90): n is a, c, g, or t
  misc_feature (820)..(820): n is a, c, g, or t
  misc_feature (884)..(884): n is a, c, g, or t
ccgatgtatacgactcactatagggcgactcgggctgaacgcggtggcggccgnnnnnnnnnnnnnnnnnnnnnnnnnnnnnnnnnnnnnatcaggccaaatcggccgagctcgaattcgtcgagagcggccagacttattagatgaccctaattcagaaaagaagaagaagagggatactcccatgctgccaaaggataccatacttgcagagctccttcagatacataaagaacacattgtaggataccatgaacatgattctcttttggaccacaaagaagaagaagagttgactgaagaagaaagaaaagcagcttgggctgagtatgaagcagagaagaagggactgaccatgcgtttcaacataccaactgggaccaatttaccccctgtcagtttcaactctcaaactccttatattcctttcaatttgggagccctgtcagcaatgagtaatcaacagctggaggacctcattaatcaaggaagagaaacaagttgtagaagcaacaaacagtgtgacagcagtgaggattcaacctcttgaggatataatttcagctgtatggaacggagaacatgaatctctcagaggcccaagtacaggcgttagcattaacgtagacaagccagccaggagcttgatgttaaacgaagagaagcaatctacaatgatgtattgacaaaacaacagatgttaatcagctgtgttcagcgaatacttatgaacagaaggctccagcagcagtacaatcagcagcaacagcaacaaatgacttatcaacaagcaacactgggtcacctcatgatgccaaangccccaaatttgatcatgaatccttctaactaccagcagatgatatgacgaggaatgtctcagncagtggctggtggtatgcaggcacaacatttacggttgacacccc

SEQ ID NO: 369880 - DNA, 768 bp, Homo Sapiens
  misc_feature (439)..(447): n is a, c, g, or t
cacccggcgccatttggaaccacccctttttaaaaaagcgtgggaatccaaaaggaataatgtttagaaaggtattggccagggatttttcccaaaagaaaatgtttagccaggacaaattgccattagaaaaaaaatcaaggcatttcccaaaaatggggtttgtattagaaaagtttttaaactttggtcttcattgtaaagggtatcactttattttatttttaaaaggccatgattaaccattaaataacttacataccctttacaaaaataaaactaacagcttgctgggcacaaaatttactcaaaatctttctgtatttttaaaatcagtaagtgatgtatcttactagcgctttattctcacagtggtatttttttaaaagcctgaacagtgtaattatttaatctgatgttttaaattatacttgatatnnnnnnnnngtctacccaaaccatcaccaaaatttcaattcaatctaatgtagaagaaacctgagtttggatgtagaaataattcattcaattttttttctgacatcatacatcatgccttcaaccaaaatagaagtgaagcttcaaacaggactctatggctttatctgaattttctgagtattaagtaaatcttaaatttaaagcagctgttggaggttaaatgttctcaaagcaatgtaaactagttataaaatgtctcatcaaagacatcagcagctcttgtgagtcacatgaaattaacaatgaaagaaggatcatcagttatcc

SEQ ID NO: 369881 - DNA, 1044 bp, Homo Sapiens
  misc_feature (448)..(484): n is a, c, g, or t
  misc_feature (1007)..(1007): n is a, c, g, or t
ggagaaaaactctcatccctgacccttccccccccgcaaatgttagaccagagctgttgatcccacacattcattttcctgaaaattcatgaactattctctcatacccctgaaatataaaagtaagtggccactattcctaagattatttagtttataaagtttgcttttaatcatacaatagcttacctggctaaaactttgcgtataaagggaaaacttgctttaatctgtgggattgcggaccgatgcgacttgcagaaggtaaacaggcgtgggttttgtgtgcgttaggttaggtgttagtggacttttaatgtatcttgtgaagtatggttactagggtaggttcaagagctacatgcctctggcttttgaacccatctattaaatcttttttaatgctgtactaagataaatgtgaagtctgagtaaggttgctctcagnnnnnnnnnnnnnnnnnnnnnnnnnnnnnnnnnnnnntttaggccatgggaactggcattttacttggtataggaatttaatgagaaccaaatcacaaaaataccagatctccttttgagatcgtggacaatcaggcctttggacaatcaccgcttccagtgcccgctgtgcgttgaggttagagacctaccgtttacacgctagagccgagaggacgttcaagtttcttaaagatgctgttggtcttttttcttatgttattgttttagttttgtgattttgatgaataattgaagttcagagtcacccgtggctcctaaggaaaaaacagcatcatgaaaggcaaaaagtatttgaaacgtaattgtttcaattttccacgcccgttctcacatgccccctttagctttatttctgggaacatgtcactagacctcagctagcctgacaccgcaataacccgttaggctttgaggcttttcagtgaattcttgacatttaaatcttcttatagaattctttatgaagccttaactaattcttggtttttgcttcctcnagaaactttttattgcatctgccatccttcattggat

SEQ ID NO: 369882 - DNA, 789 bp, Homo Sapiens
  misc_feature (582)..(607): n is a, c, g, or t
aataagcaaaataaaggagatttttctatttgttcactttaatttattcacttttgtgtacttttatgtactgcaaatcagatttcagtctaaagcgaaacatcagtaagttaataataaacctatctttcgggaagttgaatattaatctgtacccaaaacgtatttagtaaaatatttgcccccgccaccctgccatgctgacataacaacttttataatgttgaatagatgatatgggaaatactaataacaacaatgtaatttttgcagacagctttaacttatatacattgcttgatttttttcaaaagactaaatatgtcatttatactttgtttattttctaccaaagaaggtttgtaaaaatatgcctgctgcttttccttttgaaggacacaaacctggtcccaacatgtgtggattttaactctgagtggggtgccattaaatcaaaagagagaggcagaagatgaaatgctaaagaagggtcaggcaaacttctgtttcagtataaaattcatcatgcaggcttctgagtgaaatagaatgatttgaaaccactactgtattgcctggatnnnnnnnnnnnnnnnnnnnnnnnnnntttatacaaaaatgttaaaagcaggtttcctggcatgttctaaactgttttttctttaggaataaattacatttatctgcacagatgttgaaaatcctgttaaacccttgtcaaggatttgtttattttacattaaacaaatttattatgatgaacgtgaacaaataaattaaaaaataaaa

SEQ ID NO: 369883 - DNA, 719 bp, Homo Sapiens
gggtttttctgtctgcgtctcaagtctgaaacatctcttcctccagttgctagttaatgtatactcaaatattggcagctaggtgtggtcctttgttcttgactgtccatatttaaaccaaactaatctaattaataaggtaaatctgctatgtgttgtgtatgtacagacactcttataatgtacttcagagatagattttaattatgcttaggtgttcttaattagtactcctgattagaacagaattttatttttacttttatagttaaacgctcaggtacagtgtaattttccagattagatttttcagattaaatttagagaaggaatatacttagcttgtaatggtatttcagcactgattctttatggtgtctgatattttgccatctttacatggactgtgattttgaaaatcgtgatcatctcatcattgatggagtactgctcctatgccatgtacttatactaggtggtggagtacaaaatgaataggacacattctctacatgtatagtgtttatagacttttctcatatgttaccttgtaggctcgttcctagaaatcatcaggacacttagaaccaaactcttgggccctagtgaatcacctcaagttactctaccactgtggcacaggtagaaatttgactttctatagaaaacctagacaaataatagggggctcattcctactgtcttcacccttatcaaaa

SEQ ID NO: 369884 - DNA, 1121 bp, Homo Sapiens
  misc_feature (159)..(192): n is a, c, g, or t
gggtgcacatttctatgtgtggatgagattttcttgtcaacttttcctgccaagacactaaatgcttttcagtgctaatactgacctgatagtagagatttctttccctgagtcggatggtagcaggatttacttggtaacccttggtttaaaataccnnnnnnnnnnnnnnnnnnnnnnnnnnnnnnnnnnaaggaaataagatcaataggcggagggaaattgtttctatatgcacttattaaataatttttgttaacaaccctgccctgggataaaagtgaatggaagtacatgactgagtaacagtaattaattctttgccctgatcgtttatttggggactgtatatgctttcttgactgacaatagaatgttgtattagttttcattgtgtctttatttgcagttcacagcacttttgttttccatatgctacaaactaaaagtttagcaattacgttatattccaattctggagtccagattgtacaaattagaagaaattctaattcgtcattttaggaagaaatcaattacctaaaattactggctcttttcaacataccctttagtatgtaaaaaaataagcttcaaatgcgtgggttaaagttaactatcaatcccagtttaagaatgatatttctgtaagaaaactgctttattttccaagttgtagtatttaacataggctgagtcacaaataagtttttaattgtatctttaatgcagttggtctctgccctttcaagtcactttgattgaaacattttaagcagaacaaatatagccaataatttaaaataatcaccccaaaaccatttcttcaaacctgcctaaaacttttgagcatgggaaataaattttctccctccttcaccattctttcttatgttggggaaggaaagtgaaattttaaaattatttaaatcttgccccttttggaataggccctattttgggccgttttataaccttgaattttccactccgggggaagaaaggttaaaatttcccaaataccctttccccaaatctggggattatcccctgtgaatattgcactttgccaaggtctggcccccaagcaaccttatcccccttaccctaaaaattttggg

SEQ ID NO: 369885 - DNA, 1092 bp, Homo Sapiens
  misc_feature (235)..(363): n is a, c, g, or t
  misc_feature (430)..(502): n is a, c, g, or t
ggagtgttcaaaaaatccaggcaaaggttatggatgataacatattcaatccaaataggttccgggactcaagggattttttatctaactgggaggaaaaataggtttttaaaaagtacatattatacgtgatgacctattttatatagtacatacataaaacacatccattaaggatcttggttaaattataccatagtcatacaatgaaatacaatgcaggccccgtgcggtnnnnnnnnnnnnnnnnnnnnnnnnnnnnnnnnnnnnnnnnnnnnnnnnnnnnnnnnnnnnnnnnnnnnnnnnnnnnnnnnnnnnnnnnnnnnnnnnnnnnnnnnnnnnnnnnnnnnnnnnnnnnnnnnncatggtggcgcatgtctgtagtcccagctactcaggaggctgaagctggagaattgcttgaacccannnnnnnnnnnnnnnnnnnnnnnnnnnnnnnnnnnnnnnnnnnnnnnnnnnnnnnnnnnnnnnnnnnnnnnnncaaaaagaaaaagaaaaggaaatacaatgcagcaatttaaaatgataacagaacatagacatagaaagcaatccaacaaatgctattcagtgaatcaggtaggtttaaaaaaaaggatataatgtgcatatattttgtttttatataaaaatcacttaaaacacatgtggagagtaacctgaaatggtgttctacggtggttatctgggatttcaagtgatttacagttaatcttttctattcacaaattctgcatttctgaatttgcttagctgctcaaatttatttgtaatccccaaatcaatactcatgtgctttcatggtcatttgcaaatagacagagtggtaaaaaatttaagttcacaactaagaacaagtcactctaccctcttgtttcagctttcatacagagatgaccagaagatggagaccgtaggggaaatgccgtgtaatccaagcagttcaggctttggggccaggtggacagggtttgaatgccagctctggaatctgttagtggggtgacctcgccagtcacttaacacttctgaactttgttttctcttttgtgaaataaagaaaaaatgaat

SEQ ID NO: 369886 - DNA, 1159 bp, Homo Sapiens
  misc_feature (988)..(988): n is a, c, g, or t
  misc_feature (1029)..(1029): n is a, c, g, or t
  misc_feature (1075)..(1075): n is a, c, g, or t
aaacttatatatatactccaaaaagtcttcaacaagcagacgacagcaccctcttaataagcatctctttaagccttccactttcatgacttcacatgaaccgccagtgtatatggatgaagatgatgaccgatcttgttttcatagccacatgaacactgctgttgaagatgcatcagatgacgaaagtattcctatcatgtataggaatttacctgaatataaagaactattacagtttaaaaagttaaagaagcagaaacttcagcaaatgcaagctgaaagtggatttgtgcaacatgtgggctttaagtgtgataactgtggcatagaacccatccagggtgttcggtggcattgccaggattgtcctccagaaatgtctttggatttctgtgattcttgttcagactgtctacatgaaacagatattcacaaggaagatcaccaattagaacctatttataggtcagagacattcttagacagagactactgtgtgtctcagggcaccagttacaattaccttgacccaaactactttccagcaaacagatgacatggaagagaacatcatttactagtcctcttcaacacatagcaatggtatcattgttaattatgtgcacagtttggaaagattctctgctttcccagaaatgacactcacagcatgagagcttcctgagtgttctcgtcaagtacagctctgcaccgttgtggctctagatcactgttcagcagctgaacattcctggtgagcaagggtttccctggtgaatttttcaccactgcgttttaggtggtgatcttaaatgggtgagatggaacgagagcacacattaaagagagagtaaattccaaaggtttcaaagaacttggtcataaatatgataatgagaagacaaagtatttatattaaaacagtttagtagccttcagtttttgtgaaaatagttttcagcacagaaactgacttctttagacnaagttttaaccaatgatggtgtttgcttctaggatatacanctttaaagaactcactgtcccagtggtggtcattgatggcctttantaaattgggagctgcttaatcatattgatatctaattttcttttaaacacaatgaaattgtccttaattaccaacagtgaagcc

SEQ ID NO: 369887 - DNA, 810 bp, Homo Sapiens
  misc_feature (684)..(684): n is a, c, g, or t
  misc_feature (747)..(747): n is a, c, g, or t
agcggggggtgggaggagccgcgctcctaagcgggagggagatccaccgcggagttacgggaaagttggtccgagttcccagagtttccctctgtggtgccctaggctcggccggccggtgccccggctcctttcctcctttcggccttcgccgtccaccaggtccctctctctgtccccggccgccatggagcagccgccggcgcctaagagtaaactaaaaaagctgagtgaagacagtttgactaagcagcctgaagaagtttttgatgtattagagaagcttggagaagggtcttatggaagtgtatttaaagcaatacacaaggaatccggtcaagttgtcgcaattaaacaagtacctgttgaatcagatcttcaggaaataatcaaagaaatttccataatgcagcaatgtgacagcccatatgttgtaaagtactatggcagttattttaagaatacagacctctggattgttatggagtactgtggcgctggctctgtctcagacataattagattacgaaacaagacattaatagaagatgaaattgcaaccattcttaaatctacattgaaaaggactagaatatttgcactttatgagaaaaatacacagagatataaacagctggaaatattctcctcaatacagaaggacatgcaaaattggcagatttnggagtggctggtcagttaacagatacaatggcaaaacgcaatactgtaataggaactccattntggatggctctgaagtgattcaagaacataggctatacctgtgtggccgacctctggtccctg

SEQ ID NO: 369888 - DNA, 744 bp, Homo Sapiens
  misc_feature (421)..(443): n is a, c, g, or t
ttcattacaaatatgttgcccccatctgtttaataaaaatccaaaaggtgttcttaaagctaaaaccataaacctttattagagaattctagttaagtgttttgtttttccacatacatgtaaatagccttgaagatcaagtaggatcaagtaaggataatattagttatcaaaatttagtcttcatacttgaagaatttgtttttaaaaataactaagatgcaaaaaaataaattagctagtcttgaacaagagtgagttgggcagaaaactgacatatctgaattctagtacagataagaatctgtcaaatgataactgaattcacgtgactaaccactcttttacgtaagattgtatctactcatgagaaataggggaattcagtgttatcattatagtctccgtatttaaactgagnnnnnnnnnnnnnnnnnnnnnnncatgcctcaacataagggaaattaatcagttaatttctgctgacttaggtttcctaaacagcttttagttctcaaggcacagctgtggtaaaaacagagcaaaacacccagccatttattggaattctgcagtacaaaataagcacatgtgctctatataatctagtaacaggatagcaacagttaaactgtctcaaacaacagatgtatttgcttgattttccttcctaacttcttttgcatcaggaccgcaagcaaagagcttgtttcccagagtattttgggcaaatcggaaataccc

SEQ ID NO: 369889 - DNA, 736 bp, Homo Sapiens
gggtgtccaaaatctaactcacaggtctgtttctgacctcccaacttgctttccttgtgtttttcctatgctaatgatccaccataatcaaaataattaacatttatccagtgcctactatgtactattccctgtcctgttttacatttactcatttaaagtccataagaaacattaaatctcatctgccttctgaagaagatacaaccatgctctcttttacaaagtaggaaactgggtcacagaaaggtgaagtctttaaggctgaatcacagtagctcatcctagtaaatagaaaagccaggattcaactccaggggctgggtgcagaactgctattcttcactgcttcaccaatcagcagctacccaaggcagaaaactttttcatccttggctccttcattctccctgtcaccccagatcccctctacatctagtcagagaataggtcctgtcaattccaacttctctatatggctcctctcaggcatgtgcccttaattggcctaattctctaatacaccttccctctacatgctcactccctcagatcattgctttatcacgtgttacctgggttgctattacataaagagcaatctttctaaaatgaggatcttatcacttcacttccacactaaaatgtttttcctggggaaccacaaaccttagcaatctgacccatcagaccttccaggcctgtctcctgcctgctcccctaagctccagccaca

SEQ ID NO: 369890 - DNA, 895 bp, Homo Sapiens
gggtgttggatttgctccagtatgtgtaccatcttgtaaattcatttgagtagatcatgtttacttcccagtggaaggagcactgaaaacctcttaaagaaaaagcatttgtgtgttttccttgaactgtctgtatcaagacgtgttacttcgagatatccattcactttataattttgactgcaaaatattttgtaaatacacttttttacttttcaaacgagtaaaataatgtgcaatgatttttatacaaatgattttcaagttgtttggtatatttcctctaggttttgcttgactcaaagtagatcgttattttgatcaaactgtgcaaacagtagtaccacgtgtagcattttgaaacattattttttaaaaaatgctgtcttgctttagctattaatggggcattgtgaggaactgtgccaaagacatttttgttacaaacctgtgggcctgttgcaatactttaaaaataaaaaattttattccatttgcttgttttgtatagacatttctattgcttctaaatatacctaaaatattttctttccttatgtactgtacagttaatcttatttgccatcatcttgaacacaaaatgtgtatttagaatatttgtataactgtgtaaaataaaaaaggaattatgtggtcagtgcattgttttttaaactggaaatcattttgttttaaaagttaataatggaaaccatattaaaattgaataaaatataaaataatatagcagtgtgacttcatcttttttataagcctgcattggttacatctttcttaccctacccttttctgagttttaatgaagtaaattatttaacatatttttatatcctgtttgatattgcaatttccttaccaaaacttcttcagggtt

SEQ ID NO: 369891 - DNA, 780 bp, Homo Sapiens
ttacctttacagttgagggttgttgaggaaaatgattttctttgtaaatatatagcatcgtgtttggtttgggatgtagagtctatacctggctgctgattgcgtcgtttactacagctttttttaaataagatttttgctttaccatttatcataatgtagtaatgaagcaaaatggtcaaaactgggtgtgtgtgaacagagatacacccatattcgtgtatatacacatccacctacatgttttggtctgtggtttaagagactatttcaaggttccatttttataagctaaaacattctaagttaagatggaagaaagccctaaacacagtagattctgagtttttatgtgtattttaaccagagtttctgatagtactgtatctggctacctatatttccagatctaaagcaagaactactctaagtactgcatttggaatcctcctccattaggaatggccaggacaagtggagctagccattttcattaaaacggccatcccaaagggacactggaatccctggtccaactgtccaaaaggccagttgttcctttctgtggatgtggatgtctggccttcacctgaggtagagcggggactataaacacacatcaactttctttctgtttgctttcttttccttcttttcaaactctttaaacttcaggcctttatgctgtgagtgactagtccaagaaggcacacattttgtagtagtcctggcaccagccctgctcttggaataaaaagggaaaattactggctggcaccc

SEQ ID NO: 369892 - DNA, 773 bp, Homo Sapiens
cccttaaataaaaagcaaaataattagtagtagatgagccttacgttgctgaaaaaaaggattccgggtaatgaagtgcagcattattaaatgccaatatgtgttgattcttcagctacagagagcatgtcggtgctgatagtaggatatatgaacatagctttccaactttggcaaccctcctatatacttaaacagagggaagcgtaaaagcgtatcccattgaatcaatgtaaacatcaggaacacactgcattagagcttcccagccaagaaaaatggatcctagactttggcccagcagtgtgaagtgaggatacagtgaatcttccacaagatagcgtttccttaaaaaaacaaactgcactgggtgaattaatctgatgttaaatcttctgaaagcaccttctagtatctgttgaccgttgacattaacatcgccggtataaacaacataaactgcttcaggatactttttctgcagggctcttaaagcacaccataaaactctttctcctcctccaccagcattgcagtatggatgaaaaaatgcaatcaccatttgatttttcccatttttgctagttgacactaattttttctttcactgtagcagcagtctgattccccaaaggacaatgaccaaacacacacataaagttccacatacaatgagcccagggaagaataatgaataaaaaaacctcaacaacttgcacaggcaccagctcctttcgccggccgccatcttccgccgacccccgaactccgct

SEQ ID NO: 369893 - DNA, 745 bp, Homo Sapiens
acagcctgtcctactccgtggatgcctttgactatgacctgcagacaggacagatctccaaccgcagaagtgtttacaagctagaaaaggaagaacaaatcccagatggaatgtgtattgatgctgaggggaagctctgggtggcctgttacaatggaggaagagtgattcgtttagatcctgtgacagggaaaagacttcaaactgtgaagttgcctgttgataaaacaacttcatgctgctttggagggaagaattactctgaaatgtatgtgacctgcgcccgggatgggatggaccccgagggtcttttgaggcaacctgaagctggtggaattttcaagataactggtctgggggtcaaaggaattgctccctactcctatgcgggatgaggacaggtcttctttcctgccagagggagctctgaagacaactagagaattttgggcctgaaatttcaatctagttagaaagaaaaatgaggcaatgattttattaacagcgttaagttttaatttacaacttttaaaaggcagagcatttttaacaaggggtgacaggtggttttgataacacacttataaggctttctgtaaaaggtactatagaagggcgaagaatcgttcaactgtcaatcagcctcttgattctttgtaaattgccagggtgggtgggtacatatctcttcttgattctgcatttcatacttaactatattaaagcttcaaggaacagtaaaaaa

SEQ ID NO: 369894 - DNA, 496 bp, Homo Sapiens
aaggggaatgggaccccccgagggtccttttgaggccaaccctgaaacctggtggaaattttccaagaataactggtctgggggtccaaaggaattgcctcccctactccctatgcgggatgaggacaggtccttctttccctgcccagagggagcctctgaagacaacctagagaattttgggccctgaaatttcaatcctagttagaaagaaaaatgaggcaatgattttattaacagcgttaagttttaatttacaacttttaaaaggcagagcatttttaacaaggggtgacaggtggttttgataacacacttataaggctttctgtaaaaggtactatagaagggcgaagaatcgttcaactgtcaatcagcctcttgattctttgtaaattgccagggtgggtgggtacatatctcttcttgattctgcatttcatacttaactatattaaagcttcaaggaacaataaatagtaacctggtaatgacc

SEQ ID NO: 369895 - DNA, 800 bp, Homo Sapiens
  misc_feature (61)..(310): n is a, c, g, or t
tttccactccttggtttccacccgctgggagtgcggatgggctcaaacctcgggctcaatnnnnnnnnnnnnnnnnnnnnnnnnnnnnnnnnnnnnnnnnnnnnnnnnnnnnnnnnnnnnnnnnnnnnnnnnnnnnnnnnnnnnnnnnnnnnnnnnnnnnnnnnnnnnnnnnnnnnnnnnnnnnnnnnnnnnnnnnnnnnnnnnnnnnnnnnnnnnnnnnnnnnnnnnnnnnnnnnnnnnnnnnnnnnnnnnnnnnnnnnnnnnnnnnnnnnnnnnnnnnnnnnnnnnnnnnnnnnnnnnnnnnnnnnnnctgctgtcaggtccttcaaggctatgcttctgattgcccacacactttacttctgagtatttcatattttacgggtaggtagggtaccaacttagtatgttagataaccattgtatagtaaaaaccagaaatgaaaatataataacccttataactccttacatataagaaagacagaaatacatcaaagaaaaaacattttaaataatctcaggaaacaataacaagatcctctccccgaaaataaatataacaaacatattagtaaccatagctaaacaaacactgtaatataagaactccattagacataagaaatagacattgaagccaggttttgacacttattctccacatccagccagttgtcaccagtctagtaagtgctacagggttaactgcctctggactgactgaaatatggttgtacttaacacaaaagaacactggttcagatccagcaatgacttatgaacttgcccataggtcc

SEQ ID NO: 369896 - DNA, 513 bp, Homo Sapiens
gaaaagaaaaagaagcttacaatcatggtggaaggcgaagaggaggagcaggcatatcacatggccaaaaagggagcaagagaaaggtgagaaagacactagactctttttaaaaccagctctcacatgagctaatggaataagaactcactcattaccacaaggacagaacccagccattcatgagggacctgccaccatgacccaaaaacctcctacttgacccaacctccaacactggggataacatttcaacatgagatttgaagaggacaaatactcaaactatatcacttgttgtccatttttaatctttctctaacataccctaacttcttcttgaaaatgcttaattttctctgttttgagatgtaaatttgctatcctgtttttcttaaaacttggtaagatcttcagccatgaaggacagacaaactgtaacctttccatttacaaagctgcatttgaattcaactgtccttttaaactaaggagttttactggtctcgtggc

SEQ ID NO: 369897 - DNA, 1814 bp, Homo Sapiens
  misc_feature (1734)..(1763): n is a, c, g, or t
acgttaggatcgtgggtacacggcacgccttttatgtgtttcattgttcgggattttctactcttgttggtaaaatttgtgttgaaaaccgcccattatgtccttagatcccagttgtgttatcgactcctgttttcgggctcaaaatagtacacgtttctgaaggtacggagtggaatccacgggactataattgcacggatcagaatctggaaaccagttatagaagaccgatggatgagaaattaatgaacttcgaaatatgctgacactctgtgagctcagataatacaccaaaaaccgaagctgaaaggactggcatcctcctgggggctttattctgggattatgggcacttattatcatggttttcttcaaaacttatggaattaagcatatgaagttcattttttagacttgatgatgaatgaagaatgcatggaggactgcaaacttggataataatttatgtcattatatatttttaaaaatgtgtttctcttgtatgaattggaaataagtataaggaaactaaatttgaatcaactattaattttataacttaaagaaaaataattgttaatgcaactgcttaatggcactaaatatattccagttttgtattttgtgtattataaaagcgaatgagacagagatcagaatacattgactgtttttgaaaatagtaatttccccttatccccttttcatttggaaaagaaacaattgtgaagacattaaattctcactaacagaagtaactttggttaattattttttgtatatcctcccaatcttttgacttatgcacatattttttcccaatatggagatcatatggaatgtactattttgtaatgtcttttttcattttacaatgtattatcaaccttttccctctcaaaaatacattgtgaatgactgcatagtattcactttatgaatatttaattcatttcacagtcttctattgttggaccacttacattgtaccaaatgttttcctttggtttattctttaatgtattaatattttactgctggtcactcatggaatcctgcagctttaattaaaagcaaagatgaaaaatcggttttttaatctatggcactgacaatctccaggaccttatacgtttgttgtcagtctatttgggaaattttagacctttgataatttcacgttactgactggctcaagagaaacattaccccattgtttttcatttgtaagcgttctgtgatcttctacaattggtcacgtcctccttcattttccatcttgaaagaaagagccaacaaggactttatttcattctggtttaggtaaacctccttgcccactggctgtatcctatactttccttgagaaaaatcccataaagtggatggacctgtgaagaaaatgtatgcttatggcctagccttcatgtctggctgatgtatcctataaggcagtaagccccttttctagtctctggtaagatgcaagagctcatatccccatcactggacattttagtttggaaataatattgagactgtgctatgaccaacccccggatggtgttttttccttttccaactttttgcatattgagtagaaggaaaaaccctaaaaagtctaagtatttaatgtctggggggggatacccttccgggtggccttattctggtttttatgcaaaaaaatttatggtgggtccatcctttaaattccactggcaaaagaannnnnnnnnnnnnnnnnnnnnnnnnnnnnnaaagttgggtggggtaaaacttttagaaacaaaaatttcttttcctcccac

SEQ ID NO: 369898 - DNA, 742 bp, Homo Sapiens
ggatccaaaagacttgaagctcagtgatggtcggctgcgtgtaggatatgtgagttccgactttgggaatcatcctacttctcaccttatgcagtctattccaggcatgcacaatcctgataaatttgaggtgttctgttatgccctgagcccagacgatggcacaaacttccgagtgaaggtgatggcagaagccaatcatttcattgatctttctcagattccatgcaatggaaaagcagctgatcgcatccatcaggatggaattcatatccttgtaaatatgaatggctatactaagggcgctcgaaatgagctttttgctctcaggccagctcctattcaggcaatgtggctgggataccctgggacgagtggtgcgcttttcatggattatattatcactgatcaggaaacttcgccagctgaagttgctgagcagtattccgagaaattggcttatatgccccacactttttttattggtgatcatgctaatatgttccctcacctgaagaaaaaagcagtcatcgattttaagtccaatgggcacatttatgacaatcggatagttctgaatggcatcgacctcaaaacatttccttgatagtctaccagaagtgaaaattgtccaagatgaattgtcccggatggaaggaagacaatgcagaatagccagtaacccccagcttcttaaaaatgcccggtttattccctatgaaaaactattggccaaaagcca

SEQ ID NO: 369899 - DNA, 734 bp, Homo Sapiens
gggaaactaaggaaagttttgatccaaattgcagtcttgttatacagcaggaagtctaccctaaggagaaatcttataaatgtgatgaatgtgggaaaacttttagtgttagtgctcatcttgtacaacatcaaagaatccacactggtgaaaagcctatctatgtactgtctgtgggaaaagcttcagccggagctcatttcttattgaacatcagagaatccacactggtgagagaccctatctgtgcagacagtgtggaaaaagctttagtcagctttgtaatcttattcgacatcagggtgttcacacaggtaataaaccccataaatgtgatgaatgtggaaaggcctttagccggaactcgggtcttattcagcatcagagaatacacacaggagagaaaccttataagtgtgagaagtgcgacaaaagtttcagtcaacagcgcagtcttgtcaaccatcagaagatccatgcagaggtgaaaacccaagaaacccatgaatgtgacgcttgtggtgaagcctttaattgccgtatttctcttattcagcatcagaaattgcacacagcatggatgcaataaatgtagcgcaatacataagctcaatttgatttgagactagtacccaagtgcagttttagtatggctcaacatggggtcagatttagtgataaagcaaattctccttggcctcaagcaaataggtttctaaagaattctgtggaaa

SEQ ID NO: 369900 - DNA, 764 bp, Homo Sapiens
ggtatttaatttatgagtgcttttttatttataagctgatttggttgacacaacatataacaataagtgtacatacaaataaacacatctagacatgtatacacacacacaaacgaagatccaatagcttttaccttggaactctagccatgagatatcaatacaagctcacaggttttacatggttacactttgtttgctccaataggtaatccagtgaaggctgtgaaccaaacatttttaaagcagttccggtggcagtttgatttttaaaggccaaacctcctcagactccaaagacactggagccaaatagcaccaaaggagagcaccatatgctgaccaggcctgacccttcttaggacagcagcaccaaagcctggatacatgcaacgtcatcccgctttcccattcaacagcaaactccagattccaaacaatactggggccaagtataattgcaaaagaatatcaaatgtttcctccttagattatcagggtcaaattcatttcaatggttgaggatgcagtcaagtgggaagtcaggtggaataaatggagtgtttcctgtagtggtctgcaagagagagacaattctaaggaggccttagtactagaacctgaggaacctttgccctagggcatcccccttttggaagaagctgaaggttctggagggtggatcccccctagggcatccccccttttgaagggtccaggtcctaaaaggtggtcaagacattccttctggaaccttaaggtga

SEQ ID NO: 369901 - DNA, 1076 bp, Homo Sapiens
gctgggtggcgaattcggcacgaggctttctggtaaggagaggaggttacggggaacgacgcgctgctttcatgccctttcttgttctaccttcatcggccgaggtggacacctgcgcaggtgtgtgccctccggcccctgaagcatggccagcagcggcatggctgacagcgccaagccacctgcccttctttttcggcaacatcacccgggaggaggcagaagattacctggtccaggggggcatgagtgatgggctttatttgctgcgccagagccgcaactacctgggtggcttcgccctgtccgtggcccacgggaggaaggcacaccactacaccatcgagcgggagctgaatggcacctacgccatcgccggtggcaggacccatgccagccccgccgacctctgccactaccactcccaggagtctgatggcctggtctgcctcctcaagaagcccttcaaccggccccaaggggtgcagcccaagactgggccctttgaggatttgaaggaaaacctcatcagggaatatgtgaagcagacatggaacctgcagggccaggctctggagcaggccatcatcagtcagaagcctcacctggagaagctgatcgctaccacagcccatgaaaaaatgccttggttccatggaaaaatctctccggaaaaatctgaagcaaattgccctgaaaggaatacagaacaaacggaaagttccctgattccaaacccaaagaaaaattaccggtctcctaccgcacctgttccctgcccgccccgacaggaaaaccagaacctaacccatcccccttgacaaaaagaccagaacccggaaaccctctcccatcccccacaggccaactgaaaccacgcatccgcatctccggaaccctttacccccaaaacttaatcctttaacacaagccaacactcttcccctctacaaaccgccaccaatcggcctcaaccgcccaaagacaaattgccgtatccaccacgcgcaccactaacaaacctcactcgccgctagcacttccccgttatatcctccccacgtaccgccccccct

SEQ ID NO: 369902 - DNA, 978 bp, Homo Sapiens
  misc_feature (19)..(19): n is a, c, g, or t
  misc_feature (70)..(70): n is a, c, g, or t
tccttattttcattttaanagttagggtacatagtgccaccttccacaatgtagaggttccgacacacanttcaatgccgtgtttttcctgtgccaagttccttagtggtcctaaatccctagttgaaggtattcatttgcagaacccacatgattcaggaggtcgaaggaaaaagaaaagtttcattaaatttctgaaaccagcactagatgtgcaaaggcagcagacaatctggccatcaatgcagccagattagggtcactttaaagggagatccaaagagttagttacttagattggtctctagaaaaataggtcagtatatgctgtatcttggtcaaccgttctttcaaagacttcattgacaaaaccgacagctggtatcgtgggtctacagggagaactgcaagaagccaccaacaccatgcaggtccattaggggctgcctgaaggttttcccccctctcgggcattgatccgaaatgctgaagaatttggcttcgaaatctgtctcttaaattctgaaaccagctgcaggcttgagagtaaaccaaatcatgaagctctctgagattcttaatctcatcttcattctcaaccttaacatcttccagatattcaatgtcggcagtgcaatatccatctttcattccctctttttaaaaccctaaaccgctttcctccaactgtatcaaccacagaccttccgtccggtaagaaatgcacgtttctaatttgtaacatacaaccataatctgcaaaactattttgtgtatcactgacacacatgccaaactgtttggttccagtctgtatacttcttcgaatcatcaatctgtatcttggctcaaatacatggagagggcaaggcacagtggggtaggccatagtgcaaacaaatattggaacattcttggtcaagctaaggggaaaacagttcaattattagaattcatacaaggaaaatattaccgaac

SEQ ID NO: 369903 - DNA, 1214 bp, Homo Sapiens
  misc_feature (34)..(34): n is a, c, g, or t
cagacaatgaggatgaagatgaagatgtcaaagnctgaaagactaaaggtcaaagagctgatgggttgccagtgttgtgaggagaaaccatccattatggtcagcaatttgcataaagaatatgatgacaagaaagattttcttctttcaagaaaagtaaagaaagtggcaactaaatacatctctttctgtgtgaaaaaaggagagatcttaggactattgggtccaaatggtgctggcaaaagcacaattattaatattctggttggtgatattgaaccaacttcaggccaggtatttttaggagattattcttcagagacaagtgaagatgatgattcactgaagtgtatgggttactgtcctcagataaaccctttgtggccagatactacattgcaggaacattttgaaatttatggagctgtcaaaggaatgagtgcaagtgacatgaaagaagtcataagtcgaataacacatgcacttgatttaaaagaacatcttcagaagactgtaaagaaactacctgcaggaatcaaacgaaagttgtgtaaagctctaagtatgctagggaatcctcagattactttgctagatgaaccatctacaggtatggatcccaaagccaaacagcacatgtggcgagcaattcgaactgcatttaaaaacagaaagcgggctgctattctgaccactcactatatggaggaggcagaggctgtctgtgatcgagtagctatcatggtgtctgggcagttaagatgtatatgaacagtacaacatctaaagagtaaatttggaaaaggctactttttggaaattaaattgaaggactggatagaaaacctagaagtagaccgcctttcaaaagaaattcagtatattttcccaaatgcaagccgccaggaaagtttttcttctattttggccttataaaattccctaggaagatgttcagtcccctttcacaatcttttttttaaactggaagaaatctaaactggcttttgccccttgaagaaatatagcttttttctcaagccaacattggaacagggtttttggtagaaactcccttaaagaacacacaggaggaaaatactaattgctggaaactttttaatcagcaaccttttggtggggaaccgaatcccagctaagcatagctgcgccattttcgaactttgtatctgccccgtcccggctttaatggg

SEQ ID NO: 369904 - DNA, 731 bp, Homo Sapiens
  misc_feature (162)..(326): n is a, c, g, or t
gaagaacggggttcttccactgtttgcccccaggccccggaagtgccagggggcggcaattctccaggttcaatggcaaactttccacccccccagggcttcaagcaatttttccctgtccctagcctccccaagtagcttgcggcccacagggcacatgcnnnnnnnnnnnnnnnnnnnnnnnnnnnnnnnnnnnnnnnnnnnnnnnnnnnnnnnnnnnnnnnnnnnnnnnnnnnnnnnnnnnnnnnnnnnnnnnnnnnnnnnnnnnnnnnnnnnnnnnnnnnnnnnnnnnnnnnnnnnnnnnnnnnnnnnnnnnnnnnnnnnnntgatgccactttgtaaacggcacttaattatggaaaataggaaaaagcaaaactaaaataaggaagaggatatatatataacttttcacaatctcttttctgattccctttagatgcccagtcaaccaggaccacacacagatttcattttatttgtagagtatatgaaaagattaaatagtctcatgcattttattttacgtatactgatttctacgttttgactgactatttaaataaacaaaacaagactcatttacaagggcatatactcttccttgtttggccagaagaaaatctatagctaaatctacttagaaaaacaatgctgctaaaactcttaacttcagattgtattaggctgagattttctaataacaaggttctttaaaattagaagggttc

SEQ ID NO: 369905 - DNA, 790 bp, Homo Sapiens
ggggtaaacaccaaggattacaattgctctattgagtaagaatatgttttatttggtaagaaactgtcaaactgtcttccagagtggctataccattttgcattcccaccagcaatgaatgagtgttcctgtagttccacatccatgccagtatttggtattgtcagtgttctggattttggccattctaataggtgtgtaatgatatctcattgttttaatttgcatttcccttatgaaatccgacgtagagcatcttttcatgtgcttatttgccatctatatatctttggtgaaacatctgttaagatgtttggcccatttttaattcaggtagtttacttattgagttctaagagttctttgtatattttgggtaacagtccattatatcaggtatgtcttttgcaagtattttttccaagtctgtggcttgtcttttcattaagtgtctttcacagagcagatgtttttaattttaaagaactctaacatataaattatttcttttatggatcatgcctatggtattgtatctaaaaagtaatcgccagtcttggggtcatctagattttctcctatgttatcgtctaggagttttatgttttgcattttacttttaggtctgtgatccattttgagtgacctttttgtgaagtatgtaaagtgtgtgtaggattcatattttttgcatgtgggatgtccagttgttttgagtaccttttttcatgtgcttattgggcccatttgccatattttttgtaaaagtgttcacatattttggactact

SEQ ID NO: 369906 - DNA, 454 bp, Homo Sapiens
gggtggaatgattattgattctgttggagagtagacagaggccagattgctatgcttagatacaatttcaaccacctacaaatccatctaattacctacatgaccatcatcatctggtcatgtttctccattttatcattatgtataccttaaagacttgctcacattacttaaaattgagataggttaggcatctatccaatctcccatgccagtaattctacagaaacagattaggttagctagataagcatgtttacaattaaatttatgctgtatccttctaatcaccactttctcatcaaaatgctcacaaatcatctgcatcattgtccattctttaaaaatgtataaacccatctctactaaaaatacaaaattagctgggcatgatggcgcacgcctgtaatcccagctgttcaggaggctgaagcagaagaattgcttgaacccc

SEQ ID NO: 369907 - DNA, 343 bp, Homo Sapiens
  misc_feature (204)..(204): n is a, c, g, or t
accccttaaaagacctggccccaacattaccttaaaaattggagaatagggttagggccatcctatcccaatcctcccccatgcccagtaattcctacagaaacagattagggttagcctagaataagccatgtttaccaattaaatttatgcctgtatcccttcctaatcacccactttcctcatcaaaatgcctcacaaatncatcctgccatcattgtcccattctttaaaaatgtataaacccatctctactaaaaatacaaaattagctgggcatgatggcgcacgcctgtaatcccagctgttcaggaggctgaagcagaagaattgcttgaacccc

SEQ ID NO: 369908 - DNA, 840 bp, Homo Sapiens
ggggattgaagggtaaaggatggagtatttaaaaagtactgtgacagaacaaagtactgtaagtactagagttgagtgtggatggaaacacagaacctgtaaatcaagtgtttcatttacgtgctcaactcctactgaattttagcaattaaaacatgaaaacggaaatattggtgaacaaaggaaaatagaatttaaagacctgaactgctgttatgatctttaatgatgatttgttctaatctttgacgtggaaacccaaatgattttcagtctaacgtacttgaaatttaactattaaaaaagttggaggaactcaaactttgaagttagggctccctttctccagataaagcacattgcctggtttattgtaaggcacttagaacatgtaaccaaaaacactcaatttaggaataggaatgagtgtttttacagcttaagtgcgctctcaagagtcttttgttttacacccctctcaagtttacccttagatatttttcttgttgtttaaaatttttgggacagatttggcaactttttaaaagttggtttgaattgaatagtggataaaaattatagaatgtttttcaaaaaattcctttattaaaatagaagaatgaggaaaaaatatccgttctaaagagaatccaaacccccatggagaaattgtcctacccccccttagaatgacattttccaaaagacggtaaccaattctttaaaaaaattgccaaggccaaaggaacgtttttaaccccttttatgggggaaatgtaaaccttgtaccacacctttttggggaaaaaagttatgggggcgttcccggaaacaaaatat

SEQ ID NO: 369909 - DNA, 774 bp, Homo Sapiens
ctttccaaaatagatgaaccagagaactgacagcacttccacattcaagttgtctacaaatgacagatgcatgatctatgttgaagttatcatcaccacactgtttccccaccgtcccttggaatttgatctctattcttccagaacacatattccctccacgcgtcagcctcatttccaaattggatccatctgagcaggtcactccagcatcttgttggtgagtacagttactatgctttccccatccatcatgtttgcaatcccaaagagctgactcattcccacgacaagaaacatgatccatccaaatgcgtccagaacctgcactggaattagcccatccaggggctttgatagcagttggacatcccagctggttacaaatcacagagaccgcttccatgctccagccattattacacaccgttccccactcctcctggactttcacttccactctcccgctacacttgttttcaccatccactagcctcagctccttgtctgttcctccaagagaactggtgacaaaacaggcactgagaagtaagaccacagtaatggtgaagggactcaggttgacaaaatgtcttctgaagtcagcagatccagagtcttcaagtagcaccattctgagtttgctcattccaaagatttataacttcaatgattcctaaatcttcttgtattattccctagaaatgttcttctaaagaaaacaactaagaattctaaaaatcacttcactttcatgaaaatgaaaaggctccc

SEQ ID NO: 369910 - DNA, 778 bp, Homo Sapiens
  misc_feature (150)..(150): n is a, c, g, or t
  misc_feature (665)..(665): n is a, c, g, or t
gggggagtcccgggtccccttcccactgcgcgcggatttccctctctgaggaagtttatccttgtgccttcatggaggatttctcatctagctcagactcactcatggactgactcgctccactggctttctcaagttcgttttgcggangataacattgttttgctcacaagccgcatccgttgaccccttacagtcggatggtctagatgactgaatggagttttgagttggacattttgtgtacctgacggagttgggcctgatcccagagcactgggggtggggaggaggtgttactgtaaaatgcaagttggataaaaggaggacctctcgccaagggccccaatgagtggcacacagtctactatcaccgacaggtttcccctcaaaaaacctataaggcatggaagtattttgaaccgagagtcaccaacagataagaagcagaaagttgagcgcattgcatcacatgattttgaccccacaggtcttgttcagcgttgcgtaatcatccagaaagatgacaatggatttgggctgacggtcagtggagacaatccagtcttcgtacagtctgtcaaagaagatggagcagccatgcgggctggagtacagacaggtgatcgaatcatcaaggtgaatggaactctggtgactcattncaaatcatctggaggtggtgaagctaatcaaatctggttcctatgtagctctcactgttcagggacgccccaccctgggtcgcccccagattccacttgcccgactcctgaag

SEQ ID NO: 369911 - DNA, 1006 bp, Homo Sapiens
  misc_feature (709)..(719): n is a, c, g, or t
ggttcttaagggggtttgaaatcattggtaaaattaatatcagtacattatatgtcataaattttgattatctataatgtcttttcttatctaccacaaataattgagagttggctaaattcttgcagaatatatgggaaaaaaatcatagcaaagaattcagcttccctcaaaagaaagctatttttgtttccttcactccactaaatttgaaccagtagcacggatcaacacgacttctgcaatgagagtataacggtagctcttggtacagtcatattcatatttttaaatctttctttgaccaaaactattgcattgttttcattacattttgactgcgttacttattaaggccgaatgactttgacacccccgtggattatttttatgatcacatcaaatttaaacaatgtccaaagtgtaactttaatgttatattttgtttcaaaccctctggtctaagattattgagaaagatgtttttttcctcctccctcaaatatgttatctcttcatatataaaaaaataagttattccatgcttttcaggaactgtaaaaattatttcaaaaagatatttgaaaaagttttctctattctggacacaaatgcttccatttatttcaaaagaagaagaagaaaaatggaatcttaatttaaaaaaatatatgtagtagtatctgctatgagatattcagtctctatnnnnnnnnnnngggacacagcttcttttaaaacccttgtttcagtcccatattcaacttcatggaacttctgaaacatcattcaattttgaactttatttaagagcatttttgtactgctgtctctgactgtcatggaaagttctgtaattctaaggtgtttctggttttatttttaatttcttcatctgtaccacagtcaaattagcaaccatctcccccatcccttgggctttctgtagatcagtggatgttaggtttaaacttctgttttctttgatgaagctttcaataaaaaa

SEQ ID NO: 369912 - DNA, 867 bp, Homo Sapiens
gggacactctgcttttctttatcaatcagaatcctgaggttggcttgaagcctgtgtggtatagtcccaaagttttcattgaaggtgctgatgcagagactttttcggagggtgagatggttacatttataaattggggcaacctcaacattacaaaaatacacaaaaatgcagatggaaaaatcatatctcttgatgcaaagttgaatttggaaaacaaagactacaagaaaaccactaaggtcacttggcttgcagagactacacatgctcttcctattccagtaatctgtgtcacttatgagcacttgatcacaaagccagtgctaggaaaagacgaggactttaagcagtatgtcaacaagaacagtaagcatgaagagctaatgctaggggatccctgccttaaggatttgaaaaaaggagatattatacaactccagagaagaggattcttcatatgtgatcaaccttatgaacctgttagcccatatagttgcaaggaagccccgtgtgttttgatatacattcctgatgggcacacaaaggaaatgccaacatcagggtcaaaggaaaagaccaaagtagaagccacaaaaaatgagacctctgctccttttaaggaaagaccaacaccttctctgaataataattgtactacatctgaggattccttggtcctttacaatagagtggctgttcaaggagatgtggttcgtgaattaaaagccaagaaagcaccaaaggaagatgtagatgcagatgtaaaacagctttcgtctttgaaagctgaatataaggagaaaactggccaggaatataaacctggaaaccctcctgctgaaataggacagaatatttcttcta

SEQ ID NO: 369913 - DNA, 699 bp, Homo Sapiens
  misc_feature (60)..(318): n is a, c, g, or t
  misc_feature (569)..(608): n is a, c, g, or t
ggtgtgagctaccacaccagcaatgtctatgcttctcgatagctgtgaacatgaaaagannnnnnnnnnnnnnnnnnnnnnnnnnnnnnnnnnnnnnnnnnnnnnnnnnnnnnnnnnnnnnnnnnnnnnnnnnnnnnnnnnnnnnnnnnnnnnnnnnnnnnnnnnnnnnnnnnnnnnnnnnnnnnnnnnnnnnnnnnnnnnnnnnnnnnnnnnnnnnnnnnnnnnnnnnnnnnnnnnnnnnnnnnnnnnnnnnnnnnnnnnnnnnnnnnnnnnnnnnnnnnnnnnnnnnnnnnnnnnnnnnnnnnnnnnnnnnnnnnngtatctctaaatacaggattataatttctgcttgagtatggtgttaactaccttgtatttagaaagatttcagattcattccatctccttagttttcttttaaggtgacccatctgtgataaaaatatagcttagtgctaaaatcagtgtaacttatacatggcctaaaatgtttctacaaattagagtttgtcacttattccatttgtacctaagagaaaaataggctcagttagaaaaggactccctgnnnnnnnnnnnnnnnnnnnnnnnnnnnnnnnnnnnnnnnnttggagcaccaaagagcggcgaattccaagaggtcgaggattttaaaaaccatttggggccaaatgggtggaaaaccccccttttttgggg

SEQ ID NO: 369914 - DNA, 809 bp, Homo Sapiens
  misc_feature (327)..(400): n is a, c, g, or t
taaaaataaagattttgggtattccctattacacttttgccaaatattttgtgaagtgttaccagagacaaccattttgcacaagttgtagcccccttttaaggcttaacaaaggtgatgcctaaagcaagaatcctaggcctcccaaagcttcaggaaaagcaggtcatttttgccaccatataatctcagctgttacttcatgattccgttcaggtgtcatatatgaattcacatatatatgctgaaacattgttgcaactgcacaagatcttccagaatacctttttttccttctctttaaagagggtctcagtggcccagaannnnnnnnnnnnnnnnnnnnnnnnnnnnnnnnnnnnnnnnnnnnnnnnnnnnnnnnnnnnnnnnnnnnnnnnnnccagaatacaccttttgcctaaagtgtctgtttagtgtatagtggcaagttcttccccatagcaacatctcacctaactaggatagcagcccaaaaagacggaaccctctcaaatacatttaaaaggctacctgaattaatggctaccctttggggagtggggctctctaaaaaaacaaatgcgtatttatcacaattctgcactacctatattttttaaaggacaagacattgggtttagtcatttgtaaagtaatgaacttagtgtggttattgctagaatgaagaattggttcagctatactcactcttttaagattttgtttcttccattcccattgaaaccatctttatggaaaagggatgtttaatatatctgactattctatgtgggagaaaatgaaaagtc

SEQ ID NO: 369915 - DNA, 794 bp, Homo Sapiens
  misc_feature (53)..(53): n is a, c, g, or t
tgaaatttcctacgttgcaaaccactgatttcctacaaaccatgaagatttcntatgatatttgcctatctttttattaaactaggggccaaaactgacatcattgctgcaattaacttttacttgttctggtgaaatgcttcttcctaaatggcttcgccctaaccagaaatataagcagttttgatggttaccataaattaagccagaaatggaaataccaacagtaacccaaaaggcagcacaaagaaccccaattgaaagtcatcaaccaaagtatgtgcccagaataataccaaaaacaaacaaaatagatttgcaatgagcagagtttcttacagcaacgcatacatcaaagacttctgatttttaattacaatagtagaagcagtgtcaaatagtgagtctatcattaaagaggtctgttttactcatctttagttaggcactgtcaatccgtctcctacctcaatttaatttctagaacttctttcgaaaaggaagtactccaagttgtttgccttgctagggtagggaggagatcctgagagataagaggtaccacaaagtattttgttaattatatctctatatggcagttgagtcattgtcattgcccttattttacagttttgtatttgccatatttttctcccattctgcaagaaaaatgtaaaaggattttaattgctcacaagctttctgtaactaaagattttatacttagctattacttagtaaaggtacttactagtaagaaaattctctaaacttcttatcatcccatacacaat

SEQ ID NO: 369916 - DNA, 773 bp, Homo Sapiens
  misc_feature (99)..(99): n is a, c, g, or t
  misc_feature (677)..(685): n is a, c, g, or t
ttggttttgttgactccgcttgaaaatctaactctaaagtaggcagcagtaactcgtctgaacaaatctgattaaataaattcttggggcttacctgtngaggtcacacatacagatctactctccaggaagcaaactcttagcaagttactgccccacttgtaatccactggatctgaaattctcttgctatggaaagaaaaatccttctccccacgaaagacctttaaagacttctacgtatttgaaataccagatactaaggtgtttaaaatgatttctatcattggtaacatcaaacaaaaatagctgcatctggttaagttaaaaagcatcaatactccctcttctggccctacagctgtaccaataggaattctcaccactactcaataacagaaataagtgcctacagccatgatgaatttgtaacattttctcaaattaactacgatttttctaatttcaggtgaaaacccaaggtggtacttcaaacacgcacatgcacacacaaactcagaggacagcgttacaaggaaactaaggaattcctgcattaacaaaggaagacatgttagggggacatcctagccacatatgctttctttgttatatttaggttcattttcattgatactaaacacagacatttaatggcactgataaaaattcaagtnnnnnnnnnctcaactgaatatgcaaacttaccattataaacaaaatactataaccacaaatcaacactaaaacaaattctgtaagtattttattcc

SEQ ID NO: 369917 - DNA, 845 bp, Homo Sapiens
cctttgggggttgggcccccggattgccaaggatccaccggggtatttggggtgggttgaccgggaaagtagccccaacccagggggatgaccttcatgaagggaggcttttcacaggagaattgggtggcagtggcccagccagggagctgggccatgtgccggaaggaaagggacaagccctctgccccttacaatagactgaaaagcgggcagatgaagagctgcaaagctgttgaagaaacgtaaattctgaatggccacttggatggtattttgagtgtaattctccttgggactggcagtgctgggggtccaagatggtgccatggaagaggacacagtagagcatatgaagaactccagccaggtcggttgcctgaagagcagctgtcaggccctgtgggatcctggcgattattgtcaaatatgctgtatgaccttccagtgacagcaaagcacagtgtacacattgcatgtaagagtcctgcggcatgcctgccagaaatatggcccatcttgggattcctcatcccactgggccttgcaccgagaggaagcaggcacacagtttgtcaatcagacccatgttcaccacgtagctgataaggtcctgaactcgattgttaaaaggatcaccttgtgagggtttgtttttcatttcctgtgttggtatttttggggtagctggctggcagtttccatctggtcgattggcaatcaggcagcccaaaaccacagcactgactttgagaagtccagttgtcaagccttcaaaaacttgtttatttgtatttctccccaaaatagtattattttcatctggaacataaaccgtcaactgg

SEQ ID NO: 369918 - DNA, 838 bp, Homo Sapiens
tatcaccacctatagtgtttaaagttagccatgaccgaattttttggcctttctccattaatagtaatcccttccagacccagtccaggtgtctagctttagatagtgcaaatcattcatcctagtttgcagaacacgtccgccaaagatataacccttatttccaagaactgcacacgtatgcgcggctcgtggctgtggtggaactccacctttaatttctggttgaaaccaagtctgtgtctttgtgtcaaatatgtggacatcattatgtcatccccagaatatctgctcttcccaagatgcatcatgaacatcaaaacagtcttggagttcactgtgtctcctacacccataaccacaaaaatatattagtctgtctttatatacccagcaggaaagtttatcacgtggtgtaggtggttgcccttcaaagtcggtgattttctcccaaatgtaggtttcatctcttgttcgtaaattaacaaaataaagtcgattgctgtatcctttgtcatcatatcctccaaaaatgtacagctttccattaatgcaagcaccacagcttcctgacatggaggctgggagttctccttccatgaggtgcattctccacaacccactatcaatatcataggtccaaatttcatcattaggcaaatatacttcattgtcttcaatagacacgtagcccccccacacgtagaggaagtttccgtccaccacggcgcagtggccgctgcgttcctccgccacacagaacagctgagagtccgccattcgcgccgtcgctggcccgccgcttgccgcgccacactccctgcccgccccgcccgct

SEQ ID NO: 369919 - DNA, 717 bp, Homo Sapiens
  misc_feature (65)..(73): n is a, c, g, or t
gggtctaaagtaacacatgcactagtgctgtggtctgtggcaaaattactgtaattcaaattggnnnnnnnnntgtttccagactttgtccaacatttattcctatggcaaaggaaattactatgtaatactaattatttcttatgctggtatgttttaagctactctatgaagtatgtgaaacatcaatatttatggattaatagatggcctgatgtctttcaaatgggagaggagtaaattttagtgttaccaactcatgacacttgtaatacaataaatcttaaaatttttattttccacttacaggtatactttactaaataattaccttaaatggcagtgcatattaggattttttagcacatactactaaaattatatagtaacttttaacttgcgctgatatttcccaaccaaaaaagacatcattcacttcatcataaccaaaataagtaggactgtaatatttatcttcatttatttagacatgattaagataccgtaagactcctctaatttacctgcaatttttaaccattgattcaacgacttgaatgctgtttacttgctactacctaatgaaaggatttgggaataaaggttataatcacaatttttaaagaaaaaagtttcatcttgaaggcaaaatttttaagcttttttattttagagggtggtttacttttaagaataggtaaatttaaaaaagcattt

SEQ ID NO: 369920 - DNA, 925 bp, Homo Sapiens
ggctgatacccactctttagactgtgccttctgctctgttctttgttttatgtttaactgctgtttctaattgcaggtgtattacagatacaaataagagtaaagaaaatatatttcattatagaaaagaaaaaattaaaagcttcttgcttttcagtgcctgatagagtgaaaacacaaagttgcactttaataatttcaataaaagctaatctgtgtcagcctccctctgcttcagagagtcaggtgagcatccataacctaacaggcagagccctagcgatgtggatcaagtttcctgagcccgggggcggtggagcctcatgatctcttatcttttgaggctgaggcaggtcacatgcaacaaattgtgaccctgctccccacaagtcatgcaaaggttttgaagagcttttaccgtggggcagatgaacttgtgtcaaccatgcacaccctgtgagaaccaagtacctgtgtttctaaggcgggcactcaaggtgaggggtgcattctggccaaagaaacaaaagctgtggtttcaggaccatgccgtgtgtagctgatctgtacgggacgtgtatgtaaggaagagcaatcatgatagataagaacagtgtgtgaagcagccttcacactagagtgtttggtcatctcttataatgtaagggaaggtactttaaaattctgggaagatgcgatgaactcactgtcccagtcagaaaataatccaatgaaataagcacttggttgccaggccacagttaggaattgtattgtgatacatctagaggccaagagagcaggagagagctaccaacttacactgtggtttaagctaaatgaccgcacagcatcatagcattgcagtgttgttactaaatctggaagtgacctgtgaatgtatggaatacaataaagtctttta

SEQ ID NO: 369921 - DNA, 829 bp, Homo Sapiens
ggtgttctggcttccaaatgtagatgggagcttgggtgaggccagctgcctactgagagaccacatatcccacctacacctctgcgtgctgaagaataacaggcacccagagacagtgggaaatgcctacatcttcttggaggcaagaccaagttgttgcccatgtaaaagctttcaggaagaggggggaaaataatcctgaaactctttatgatttctgccagatctgggttgattccctcagtcacaccatagagggagggagcttcaatgagcaaaactctggctagggaacataaagactaaaagaaatgggtttctactccttccttgcccaattgaagcttccacctgagcagggacctacaatcccttatatatcagtttccttttcacctactacctagactcaaagccagtgccatacatttttggcttttttatgctgctggttgttatatggctgcataacaaccaagaaattcaatgatatccaactgtaaacatatgtttgttgaaagtggctgtgccattggcttgaagaacccccctctccacctggggctcacacactcgcaatttgtgccttcagttcttgccaaatcctagcctagccttgggcctcccttccactcccagggtaaaaaaactttgtcttggcccccccgtggctattttatattccgggggccctgcgggttcgcaaagggggcccaccactttattccacggggaaaaaatttcccctattaaggggggcgtaatacaccgcaccgtttctcaaagggaaacccccaatgtccaaggtctttgcccacgtaccattttt

SEQ ID NO: 369922 - DNA, 958 bp, Homo Sapiens
tactcaagaactaactctgaagaggcagaaacagaaagtgtgcatggaggaaaccctgtggctacaggataatatcagagataaactgcgtcccattcccataactgccctcagtggagatccaagagccaagctctcgtaggcgagtgaattcacttccagaagttcttccaattctgaattcagatgaacccaagacagctcatattgatgttcacttcttaaaagagggatgtggagacgacaatgtatgtaacagcaaccttaaactagaatataaatttttgcaccccgagaaggaaatcaagacaaattttcttatttaccaattcaaaaaggtgtaccagaactagttctaaaagatcagaaggatattgctttagaaataacagtgacaaacagcccttccaacccaaggaatcccacaaaagatggcgatgatgcccatgaggctaaactgattgcaacgtttccagacactttaacctattctgcatatagagaactgagggctttccctgagaaacagttgagttgtgttgccaaccagaatggctcgcaagctgactgtgagctcggaaatccttttaaaagaaattcaaatgtcactttttatttggttttaagtacaactgaagtcacctttgacaccccagatctggatattaatctgaagttagaaacaacaagcaatcaagataatttggcctccaatttcagctaaagcaaaagtgggttattgaactgctttttatccggtcctcgggagttgctaaaaccttcccaaggtgtatttttggaagtaccatttgtttgggcagcaagcctataaaatctgaaaaaataaagtggggaaattttaataagagtattgaattcccgggggaataaaccttaggtaaaacttctttaaaaaaccctggccccaacaaacccttgaaacaattccggtgggccc

SEQ ID NO: 369923 - DNA, 803 bp, Homo Sapiens
tggtattccatgccttccaaggattttttggcaagggcgaacttgggttttttaagcaattcacctggagtgcctttttgggaaaggctatgaagggcttttggttgcgaaaaaaacatgtccaaccaacagaagcaagggcataatcttccaaactgccccaccacaatggccatattctgaaaggacattttctatatttttcacttccccagatttccattttttcatcatagcttccaaatatactcaaaatattcttttgatatggaaaaaagtcctcctgcaaaagtgggtgttttaattgggtaggtttcatctttccttctttgcttctcatgatcaggaagcgactccccagccaaatgaaagactcccagtcaaaatttcccacggttatggttacttcccataaggagaaggtttgttgaattcaaacgtgttcagatctatggatgcaatatctggacttacgacagccgtgtagttctcagctattctggccaacagaggttctagccaaccatagaaacactcacagtgagcatctaaaaatgtgagcgtttcagctgttgcgactgttgctcctagcaaccgagcagtgatcagaccttttctttctctttgtctgactatttttactatagaaaattgttttacatattcatctagtttatcatgtaagtactcatctacactagcatcatccaccaaaatgatttccttcagcagtattgcaggtgaagaatagagcacactgtggacagttctaagcaacgtggaccacgcttcattatgaaaaa

SEQ ID NO: 369924 - DNA, 1156 bp, Homo Sapiens
  misc_feature (960)..(960): n is a, c, g, or t
  misc_feature (1112)..(1112): n is a, c, g, or t
  misc_feature (1127)..(1127): n is a, c, g, or t
ggccattttaaatttccaaaatattttcctgaatgcccaatttaaaatccaagctttgtatttccaaaatttccttttttcctttttcataaaactggcaaaatgaaatgttctttcgtaaattttaaaaaatcccacattattgggaattcttttttctcaccccagggttccctttccagggatggcatccttatacccctgtcccttccctgaaaaggtcaggacaccatctgcaggaattcatttatctacattccttttctctctgaaggacaccatgggggaggagaaaaagaacagcaaagagaacaagaatccacattgaagtagccttagaaagcctacataagtgcactgtgacccattaacttccccctttggtatcctcctaagccgacataagaacaataatgcccacccatatatttacaatttcagaagtgtttagtcaaaatactatctcatctgattctcaccacaacactgtgagaaaggcaaaaacaaaacacctttctgttgttcagcttttgtgactcaagtagaatatatttaaggatttgtttttatgatactgtttaaagtgtaggccatttaattgcactgacaatatttcctaaacgtactcatctaccacatgcagaggatttagttattatgaaggcagagtatgctctatgtaaaaagattatggttataagtgaaacatttaacatattttaagcttttggctttaactatattctgaagattcaataatgaaacagaggaacaactgccctttgaaattctgctgaggcaaaatttatcctgaatattttatccagtattacttttcccagtttggttttaactaagaagggcaccttctacaacctctgaagacgaatccttttactttctagcagtctttacagggtatgtttcattatattcaaactaaattactttggctcaagnacaatcataattcctttaccaccctaaatactccgcctcaccgtggtgtccacgaccttgtatgagtgtctggagggcaacatggtcaatctttttgtgtctcagtgctactataatcagtctattcaattgcaagtttattttcccttctnttcatgtacagaaanatccttcacataatcagacaaaatttttc

SEQ ID NO: 369925 - DNA, 793 bp, Homo Sapiens
gggagagaaaccctacaagtgtgatgtgtgtggtaagggcttcagccacaattcaccattaatatgccatcggagagtccacacaggagagaagccatacaagtgtgaggcgtgtgggaaaggctttacccgtaatacagatctgcatattcatttcagagttcacacgggagagaaaccctataaatgtaaggagtgtggtaagggcttcagtcaggcttcaaatcttcaagtccatcagaatgtccacactggggagaaacgattcaagtgtgaaacgtgtgggaagggcttcagtcagtcctcaaagcttcaaacccatcagcgagtccacactggagagaaaccatatagatgtgatgtgtgtggtaaggacttcagttatagttcaaatcttaaactacaccaagtaattcacactggagaaaaaccatataaatgtgaggaatgtgggaagggcttcagttggagatcaaatcttcatgcacatcaaagagttcactcacgagaaaaaccctataaatgtgagcagtgtgataagagcttcagtcacgccatagattttccggtacatcagaagagtccatactgggagagaagccatacaaatgtgggtgtcctgtgggtaaaggccttcaagtcaagtcctcctggtccttcaaatccccatcaggaaaagtccaccacggggtgggaaaaaacccattacacaaatgttgaatgatgctggttgggaaaaaggggccttttttaaaaataacagatttttcgccccaggattttttaataataa

SEQ ID NO: 369926 - DNA, 757 bp, Homo Sapiens
  misc_feature (342)..(357): n is a, c, g, or t
  misc_feature (699)..(699): n is a, c, g, or t
ggtggtgtgtgtgtagcattgtgtgtccatctgttatatgtaaaggacaaggcaccagaatcaggctttatttcgatattgaagatgttatttaacatctttcttttttccttactcccttagccatcccctccccttttgtcctatcattccctagaacaagccacctgtcaattgtgaagggttgtgttctttatggcaggttctatgcagattgtgccagagcatgtgcgtgttctgttggcaagccacagtgctcccttgactgaagacatttccaggtagatttctcagccagctctaaaacagattgctttttcagtggccttactctttgtgggnnnnnnnnnnnnnnnnctctgaacttgatataaagattttatttgtcccttgaaaaagtaacaaatgtgcatagatcaatttgtactactttggtcattggatatttctgatccttattgcattgtacctaaaggagagtaactaatggtaacctttttaatagagtatgtgaaaggtagtggctgatgaatccttaacgttcatagggtctttttgctgttacggttgtatatagaagtctgaaggatttttaaaatgatttgcactttttcactgcatgcttacaattcccaaaggcaaaatctgtactgaggtagatcatttgaaagggctagattataaaattaaagcccttanagtatgggaaaagttctttataacaaataatagtacaccactttcaagagataaggaa

SEQ ID NO: 369927 - DNA, 858 bp, Homo Sapiens
  misc_feature (50)..(58): n is a, c, g, or t
  misc_feature (811)..(811): n is a, c, g, or t
aataggaattggggtttcaaggattggttaaaaaaggaattttaattggnnnnnnnnnaaaaaaagtttaggaaccccccatgaaatttggatggaatatggggaaattaaaggaaaccctgtttttcctttgttgaccaaggtgtcgtcttccctgccttcaagaccaatccttgggttacaagtgttccccatggaacctaatagaccaggttgggagtttttcgtttaatgaaatcttgagctatctctgatttcaccaaaaaaccccaaatgtagaagtaggatgtgaagccattggaaagtgagggactattagacaactctaggcatgtggggtggattttaaatcaagcagatgttttcttttctcttctcgcaaagaagtcggcctcatatttgtgttattaagctgaccttagctaatgttcagtgatgaagccaaattcactcacttactagtgaggctgtccacatacttaatgaggcatttggaaccccactctggcttcctactgcaacaggtggatttagacagtaaacatgcttctcgattacagtggctgtttctttgttctattccacctgcatatctcaaaatgggtgatgatattactgcttgctgggctgaagttgaggagcagcagtgagcactgttgttggaaggtttgagactgtttattgatggatttgatagcatcattaacactgtatgatgacatcacacttactattgcatcaagggctcatgacattcttgctctttctcaaataaggatgctcatttcctcctattctgtcaatatctacnaaaggaaggtagggggagaaccaaagaaaacagcatgtgtgagcatg

SEQ ID NO: 369928 - DNA, 562 bp, Homo Sapiens
  misc_feature (204)..(243): n is a, c, g, or t
  misc_feature (476)..(511): n is a, c, g, or t
tccccgtacgcccaatggaaaaagtgaattaaggtaatgcacgaaacctttcacccacttaaacattttccagttttgagattcctcttcgtgtttgtggtgtcttccccttgttaccccttctgccctttttctctgactatggtaatttggtctttaggctcatatcagtctccccgagacattctgcagtcattatcaccnnnnnnnnnnnnnnnnnnnnnnnnnnnnnnnnnnnnnnnnaaaaagataactttttaacattggtgcatatttgcttgggatagagcttgtgtaatttaccaatcgtattgattgtaagtgattgtgccctgcagaggtatatttaacaagacaaaaataatcttggttaataaaggagcccatgagatttgagtcaggttgtaagtgaaatcacttacacttttggatagaatttatactcctgctcttataaatcagtggtagacttaccnnnnnnnnnnnnnnnnnnnnnnnnnnnnnnnnnnnnattgccacagctccctattctttcttgcctgcctccacccccctgtttagg

SEQ ID NO: 369929 - DNA, 791 bp, Homo Sapiens
  misc_feature (494)..(506): n is a, c, g, or t
  misc_feature (658)..(666): n is a, c, g, or t
gggggaagatagtgatgtactcagtataaatgcagatgcttatgacagcgacatagaaggcccatgcaacgaagaagcagctgctcccgaggcaccagaaaatacagtccaaagtgaagctggtcagatagatgacctggagaaagacattgagaaaagtgtgaatgagattctaggactggcagagtctagcccaaacgaacccaaagcagccaccctggctgttcctccaccagaagatgttcaaccttctgcacagcaactggagctgctagaacttgagatgagggcaagagcgattaaagccctaatgaaagctggtgatataaaaaagccagcctaggtatttaacttgattttgaattttaggtatgtttgaacaaagccacatcatttaattttgtatctaaaatttatttggggtcttatatgttatttctcatgtaacccttattaggactcattttagccctaaattacctgtggctgtttcnnnnnnnnnnnnngactacttttataatataaatgtgtgttaccggcttatgaaatcctggccaatatagttgggatagccctggaatacttttgttaaatgagtattttacctgtggtctgcaaaatcttaaaaaaccctttatcaaaagaatcggggggcaannnnnnnnncctttatatttttaaaatgtgtgggggggccccaaaacccttaccaaggcccaaagaatttggacccaaaacccatggtttttctctccttaaaggggccaacactgtgtaatttttttaacaac

SEQ ID NO: 369930 - DNA, 874 bp, Homo Sapiens
  misc_feature (15)..(15): n is a, c, g, or t
  misc_feature (544)..(558): n is a, c, g, or t
ctctgtggccccccncgccaggggtgtgagcggtgattagcaagtgtgcgaaaaaaccacaggggtttgtttcttcctccacgtcatggtgaggggcaggaagtgagaaattggggggatggaaaaaacaccctttgaagggcgtcctacaaatcaaatctagaatataggggggcccgacctgttttatacaggagttacacatttaatatttggcccactgtttctgtgctccccaaaagaaaaatgtgcaatccaccggtctttctctctcctgggtttttgggatattaagaggtgttcctttctcaacaccaggttttcggctttccccccgggcccgtagtttgatgggcgacagtttaaccccggggcttgagaaggttgtggaaaccattggaccagggggttgttttagccaaaggtcccttccagggttttccccgggcggctggttgaaaaggacccttctgttcggggccgttcttaaagggaatgccccaggggggagacccaccattgttttttttcagcaacagccccnnnnnnnnnnnnnnncaaaataagagccattccaacttacaatgttgttttctgtttctgaatgggcaagctgaaactatcagagtactggcaatactaggaaaaagtgcttaaactcctatatattatacttctaagtgcggaaaaaaactgcataaaatgacaacaaaagactagcttgaggtggggtatttcaagtagcaataaacaactctgttaagtaaaaggatggagttgtatatacagtcactgatcattcatatagctccttagtcattacagccaatttggaaggtgtggagtaccaaaggcaaaaagtgattctattttc

SEQ ID NO: 369931 - DNA, 963 bp, Homo Sapiens
tttactccatggctctgatgcgacaatagctttctaattggaacaggaaagcagatgctcaccttagttttcttcacatacctgttctttacacctatttatctttactagattattgcttcgcctggaacccactcctacccctacacccggaaccccctcctaaccctacgcctttcccatctaaccccttcccagtcttagtccaggcctcgactcctcaagaccttccctgacgttcctcccctgcctcgccccacccctcctagctcgcctcctctgtgctgccacctggccctgggcatgctcgagtatacaccattaacgcagctgtcccagttcagtgagctttcccagggtagggatcaccatctcttcatctgtgggttgttggtgccaagcagtgctagcagctgtctggcagaatgtcgcataaatccagcctcgcacgtcctctgccctcacccttacagataatgaaaacagctcaaccctggaaggtaagtacaccttcccaggatcccagaggatgatagtatagcgagccagaagtggagctgtgacgcattccttctcttcacacttgatgatgcgataagcaatttcaaggagcggtcaaggtttcccttaataagacggcatttacacacctaatggtgatcattcgttgagcagaatccaaaagccattggagcagcaggagtggctctggagtgtgcaagaagtaggtttgatagtgctgtgatgtttcaaacgtttattcgacacaaaatgcagcaattatgacaccttaacttttttactgctgggagaattgaaagacctatagttctataattccggtttgaacctaacaggggtgttcgaacacttgtgtactttttcaaccagaattgctggaatcctggttacagccacccatgtgttttccaattttaatccatttcccctttaaaatggaaa

SEQ ID NO: 369932 - DNA, 570 bp, Homo Sapiens
aatgctaatgagcgagttgccaggcgagacaggaacttctttccccttctctgtgtcaggatcgcagaaagtatgtcccttctctcaccatgagctggctctccagttcccagggagtggtactaacagcctaccaccccagcggcaaggaccaggccgtcgggaacagccatgcaaaggcaggggaggaagccacctcgagtcgcagatatggccagtacactatgaaccaggaaagcaccaccatcaaagttatggagaagcctccatttgatcgatcaatttcccaggattctttggatgaactatctatggaagactattggatagaactagaaaacatcaagaaatctagtgaaaacagccaagaagatcaagaggtggttgttgtcaaagagcctgatgagggagaattggaagaagagtggcttaaagaggccggtttatccaatctcttcggagagtctgctggagatccacaggaaagcattgtgtttttatcaacattgacgcggacccaggcagcagcagttcagaagcgagtagagacggtctccccctaccttgagg

SEQ ID NO: 369933 - DNA, 579 bp, Homo Sapiens
  misc_feature (302)..(319): n is a, c, g, or t
ggaattgagtttcacagtggaattggctttggatctggcctatagattagtgacataaaatattttctctattttcccctgttctttttgtgttatgcacttaattttatgactgccgggggggtcagctggagtgctgcttaacaagtatctctcctactctcagtggtcagaggctgtgttggacccatagtagaattttccaggtcacagacccaagcttccatgggttgttactgtgctgtaccacttggtgggtctgattctgaacctgatgtgtgtgttaattatattttaagcannnnnnnnnnnnnnnnnngcctcatgtaatggacttttataacaaaagaaaaaatttggatttctaatttacaaatggcaaattatttatccctctctggatgcaccaaagaccagtaaagtttatagcttttccatctatatttataaagcaatactgtattataaaaatcaatatttttatcacatgcttgaaatttttattttgttgttttaaaatgtgcactctaaacatatcagaaccttatttcttcctatgaacttaagctgcctgcgcac

SEQ ID NO: 369934 - DNA, 836 bp, Homo Sapiens
  misc_feature (623)..(623): n is a, c, g, or t
  misc_feature (670)..(680): n is a, c, g, or t
gggggacaccctagatcccaagatctccaaggattcggtggcatacccactccagcacacagaagcatgaggttcatgactctcctcttcctgacagctctggcaggagccctggtctgtgcctatgatccagaggccgcctctgccccaggatcggggaacccttgccatgaagcatcagcagctcaaaaggaaaatgcaggtgaagacccagggttagccagacaggcaccaaagccaaggaagcagagatccagccttctggaaaaaggcctagacggagcaaaaaaagctgtggggggactcggaaaactaggaaaagatgcagtcgaagatctagaaagcgtgggtaaaggagccgtccatgacgttaaagacgtccttgactcagtactatagctgtaaggagaagctgagaaatgatacccaggagcagcaggctttacgtcttcagcctaaaacctggaacaaattacttttcaatcaccacaaaagaaaccttgttcggcccgcccttcggccccttcgaaaaagcctttcctaaaaccatttccgttttgggcgcccccgggcccccagtaaggttaagttgaaacctatggtccataaccctggttcccctnacggaataatccttgggtcccaaggaattaggtggctttgggcattnnnnnnnnnnnttcaaaaataaggccccgggggggtctaaattctgagcgtttttttgtaaactaaattctcctaaattggtaattttcctgagaggtccctttctaatgggaaattctccagcacgcaaagcggaatttccccacatctaaagattcttttataaa

SEQ ID NO: 369935 - DNA, 1079 bp, Homo Sapiens
  misc_feature (657)..(672): n is a, c, g, or t
  misc_feature (695)..(884): n is a, c, g, or t
ggggagagtcttgaatggcaagaccaggagctgagtttaagcttgtaatggaagcttgcattgtgggatatataactgaggaagcatatttatcctgaaggtattttgccagaaggtatcacttgacctggaaaaggaatctatttagttcaggaaagataaaaagtttagaggtatgtgaaggaagcacttagaacttgcaagcctgatgtcctatcaagttatgtcttctgggtgacagacaaaatcgcttgtcttatggtggtgatgtgttgcattttcactttggggtctgtaagaaactgtcagtgaaaatatgtacaattccttcaatttccattcttaacaactctaatgttgaaaaataagtttgaaaagtctttgggacccatacatgcaaaaacggtgcctctgttacttaattatttaatattctataaatgtacccaatctgtccgcacccttcccagtgatggggcagtatgtctgaggaagtataatttcagtactggggtcggggagaggaggtgatgtttctacatttttattttttctataaattgcaattggtctgtatgctggtttattttgaaatttatattggtttcttttcaagctggtgtcatctcctagactgtttcacccagatgctagcannnnnnnnnnnnnnnngagacagagtctcactctgtcannnnnnnnnnnnnnnnnnnnnnnnnnnnnnnnnnnnnnnnnnnnnnnnnnnnnnnnnnnnnnnnnnnnnnnnnnnnnnnnnnnnnnnnnnnnnnnnnnnnnnnnnnnnnnnnnnnnnnnnnnnnnnnnnnnnnnnnnnnnnnnnnnnnnnnnnnnnnnnnnnnnnnnnnnnnnnnnnnnnnnnnnnnnnnctggccttatgtgaatccgcccaccctgggcttccccaaagtggctgggaaattacagggcattgagccaaccctcgccctgggccaggattgcttagcattttttaagatttaaaaccaaatttcacttttttaaaatggaaaattgggttttttgatttttacccacatcccacttttttaaaaatcccactt

SEQ ID NO: 369936 - DNA, 900 bp, Homo Sapiens
aaagagtaactttgattacgtaaaaagcctttgaagtattttaatgaacactagtctttgctattggtaagaaatctgcttgttttattaaaatgcttaattgaagaaaataatattcttctgtgattaaaattaggaagaaatagaaccatttccagaagaaagggagaactttcttcagcaattgtacaaatttatggaagatagaggtgagtattttttatttatcattaacgtgggtaagttttgggacagataattaggtatcttaaaaataaggaataggaattttgtttactgaactttatgtcatcaggtaattatgggctgtcttttttgactctggatatcaccagcacctagcatagcgcctgtcacgtatcaagtagaatgaggaatttgatagcattttgacagatattgtggctatggacacataaatgcacttattaccctgtcctgccaaatccctttacctatcccatgggtcccctaaaagaaacagttagcaaaaatggggaaatttaggcccaggaacattagattaaaagaaagttggtgaacaaaaagtccttccaaaaagttggaagcccctttgggccttcagaccatttaattttaaaatccctgccccaaaaaaaccctgccttaaaagggcccaacggggaaaggggatttggaaagggaactaaaataaattatcctttttaccgggttaacaggaaaacctaaaatcccctttcccgttaaaaccttccaagacaacctgatttattttcttcttagacttgtatttctttcctttgggtttcaacaaagacaccaacctttgtcttttccgcatatccagggagaaacaaaatgtcttttgtataagggggaaactaaagggcattaagg

SEQ ID NO: 369937 - DNA, 1437 bp, Homo Sapiens
  misc_feature (447)..(455): n is a, c, g, or t
  misc_feature (757)..(757): n is a, c, g, or t
  misc_feature (777)..(777): n is a, c, g, or t
  misc_feature (1074)..(1074): n is a, c, g, or t
  misc_feature (1230)..(1230): n is a, c, g, or t
  misc_feature (1401)..(1401): n is a, c, g, or t
ggctactccgaagtgaatctgagcaaactcttcgctggttgtgccgtgaaatcctaagggaatcccaggagtaaccaaggagggggtagttgaaaaatcccagcttcctctgtgcctccactctggccctaaatgctcctccagcatctgtttctcccttgggactgtgtctcatgtttgtgtgaatgtagaccaggaaagggggctgcaaaaatgttgagtctaatgttcgtaagcatcatagaaattcctgtcttcatattaagatgtactgctttaaaacacaactccagagcccctccccaagctcccctccccaagctccgtgaagacccgggcttctgagtggatgggaaattgcttactatgtcatttaaaacgtagcttggaaatgtagagtgcaccaccaaagcctttgctaacacagcgccttttagcgctaatgtnnnnnnnnnattccaaatggagagctgtatgcactagtccttgaactgaatgaagcatgagtcgtctctagcacatttaccaactaatagccacacctaaaaatcccgagaacattaaaattccgtgaattggaaggtcttgtcctagtcacgaatcccgtgtggccgtgtgggcgcccgcgttcgctatattgcgacccatctacccctgcgtgtgcgacctacaaatgataatataatcgcacctgacccactcctctaatgtgtgacactatgtctacgaggcgtgttctataatatctgagtctccncacgcccctcgaccatatantctataccgctcctagagtagacggtggagctcgcacgcgttgtaatgtctaagatagcacctgctacttgttctaataagaccacgatagcattgggatatgtgaatgatgccaatcgtggacccggaaagttaacatcatccttgtggcaactccagcacaatatagatcacgaaataaatatttgtaagccgaaattgcgccggtacagaattcagaatgagcacaacctgtactggtaacgtcatagtccctacgtactatcatgactacgcgaccgtctgggcagttgtgcngccgcgcaacgcacattatctctccatgctcttcactattcgtgaagatgtaattacgctacttatttttgtgtgctctactgcccactgcccgatttcgtgccttaagatgtctgctcgtgtcggacctacgcaccttccaatcctgagttattncgtttccacacttctcgtgccccctcaaggcccccctgcgcgtaggaattgtccgcagtaaaggtgctgcccggatgtgcccgcctaaagtgggaagtgtactgtacgtgagctacgtcgtcgaaaatgagtttctccggcaatctcgtcctgtttcaatattgatctcgntggtgtataatttacgaaataaatttttcttcatta

SEQ ID NO: 369938 - DNA, 831 bp, Homo Sapiens
ggcattgagaccaacatttgaaaatgcacttgaacacctcttgcaaagatcacgtcccctagagaatactggccagactgtattggttgttggtggtgttcagtggcttaattccaatcacctgcaaattattcacaaagttttgaagagggaaaatttactcaatatcctagtgatcatcaaaactttgggaattggatttcatctgccagtggatggagtacatttcttaacacagagtgaagtacagaacttatggaaagaaaatttgattattctggatactgcaaaaaaacatggctatgaagtagttgacacattcactataacaatggggcgttacaaagagtttctacaggggaagtgtggatgtcatttccatgaggtagtgaaatcaaagttatccaaagaatataactttattaaaatgaaaagatcaagaaatcatatcatgggaagatatttcagcaatcaaagcaaactacaacaaggcactgtaacaaattttcgatcgccatatcatgtcagaggtccaataaatcaggtttgttctgaaatccttctcagcaggatgtgtgcaaataaaaggactatgtaggctccctgcaggagagctgaatctggagctggagacgagctagtcacccggacaatggtctaggagccaagcgctgcacatcgcacacatttggaatcgaccacccacaccttgtgccccccaccacatgcatgcccaccaatacccccacaggttaaataaaggataaccccttccttacagcctttatgaaattcccaaaaggggaaccctttaaaacaccagtttccata

SEQ ID NO: 369939 - DNA, 674 bp, Homo Sapiens
cgtggaattttttattcaaggctttataggggggaaagccattacatgtttttacatttaattggaataaaaaacagggagttccatggttgggatttttaagaatggccaagggttttatgttttcctcccaaattctaaattttttaattgctttcccccagcatatttttgggcgttccaacattttcagaatagcttgttaatgtagcaatgaatgccattattttttgttttcaaggggtagaaggttggactagtaacagccccatagctgcagtccttggcagttgcatttgtactgatgggtgggagtgtagagcaggggctactggctggtggagaggcagtgctgctagtcagagtggaacaaggacttatccgctgggtgattgctgaggtctgattttcatcctgtacttccatgctgtattggtcacctggctgaacttctgtgactttctctccaaggaggaaacccagacgagtcatgagtgtgtttgctgcctcatctacagatggaggggggccaagctcctgttcagcatcaccagggcagtatgcatccacgtccagtttctgagctgaagtgagggttggtgagccaagctcggattctggaattcgtgggctctcaacaaactttgccttcctcagaggggctaagaacaaaa

SEQ ID NO: 369940 - DNA, 610 bp, Homo Sapiens; identical to SEQ ID NO: 264828
  misc_feature (514)..(514): n is a, c, g, or t

SEQ ID NO: 369941 - DNA, 1140 bp, Homo Sapiens
gtctgcccacgaaatgaaactgcccaacccatttccccgggttgttcttagttccgaatttcttgaccttcgggggacccccaaaggcacaaaattcaagatgcaactctccccaggaggacaatatcgaaaaaccttccaaaggaacattaaagaactcggccattcccgtccactggaagtctcccatttaatcctgcatttaagagcatccaatattttgtcggattaactttctcccgtcttcttttagcttcaagggtctgtgttgggggtaaaccagtgcaaataatagctcccagaaacccttgatcaatttttaaggccatttcctgaatgaggaccataaaatacttgaactgtaagactttactgtactcattaaatcttgtgatgacactcacatcaatgaaaggcttgggctctgaatctaaagcaatagatttcggaggggcaacaggatgaaatacaacagggaacattgcacctggtaactgattatcaacctgaagccagtacaacctggcccttaaacttctctggtgagaagactgcttaaattcaatctgaattcctgataaaaagtctcgtttaatagggctacgaatagggaggcgcatttccattggatctttatcaaaattgacctcaaaattattatctagcttaatccagccatggtctcttgatatttgatgtttctgataggattgttccaataagattatctgcttttgactaaatggcttccatttctgctttggtttcacctcccaaacaacaccagaactggttatcccaatataggaaacttcctgcttgctttcattgttaaccagtgaaagcccaagactgtggagagacaaggttatttcataatcagcctgttccatttcttctgcctgcagtgctttggaaaccaaggcaacatcatcggtgaaaagcaaaactctctggcgcccatccagaaatgatacccagtgtatctggatgtttgcatcatatggaaactgtccacatccatcctttaacaaatcatgttccccaacatttgctgcatatgtccatgtaagttttctggtaccagtaggatctgcccaggcaaaaagtcgagcctgtcttcctgtggaaaatagaagt

SEQ ID NO: 369942 - DNA, 852 bp, Homo Sapiens
ccccatgcgggaggggtctataaaacgaaaaaagggactttccggggtaaacatttggaggtcttgaacacaatttcaagttgggagtatagttcaaagcacataaaggggttcctgggtcactaaggggggcatcttcctgggataggaggctttatgtttcaaagattgtgtccaaagctcacctattagtgttgagagttttgggtttctttatggaattgtcgggaatgttaagaaaaaaatatacacttgcaaatcagtgctgtgttcacaaagcaaaagatcacaccgtaagaaccaggctttccctgttgtttagctcaaatcccttgtgacctaattcttagggtcctataagtctggactcctctgggccagacttgaactctatagtgtaccccctagaaacactggacttccttgtgcatcagttcctgcagctgtaaaatgcaagcattgaactagatcatcctggaaggtctgttccactctaatagtctaggattttgtaaaaaatttatttatgatttagttagtacttctgccaaacatattccataaaccttcacccagcttttgaaaaacaacagatctttctggatttcatcttctgacatgagtattactaagcctttctacatcggtacaggctagataattggaaaagaaagggtgttaagaatgcgggctcgaaggctggacttggatctaatgaatcctaatatctgggagtggtgcttggggacctgtactcaataagccacctgggcggttctgatccaccattagtgcatctgatgtttctgcaggtaacacattgtattagtgtcctgttgcccctgtggaata

SEQ ID NO: 369943 - DNA, 1060 bp, Homo Sapiens
  misc_feature (769)..(769): n is a, c, g, or t
  misc_feature (898)..(898): n is a, c, g, or t
gggagcaaaattcaaaaagaactaaatatgcaatatatgttcatatctatgggaaaaatctaaaatgtgtgccagatgccctgttggtttcacagataacataaataaaaattcaaccacacatttatacaacggttaaccatctcttttactttttactaccctccccaagttctcagctgatttagccctcctatccttatctctccctgcctgattaacctcacttccctctatcgctgaatacgtctatgactgccgaaccccttaattctatcctccgtttgcatttcccctagccgccacgctcttccgttacctgtccccacagctccgtaacgacttgcacgactgtatgcgcagaaggccccccacactaatctccgacagcgccgccgatttttagagtcctatacatacttaatagaaacccgcagcttcctcgtacccttcagacactccttctttctgttctcccacacacttgtcccttttactttaatacttccttccataaccctttcttccgtccctgctcgctggtgctctgtcgctacttaaatacattcatcgatggcgtcgattgcaacccccctcatttatctcttcttttatatagcaagaggcgccgcagcactcagacctattatatatacgcgcccttacctctcgtctctgtttccaccgttacatttctctctttcctttctatattattacggacaccattcacaccatccctctacgccactacttctcatgatgtttncgcctccgataatcttcatcctgccggattccctcccacgtcagctgccatgttttgtcctgctccgcctatctaccactcagacatatacgtctgttggcaagctatctcaagtacatccctacgctnctgatgagacacgacgctctcgcgcccggttatatctgctcctcttcgatcatcatctaatcctatctctcgcgcagacgagacagatctaagacacgaagtgttacagctctgactagtcgcgtacttctaatcacctgtcttagttctcctctgccttct

SEQ ID NO: 369944 - DNA, 464 bp, Homo Sapiens
ggggccataattagagaattagagggtgtagacagaggttaatgccaatgagaaacacaggacagggttttttttattataaaggtcattagatacaaaagattgtttttcaaaaaatttctaattctaacaaaggggatcaatcagaaatgaaactaagctactttctaaagtgacactgtatcagaataatccagatttgaatataacattttgccaccaactgacatttagatgaaggactgcctctctgaaagagttcagatcatattcaggggtgaatccaacaccatggaagaaagactactgatgaaaatattttcccactttgcacaaatctgtaaactacacctttgtttatagaaaaatgcttgtaatagtcactgtaatatttagctgtggataaaaatttgtggaaataaatacttttgaataaagaggtgtgccaaatctaaatgaaattt

SEQ ID NO: 369945 - DNA, 1071 bp, Homo Sapiens
  misc_feature (766)..(775): n is a, c, g, or t
  misc_feature (966)..(1024): n is a, c, g, or t
tttttgttaaaaaaggatgagctggcaaagggctcaagagacccccgcagcatgtcttttttcctttcgccgattaaaatatagatagcctgcggcaaaaaagtgaagtgttcttcgtaaacaaactttccagaatcatggggcaattgagaaatgtggtttgccgcatgatgttgttaaagtggggctcccccgctcttacacggcaataggtgcaaaatttcccaatttttttcgtttatatccaagcggtgttaaattacccacaaatggggacgagtgttacactgaattacaatattgggggaaggagaaaatatttgttaaaaataagttggggttaatctccagaagcgcccaaaaaaatatttaattttttccaaatagcttcttgccatgtacacttttttggcattagaaaggaagaatgaggttgtgagaaaaaaagggtctgatttatcccccaattaagtgttatcggattggcgaaaaattttttagggtaagaagttccccaagtttacccttgtattaaaaaaccaaaaaccaatataacaaaaacttaaggggatgaaagggggaaactatttatcaagttaattgacttacgggacaatgccaaacgaggatgcctgactgaaagtctaggtgacccaattctttctggtagcctgagatgccttgctccatgcctgactcccaatcttgctggaactgtgcagtctctataaaatcaagtacaatcaaaaagctgcatatgcggggnnnnnnnnnngagaggagaagagagggagggagagaaataggtaaatagagaaggtaggaagggagagggatggaggcaagggaggcaagaaagcaagcaagtgagccttgctaacttagaaaaatatcagtggcctttaactgacagggaatagtgcaaagttaacctttggcccctataaaacattggatactgatttnnnnnnnnnnnnnnnnnnnnnnnnnnnnnnnnnnnnnnnnnnnnnnnnnnnnnnnnnnngagaaacaccacagttcttatgagggaagcttagcctgttaagaagg

SEQ ID NO: 369946 - DNA, 905 bp, Homo Sapiens
aaggggattcctcatccgtgatagtgaatctcgcaaatgatttctcagtacactaaaaagcacaaacgaaaaacaagcatcttaaagtccaactaaaagatgactgtctactgcatttggcagcgtaaatcatgcaccatggaatgacttgtagaacattacaaaaacggcaccaaatttttacaacgtgaacaaaggagaaaaattatatcttgtcaagcatttatcatgatactgctgaccagaagtgactgctgtgtagctgtaatttgtcatgtaattgaagactgagaaaatgttgggtccagtcgtgcttgattggaaattgttgtttctaaatctatatgagaattgacaataagtatttttattataactcagcccatacatatatactatgtatgcagtgcatctgcatagaacagttccttatccttggccttctgttttattgtttttttctttgctgttttccctttgcttctaatattacagttttgtattttgtaaacaaaaatcaaataatgcatatcagaatctttatatggaagaaatcctttattgcctttcctttgtttccttgtaaaggcaccctgttctgttatggtttttcattatataaaattattatatctatatatgacatatgctaaaatttcttggagagtgttaatcttttctgtgactaaatagcaataataagtggaaaattagaaattatttccaggtattatatttgtcacaggccattgtaaataccaagtatattgtgtctgccataattttttaaaatacattcattgtcttcagtcatacagcaagacacatgagacatagattagaaaacatgttgtacaattttaatttacaactggtgggaaataaaaatcaccttaattttcaaa

SEQ ID NO: 369947 - DNA, 537 bp, Homo Sapiens
  misc_feature (537)..(537): n is a, c, g, or t
ggggattacaggcgtgagccactgcacctggcctctgttgccgtcttatcttcattttcctttgtttataatgaaagtggcgattaggcagttagtttccataaagtggccgtatgggaatttagttcattcatccagcaaacattgagtaccaattatttgctaggtcctgtgcaaggaatacaaaaatgattaagacttcttccttacccttttggagcttgaagcataaggaagacaagttactctgtaaggaagataaagcattcaaaagtactacagagaaaaaccaagtatgcttgagttttgcgaatctcctcctcttaaagaatagcttcaaattttgagaccagtggttcccactaagtatagaacattaaaattaatactttataataaaacacttttattgctgcagaatgttaaactgcataacaggcaccagatggtcaagacgagggaaatatgagaaggcaaatgatgtgaggattagtatcttgagattcacctggtctggaattatgtcataggctactn

SEQ ID NO: 369948 - DNA, 809 bp, Homo Sapiens
tggcctgccccagcctcaaggtccatctcaggcacaagagccacagtgaccctagatagtgtcacatgacaccgttggtcatccaaggataatacagaccaactaggctacatctgtgatgagcagctagcaaagccgctggtcttctcctaggactaagtccaggtgccttccacaatctcatggtctttcaggtccctggttacttttctcaaaggccatttccaaaagaatacatgccttcacatcacaacctgtactgtgagtccattctagaggtcactgaaaggccctgtaaagagaggacatggatacgggacctggccctgaggttattactggccgtaaggcagagttaatccatacagaaaccagtgtgtccatgtgctctgcacaaaaacagacctgttgtccatccagtccactgacaagagggtttccccgagagccgaagtggactgaagctacagtttttagctggtgcgggccacaggcagggtcagattgagaagaagcaaagctggggaagcagaagttgggagtcttgtgttgctccctcttcctgtgtggtgctctgggtttctgtggatcgtgaaggcgatctcaagagtgtttccctccaaacctgatagctgcctattcctgtctggttggggctgtggaggatgtagttgtatttattgcattgtaatatttttaacatcctgtgacttcatgctagaaattttctattgtttatagaaactttttgtagaaacattaactctaaagcacatctgcatgtcagtaaaaatctcagtttcgtacag

SEQ ID NO: 369949 - DNA, 536 bp, Homo Sapiens
ggatgaaagaaacaaatttgttaacttactccacaaagctcatcagaaagtaaatgaaataaaagaaaggcataaaatgtcattaaatgaacttgaaattctgagaaatagtgccgttagtcaagaaagctacaaaattccatgctgaaacacgccaacaatgttaccatcagagagagcatgcaaaacgatgtgcgcaaaattgtatcaaaacttcaggaaatgaaagaaaagaaggaagcccagttaaataacattgacagacttgccaacacgatcacaatgatcgaagaggagatggtgcagcttcgcaaaagatacgaaaaagctgttcagcatcgaaatgaaagtggcgttcagctgatagagcgggaagaagaaatatgcattttttatgaaaaaataaatatccaagagaagatgaaactaaatggagaaattgaaatacatctactggaagaaaagatccaattcctgaaaatgaagattgctgagaagcaaagacaaatttgtgtgacccagtgtggagagagggg

SEQ ID NO: 369950 - DNA, 936 bp, Homo Sapiens
  misc_feature (85)..(93): n is a, c, g, or t
  misc_feature (864)..(874): n is a, c, g, or t
caaataacctgacttagaaatgaccaaaggccctaaatagacattttctcaaaagaagaagtacaaatggccaacaggtatatgnnnnnnnnntgctcaataccactaatcatcagggaaatgcaaagtaaaaccacaatgagccattatggtaaaccaataatacagccattatggaggttcctcacaaaattaaaaatagaactgccacacaatctagcaattctgctactggaaatatatccaaaagatattaaatcagtatgttaaagagaatatctgcactcccccacattcaatgcagcattattccacaagattagtggcatctatctaagggtccaccagtgcatgaataaagaaaatgtggtatatatccacaataaaatgctattcagccttataaatgaaagaaatcctgtcatttccaacaacatggatgaacctggagtgcattatgttacatgaaataaaccagggcattgaaggacaaataagcacatgagctcacttatatgtggagtgtaaaaaaactcaaattcatagaaacagagagtaaatggaggttaccagagactgggggttgggaaaacttggcagatatggccaagagatccaacatttttgttagacatgaggaataagttcaagagctctatcatacatcatggtcatgacaattaacagcaatatatcaatatctgataattgttagtagagtagattttaagtgttctcactacaaaaaagtatgtcaggtgatgcatgtgttaaatagcttgatttagccattctataacatatacatatatcaaaacatgttgtacaacataaatatacataatttttactagtcagtttatnnnnnnnnnnncttagttataatgaattgtgtactggccaggtacggttcctcacacctataatcccaacacc

SEQ ID NO: 369951 - DNA, 774 bp, Homo Sapiens
  misc_feature (55)..(64): n is a, c, g, or t
  misc_feature (241)..(290): n is a, c, g, or t
  misc_feature (292)..(292): n is a, c, g, or t
  misc_feature (687)..(687): n is a, c, g, or t
aaaatttttttctaggggttttaaggctgtagggacccaaaaataaaaccaaaannnnnnnnnnaaaattacggcaggttctattatgttctgggttaaggggaaaaaccaaggagttggttatatttgctatcattagaaaagacatttactcatgttctggaagatttaaaaaattatcattttcgttctacagtatattctgctcaacagtgaaccgacagtatcctttctgctgttnnnnnnnnnnnnnnnnnnnnnnnnnnnnnnnnnnnnnnnnnnnnnnnnnnangccaaggcagggccaattggttgggaggctttttccactgaccaaaaaattaacttgtctccatatactgtatttacaaatataatttctaaatgtatttacagctttagtagaaattagagggtagagaactgattagaatgaaaataactgtttaaaaccacaaacattagtaaaagtataaaattctttgtcttcacagtttgtaataacaggctaaatatctctagaaaaggacgctgtcactgtcttcacattgtctaatattgaaaaggtagctcaagaagagactcaattatgaacaagcctatatgaattcaggatatattttactgtaaaagatttcttcacatatcactttatcttaattgatttctgcatctgttataaatganaacacctaacctaaaactgtacagaaatagggactttgctttccaaaaagagttgctctaaggagttacacagcgtacttcgtctcc

SEQ ID NO: 369952 - DNA, 758 bp, Homo Sapiens
  misc_feature (87)..(145): n is a, c, g, or t
taggaaatgtgggcaaatgagggctagctaataaatatacagatcagctacaagaatttggaggttcccttaagggatttaagtaannnnnnnnnnnnnnnnnnnnnnnnnnnnnnnnnnnnnnnnnnnnnnnnnnnnnnnnnnngaaacttatcagctcgttaagagtacacacaaataaaactccactcaaattgaaaacaaaaccaatcataccgaacgtgactgatgacttgaacagtgtctattgcgcttccttttaggactgcttctcctgctgcggactgaagatttactgcagtggattcgatacccgctttcaatgtctctgtgataatgtctaggaacatatccttcacagtagtcatacctgtattcgtcaacgtatctccggtcccgataatctcgctcattcaaggaccttgcttctaaataatgactgggatgagtgtcctctacaacagagtgcgaagcttcaagagggatgcacatggagcacaatcagattctttaaactggtgatgtggttaacaatgcctgttctcttgtgtgctactatgagatctcctcttccgcttgtgacttccacgatagctttcatgtccccagctttctctgctatcccaatcaggacagtgagttcttttggaatgccgcatctccgcaaaagcaaatggcccttcggccgagaaatgtcgccaaactgccgtcttccctcctcggccgctgcgacaaacaccccacaaaatggcggcccc

SEQ ID NO: 369953 - DNA, 450 bp, Homo Sapiens
ggagctgagcactcactttctttttggatgtcttatatttcctgtattctttgggatgatttttctccctagcgtagcactgtctcagaaggaggcaaaaaaaatgcagtcttgtggtcctgtagaaagcacatacctttccagtgactgtttggccagcatcatgagcagactatatcatctatgtgagcacagacttgtcatgcatagtcacctgccatgcaagatctcatggggccatgagcgtttctgagagggctttgaatgctgaatgcagcagtcgagcgacttgcacaacttggtgatgtgataaaatgtttaagagatttcatatattagtaagttttctaacatcggtttaagaaacaaattgatgagtggcatctcttaaaagagaaatataaaaaatactcattttactcaaatgaataatatattttggacgatagc

SEQ ID NO: 369954 - DNA, 520 bp, Homo Sapiens
taagttggcaccctggggcccaaggaggccaggaaggaaatttaggatttttaccaaaaattaaaccggattccccaaatacaaggagaggggggttccccagaaacggacatttttttcctgaacaggtaggccaggttttctgtttgggtatagcccacacctcttcatgggccacagggagatacagggtatagtatatagtatataaattggttaggctaacattttactcccctaaattaaaggaggcttccaaaggaaaaccttaattaaatgttggcaactttaaaatggtaaaacttttaaaaagtattataatcgcccacagcaatactcctagcttttgctacccaaatgaaaaaaattccccaggattgatctgagggtcaaatactattaaaagaaattgcccacccagggagaattctgaaaggctcaatataaaggaattcagagaaaagcctcttattgtcttatttcgggaaaaatggtgttttgtaacctgatttttcaattt

SEQ ID NO: 369955 - DNA, 979 bp, Homo Sapiens
  misc_feature (46)..(65): n is a, c, g, or t
  misc_feature (211)..(320): n is a, c, g, or t
atgagccaccgcacccagctgaaaaattctttagttcccctcaaannnnnnnnnnnnnnnnnnnnagagatgggaatctcaacatggtgcccaggccaggtgggacttgaacttctggactcaagcaatcctcccacgtcagcttcccaagtagctggaactatagggatgcaccatgaactactaatttaaaataaactttctcctttannnnnnnnnnnnnnnnnnnnnnnnnnnnnnnnnnnnnnnnnnnnnnnnnnnnnnnnnnnnnnnnnnnnnnnnnnnnnnnnnnnnnnnnnnnnnnnnnnnnnnnnnnnnnngtgtgagccaccacacccagacattcatctttatttttaaaggacatttttactgaacataaaattctctgagtgggcagtttgttctttcagcaatcttaagatgtttatgccttctggcttcaacagttggagcaagaagattgctgtaattcttatcttggttcctctggatatttttaaggttttctttctatcagcaatttgattacgatgtgcctcataaggatttatttgtgtttatcctgcttggggtttattgagctttgtggacttgtacatttatagttgtcactacagtttggaaatttttaagccatttatttctttaaatacgtttctatctcaagaagtacagttatctccaaatgagcgtcatctacatgtccacaactctgatcagaccactcttagagccagtaatgattattttaatacctaccatactttgtgtatatttactcctcagtaaatatttgtagagctgcacatagggaatttctttaacacctttaaagtttatttatttaaataagaaatacatgcccatggtaaatatttcaaatagtacaaaaatatttcaaatagtacaaaaaaggaggtattctgtgaaaagtaagtctttgtttcaccaaagataccaatccctgccccctccc

SEQ ID NO: 369956 - DNA, 387 bp, Homo Sapiens
ccataggccttgagaaagtatagttacatccctcacaaatatatgaagttaagtcactacttaccaaggaaaaaaaatgtaaatacatttttctttcctggaaccgaactcttattatggggaaataatagaaataaagaaaatgtaaaagcatgaaatggaatgtagtcttgatcaaacatttcagcagacctcaatttgcttacaatctgtactcaaaaagtttataattcaatcagaattcaaaaagtattttgtgtgtttgtgatgtattagcatatacacaaaacaaatgaggggaatgtatataatcttggtgaaaagttgtatgggagttttttgtacgattcctgcaacttttctataaacgtggcattatatctaaat

SEQ ID NO: 369957 - DNA, 804 bp, Homo Sapiens
gggagcctgatctgatgccccctttcactctgaagtcatgggaaattttccagccatgaaagccctctttccactgcatactgatgggctgactcagcttccttcagccgactgagatcttttcatactattggctatttcataccaattaacctcttaaataagattgtgaattgccaaaattgatagacacttattaccacctgtggactccatattccttaccacaaatgttattttcatcagtcctgagtcattttaacttacagaaattaggattgttgctgctaatatgaataccaattataacttttagaaacaagaataaagcctaaaagagaatgaaatataagaaatgttcgttcccacccctaataacatttggaagtgaatattcccattttcttccacccacagggattgggattgatttttaatttcctaggaaacaatactagactacccaaaaagatgttgccagaatccaaaaggaactatgctcgtaaaagaaatgcagttttctcctacctaaaaaaaagaaagtaaagtgtgttctgttcttatctttttaatgactaagctttaaacagtttattttgggtaagactagaactttcagccatttgttctaatatctgtgttattagatgcaatagaatttatgaaaagaagaatgacaaaggtatctgattagaaaatttgatcttacgcatgaatccatgtcatggccagccactgtcacatagtgggtgccattctcaacatattggtttgctaactttaagcattagggatttagcacac

SEQ ID NO: 369958 - DNA, 865 bp, Homo Sapiens
ggatttcaaagtattttttaaaaccccagttcattattcttctaaagatcttgtatagtagcaaataatacctggtactgtagacagtttgtctctgccttagaattatatgactcatgtaggcattcccagaccaaatcattaagaaactcttaagtgcctactttgaccccaagaaaatgactgtatagtcagagagtggaagctaacatacgaaaaagtaaagccctggcaaataagatggcatttgttacgacacatgaagtcacatggtaaagccttttcactgctgtaggagttcagagaagtatgagatacctgtgaaaggaaggaaccatgactaaagaatttaaagctctaaaatgtgggctaaaatttcttaaaaggctaaattaaacttccaaatggaacttaaaagtttcctttaacattttcttataaaattttgcccttttcttttggaatttaaaacaccattttcagtgttcctgtaactcaactgccaatagtgattaaagtgaggagacacagtaacaaaagcttggtggaataccatgtggcattatagcctgttgatgcccaagtaaatattaattgatcattcatattgacaggtatttaatactctgcatttcgcagatgctgtgggaaataaaaaggcacaactgatatactgaatatccctttctatgatgtccctcttttctgaacttttcaccgtgttgtaattaaaacttgttttctaaagacacaacttcctctgctgccttctctaagggaggctttttacccatatccctgcatactcacattcctcaagacttaaaggctgttcggcagaggttgtcttgtttctcactgctgc

SEQ ID NO: 369959 - DNA, 902 bp, Homo Sapiens
attccccattccaaaagaaattaaccttccctttcttgtggtacaccaaaagccccacctggaattgcttaaaattttggaaggctttttgggtttttttggccaggttgggacctttttccccatggaaggggtttacaaaattttttaaggggcctatttccccacgggaaaacggagcccccattttggccccttggaccagtgtttcccctgggggcaaagggaggcctttaaaggaaaaaggttgtcctgggattgggaaaaaagttttcttgattaagggtcaaaggtgtttttccagaggaagaaggagcccttgtttttttcaggcttttattctaccccaagtttctggttttgcaaggggcacggggcaacaagaccctctcaggtattgtaagggatcttcttgggccttcccacttgctctgccatgcgagaggacacttttggtttaataaagcacttgccaatttttgtacttctgaactcagtaaagtagttcctctgatgactttgctgagagcagcaagagactggtggacactttgtactaaacgaatagcattaaattgttcaagaatgatgaatgacagtattggagatccttgtcgatcgttaggaggaggcactttctgatgtattaggtttgaattctggtttagtttcttccagagattgaggacaggagaaagttcattagaccagatttctctatcaaatttggaaccagctgttatggatctgcccaaaatcctcaactgtgaaataacctgagaactgatcatgcgctgagatgagcgagcgatattggcaggcagaccaaagaaactaggtttgtcgtcctctggaattttctcaatgacagcacgatagtccaaaatgctgcaggattgtgg

SEQ ID NO: 369960 - DNA, 1250 bp, Homo Sapiens
  misc_feature (51)..(51): n is a, c, g, or t
agggtgaaaagaaaagaaagaaagaaggcaaaatattagcacagattcatngtagagaaaatgttatgtatcctcacagactggagccacatacaaagagataagtagccttctttcccatgcttccagataaccaggatgcatctaaggtaagaggttggaggaaagaagacacattgctctgattccaagggtagagggaataatgaccagatttcaaccctaagatagaacccaaatacttgggaggcttgtggttctttcttcttaatggttgataacacagtgtccctacagagaggtcatctgaaactcagaggcaaataactcatcatgggcagcaacactggcaacctaacttagaagccccgtgtggccccttttttatttggagtgggtctcttcactatagcaaggcagaatgtactctttaagtaccagcacatagtaagctccagagagcaaggctttgctgagaaacagcaggttatgatttttggtctaagaatacaataggctagagaccatctatctgccaaatggaatctgctctggatataagataaggtacaaagatctgaatcccttgctaaagggaaccaattaatacaaaaatcaggactaggtaggcaaaaggaagaactgaatggcttagtggaatttttagcatttatgatcttccttacaaaaaaagaatataaccagtacttgctgagacatatggcctctgaagaactgtagtctatgggctgagcctgtatactattaaatgaggcaaacagtcatttaccaaagttccacttccctacttccgaaagtaaggtcactttcagactagctttgagagtatatgtgaagaccaggagaagttggagagggtagaggtagaagaagagaatcaggatgggaaggttttggtgatcatgcgtggtctggtgttatccttgaagtcaccttggtcttgagactttgaggcagacccagcataggaaaaaagtgggaaacaaacaaacctgagagtgttaaaaaggatcggtaaggggaagaggcttatttaattcaagtttcctagggccagtccagactaactcttagaaccaatctggtcctaatgaaatgcctgagaccaacagatcagtctccaaaaggaatccaatttttgggtgggacataaaatgtcacgctgcccacaccacattactaattctttttgtagcactggagttactcaagaaactgactctgaaata

SEQ ID NO: 369961 - DNA, 1124 bp, Homo Sapiens
ggactcatacttagggtttaggaaacactaccactagttatcatttaatcaacttcaatggtctactgaaacaaaaatggtaacttttcattagtggattatttagagttatagtagttgtttccagaaaacacttcctcacaattgtacttcccaatcaaatcatgtgatcatacagttattcccatgaaaggcagaatgtttgtttcaaaattaatctagttttctgtacatttaaatttgagaaggtgacaactggctcttttccagtcttccttcatgtcagttttctgatagaccactattggcaaacagtatctgtcaactaccaaatgtgtaaaattttctgtatttcactttgtcttatttgtaaatagtgaactaaaacttttggcagatcagcaacatttgctgagcctgttttttaagctaatgtgtattcttactaatgttcctatcaagaatggatttgtaatatatgctgtctatttctaatgttcacattcatattttgaggttctatcttattttaatagagaacagacttctcaaaaaatcttcagaagcagcttattattgaaatatcgaaatattgaaataaacccggtggggttagattactcatctggtccaccaagtggggacatttgcatggactggggggcttaaaggacttagaagagaccctgtaagtaaatcctgaaaatgagccaatccccacttggaatggttactggagtaaacccacctttaccaccccaattacagcacccgaggccgataaacccacttggctctggttcatttttcttttcttcatttgtgatgctcagattcaaaatgtgtgttctacactgttacaggcttctcttttgtttgattaaagattttagtcctacttttgtatggacacattagaatattcagagaccaaaatagaagaatttgctgttagatatttttcagaagtcagcagatttgtggcaaatcatttatttgcctttttaaaaattcatttaagcagttcagagagtagactactcagaaaattatttcacgtaattgtctaagaggtcaatattttttaatgcatattgaatcaaataaagtgctctaaagaaatt

SEQ ID NO: 369962 - DNA, 557 bp, Homo Sapiens
  misc_feature (431)..(431): n is a, c, g, or t
  misc_feature (466)..(466): n is a, c, g, or t
  misc_feature (539)..(539): n is a, c, g, or t
gtgtgagccaccgtgcccggctacttcatggatttttgattacagattatgcctcttacaatttttaagaagaatcaagtgggctgaaggtcaatgtcaccataagacaaaagacatttttattagttgattctagggaattggccttaaggggagccctttcttcctaagagattcttaggtgattctcacttcctcttgccccagtattatttttgtttttggtatggctcactcagatccttttttcctcctatccctaagtaatccgggtttctttttcccatatttagaacaaaatgtatttatgcagagtgtgtccaaacctcaacccaaggcctgtatacaaaataaatcaaattaaacacatctttactgtcttctacctctttcctgacctcaatatatcccaacttgcctcactcggaganaccaagggctgtcccaagcacctggagtcggaggntattcttactggatttggacagggactgtgtggactatctgggggacaggcattttgatccccacaatttggncccggtttacaaaggttt

SEQ ID NO: 369963 - DNA, 713 bp, Homo Sapiens
aaaaggtggtagtgataagaagtaggggtaggagagtgtgggcggtgggcctctggtggtgtccagcgttggggaagtaaggagcctatgtaagtgtttggttgcatgtgcatagaagagcacttccgagtgtggtctgtagacctctgggggtccctgaggccctttcaggagagcagtggtggttaaaataatttgtaatattaagatgtcattgacttttttttgcgtgtgaccatctgcactgatggtgcaaaagcaatgggaggtaaagccactagcacttggcacagccccatctgtagcaacaggctggaccagtggtcactggattcttcactgccatacattttaaataattaatcgttttaaaataaataaggtccttgaaagagcagcagaagttactaattttatgaagcctcaatctttaaatgcccatctttttaatattctgtgatttgaaatgggaagtaagcatcgcctggctgcatactagagtgtgcaggctttctcatggaaaggacttgtgtgattgagttgccagctgaactagcagcttcttttggaacaccacgtttacttgaaaaaacactggataagcaaaactgtggtcattaatttttgggtggtttggcatatatttttcatggaaaatgaaaccaagtttggcctcatttccctctaagggaaaaacaacttgaacaaaaata

SEQ ID NO: 369964 - DNA, 508 bp, Homo Sapiens
ggtaagggcgtatggggaatgcctaggctctcagaggcgaagaaggacgtgataagctgcgaaaagctacggggattggcacacacgaattgatccgtagatatccgaatggggcaacccagtatgttgaagacatactatcctaatatggaggcgaacccgctgaactgaaacatctaagtaggcggaggagaagaaaacaaaagtgattccgtaagtagtggcgagcgaacgcggaatagcccaaaccaaagttgttacggcaatttttggggttgtaggaccacgacgatttcttgcggatttaattagaaattaccgggaaaggtaaaccgaagaagggtgatagtccccgtataagtaagagaagataaggataatgggatccctgataaagtccggggcacgttgaaaacctgaatgaaactgggcgggaccctcccgctaaagggtaaataccccctgaaagaaccattagtggaaccctttccccggaggggaaaagggg

SEQ ID NO: 369965 - DNA, 502 bp, Homo Sapiens
  misc_feature (24)..(24): n is a, c, g, or t
  misc_feature (31)..(31): n is a, c, g, or t
  misc_feature (37)..(37): n is a, c, g, or t
  misc_feature (45)..(45): n is a, c, g, or t
  misc_feature (75)..(75): n is a, c, g, or t
  misc_feature (131)..(131): n is a, c, g, or t
cccaaatacacctttaataaaccnccaaaanaggccntttggggnccaataacatcctttaaataccccattaangataacccaataattaaaagggttaatttggccttccccttgggataaatataacngaattccaaatacgaacttgcccccgttctggtggaagtgtagtgagagctgactacgtgaactgaataatgcttgtcctgtacagaatggtgaagaaaagcaaacttttgttcacctgggaacactttttaaaaatacactgatacttaacttaaataattgaatacatatcataaacacacaaattacaccatttaaaatatacttactacaaaaagatcctgaacattattgattaatgcaaataaaactacttcgcattattataaaagtcaaaatattttacatcactttgtgcttttaaaactattgctagcttcccctgggaaaagtgcaaaaacttttttctacaatgtacagttattttgac

SEQ ID NO: 369966 - DNA, 500 bp, Homo Sapiens
ggggtgctttcagatgtgccttgtgtgtaacaaaaaataacaatagaaaaggattatttgaattccaactcactaatgtttcttttgagtagattacaggcttttggatacctaaggtaagacactcaacctgtatttccatacaacctggctgtaattcaagcttctaaaggagtaaatcaggaaaagtgctctgttaggtatggaatcatttttcgaattatgtgggttgcagcgtaaattcaccaacacactcctatttcagaagtttttcttcctgtttttcattaaataaagtaggtaaaaggcccctgccataaagcattaaccccacctctgtggacaaagatagttaggatggggtttagaatgcatttacttatgggtcgtggttttccttccaatctggctaacatcagcttaagcttccttaagtaatttcttggtcttcctaactggagctagaagtttgagataaacatgatgaactgttctattct

SEQ ID NO: 369967 - DNA, 1271 bp, Homo Sapiens
  misc_feature (109)..(216): n is a, c, g, or t
ggggctagaatgtaaatgggacaagcagatgaaaacaaaatgggagatgcctgaatagctcaaactaagttccttatttttatttttatttgagacagggtctcactgnnnnnnnnnnnnnnnnnnnnnnnnnnnnnnnnnnnnnnnnnnnnnnnnnnnnnnnnnnnnnnnnnnnnnnnnnnnnnnnnnnnnnnnnnnnnnnnnnnnnnnnnnnnngtacagaaccctggtatttctatttaattaatggatttctgaatttcaatgtagcctttgctttggctctcctagtcctaccactgacttctcttatggaatacctgctgcagagatttcatgttcagaatttaggccacccgtattggcttaccttggctccaatgtatatttggtttataattttcttcatccagcctcacaaagaggagagatttcttttccctgtgtatccacttatatgtctctgtggcgctgtggctctctctgcacttcagaaatgttaccactttgtgtttcaacgatatcgcctggagcactatactgtgacatcgaattggctggcattaggaactgtcttcctgtttgggctcttgtcattttctcgctctgtggcactgttcagaggatatcacgggccccttgatttgtatccagaattttaccgaattgctacagacccaaccatccacactgtcccagaaggcagacctgtgaatgtctgtgtgggaaaagagtggtatcgatttcccagcagcttccttcttcctgacaattggcagcttcagttcattccatcagagttcagaggtcagttaccaaaaccttttgcagaaggacctctggccacccggattgttcctactgacatgaatgaccagaatctagaagagccatccagatatattgatatcagtaaatgccattatttagtggatttggacaccatgagagaaacaccccgggagccaaaatattcatccaataaagaagaatggatcagcttggcctatagaccattccttgatgcttctagatcgtcaaagctgctgcgggcattctatgtccccttcctgtcagatcagtatacagtgtacgtaaactacaccatcctcaaaccccggaaagcaaagcaaatcaggaagaaaagtggaggttagcaacacacctgctggcccaaaggacaaccatcttgttaactattgattccagtgacctgactccctgcaagtcatcgcctgtaacattgtcatacaggtcttctgacatgaata

SEQ ID NO: 369968 - DNA, 728 bp, Homo Sapiens
gggaggaacctgcccatttacccactggatattgtccgaaaaatgcgagaccagcgcgccatgatggtgcagacatcaagccagtacaagtttgtgtgtgaagcgattcttcgtgtgtatgaagaaggtttagtccaaatgctggatcctagttaagacaactgtgaaaaagttcattcctctttcccaagggcatcctccttgaaagaggaggacagacctctctggaagcagcaagaggaaccagtagctgtgggaaaggaatgggcacctctgaacccaggcactttaaacttctatagaaaagatatcgtgtacataggaactggtgtagataagcatgcaattatggcatcatttaggcctgtatttctatggaaagatacaaaaaggatctcagtttggggcctgtcctaatgccttcttccctaacatcaccacacacacccctgtcggcatcctggagcaattgagaccggacacccacagagctgttgtcctcccagcaacaagatggtgtggttatcttgggtcatttggatgttttgtttgtttctgtgtgtcagactgtaagggctgagctttctgtgcttctaggtggagctgggacaatttcagattcacccgccccgatgctaaggaaaaccctgacgtatgtactaaaatggcagggcactggggggtcaggcttaaaggcctgagcaacaccctctctggcccttccttcc

SEQ ID NO: 369969 - DNA, 899 bp, Homo Sapiens
  misc_feature (92)..(120): n is a, c, g, or t
aagcctctcccctttaacgtcactgtcattgagttgtaactgatgctctacatttgtttgcattggataaaattgtgtgtgcttgtttaccnnnnnnnnnnnnnnnnnnnnnnnnnnnnnattcgatctgagctgggactgagaagaaaatagcaattgcaactcaaagcaactatttacacacattcaatgctgaagtattgcttcctgccctaagttcctaagaggtattgccaccctgaagcacgacccatgccgtcagcagccctcgtgccagctgcttagaaactcgtgtctccagcacgatgtgctcgctgccaacagacaagagatgcacggcgtttccgctgcagagattctgtggttctgcactgaggtatgcatcggagcaggggacggggaggacccgaggggcttcgtggcccagagagaatgtctgcactggctgtttaggaaggctcagggtgtttgaaagacaacgttaagctctgggtgagtctgcacggggctgaaccagactccacttggcagctccttggtttcccggggtgaggaatcacaaacacctttgtggttggggaaggaaatgggcttgatggggaagaagtgtgtgcggagaactttgcggagcatgttctgagcgagacagcaaggtcgtgagcaaacgcccagcccctcaaagctacacagcctggaggggaaaggggaggggaggacattcaaatatacaccttaatactgatgcagaaagagcttcatgtgaccacaatccccacgaacaaggaaagcatcaggtagtgttttttaaggaaagaaaaaatctgcggtgttttataatacattctttagaagcaagaggtattgtcacaaccaccctttcttcggtattggaagacccc

SEQ ID NO: 369970 - DNA, 894 bp, Homo Sapiens
  misc_feature (219)..(231): n is a, c, g, or t
ctgtgcgcatggggagatatttctcaaaaaagcgagcttgtaggttaccagtgaacacgccaagagggattatgcgtcgttttaggggggaagacccagggaggtgaaaggacgcccgccgtgggtttcccgacacttaggagcgcataacgtgggggaaaggcccaaaggacggagatgtgtacaagaggtaacaaaggggggtaaatgttcgtgttnnnnnnnnnnnnngcggttttttatttaacgggaagagggtgtatccgggaaatatttttgtggtccagtaaagcgggatgggatatgtggaggtaaatgggggtagtggttatagtggagatagggggttggattggggaggccatggtgaaatagaaattgtaatgaaaattaaatagggaagttgttcagaaaaaccctgtaggtggatgaccatacaggaatttagggattaaggcaaccactttgcaaccattcacaaaaaataccattggacaaaggagaagaattacagaaaataatataaggcagtatgttgcacgtgtcttacacagatatacatatataataatacatcaaaatgatttgtttgatggtaaattcatcacctttacaattatcacatggacttctttaaaacatttataaaagtttgtagatttaacattgaagggtaagatttatatccaaatgagtatatttgtttcataccaaactgcacagaacttacgaatagcacacaacttgaggataattaccagtttgggtactattaagtactactacttgatgacacaagaatcattaacaaatgtgctgtgagctattatcattcaacttattgctagtacttttggaaatctgtgatttatattttgtttctttgtaaaaccc

SEQ ID NO: 369971 - DNA, 995 bp, Homo Sapiens
agatgctatgaagaaaataaaggaacgtgttagtgacttgagcaaggagcagtttttgatttagaagtcctcactgagcagaagacctttgatctaagacctgtcacaaagacagccacttttgtttcaatctggagaaagagctttccaagtggcgggaacagtaagcgcgaaaatcctgaggcaggattggattttgattgctagaggaacaaaagaaaggtgagtgtggctggagcttagagatcttgggaagggcggaaggagataaagccagaaaagcaggcaggggtcagatcaggtgaggtcttctgagccacagtaaagagtgtggattttctaagtgagacaggaagtctttggagggctttaagcaggagcaggaaagggggcagccacatgatctgatgtacttttccaaagatctctctggctgccatgtagacagacatggattgtaggattgccggggggaaaaaggagacgaggcaggcgctgttggtgacggctgaacaaaacatgtcagtggcatggtctagatgagagaaagaagagagcaagaagagtagatggatctggttatattaatgagccaggtgggaaagaggaggatggtgggatcctttgcactcttgagtcttctacccaagggcagagggctctgtcaaccctggacagtgagttttcatgcagcaaggaggcaactttatttaattcactgctggctgaatggaacctggtttctcccctcatgagcttcatgtgattttgatgggcaaagagtctcttcccagaatttacttggcccatcccttccttcccaatattccttttatttccgcaaagcgctatggcattggttgggcaggaaacgccggaaagcgaggccttaaaccccacataattcaatgttcttttggcaatttttggcattgggcgcgccccttcccaccccttaaatgggcaaaaaatttttacatttccctgtgctgaca

SEQ ID NO: 369972 - DNA, 1100 bp, Homo Sapiens
ggtatggcagtgatgtttaatattattaaatccaggcatttcgaatctgtttttcatgatttatagagggtttacacaaagtgccacttattaaagagcttccacagtgaagatggagaaggtgaacttgctttgaatattccagatgtgtttggtcgtgcgtatggcagtgagcaggtatgtgtttgcttttgcttgcactgaaaattaaattgctatcaagagcaaactatgaacggttttttattcaagatgtctccagagtgaagatgccgaggatgaacttgcagttgaatcattccagatgtgtgagatcatgtgtattacagtcggcaggtatttgcttttgcttgcactgaaaattaaattgctatcaagaataaaccatgaaacattttatcctgaacagccacagtgcctgaattcactcaagtggataaaaagtgtattttaactctgtatatattacccttaagtcattttcctgtcttcactaatttagcaatgcattcatattagctgatgaaaataggcactcacaatgacaaccagagccagtttcttgtcttttttatacattttgtcatcccagagacaatcagtatgtgcttacctgtgttcaagtagagaaaaatacagtagagtctgataggacatattcttgtaccacagacaaaacaaatcttatggtgcatttactatcaactgctgctaatacgttaatataaaacttaccgagcccctgaaatcttcctatcttatagccttaaaaaaattaggatcataggcaaatcagttaccttgcagaaagagccttgtatgacagacattgtcttattttatttctgtaaaatattagctgtatgaatatgatttaattaacaagaaaacatttcttcctgattgacaacagtgttagacaaggtgcaaagcgaaactggttgctcaagttgatagaaaacaaaattctgaatatcctcaaattaaattcggtaaaaacacattattttttcatatgtgatgtattcatgcagaacaactatctttgtattttgtttttaaaatgtgtttaataaatgatcctttgtaaataaaaaaaa

SEQ ID NO: 369973 - DNA, 698 bp, Homo Sapiens
  misc_feature (407)..(420): n is a, c, g, or t
  misc_feature (471)..(483): n is a, c, g, or t
  misc_feature (534)..(534): n is a, c, g, or t
  misc_feature (554)..(554): n is a, c, g, or t
  misc_feature (624)..(634): n is a, c, g, or t
ggagtgaaattgtatcaaaacatagggaaactgtattactgtccattttgaaaatatgaaacttgagtattgaaaatattcaaacatggaatggcagtattctaatttcagttagttggttcatgttaatttcttacctgttagatgtttaaactgcagtgacctttacttgtatctactctgtggtggaaatgttaaaccatggtagcttttgctaccaactcaaccacttaacttttagagcagttttggggagagtttatgcttcatctgagtttagaagtaatgtcagaaaatgttaagcatgtctgtattaagaaaatataaggtttctaattgtcttattaatatggtaattcaagtgaattagaaatatttaactgcaatcttgaattataaagttgagnnnnnnnnnnnnnngtatcaagatctcaacttgatgtaaagtaaatgagcagttacctggcggannnnnnnnnnnnnaaataactgatttaatccataatcccataacaaacatagcttcacctcagnattttccttccttttcttgnttcaaccagtgcctccgataaagggaaatgcttagaaaaatatgatggagaagttacctgaaaagaaccnnnnnnnnnnnaaattggattaagaaaaagtaaagttcttcctaggggtccttttgaaatgcctgggaaaatttt

SEQ ID NO: 369974 - DNA, 857 bp, Homo Sapiens
ggtatgttctgtaaatatataattttaagagcaacctcacaatccctgctaagtggagtttattatttgaagactaaaatggaattccatagttcctgataggttatattctgagttattattctgagttatctacaaacatttttgagatttgtctttacactctgattgtagtttccagcagcccatgcacactgccaagtaagtctcattttttcctgttagaaatggtgaaatatcatataatcacttataaagaaaactgatatgaaaaaattttagagttgtttgctttatggtcactcaagtagggtaagtgttccacaaattccacaagttgatagtttaacatggatgtctgaaagccacatatataatttcttaggattcttaaattagtaaatctagcttactgaagcagtattagcatcactattttagattgcaaaaataccttaattgtgtggaactggcttgtagagtggtacttaagaaaaatgggattctacctctatttctgttgtagcacacttaacaacaaacaaacatgaaaagatatattagctttcatagaaacatttttgttctgtaaataggttaatgatatggtaagggcccctaaaataacttgaattaacattggtttataattaatgttactggctgttttataaagataattatgcaattttgtggggccttaacccgaaatttggtaggcccattcccccgtggattttaaaaaattaaaggaaccaaaacctttttggaagttcaaagggggcccccgccctccctaccttacccaaacgcaatttccctttgtttcggcccccgccccttcggggcccccctcc

SEQ ID NO: 369975 - DNA, 458 bp, Homo Sapiens
tttccagcaggtacttttcactttgggctaaatgggttttaagacgaaaaacattatgatgccaaaaagcaatgttatatactgccaaaacagtgtgctagatcaagaagatagtagttatgaataaataagccctttaaaatagctcatcacaatatgtagaataacaactgacagcattacaagagaacatagagacaacaaaatttattgcccaagattttcacaaagtccctattagagactggtagattagagggacaaaaatatagttcagaacaaaaaagcataggtgtttacaaaatttgattgacaagattaataaaaatcccagagcaaaatatatgtgtgtgtggagcgaagctttcacaaccacggatgatggacgaggttggaagctacaatgagcccaaacaatccacccagcttagtatgttcctgtgaaaagtaggtccggc

SEQ ID NO: 369976 - DNA, 910 bp, Homo Sapiens
  misc_feature (38)..(38): n is a, c, g, or t
  misc_feature (91)..(91): n is a, c, g, or t
  misc_feature (358)..(673): n is a, c, g, or t
gaaggtccccgggtaaaagtccggaaacccgaaaagtnccaccccacgtggccaggaacaccttgaagtgttccaaccgccattatgtggncctgaaaaaattttaaaaaacccccattttgaatagtttttaaaagtggaaaacccatccacaagagttgagtggatagggaatgtaagaatgtagttttagaaaaattcaattatatttggttatcactggtattgtattgttattgagctaccttgttatcattttaagaaaaataagtttatatactgggaactatgttgggaaaatgttgccatagtaactttattttttataatagaattttctatttttgaccaaacatannnnnnnnnnnnnnnnnnnnnnnnnnnnnnnnnnnnnnnnnnnnnnnnnnnnnnnnnnnnnnnnnnnnnnnnnnnnnnnnnnnnnnnnnnnnnnnnnnnnnnnnnnnnnnnnnnnnnnnnnnnnnnnnnnnnnnnnnnnnnnnnnnnnnnnnnnnnnnnnnnnnnnnnnnnnnnnnnnnnnnnnnnnnnnnnnnnnnnnnnnnnnnnnnnnnnnnnnnnnnnnnnnnnnnnnnnnnnnnnnnnnnnnnnnnnnnnnnnnnnnnnnnnnnnnnnnnnnnnnnnnnnnnnnnnnnnnnnnnnnnnnnnnnnnnnnnnntatattggcagcatactcagacataaactccaaagttgtctctacactgatttcacatctgcataattttctgcatacccagcaggtgaattttcagtttttctgggagacaattttgaagagatggtgaaatagaatgggaagttaaggagggggaggtaaaaatgttttaaattgagaaagaacaaaaaagcttttaaaagtcaataaccacttttgggaagctgagggggggcc

SEQ ID NO: 369977 - DNA, 601 bp, Homo Sapiens
  misc_feature (358)..(358): n is a, c, g, or t
agcactggctatgacttccagtactatgttgattaaaagtgataagagtgagcatcctttccttgttctgtatcttagaggaaagaaaagctttcagtctttcaccattgagtgtgatgttagttgtgggcatttcataagtgacctttattgcattgaggtaaatttcttccatacttgtttagttgagtctttatcatgaaaggatgttgacttttgtcaaatgctttttctaggtctactgatgtgatcatctgttttttgtgtttccttcctcttattgtgatttactacattggttgattttcatatgttaactgaccttgtatcctatggataaatcccactctatcatgtngtataatcattttaatgtgctgttgaatttggtttgctagtgttttattaacgatttttgcatttatgttcatcagggatattgcctggtaattttcttatgttatctttagctttggaatcagggtgatgctgactttataaaatgagtttgggagtgcattctcttttttactttttggcagagttaagaaggctagtgtctttgatattggagattagatatgaaacatcggttgggatt

SEQ ID NO: 369978 - DNA, 777 bp, Homo Sapiens
  misc_feature (278)..(291): n is a, c, g, or t
  misc_feature (456)..(475): n is a, c, g, or t
taggtcatctatagatcaggtcttagactacagtgattgaagttcttcattacagccatcaagaaaggacacagtaatcatttacctactggaagctcacatctaaagggcatgaaaaggttttccttttatcaactgacccaaacatcataccccaatagtgcaaagttccctctctgctgctttgaatgttgacagcccaactgttgttctcggagtcgtttagcaaaaaattgattttgttgcactggaagaattattctgctacatctcttttnnnnnnnnnnnnnntccacatcactaaagcaccagttcggttaccaaaattgtagatgtggtacttaccacggcatgaaggcaatggcccacagtcttctaaaaatcctacagatctatgctgaaatttgcctccagtgatgatggggtgcacgtgttcatttgaaatattctctcccnnnnnnnnnnnnnnnnnnnngagaggagcacagcttacattttgatgggctacccacagtgtctgcagaagatacaaaagctccactaattctagatgcaatttgaagtccattgaggaaaactatcttcatggtaacaatatttgtcaggctgggggtaggggggataaattaatcctcaatatgatatctgtagtgctgtcttttgataagtaagaaaagaaaccaagtattccactcatgtcaacaatccagggcaaaaaggagaatgtatttaaaattggttcacaaaaatttaaaggcaaaatagagaacacatgcc

SEQ ID NO: 369979 - DNA, 1329 bp, Homo Sapiens
  misc_feature (304)..(604): n is a, c, g, or t
  misc_feature (774)..(794): n is a, c, g, or t
  misc_feature (1217)..(1217): n is a, c, g, or t
  misc_feature (1282)..(1282): n is a, c, g, or t
aacaaagatgtttccttaagatgaatcttatatttcccatagaaaataacccatttcctttggcactgcagttgccctcaaactgcttgcagttgtattcattttagtacaacaaaggttttcataatatgggaggccaagtctatgatactgcctcaaagagaccctattgtgtagatgcatcatcttctctcatttgatccatagagcataggcaaagatgtcaacctcaggccttagagaaaagtggaaatgttattatgacagccgtccatgagttatcgctttgtatgaagttaaatannnnnnnnnnnnnnnnnnnnnnnnnnnnnnnnnnnnnnnnnnnnnnnnnnnnnnnnnnnnnnnnnnnnnnnnnnnnnnnnnnnnnnnnnnnnnnnnnnnnnnnnnnnnnnnnnnnnnnnnnnnnnnnnnnnnnnnnnnnnnnnnnnnnnnnnnnnnnnnnnnnnnnnnnnnnnnnnnnnnnnnnnnnnnnnnnnnnnnnnnnnnnnnnnnnnnnnnnnnnnnnnnnnnnnnnnnnnnnnnnnnnnnnnnnnnnnnnnnnnnnnnnnnnnnnnnnnnnnnnnnnnnnnnnnnnnnnnnnnnnataaatacctagctggttagcatttacattccttgccagggagtttgaaatttatactatagaaataactttaggttttaggtagagttaaagaggtaaagcacatgttggccacaacccaggaaagtatttttaagaaagattggattttcctacctttagagatcctnnnnnnnnnnnnnnnnnnnnnttcattttgtgttggtgtttattactagttcagatgagtggctgctgaaggggcccccttgtcattttcattataacccaatttccacttatttgaactcttaagtcataaatgtataatgacttatgaattagcacagttaagttgacactagaaactgcccatttctgtattacactatcaaataggaaacattggaaagatggggaaaaaaaatcttattttaaaatggcttagaaagttttcagattactttgaaaattctaaacttctttctgtttccaaaacttgaaaatatgtagatggactcatgcattaagactgtttttcaaagctttcctcacatttttaaagtgtgattttccctttaatatacatatttattttccttaaagcagctatatcccaacccatgactttggnggatatacccataaaacccatataacagcaggggtattggagcagctttctcaaatggttggctncggatggtggcaagttggcaaattttattggaatttggaggatacat

SEQ ID NO: 369980 - DNA, 868 bp, Homo Sapiens
  misc_feature (586)..(586): n is a, c, g, or t
  misc_feature (838)..(838): n is a, c, g, or t
ggaagcagtggtatcaaccagagtgcccattacggccggggttcaccaattctaacacacccaactcctacaatcatatggacccagacaaactgaatggcctctggagccgtatttctcacttagttctgcctgtgcaacctgaaaatgccctgaaaaggggcatctgcttataagaagtgagagagaagaaaaatcatgtcccaagttctgagaattgttcacactttctaaccagagacagaattcagagctctttttgaaagaactagtttctttttaaagaagttaagtgcttacataaacatggaacatataaatcattcattcaacctaattatctgtgatatgagagaatcatttcagtttccattgagagctctgttaaaggtatcttaggagtgcagattatatgcagttcccttaaagaatctgttttgattctgggctgagttattacagttatcggatgaccagtgaaaagcgatttgtgtcctttccttatcaaccttcctgattttttaacttagatttctcacctaagtttcctgaattattaacaaaaattgcccccccacaatggcangcccgggaatttttccattaaatgttccccttttatacccatttaaaggtgggaagtttccttagccttcctgcctattaggaaccaaaagttaatcgaaagggtctcctaaggcgctctggttttgagaaatttatacgcctctgcctctcttgggaaaaactggaaaagaaaccaaggccacgggaaagggaaaaatctaatgcgggaacaaaccgccaaggggaagatatatgttctacacactcaccngccactgcaaccaacacactcctacgccac

SEQ ID NO: 369981 - DNA, 915 bp, Homo Sapiens
  misc_feature (123)..(123): n is a, c, g, or t
  misc_feature (421)..(477): n is a, c, g, or t
ggtgagaaaagtaatagaattttaaatatagaaatatgagaattttaaagtaatatattgattaaagatcactgatgatatagatataatatatcataacagaaggaaagtaaatggacttgnagcttaacttctcaccctggaattattagtgggtgaagaggggaatcattagcattctgggcgtttttatattaaatgttttgtgaatatgccagaagatctgccttcaacttgtaattaggcaagatagtaacgcttgatggtaacttctatgtttgtgtagaaataataccagttagttttggaaagccattcagatccattcaaaaattccataaagtatgatgtatgctttggaagagggatatgagtgatacaattgttatataaatggaatagacaaaccatttgaatgcannnnnnnnnnnnnnnnnnnnnnnnnnnnnnnnnnnnnnnnnnnnnnnnnnnnnnnnnccggctttgagcccaaaaaaatggtggttttggttttggcaatttttttgagccttcccaaaggaaaaccgggcccccccaagtggggtttttaaaaaggggcccctggaaagattcccaaaataaagtaagttaagggtgaggcggtttttcgcgtaaagtgggattttaaaaattttgaagaagaatttgccaggggaaataaaatgtgggcccaaaaaacctttgtccacatttttgccccggcgtagaggggcttaaacaaatgctgtggcccttaacgcgtatggaaaagttaattttgggacactggtgtaaaagccctaaacacacgaaggacctgtgtgaaaaagaaaacccctttccttgtttggccaaaagaaccgcttattgcgtcgtaatattgccggagtgagggaaaatatcacaaaagaagaa

SEQ ID NO: 369982 - DNA, 815 bp, Homo Sapiens
  misc_feature (37)..(38): n is a, c, g, or t
tccatgtcaacaatttgtccaaaggaaaactgctggnnggaggtggagggaggaaggtgggaattattatttaatacatcattaatgcttattaatctctcacaagcatctttgtcttgcaaatcctaagggaaaagcaagtccctgcagtgagcactagggacagtctaatttggggattgctcaaccatcaagactgcaggtctcccttcagccacctccttcctgctaaaagcttagcctaccacactaccagtcattcccatcgctttgcaatcacaagccacaggatgagaagttctgactcactcatgccatgcccaggggctatctgaaacaatgtctcattaagaatttagggttcttccatgggcttactgacagttgcccagatctgaaggggaaagggtcttgagaaagaccatcactggctcaactttagggcactgtccagagtcaacatgatgtggtttagcagtgatcacatctaaacaaagtttaggtaaatgaattatcgcagagaaaaaccacatgagaaaatttttgtactccaaatttacttcccaataaatattcagcaaagtagtaaaatgaccttaaagataaaaatgattagggaatagccttagaaaatttataggtataaaaaattcaaggacaaactgtgcatttaatggacacaagaattgactctaactccatgtctgtggtttctttgaacccatatcaaatgtatgactatttagagtgtttataagagataatggaactgaactttcactcaattaattgggcattaacaaccttcttttatg

SEQ ID NO: 369983 - DNA, 810 bp, Homo Sapiens
cttaccaagaggctttaataggaaaatctttgtatattgcagttaccaaaggactttccctgcatgtctgcagaatgtctaaaagaaaaaaacactactcccaagtgagacttttgacacatataaaatattgttgttaaaggaataaactagtggaataagacaaggcaaatttcattgttgtgttaaaatctcatgttaagcaaggttctgactagtcatttgcagacctgatttctggaaacgctgagtagaaatcactgggagataaatctaaatgagaacattaatttacttacactcagataactctctaaagagccattgtccaattttacaagatgtgcaacaggcagagaaggacaaacattgcaaataagttcttgcccattcatggtgcaagttctcagaagttactcttgtccaaatccttctgtttcttctatggcaaacaacagcttttccttcagttgctcatagctcttgtatggtggcaggtccaggcgattaaaacaggtatgacttctgggtagccaattttctttcccaactttttcaatgcagaatttctgtggtccattgctccccatgagatcagcaaatcctcctactggcaatcggcaggttccagtaacaaactgcagaagtctcattctcttctcattatcaatttctttaacaaactgccaaaaccacatgatttgtttgctggtccttgcataatgacggtagatggcatgtctttgccagtcattcaaatcaatctcttgcattccacataaaaggacctctaatcctttgcatcaaagt

SEQ ID NO: 369984 - DNA, 854 bp, Homo Sapiens
gcccggaacttcggtgcctgggcgcagcggtgcacccggacccggaacattctcaggcgaaagtgtctcttgcgtgcgtgggccggaggttagtgtgcggggcccgccgggcggttgaaaagtccgagagaatcaggatggaggccgtggcgacggcgacggcggcgaaggaacccgataagggctgcatagagcctggacctgggcactggggtgagctgagccggacaccagtcccatctaaaccccaggacaaagtggaagcagctgaggcaacaccagtggccctggacagtgacacctccggggctgaaaatgcagcagtgagtgctatgctgcacgctgtagccgccagccgcctgcctgtttgcagccagcagcagggtgaacccgacttgacagagcatgagaaagtggccatcctggcccagctgtaccacgagaagccactggtgttcctggagcgcttccgcacaggcctccgtgaggagcatctggcctgctttggccacgtgcgtggcgaccaccgtgcagacttctactgtgctgaggtggcccggcagggcactgcccggccccgcaccctgcgtacccgcctgcgtaaccggcgctatgctgccctgcgagagctgatccaagggggcgagtacttcagtgatgagcagatgcggttccgggcccccctgctatatgagcagtacatcgggcagtatctcacccaggaggagctcagtgcccgcaccccaaccaccagcccccccaagcccggggtccccccgggagaacctgcttggccccgctcttcaaacttggctgcttccagtccctaccaagggaggcgggaagcctaccgg

SEQ ID NO: 369985 - DNA, 763 bp, Homo Sapiens
ggatactgatagcacattccgtgttccagtggagagaaaagctgaagaagaacatctgggaattctaggtccacaacttcatgcagatgttggagacaaagtcaaaatgatctttaaaaacatggccacaagcccctactcaatacatgcccatggggtacaaacagagagttctacagttactccaacattaccaggtgaaactctcacttacgtatggaaaatcccagaaagatctggagctggaacagaggattctgcttgtattccatgggcttattattcaactggggatcaagttaaggacctctacagtggattaattggccccctgattgtttgtcgaaaaccttacttgaaagtattcaatcccagaaaggaaactggaattccgcccttctgtttctagcttttttgaggagaatgactctttggctacttaaatgacaacattgaaaaacattaccctgatccccccgaagaaagtacaccaagattgatgaggaatttcccgcaaagccaataaattgcttggcccccttaaggggcaaaatgtgcggggaaaacttacacgggcccccacagtgggactggggaaaaaggcaatcgaaacgcggtataccggaggggcaacggggcaactccaaaatacgccttggcgcagcctggtaccttttcaggccggctagacttcctagcccgcgcacacacacgcggggggaagctttaaaccgtgttctaaccgccttcttgaaactctttt

SEQ ID NO: 369986 - DNA, 1150 bp, Homo Sapiens
  misc_feature (322)..(322): n is a, c, g, or t
gtcacaccacccgtacacttcatcatagccaccacttacaggcggccgtcacggtacacactgtcgatgcagaatgctaacaatctcctcacctccacgccaagatgagatctgggagctacagaatgttctggaaagaaaaagaacccggcttaaaacccacagcaagagacctcccttgtgtttgtgctttgtgcagagttgtttgagtcatttcctgcctgtcgacatggttaaaaacgagagaaacaacaacacagtcacatttgtgaagatgtgaggctggttctgaaatggaggggaaataagcctgatgaacagncctgccataacactaatggaaggtaacagaaggcgaacctccaaacacagagacggaacctgcaagtgaagctgagccagaggaatgttccaaagagccagaagcattcagctctccttaactggaagagagaaaaattctgctcacccagagactggaatgtgggcacatgcagatacaaatgtgtgcattgaagatttcgcctttgtttcttagcggtacctggataccacagttgctgtatggaactcatgttatgctctaaacgatgcatctcagaatttctaagtaaaggattatttttctactatttattgaactttcaaacattctcaaactttggggaaaaggaaaggaaacacaggagaagttttcagcagttgccccgagctgttttgtgtgtaatgaagtggttctttgattaaggagctctatttcttatttaactgatatcccactgccccactccacaaaataggaaaatgaagaaatctttctctctgacttgtttacatcatttcacggaaacacatctttgtttgtaatgcagtattctttctctgtgtttgacagagatggggaggggcagaggaatttaagaggttttaaaagaaatgttatgcttcttatgacttgtttccactcctcgtaccatgctattcttaggtttctaccaaacctaatgttagaaccgcatccttttcgctaaaggaaggttggatttaatttccttgttttaaagaccaccaatttttaaatatcccatttttgactgagaatattgacctttaagggaaagaagtttttctaaattggggaaaacctggg

SEQ ID NO: 369987 - DNA, 638 bp, Homo Sapiens
ggagttctgaaattcattacatatctgtctcattctgccttttatactgtctaaaaaagcaaagttttaaagtgcaattttaaaactgtaaattacatctgaaggctatatatcctttaatcacattttatattttttcttcacaattctaacctttgaaaatattataactggatatttcttcaaacagatgtcctggatgatggtccataagaataatgaagaagtagttaaaaatgtatggacagtttttccggcaaaatttgtagcttatgtcttggctaaatagtcaaggggtaatatgggcctgttgtttagtgtctccttcctaaagagcacttttgtattgtaatttattttttattatgctttaaacactatgtaaataaaccctttagtaataaagaacgcgccattacaacccaaaacagaacatcaactaagaagacacctccgttatgctcacaacccgccactaataccttgtgaggccccccccagccccttaaaaaaacctttttaaacactttctttttgggcgccccgggcccccttatggaaagggaaaaagggccaaaaacatttttcccaaaaaataatccccggtatatacaacacgggttgtggatcccccccac

SEQ ID NO: 369988 - DNA, 926 bp, Homo Sapiens
  misc_feature (727)..(728): n is a, c, g, or t
  misc_feature (822)..(822): n is a, c, g, or t
ggctgcctggccaaatgaggtgactcagatagaatctgatcccattcagagcttggtaaatgtcactgtacagaagacattgaaaaggaagaggcatagtcatgatcaaaaggatatattgacagttatctatagccagggtagttgttaatacctgcttgtttggggagatatgtttgattatagagagactctgggccaccctcaaacaccgtcagatgcattagcagcccactgcatgggacaatcgcaggcagatacgaggaatgtatcccctgcctattttccttgtgtaacaaatggaaaacattctcccctgtgagaaataatgcaatttctaattatctggatgttcgttgaaaatatattagacattctccctgaggttaaaaacaaaaagtacgtgaccagtctggtaagaagtattaatgaagtagctaatattacagcttcattttctactagcacctatcataatggtcttagtcatttcacacaaatcagaacttccttccccaccagggaggacaacatcttcatgctgtgattgaagcatccattcagaacacgaggcaatattgtagtccacaaggaatggatgcttcacttgatctccggaccttggctgcagaggccatcgcagcttttgaaaagtgaaggggttaattcccattggtgtcctttgcttatagcattttttctctaacctataacaaggagacattannttttactttagaacatgagaatagcagttttgctcatgacttaccattccagctgcatgggaaagcaaagcagaaaacagtgccccaaatgggnaaaaagatacttcacacagaacaaaacagttcttgggtcttgttcttgggtcttgtcaaaccttgcctgatgctctttctaaagtccaaatatgaatgctaaga

SEQ ID NO: 369989 - DNA, 747 bp, Homo Sapiens
  misc_feature (80)..(80): n is a, c, g, or t
  misc_feature (259)..(259): n is a, c, g, or t
  misc_feature (434)..(455): n is a, c, g, or t
gcaattacccacctttccatttcatggccctgtgtttttaattaaattttcataaaactaccaagtacaaatcaaatacnaatgcatttttttaacacaccaacagcttgaatgttcttgaagcttttaaacaatgagtttactgtgagcaaacagaagcaaggactcaaagagataattagctcatgcatctggtgctggcctaataattttcacatgaatgaagaaaccactctatgttaactgtattttatttttnaaaaaatagtttgaaatggtaataaaatgccaattttcagaagccatcttggtgatcgagtagaactgcttaatttaaaaaataattcagttacttccacctggcctggggtggataacatgtagcaaaaacttccatcccactagattctggcagatggattgatctttcacannnnnnnnnnnnnnnnnnnnnnttttctccatttcttcttatggaagccagaagccaggaggagcaccctgttttgaaaagagattgtttggttcacacggtatactttggtttatttaaacaggtaagaaagcggtccctacttctgaggagaaaatgtggtttctgacttttaggtacatcacgatatcaccagtctgaatgagtttccttttctgtaaagcagaaagtgtcattttcttttcctccagtgttcagttgctcctcttcgaaaatactcttcagagaaagtatctgtacgtctgtattagtcc

SEQ ID NO: 369990 - DNA, 1088 bp, Homo Sapiens
  misc_feature (241)..(249): n is a, c, g, or t
  misc_feature (865)..(948): n is a, c, g, or t
gggcgcagacaatatcctacccatttgatgtgactcgtcggcgaatgcaattaggaactgttctgccggaatttgaaaagtgccttaccatgcgggatactatgaagtatgtctatggacaccatggaattcgaaaaggactctatcgtggtttatctcttaattacattcgctgtattccctctcaagcagtggcttttacaacatacgaacttatgaagcagttttttcacctcaactnnnnnnnnnttatggttggtttttcttaatacattctcagagggagaaatgaaacattactataattgtggggggaacattacttgaatggggatatttaccctgtcacaagagccactggtattttagtacttgattattttttctttagtcacaaatcagaactgcttaccatactttttgatgccaaacattataccttagaacattgaagaaaatattcctaagctgatgctggctaaaccgctttaaagttttatttggaagtagaactagctttaaaacggggttcaagaggttgccattagctttgtcatgctgttcaaagtttttaattgttatcatggtttttaaaagactgacagtgtttattattattaaaataaacagggttggttatattgcaatagaataatgagaattgaatttttaagttctatgaaacagccagcattgacattttatttttgttatctctcttctcacaattatgctccactggataataggaaaaacacttctttccttcattttttaaataaaattaatgttgtatttaaaaagtagccatgtagagacacaaaaataaatgaagaagctggacatggtgggatgggcatgtggnnnnnnnnnnnnnnnnnnnnnnnnnnnnnnnnnnnnnnnnnnnnnnnnnnnnnnnnnnnnnnnnnnnnnnnnnnnnnnnnnnnnacttaataaatgaatgaacgactaagtcttgctcaaatgttattatgaggtactatgagtgacttacatgtgttttaaaatgtcagtgtgtttcccagaggcagaaataaaaatactgaatatctaagctcttaaaaaaa

SEQ ID NO: 369991 - DNA, 441 bp, Homo Sapiens
ggtgaaaaaaaactgccttccataagttccgtaatgttgtaaaaaagcccactgccttgaagagggaaatacagcgaaatgtaatttaagagataaacccacgatagagtcccttttccgaattcccatggtgtcccatagacatacttcatagtatcccgcatggtaaggcacttttcaaattccggcagaacagttcctaattgcattcgccgacgagtcacatcaaatgggtaggatattgtctgcgctattgctccagcaacaccaccacaaagtaagtttacatgagttttcaaaactaagacattaggattgtctgatgaaggtctgccaagaagggtaggagcatgggaaagcccaacactcttcaaggtaccaaaagtaaaaaatgaaacacctgcatatggagccattcctaaaatagtaggcatcagacct

SEQ ID NO: 369992 - DNA, 597 bp, Homo Sapiens
gggtagagatgaatattaagcatattgctaagtgtatcattttagatgttccttgaagtgtgtgttagagggaaggagggaagagttaaaattatcttttggtttaaattattttaaaaacatgaatatgaagtaattttctaaattttttcatcatactcttttttgttagagttgtattcataaccaatagtgagccatttggaaatagggattttggaggaaaggtttagaagttggaaaagatttaaaaatgggttgctcagaatatttctgctttatatgtgaatcctctttaacatttaaatgtcttcttccaaactcacaaactgctgtaaacattcaatgaaaagttttcgctaaatataatggcttatggaaatattaatcaataatgctattttttactttgaaatgatgagttcttttctatgatttaaaatatatgtgaatgatttatttattttgctctaaattattatcagggtttaatttttcattattgatttgtcagtttttcattagacttatgataacctcaagttaatgtcataaaaccagggacaactcagtagctgagttgccattctcttcttg

SEQ ID NO: 369993 - DNA, 905 bp, Homo Sapiens
  misc_feature (28)..(28): n is a, c, g, or t
  misc_feature (68)..(68): n is a, c, g, or t
  misc_feature (81)..(81): n is a, c, g, or t
  misc_feature (99)..(99): n is a, c, g, or t
  misc_feature (122)..(122): n is a, c, g, or t
accccccatatcaagtactttgccccanttgccgggccagatggttaaaaatacagcagttggccccntgtggaataacanttactgccagagaaaagntcccactctgtgaaagatttganccagcatggtcaagtgaatgccagagaatgaggccatgaataggacctgtaatctcccaaactaaattggtctctgtatcccagaaagagcttgtgtcttcacattcaaactcccgtgccttaagcatttgcattgtggcacctcggaaagcaacaggggacaagagggttggaggaagtcctgcctgtggacctgaggtagcaactaaactcttagagttaatcaaaaaattgagcaatgtaaaggtgttgattccttttaccaacacaacagattcaggtctgtgatccatttgtacttcatgtttctctttacgcagcttgatagaaagtatgtctggctttttaattttatcttgcacacccatctcttccagccaggaaaaactttcctcttcatcctcatcactgatggcttgctcccagtcactcattaaaacatgctgcagggttgcatcatttgaccaaggacttgtctttccagccatttttctatcagctccaatacgagggaacagtggtagccaagacaaagcagggtggagccaatagataaggctctgctggaaggtacaacggagctcagaggagagtttgggatcctgtatacttttaggcaaagtaacttctgttgccctacaatgctggacaagaccttgagcttcttcctgtgctttcaaatgatctgcccaggtaaagggttgagaagaggtgaaaaggagtcgcgttttaatactccagtccacaggtaactcagtactttttgaggacggaatatcagcc

SEQ ID NO: 369994 - DNA, 1037 bp, Homo Sapiens
tatttctcatagctctcctttaacctcgattgttggagatatgaagacctgtgattaagtcacttcccagctaatcctgctgctcggaacaggaccagtaaactgataggtacaaacgtagaaataggggccaaagttttgtcttcagcaaaattatatagagaagtaaagctcacagaccagtcactcattaaaacatgctgcagggttgcatcatttgaccaaggacttgtctttccagccatttttctatcagctccaatacgagggaacagtggtagccaagacaaagcagggtggagccaatagataaggctctgctggaaggtacaacggagctcagaggagagtttgggatcctgtatacttttaggcaaagtaacttctgttgccctacaatgctggacaagaccttgagcttcttcctgtgctttcaaatgatctgcccaggtaaagggttgagaagaggtgaaaaggagtcgcgttttaatactccagtccacaggtaactcagtactttttgaggacggaatatcaggctcggagaatgatacatgtgaagtctgaggtaattcagtaacagttgttctttcaggaaacttctcttcccatagcaaatcattttcttgattagaatctaaaaacgggaccggggcctccggctgctcgcgggccggcccgtcggggggctccgcggcgacccgcggtcggttgtccaggcgggcgaaggggttcctccgagcagcggccgggccgccgccgctgccaccgcctctgcccccggcagcagggaaagggcgaagaggcagccccgccaccagggcggctcggcgggccgccggctccgtcagctcacggggcggggaggcggcagctccacggctccgggcccttttccgtcggagccgcactacctcgggcggctttcggaagcccggtgagtagccgggcaccgaaagggccatgacgcgcggcgactgagggtagccggcccctcgtgcggaattcgccacccaggcctctttcgtgttatttga

SEQ ID NO: 369995 - DNA, 977 bp, Homo Sapiens
ggaacgtaatgaaacactcagcagaaactaaagccctgaagtggttaagaaaaagctacctatcactaaatcaggcatgcttataagcaacctagaagaaaacttttatctgccttgttttggctttcctggcatacttccttacttcatctccattttataattaagttttgggtcacaagtctaaggcaaaggagcttccatactgaaaatctacatttttaatgcttattttatcataaaaataatttgggtaattttctgcaagtgacttctaacttaacagtagaagtttaaaactgttcaaagaccaaagcacaacatttatctagtgtttgatcctagtataaaagaatggcaataattatgtgaacaggaattacatgcccttagaatgtgcattttttaacctattaaatttgccaatcttgcaaactattgtttacttgtattgcataattagatactcatattaacatattgaattcagaaaaagttagcaagccaagatgacattctctgtagcactattttaaattataatgaatgatcacataaaactctttagtatttatctaaagtaattattactctacttcatttgtttatctaaatcagtgatcattgatgtttgaactttttggcttaaatgtttattttgtttatactacttgctagagtaaaataaatttaatacatgaaaaactctacacaatttaaaataggttataatttgtcaatacttatgttttaaaatatttttagaaggaggagtgctgtatattattaaaacaattttctgaaattgtttaatattatctttgattttaaaatgacatatatgtggatttacaatgaatcaaattgtccctaaaagatgtcagataagaaatgcaagtgcttttgcaagtctaatacttaaatgtttcttttatgtacaaccaaaaatttaataaattaactttaaagcaaaaaaa

SEQ ID NO: 369996 - DNA, 940 bp, Homo Sapiens
gtgcgtggagaagtggaacctgcataagcgcatagctctgcccatgggcttgacggccggggccaagccgcgcatgctgctgctctgcttcatgtgctgtaccacgttgctgtccatgcggctgtccaacacctccaccaccgccatggtgatgcccatcgaggacgccgtgctgcaggagctggtcagtgctgacgacgagcagatcgtggcgtgcaactccaacaccgaagaggccgaacccatcagtctggatgtaaagaacagccaaccttctctggaactcatctttgtcaatgaagacaggtccaacgcagacctcaccactctgatgcacaacgagaacctgaatggtgtgccctcgatcaccaaccccatcaaaactgcaaaccaacaccagggcaagaagcaacacccatcccaggaaaagccacaagtcctgacccccagccccaggaagcagaagctgaacagaaagtacaggtcccaccatgaccagatgatctgcaagtgcctctccctgagcatatcctactccgctaccattggcggcctgaccaccatcatcggcacctccaccagcctcatcttcctggaacacttcaacaaccagtatccagccgcagaggtggtgaactttggcacctggttcctcttcagcttccccatatccctcatcatgctggtggtcagctggttctggatgcactggctgttcctgggctgcaattttaaagagacctgctctctgagcaagaagaagaagaccaaaagggaacagttgtcagagaagaggatccaagaagaatatgaaaaactgggagacattagctacccagaaatggtgactggatttttcttcatcctgatgaccgtactgtggtttacccgggagcctggcctttgtccctgggctggggatttctttctttgaaaagaa

SEQ ID NO: 369997 - DNA, 1005 bp, Homo Sapiens
  misc_feature (188)..(188): n is a, c, g, or t
aagatctccttagtaaaaataaatatatcctcaaaatgactcccccttgaaaaatacttggaatttctaagagaatgaaaatgcttttacaaaatccaaaaaagttttacaaaagcatttggttctggaattaaatatttcacttccttaaactctctctaggtcaaactctagccctccatcacaanatgtatatacaaacatacaataatgctcatcatgtcagctcttccaagcctagtaaaatgctcatgtcccttatggaaaaacaagtcattcttgcttggagagatacctcttcaaaatccctcttccaaccttgaaagaatacttgcaactccaaggagggtatctagctttctttacctttggagggtccagccatctcaaaggccttagtttcagagtagccttgatctaaagcagtttcacacagagataagtttccttgctcaatagcacaggaacttgctgacttcattgcaaatacagcagaagggccaggcatgggtcttcttcctgacttgccagctgattggttagcatactttgatgtcacttgattcatctttccagcccctctccacttcttgagagctttagtcctctcctctggagttaagtctgtcaaagtgcttagctctcagaattggagatggaaacagggatccctgaagaactctgtatacaaacctgggcagaagagcaatggacgtcgtgaggatacaaactaagtagaatactggatccagcatgtgctcctgcataatccagtaagggttggatgtgggttgcaagttacacacatggctccaaaaactatggcaaataaaaaataagacaagatgctaccaatgatgaccagcaagtgaatccaagtcaaactcttgctttcaatgaccagatggaggagaatgatgaacagagcggctgtgttcagggggtttccaaatgcaaagatgtcagtatctgagccctggtaggtaaaataaggcacaaagaagc

SEQ ID NO: 369998 - DNA, 787 bp, Homo Sapiens
  misc_feature (770)..(770): n is a, c, g, or t
ggcctcatggtcactcccaagagatccaacccatgttaagtatgggctggaggactgcatgaatgcctcatgatcttcccagaggcaaaggcacctactgccttccaaggtcagtgggaggttgggatcaacactgtttattatgcttaggacaaaaaagatagggagaaagatgtgcaaccttacaggtcatctttctgggatagaacacaatgggtcttctcctgcctcctggatatgttagtcaaggccagtccatgctacacatctagtctgacttctaaaatagaagcaccagatgaattcagccctgagagaattttcagcagctgtgggggcgctggaggaaacactattaaatagttttgcacctgagacagatagcctcactcgcctcaccctagtcctggtggcatttgtctcaggtgcaaaatttaagaaagaaaccttggagtgctcaccctgtggctgggtaaatggtcctaaagtggtggttttcaagcctgagcgtgtatcaggatcatcaggggagcttgctaaagagcagttcctgcggtcagaccctcatgcatttgacagtggggacggactgtcgtactgcgatcacctacaaacacggtcaagagaaccaaagtaagtgtctcaagcagtacaatgactcgctgatctcggataataatagatcacttgaagacaatactcggccgcagggtagcgcgcatctgctgagatacctgacgcatcgactccgcaggaacatcacgtacagnacacgctgcaatgtgag

SEQ ID NO: 369999 - DNA, 733 bp, Homo Sapiens
  misc_feature (566)..(577): n is a, c, g, or t
gggggagaaaaacatttagggaattggcacatttccaagtctcttcaattcgttgcctaggtttctttcaaaaataggcattattgaagacttgagatgcaagtcttagtaaatacatcaagcacattaatttttctcccttgggctaattcagcataagtatcttaaaagtatgttagaaagtactgactttaacttgctctgactgaatgctttctggatggaaccctgtataccacttttatctgatttggagatgagacactatgaaatgtgactccacaagctttctgctgcttgctgtgtcttgataacattaatgctatgtttaacagaacaattgctgaaatgacctaaagggcctggcaagaggaagccatcctcccagccctgtgcgcatgcgagctttagtgtaaggctattctggtgctattcagtattatttcacgtggctttttctttatccttctaccaagtattggttttaccaggggatagaaattgtaatcccctaaacatctctgctacattaaatggacttttgtatgtctcctttgaacactgannnnnnnnnnnnaaattgtcaaacttggtaaaaagcaccagcatggccaagtttctctagggacttcatttcattttcaggttttcaatccagctataaggaatatgtaatggacttatatacagcacacagcaggcagcaaggctgactgacatgtcatagtttttc

SEQ ID NO: 370000 - DNA, 718 bp, Homo Sapiens
  misc_feature (24)..(24): n is a, c, g, or t
cctcccaaataaaaaggtataaanatttcctagaaccttatccagcatcctacattttaatataatacattatttgaaacattgttgaatgaggtaattgtcccagtcgctaacaatgcttttatactatttggaaatatttggagggcagcgaaccagaaaagaatttctctaaaaaatatttccgaatcaagaacagctatatgtgcagctctcccaatgagtgaatcagctgtattgggcaatgcattgatgacattatagcgaaccaaattacagtcccttgctttgcagaacaggtcgaagcaagttgtggatcatttctgaatagatctgtcctgactgtttgtcctttaaagctgttttacacatctcaatgcgggcagagtgataaggaacatagcgatcctgtagggatcccactagcacaacatttttgaaataatgaagccctgctttgttactaagcttatataaaaaagtttggcgagggtctgagtgatctcgacatgtcagctgcaaaagcgaacctgattttttccatttctgcataaaccagagacctgtattaacaagagcactgctgttgtagagtgtaccaaggtgaggtccagaaagagacagaaaggtatgaagtttgttgaggtaatatttaaaccttggccttgtaagcactgaacgaattattaaattgcccaacgaatgtccaataaagccc

SEQ ID NO: 370001 - DNA, 785 bp, Homo Sapiens
gggaaacatcatagaacacacacaggggagaagccctacaaatgtaatcagtgtggaaaagctttcggtcagaaatcacaactcagaggacatcatagaattcacacaggggaaaaaccctataaatgtaatcattgtggggaagctttcagtcagaaatcaaacctcagagtacatcacagaactcatactggggagaaaccctatcaatgtgaggagtgtggaaaaacattcaggcagaaatcaaatctcagagggcatcagagaactcacactggggagaagccctatgaatgtaatgaatgtggaaaagctttcagtgagaagtcagtcctaagaaaacatcagcgaactcacaccggggagaaaccatataattgtaatcagtgtggggaagctttcagtcagaaatccaatctcagagtacatcagagaactcacacaggggagaaaccctataaatgtgataaatgtgggagaactttcagtcaaaaatcaagccttagagaacatcagaaagcccacccaggggattaaatgtatgcatataaagaatacgaaaaaactctgagctggaaatcaaacctcacaatacataaatgaacacacaggagagaactgttaacatagtgagcactggaatttcctctacaatttcagcctccaccaaatatcaaagaatagaagataaattgttgaaatctattttatatgggcattctttcagccagagcccagtcttctatggatatacagaactcacacagcaaagaaaccctataaac

SEQ ID NO: 370002 - DNA, 976 bp, Homo Sapiens
  misc_feature (816)..(816): n is a, c, g, or t
  misc_feature (905)..(905): n is a, c, g, or t
  misc_feature (919)..(919): n is a, c, g, or t
  misc_feature (924)..(924): n is a, c, g, or t
  misc_feature (955)..(955): n is a, c, g, or t
gggtcgctgaaacatgtatttgcctcactgagagctttcatcagtaagtttccttcagcatttttcaaaggaagagtaaacatgtgtgctgcattttgctatgaggttttaaagtgctgcacatcgaagattagctcaaccaggaatgaagcatctgcacttttgtatcttttgatgagaaacaactttgagtataccaaaaggaaaacctttttgaggacacatctacagataataattgctgtaagccaactgatagctgatgtagcactaagcggaggatcaagatttcaggagtctttattcattatcaataattttgcaaatagtgacagacctatgaaggcaactgcctttcccgcagaagtcaaagacttgaccaagagaatccgcactgttcttatggccactgcccaaatgaaggagcatgagaaagaccctgaaatgctaattgatctccagtatagcttagccaagtcctatgcaagcaccccagagctcaggaaaacctggcttgatagcatggccaagattcatgtaaaaaatggagatttttcagaggctgcgatgtgttatgtccatgtagcagctctagttgcagagtttcttcatcgaaaaaaattatttcccaacggatgttcagcgttcaagaaaattactcccaatatagatgaagaaagagcaatgaaagaagatgctgggatgatggatgtccattatagtgaagaggtcttgctggagttgctagaacaatgtgtggatggcttatggaaggcagaacgttatgaaataatttctgagatttccaagttgatncgttccaatttatgaggaaacgtcgtgagttttgagaaacttactccaagttttataggaactctttcatgggagctttacaccaaaanttctgggaagtttntgccntaccaaaaaagagacttttagggcactttcnttcagagttgcccttttttgg

SEQ ID NO: 370003 - DNA, 1042 bp, Homo Sapiens
  misc_feature (500)..(500): n is a, c, g, or t
  misc_feature (708)..(708): n is a, c, g, or t
  misc_feature (923)..(923): n is a, c, g, or t
  misc_feature (930)..(930): n is a, c, g, or t
  misc_feature (963)..(963): n is a, c, g, or t
  misc_feature (977)..(977): n is a, c, g, or t
  misc_feature (988)..(988): n is a, c, g, or t
  misc_feature (1001)..(1001): n is a, c, g, or t
  misc_feature (1025)..(1025): n is a, c, g, or t
gggggcatgtgctttctgtgcaccaaatatctggatgaggttcttttttcaggcctacagtcaaatctgtgtccagaattttttgacttttttgctttgtataatcatagaattcattgctgctgatttctataatgattcatgttgtcatgtgtctcttaataactgagggctgtcagtaacctgtgattttgccttttctatagtcttactcccatgaagaaccttggttctgatggagaaagtgaaaagctttatttcttcccctagatatctttatatttctattatattttttagttgtgtactgtgtactagagatttttttcagtttgttatgaacacaatttggtaagccctaaattggttctgcctgtctccaaacagaaacatctgtacaaatcttgttggtatagactactttctggaaaatggtcaagataagttcatgttttcttgaaatgtctaagatagtatatggtatcacttgtttaaagcanatcagactgagtttgacatttaattcaatatttctggtattcagtaacgggtatatatgtttgttcttccagtttgggtcagtttaaaagatatgttgcaaagtatacatagaaaatgtgagcaatgcctctctttgccttttgatcagaaacttcagcagagcggtcaaggattccacatgatttaaactgaaatgcttttcttctntgttgctgtaagaacttaaaatgtaaaatacctttttcagtttaagtcctgtaaacaacattgaagcatggagatgaggcaaggaatagtactcactgaagttgaaatgactgcccacttcaaaatcttcattgtgtttacacaccagtgtatttatacaaatcagaggcattttgtagatgctttgctgacttgttcagctctgtaaaaacacngaaatcngacccattttgtaaagcggaaaatcatgttacntgggaacatgtccnggtatatatcncatacatggtaanggggtcctaatgataagtgcaggntaataatttatgggggg

SEQ ID NO: 370004 - DNA, 823 bp, Homo Sapiens
ggggccgcctctctggttgacaagcaaaccacatgctaaggcttggagcaagagagaatttgtgtctattggcaaagaactaagccaggaagacatgggccatccctccgctttagggaagcatattttaaacctaaacgttgaacttcttctttggcctcaccagtgaaaacttgttgtctttagttcctaaagtttcttctactttggcacattccccagttgagcagcagcctctatgcttccacgttcaggaaaaattccagtcctcatatcttttgtagttcaccctcaagctcccccgcttcaccatccaatagtttctcccaaaccttggcacccccctagactttgcttccaatggtttcttccagaccacttttcctagatgaatatattcgtttaccttactaggaaaattattggaagattttttcttttacttgaaattggaggcattttaataactggcgaactggaatgtgtttctgtatttgtagacaaccatgtacccatgcaagtaggtgaacattccacagtggctgggtgaccacagcagctgcatgcagacaggactgcccgtgctttgtggggaatcagagaatttccaaacttgtttctcagacttccgcagatctcatcactttgatttctaatccatgctgtattggtgattttgtttatcgttcctgtaacttgttctacattccacagtctttaccgttttatgttcaaaattacaacaatccctgtccattgattccactctggaactctttgttcatgccaattttgaaattttaatacgagccttcaaataaac

SEQ ID NO: 370005 - DNA, 690 bp, Homo Sapiens
tactgtgcgagggtcaacaaggtataaaggtaatgtgggcaagggtctgttggtctggtgaaaaagcagccgcttggaaaaaggcaaacatttagactttgtcccaggcctgatcttcccaccaacttagcctcctcctgcctctaccccggctggtgttcacattgacctcgtccaatttttgcctctctaaatctcaagagtcctacacatcttcaccgcagcttcccacacatcattaaaaccagccatctgcacatagactgagaggctgcaaattcaaacacatggaggggccgaatccagaaaacacaaatgtgtgaactgggactgggtgaaagtcaacagaagtagggtttgtaagttaaggcatgaccagaatacacatcccaccacaaacaccttcaaattcagctttccaaacactgttcctagccaaacaaacatgtctgccagcagcattcagtcccaaaaggcaatagtttgggacccctgatttagagccaacaggatcagattcttgatagtgacttgatgagtggacccacccaatacacttgaaaccccaaggggggaaaaaaaactcctccctatttcaaaattaaccctgttcctgaaatgatataggcacggtataatttgtctaagccaacttaatttctcaatcttggaaccctgattctcttgctg

SEQ ID NO: 370006 - DNA, 823 bp, Homo Sapiens
  misc_feature (50)..(81): n is a, c, g, or t
  misc_feature (415)..(416): n is a, c, g, or t
agtcgacggtaccggacatatgcccgggaattcggccattacggccgggnnnnnnnnnnnnnnnnnnnnnnnnnnnnnnnntgcagatatagaaagaacatttccatcatcacagaaacttctcttaattctggtctagaagataaccttagtacttggtagaaattttgacaggctaatgacgaaaagtttgtaaccctgagctttgcatgcccaagaaaaataaggtattcttttttatatatcagaccagagaagctgtattcagcacattttgaaatgctagtttttggctatggccataccaccctaaatgtgccagatcttgtctgaaatgctagtttctgactacaaaaactacaggacatagtagatatgctcagtagagctgcttaaaataattcccttttttttnnctgttgaattctgttacaaaaccaggtctgtgttataatagaaaacacacttatgaataaaaatctttaaaaattataatttgcagaaattagttttatttctagatttctaggtggtattaatgtgatagcattaggtgggaccaagagaactcattggtttgtgtagctttcaattatacagattatttagggaaaattatattcaggcaaaggaattttttgttatgcttatctcttgaaacaaaaatattttatgtcacgattataccatcgtgatttttggtactgggtatattgtttgtgcccagaaaaatctaaaaagatgtgggttgccttctaacagaattaagaacagtcactcctatttttaagaagttcctgaaatttactttccggtccattca

SEQ ID NO: 370007 - DNA, 1386 bp, Homo Sapiens
  misc_feature (707)..(717): n is a, c, g, or t
  misc_feature (1033)..(1033): n is a, c, g, or t
  misc_feature (1129)..(1129): n is a, c, g, or t
  misc_feature (1170)..(1170): n is a, c, g, or t
gagagcgcccgtggcagatgcaagtttttatcctacgcaaaaattacccggggcaggtactctttcgccgagtgtgccactttgtggggcacaaggaaataattggaatgcaaatccaaataccccggggcgttgagggaaacgccgagccccaagggggtttgtaggaaaattccggatttttttcaattaacccaatttttaaaggattagggaagagggcaacatttttccaggttgtgtaaagtaagcgtccaagcgtagagaacctagcatcatgaattcttccaaaatttgttccacaggttgtgtgaaatgggcagttatgaaaatactgttactagaaacatttgtatactctgcacacagcatagactgaatggcgtgattttagcaatgcttgaaaacttttcatggtttagaaactattaaaatgctactgaattcttagagagcagcaggcccacgaatgaaatgatggccaacacttattgtaacacaacactatattttaacaaagatttaaacttctggtaaataactgcagtgcaatgaagagcttgccactttcacaaattagctgcagccttttcctgcactagagagtttggaaggatctgaaaatgacataaattttgtttaaaatccaaatggaaactccgtgtttctgtaatcccgagttcggtaaaagtgtctttttaattacnnnnnnnnnnncacattctaagggcccaattctgtagtccttaatcaagtaaaacttccaaagtttctaccatctatacttccaatacaagttttactcaaaaatggactgctaaattaagtcctatagacagaggtaccataattaagaaaatattttaataaggctcaaaatactaatttcactttgtgtgaagcacacaaatttccaggatgctgagatcaaaacccaattgatgttgaatcctgggttgggaaataactctgggatctcatttcccagtttaatcatagaattaggaatttactaaggaccagaatgaaaacnctaatttcagtttgcttgttgtaataatcagaatttgaacactgtccttaagaagtgaaaagctatttggtgtattacatctcattatccttccanttctgtagtcccggttaaccagctgctatgttaaaataccnctatgtttagggacagacattgcagtaaataccaacacaacattctgacaatgtcaaatttttgcccctatatgaacaacaagactaggttctgcctctgactcactgacagatgtatcagaaagcagaacctatcttactgtgtttatatgtgtagatgagcagagcaagaaagtagaagtgtatatttactgttaacccagaacaaatgtccac

SEQ ID NO: 370008 - DNA, 1170 bp, Homo Sapiens
  misc_feature (286)..(286): n is a, c, g, or t
  misc_feature (1147)..(1147): n is a, c, g, or t
gggggaaagtatgaccctgctgttcgaagtcttcacaatttggctcatctattcctgaatggaacagggggacaaacccatttgtctccaaatgatcctatttttgtcctcctgcacaccttcacagatgcagtctttgatgaatggctgaggagatacaatgctgatatatccacatttccattggaaaatgcccctattggacataatagacaatacaacatggtgccattctggcccccagtcaccaacacagaaatgtttgttactgctccagacaacctgngatacacttatgaaattcaatggccaagtcgggagtttagtgtacctgagataattgccatagcagtagttggcgctttgttactggttgcactcatttttgggactgcttcttatctgattcgtgccagacgcagtatggatgaagctaaccagcctctcctcactgatcagtatcaatgctatgctgaagaatatgaaaaactccagaatcctaatcagtctgtggtctaacaaatgccctactctcttatgcattagtatcacaaaaccacctggttgaatataatagattgagttattaactgtattttctttcactttattaccttctttctaatacaagcatatgttagcattaaagttctaggcatacttttcaaagctgggaagaccctttcagaatcttttcaatgggttttaattttcagttctatttaaaatggtgaatgacactaaactccatgatatttaaggatagtgtggaagatctttggcatgatttaaaggttgaggatgtgaagatataagtggaactaccatgctttgtttacgtgtaagagaaaataatgtttggatactaaaatgtccacgttgagatacatgaaatggggcatttcctaaaatgtttagaaccttaaccccgtttgccatttcatgggatatgtgggcggccggactttaaaagggaaaccacccgtttattgaatttaaaggaaaaaattaatttatggtgggaggtttatgaacacgaatggaagagttttgggagttgaccctcttctgccagaaattgaaccggtctgcccggggtttgtgtagggagcgcaattcccagagataatgaattgaatgtgttggncggtccaagacacgacgggcacc

SEQ ID NO: 370009 - DNA, 482 bp, Homo Sapiens
  misc_feature (41)..(41): n is a, c, g, or t
  misc_feature (444)..(445): n is a, c, g, or t
ggtgtttgatgctgcttaaaacacatattaacctaattgcnaccatatttacaaaatggtaggagaaaagagactgtgtgtgtgtatgtatatgtaaccccattatttactgctgccatctggtttaagaagacctttatcaggtattttcaaaaagttcaaaatgttttcagaagactcttcagatgcattccaaagaatccagctaatcacatcttcaattttgtaatcattgtgttcaccctgttttggcatataatactgatgaaggtttgcttttatggataaattttgatgttctaatcaggacctatatttgcaagacatggttgcttgcaaagctggatttggtcatgagtactgtgaatggaaattgatctcaggacccccaaatcactaagccaaaggaaaaggtcaagccaatgggaactgcactgggcaaanntgactcccattctattcctaaaataagatagctatga

SEQ ID NO: 370010 - DNA, 825 bp, Homo Sapiens
  misc_feature (65)..(329): n is a, c, g, or t
  misc_feature (668)..(684): n is a, c, g, or t
  misc_feature (752)..(769): n is a, c, g, or t
ggagaaggggaccttctccatttcctgtccacccccagggttggaggtgccagtgggtgcaaatnnnnnnnnnnnnnnnnnnnnnnnnnnnnnnnnnnnnnnnnnnnnnnnnnnnnnnnnnnnnnnnnnnnnnnnnnnnnnnnnnnnnnnnnnnnnnnnnnnnnnnnnnnnnnnnnnnnnnnnnnnnnnnnnnnnnnnnnnnnnnnnnnnnnnnnnnnnnnnnnnnnnnnnnnnnnnnnnnnnnnnnnnnnnnnnnnnnnnnnnnnnnnnnnnnnnnnnnnnnnnnnnnnnnnnnnnnnnnnnnnnnnnnnnnnnnnnnnnnnnnnnnnttctaaaatttacatttctgagttaagaatgcttaaaatattataaaaatagaagcacaattcattatgtgtttcattaattacctttattaaaaacaacaaaattatattacaataggacaaaaaatgtttaagcaaatgaaaatgaaaccatgacatacccaaactcaggaggaggcaacaaaggcagtgctaaagggaagcttacagccgcagatgcttaaattaaaaagaagaaagatctcaaagccatgctaaagggaagcttatagctgcaggtgattaaattaaaaagaagaaagatctcaaatcaataacctaacattacacctaaagggnnnnnnnnnnnnnnnnnctaatgacaaaccaagcaaaaggaagaaaataacagattagaacagagataagcagaatgagaccagnnnnnnnnnnnnnnnnnnccactgagtttgtttttttaaagatcaataaaaattttaaaactcacagctatatt

SEQ ID NO: 370011 - DNA, 820 bp, Homo Sapiens
  misc_feature (577)..(613): n is a, c, g, or t
ggggaatgggttgtgggtgttggttcctttactgggtcatctggtaaactgcaaggtttctgctgtgacattgaaggcagacatcaaccctctaagacatttttttcctatcctctgggaatattactttttggacaatcttggtccattggtaagctcatgggaatttgtcagagtttttttgtttcttttggctcatgtttagcatcgattggcagagtgtttggagtcatcctcagaaaggaattacagtggttcggaggtgttttctgtagtgggccctcatttgggaattggcttgaaaaaaatgtaagttcacttgcttccaggatggtattaagattgctttttttgatagttggcgtgtgtctatcaggtaagggctgtcatttagagaatataaagtggtaggagaaactaaaagtactgttcttagtttttattttaatcttattcatatacaggtgcctttgtaatttagcaaatatcatttttggtgtacagtataaatttcctttttataaagatctgagtttttaactttgctgtcactttctgtgtttcatgacttaaatannnnnnnnnnnnnnnnnnnnnnnnnnnnnnnnnnnnnattctaattcccaattgctaatcccagcattttgtgggatagcctgccaaactgccaatataatgggccaagggttgcttccgggtgaattgggttttacttggccttccccaacaaaacctgaatcctcccaaggaaaaaataccaccctggtttggttttgaaggccttttccccctaaaacaagtctccccagaaaaccttcct

SEQ ID NO: 370012 - DNA, 328 bp, Homo Sapiens
  misc_feature (69)..(69): n is a, c, g, or t
  misc_feature (268)..(268): n is a, c, g, or t
  misc_feature (270)..(270): n is a, c, g, or t
  misc_feature (289)..(289): n is a, c, g, or t
agaaaagatactggaggtaatataatacagtccttcagctttacagatagtgaaaactgaaggccaganaaggaactaaaactcagcagttcataggggtagagggaaataacctgagaaagccgagttaaatcttaaaatttttactataaggatagagatgatacaagtgaactctgcaaaatagttttgtgaaattaaacaaaaaaatctactcttaatgtatattatttcatatttgtttaacaaaagcagcttgatgcctttntnctggattatacattaagancaagcattattttaattatgtagtaacatttactatgac

SEQ ID NO: 370013 - DNA, 513 bp, Homo Sapiens
gggactcactttagggacacactgagtatcttagagattgttttcctctgttctcccaggcctatgacatggagcacactttctacagcaatggagagaagaagaagatttacatggaaattgatcctgtgaccagaactgaaatattcagaagcggaaatggcactgatgaaacattggaagtacacgactttaaaaacggatacactggcatctacttcgtgggtcttcaaaaatgttttatcaaaactcagattaaagtgattcctgaattttctgaaccagaagaggaaatagatgagaatgaagaaattaccacaactttctttgaacagtcagtgatttgggtcccagcagaaaagcctattgaaaaccgagattttcttaaaaattccaaaattctggagatttgtgataacgtgaccatgtattggatcaatcccactctaatatcagtttctgagttacaagactttgaggaggagggagaagatcttcactttcctgccaacg

SEQ ID NO: 370014 - DNA, 481 bp, Homo Sapiens
cccacatggggccacgtgttggcagtggaatcagcctgtgcaggctggggatctcaggctgatcagtaggggccagctttggagccagccaagctgaatcccacactccaggtctgtgctcaagagaccagatggtgtatttccaaatgggcctctctggtatgggcaataggcaagctcctggggtctggttatgtggaagattcttagtggatgttccgcctggttagctggttctcttcagagaatataaagtgaatgcctttaggggtagctctgaaagagaaacccaacaacttcattcctagccatgaaagtagcacgatcatattgtactgtattgttattgtaaaatgactatttgccatgtcatgagtaggtagatgttttgccacaaatatgaatgtgtttgttgtttcctgactttaagcaatgaagattgagacaataaatagcactcagagaatgaagcattgatgtt

SEQ ID NO: 370015 - DNA, 427 bp, Homo Sapiens
tagcaccttttcatatacctgtttgccatttgtatgtcttcttttgagaaatgtctattcaaatcttttattaattttaaatcggattattagatttatttcctattgagttgtatgagactccttatatttttttgtgaattatactttgtcagatggaaaacttgcagatatatattattcttccactctgtaggttgtctcttcactttgtagattgtttcctttgctgtgtagaagcgtattaacttgatgtgatcccatttgtccatttatgctttggttccctgtgcttgtagggtattactcgagaaatctttacccagtgcaatgtcctggagagctttctcagtgttttctttagtagtttcatgtttgaagtcatagatttaagtctatgatccatttttgatttgatttttgcata

SEQ ID NO: 370016 - DNA, 862 bp, Homo Sapiens
ggggttgaaagtgcaacattactgtacttagaaggggcttggtttatttttagatatttaagctatcatcaatttttacaccaagggttaataataagagagatttttggttgctcatttatggagagacaaagaacagcatggcataaacaaacatcccagaaataaatgaaaagttttaagtgataaaattgtgttttctatgaaccagtgttgtacatgaaccaacattgtgtttcttagctctgacctgtacagtgaggaacctgtcaggacccctagccttggcactggaaatgacaaagttctcctattactaaattcccatgccttcccttttctaacttaagtaaattgaaattggcagggacaaaggatttatggttggaaaaacttaaagttcagccgaaaccccttattcactggggaaatccggggtgccccaaaatttcttagcggggtgcgattaatgaaataaccccttagaaggacaccacgggctgcttttcccttaccgtttagcgaaacccccttttccgttgtaaataaaagaataattttatacctttgggcggaaaaccaaactaatgcttttatacaaacgagaacccaactaaagaatgtcccatatcccaaaaaccacacccctcttatattacgccgccttaaacgttaaaaaaacaagggcggaatcatccctcgttcctgacacaataagtgagcccataccccacaaatacccccttctatctccacaccctgtcgaatttcttccccggcataagaagagatatctcaacgccggatactaaacgctatcgctctccaacatcataccttttcctcaatcctcctaccaaaa

SEQ ID NO: 370017 - DNA, 761 bp, Homo Sapiens
ggaaatttccccaaaaggccccctctgtgtgtcatgggtccacaggtggttgctcccatatggggaaaaaccccgctaatgggatccacgttgttcacctttacccccaaatgggggcccccgccccgccaaaaacgaaatggtttttaaaaaggtttttttaaggggcccgtggcggccccacaaaggttttgttatttcttattgactatacaactgggataagaatcccagttgcacaataaataccatttgggtttttatttcttcaaaacaggaaaacaaaaaatgaagtagatgacaatgagaaaggagggaaaacatttcatacagaatatgctgtatcactagtgattaaatcagaaacaattagaaactttatttgtctgtgtcagtaatatgtaccatttataaggaagagcacaattagtgcatttcccgccccccccataagctgtgcacaatacacacaaaataaaataattttacacaactataataataacaatcctgaacaaccagaatcatagtttcctagaacatgaaaatttaaaaagcaaacaaaccaaaaagctttcaaattgaaatcgaccaatgcaagaatttcttaaagttctctgtgaaaatttgctacaggattattgacattcctaatacagctaaaaaatgagtgcaaaaagttttctaatgtttaaacaacttatattccttgaatatatttacttggtgcttctaggctagctttccatttagcaattctc

SEQ ID NO: 370018 - DNA, 697 bp, Homo Sapiens
gggggggcgtgggtgatccccaaataagagggggaaaagggggatgttatgggcgccagggagtaaagaacatttttttgtagaattggtcaaataagtggacttcggtattttagacacaaaggaccccatttttcgccagggtgtttttaaataaccggataatcaaatttggggtattttatccccatcataaattctattcccccttaacttgcaaaggttttaatttttggacaaaaaatattacaggttttccacccaccataacccgcacattgatggttccaaatggatagagtcagcagccggggctaatagccggctcgaaaatgggtttttggtgttgggagaccagattagaatgcccaaagcagttagtatgtgcccaagcaaaaacctggaaaaatatttatttctgcttttcagacttgtattggcctttgatttgtgccgagtacaggatgacattaaaaacacaggctcttgttgccctttgacattctacatagcccttccacagtccgcttctaaggaaacagttcttttcctatacttttactacctacacccagaagcagcacatctgtttttaaattcgaaatttcagaattatattatcaaatattaatttttctatgtaattctgaaacccccccctcaccaattatggcttggattttgaaagctgactttg

SEQ ID NO: 370019 - DNA, 921 bp, Homo Sapiens
gggtatttgactttatcatttctattgaatgtctgagtgatacatagagtagtaattttagacatttaagtaactaaagatttatatagctttagtatgtaagctgttatatttaaaaatgcttgaaaaaataagagttgttctccagaaattattcattttcctatgattagcacagctgagaccttacaggtgcactgctattgagtattctcccaaccttttaaattttataggtctaattgttggtaaggtattgtggaaggagttctaagacttgctcctgctttaattgacgttgcaataataatcataataaaattgttggtcaaagagtagcacaggagtggttttggtagtgaagaaaataaaaagaaatctgaaggtagagatgaatggaatcagcaaaagtgaaattggttagattagtaagttgtttttctactgggacactcatggatgatactgacatatactccattctcccttgctaatatctagatttttttagtacctctaatactaagagatttttaatttctttgctatacttctgtccttttcttctctattcatgctcaaaagaaagtaagtgctataactactcttttttgtttgcttaaaaaatgactcatgaaacttaaggtacttaagtatggacactccttgacaactaataccatagcggagaactactgagttaaagggtacccagtgcaaatagagggctgaaaacaaggaaggtcagtcagtgaatgggaaagaaatatgacaaagccctaggaaagggagctcctctagcatcaaactgtctgcatgtcgagtctcagaaaaacaaggattcgtcagtcaacccctttctgcatgcacagtggatttagggtaaagtttatgttaccctgtctttggccgagcgcagtg

SEQ ID NO: 370020 - DNA, 1448 bp, Homo Sapiens
  misc_feature (618)..(633): n is a, c, g, or t
  misc_feature (1327)..(1335): n is a, c, g, or t
ggcctgggtggcgaattcggcacgaggatcctgttctagttgcctgttaagcaaaatctgccctcccaattgaaaaagccaaagagaattgttagagggaaaagcatgtagccattgcagtctgcattgcagccagcgttgtccagagagtacacgctcagcacttagcttctactgtgtgttgtggtctggtgagtgttgtttcccctgagcgctctattatttatttatttattatcaatcagtgaccctgaccacatagtgtgataggtgcagcattccttccctgtgggaaagaattaaagatggttccatttcctaggctacagacaggaatggggctctaaatggttttcatagactggctgttaaaggccaaaaattttggtaaatcaatgctatattatgctcttgaactattaaaacagccataattattgtcccaagatagaatatagtcctttttcaaagatgattatacgtggctaggtgacagacattaatgactgactctggagagtaagtcatacctgcactctgtggacttgatggttctttttctagagcaaacagagcgtggcattttgttttgacttgttcttccttggggtcaaattnnnnnnnnnnnnnnnnaatttttgtttgggcgaccaagatctaataattaaaacccaggtggaccatggattcagacctgcctttttatgtttttgactcttaggttcatcgtggcccagactttcttcacatatttcgtgaaggtaagatattctgtgtgcgcttggcctccttttcacgcatatttcattgcctctttgatgagtggttacgaagacgttaaactacctttttgttccctggggtaataggtcagtaactatgagcgccgtctctctccatgtgagcttgtgttaatagacacttttatggtagagttgggatggggccaccaccttaaaatgagtgagcagacaaggccaggcaagccaaaggctttaagacaccatgattttcttgttttgttttaattgggaagggaagtataaggaagagctcagagggagtttcatacctggaattgttggacttaattgacactttgcaaatacttttagtataaaggtttaattctatttaaaaagaagatccattaaatcaagctcttaactcatgggactatttgcaacacttctttgtaaatatcattttgtttgttaggttattggcaaaacagtttcaaggttcacttccctcccttgaaccaggtccaggtcattttgctttggggtagattaaagtcagaactctaaaagttgagcaactttgnnnnnnnnngaattgatttagcactaacccaccattgcatcttaaggacggcatgacgtgataatgatggacttgtgtgaggttttgatttttcaattaaactttttgttatcacaggtaaa

SEQ ID NO: 370021 - DNA, 589 bp, Homo Sapiens
  misc_feature (260)..(260): n is a, c, g, or t
taaatgctgctgtttgtttcaagtggtgaatgtgttgttaaaaattggctgtttgctttcattttggccaataagtaatcaagtttgtagaaaatgttagcattctgactacttagcatctgtagtaatttctctatgtatagggataaattttttagtgggccagagatcctgttctagttgcctgtgaagcaaaatctgccctcccaattgaaaaagccaaagagaattgttagagggaaaagcatgtagccattgcnagtctgcattgcagccagcgttgtccagagagtacacgctcagcacttagcttctactgtgtgttgtgggtctgggtgagtgttgtttcccctgaggcgctctatttatttatttattatcaatcaatcagtgaccctgaccacatagtgtgataggtgcagcattcttccctgtgggaaagaattaaagatggttccatttcctaggctacagacaggaatggggctctaaatggttttcatagactggctgttaaaggccaaaaattttggtaaatcaatgctatattatgctcttgaactattaaaacagccataattattgtccc

SEQ ID NO: 370022 - DNA, 969 bp, Homo Sapiens
  misc_feature (723)..(723): n is a, c, g, or t
  misc_feature (805)..(805): n is a, c, g, or t
  misc_feature (814)..(814): n is a, c, g, or t
  misc_feature (857)..(857): n is a, c, g, or t
  misc_feature (868)..(868): n is a, c, g, or t
  misc_feature (883)..(883): n is a, c, g, or t
  misc_feature (942)..(942): n is a, c, g, or t
gggggccataacactgaaaagtgaaagaacctggtgggcagctatctttggctactgataaccagcagaaatgtctgttaattctgattttctcaatttgaagggatcagctacactgttaaattttggaaagccactacctacttccatcaagtaacttaggtttcgaaatatgggttcaacgcacctcccttattcaaaatgtcaaaatagattattataatgtataaagtaagaattgacaaaatatgattcttgggttgattggtcatttagaaactagccaaaagtgagacttttaatgtagaacatttttcagaaatgggtacaaagaaaaatgcatattactgtatatttcagagtgtttatgtgaaccttgtatttaattgagagtcccatgtacgttctgcagcctttttgctgcttctatcatctcaagtttgtgtagtacaaataaggcctttgggattcttaatgacatttatgttaaaatgttctcttctctttaaacaccgttttccaatccacctgtcagggagtccaaatcgtgtctgtgttgatgatgctatactttgtagctagaaaaacaattttagtgttgtgggctctgtattcagacttcctttttacaagaccgatgggcagtgatagattattttatcatatttaatgcatgggaaaatagtgtgctgtaggaacctattaaaagtataactcagtganttgggtctgagttttaaatgagatatttcaaaattggcttgccactgtaaaagcgactaaataataatatgatactgttctntatgatctngtcatgtttcactgatatgtttggggtcttcactatgtaaaanatgtcaaaatngtaatgagcaagcangtacaagtagtcgtaaatcaaaggttttaaacaggactgcattttccaattagggaaangctgtttggccagatagcatccatggc

SEQ ID NO: 370023 - DNA, 501 bp, Homo Sapiens
tttgaggatccccagactaacccacaaagaatccagaagacctcagatggtaaaggacagaggtctacgtctactgctgttagtgctcaggtatccatcctgttttccctaatctcctgattctgatccaagagtctttgagacctatgtcctaggccatcctttcatctagaaatggaaaccatggctgtggcaccaggcatggtcaaccctgcagtgattcagctgcacaaaggggtagtccagagcttagatagctgtctgatgtggctaggacacaactgtcattttatggaataagttaaaacaacacattagtatcacagcaaacaagaaactgagatcacttatatatctatgtaatagttaaactgtctataagtatttttctccagaaactgaaaataccatagacataattttattaatcctcacaacacatctgtgaggtagtatggggttaggtctggggtcctctagacgcccggagcacgctgccgc

SEQ ID NO: 370024 - DNA, 423 bp, Homo Sapiens
agaactagtctttattacatttgcttgtcacttaacttgcttatagtttataattgcacagggaaaaaaaattaacatcaaaaagttgcagttgattttaccccaacaggcatctgtccactttaaattctacaaacattctttcttagggaaaaaatctattttttaaagtttactaaaattcatgcagaatttactaactactttttaaaaagcaagagcttcatcatggtgttggaaaccaaagacaaaatttcaattaaggacagtctgatatttatatgtttccaaaaataaaactgcattataaaatcaataagttaatgaattgaaagagacacactttgcctaagataaaaaattcttaatttaaaaatcattatagagtgcaatgaaagaaacaagtaagactatataatcttt

SEQ ID NO: 370025 - DNA, 457 bp, Homo Sapiens
  misc_feature (150)..(161): n is a, c, g, or t
ggctacgacagtgatataagatagacagctagtaaggtaaacttttcaaaggcaagagaggaagatatacaagaaattgaaagaataattaagtcagtaagaggtaatattcagttttggcaaactcctctgacttgagttgaaaatacnnnnnnnnnnnnaagagtaaaaaccaaataactaattctaattggcaaaaaaaggtaaataaataaacatcctaagtagctgctgaaatttccgttgtgtcttatagtttctttaggtctgtgttcctaagatgcttaaaatttttatcatgaaaaatcctattttctctatacccttcctgtactgttctattttggaaccagagaatcaataactggcttggtaatgagctcattgtccttaacttttgctttattgattcacaatacacttactgaaatgtaataaactattcataaacttgcaa

SEQ ID NO: 370026 - DNA, 981 bp, Homo Sapiens
tgggtggcgaattcggcacgaggcgatctcggactaaggatgcggtcccgggttctgtggggcgctgcccggtggctctggccccgccgggccgttggcccagcccgccggcccctgagctccggtagcccgccgctggaggagctgttcacccggggcgggcccttgcggaccttcctcgagcgccaggcggggtctgaagcccatttgaaggtcaggaggcccgagttgctggcggtgatcaaactgctgaacgagaaggagcgggagctgcgggagactgagcacttgctgcacgatgagaatgaagatttaaggaaacttgcagagaatgaaatcactttgtgtcaaaaagaaataactcagctgaagcatcagattatcttacttttggttccctcagaagaaacagatgaaaatgatttgatcctggaagtaactgcaggagttggaggtctggaggcaatgttgtttacatcagagatatttgatatgtatcagcaatatgctgcatttaaaagatggcattttgaaaccctggaatattttccaagtgaactaggtggccttagacatgcatctgccagcattgggggttcagaagcctataggcacatgaaatttgaaggaggtgttcacagagtacaaagagtgccaaagacagaaaagcaaggccgcgtccatactagcaccatgactgtagcaatattaccccagcctactgagattaatctggtgattaatccgaaagatttgagaattgacacctaaccgagccagtggagctggggggccagcatgtaaatacccacggaacagggcctgtcccggaataggttcatccttcccaccagatttggaaaggtccaggggaagacccccgagaaaatttaaggaaccctctttatttttgcccaccagaaaaccgggggttccccaggattcccccggaaacttaacaccaatttcacccccttccat

SEQ ID NO: 370027 - DNA, 1109 bp, Homo Sapiens
  misc_feature (35)..(35): n is a, c, g, or t
  misc_feature (121)..(121): n is a, c, g, or t
agggttgtagactttaggtactaaagaaaaccccnggatgaaggcaccctaatttattcaacattagccagtaaataagtgcttgatgattgttcagttttgtgcaacttagagaagtttntaagaaaatgtatcatattactctgtctgacccctttttctccccttagaaataaatatataaaatcaagacaatcaagggtaagcactctgccgctcagcagtcaaagaggaatatttttcaaggcagtttaaagattatttggagttttcttaatatgcaagattatccctttggaatacttactttcttatcatacataatgcaatagtttttacgcagttttttccctaccatcaaaatgttggattgtggattaacctgtaacattctccctccgtgtaacaatcctctcattttagaattaactgtgcttatcagcatttttaaaaaatctctatattctaacatagtgtttaaaataacttcatctatgatttatatttgctttaaataaagctacagttgatcagatttaaagaactgtatgacctgttgcctttgaagtgtaactttttaactttatggaataattttgaaaatgaatcaattcttcacagatccaaacctgcctaggccagtcaccactgcaaaacaaatgcctccatcacatcagtattaatagctgttgcttgccattaacatttcctgttcttttcagatattggtttatgcaaactggtattaatttttaaggttgaaagtgaatctacaaataaggagtggttaagtatgcttaatcactacagggttttttaaacttctggtttatttcacagcaaataaaacctttcgtttggtagaaaaagaaagtagttgcattctactatatcatgattttgtatacacacacactgtatatacatacaaaatttctttctttggtggtttagttagggaaaaaatatgaaaatgtgaacactgtttgcaaagaaatggtaaaatagtggtcaagagtagcactgtctgtgtgctttattcacttaatgccatttaaacgatcacatgtcacccgaaagaagttttagccagagttccaaataacccc

SEQ ID NO: 370028 - DNA, 664 bp, Homo Sapiens
ggatatgaggacggccgctgagccataatggagatatcaatgcctccacctcagatatatgtagaaaaaactctggccattatcaaaccagatattgttgacaaagaggaggagatacaagatattattcttagatccggattcaccattgttcagagaagaaaactacgcctcagccctgagcaatgtagtaacttttatgtggaaaagtatggaaaaatgtttttccccaacttaacagcttacatgagttctggaccacttgtcgccatgatattagctagacataaagccatctcttattggttagaacttttgggaccaaataatagcttagtagcgaaggagacacatccagacagtctgagggcaatttatggcacagatgacctaaggaatgcacttcatgggagtaatgactttgctgctgcggaaagagaaatacgttttatgtttcctgaagtgattgttgagcccattccaattggacaagctgctaaggactatttaaatttacatataatgccaactctgcttgaaggactcacagagctttgtaagcaaaaaccagcagatcctttgatttggctagctgattggctgctgaaaaataatcctaacaaacccaaactttgtcaccatccaattgtagaagaaccttatt

SEQ ID NO: 370029 - DNA, 427 bp, Homo Sapiens
  misc_feature (15)..(15): n is a, c, g, or t
  misc_feature (71)..(71): n is a, c, g, or t
gggaaacagggtttncccccttggcctgggtggaagtctcctgaaaatgttaagaaagaaaacgctgaaanccttgattgaatagttcctgcccccttgtttccccggggcttatctgattatgggacgagggtagaaagtaagaagcacttttgaatttgtggggtagaacttcaacaataagtcagttcctaagtgtgtcgccctggggactagtgagaaagctactcttctccctcttccctctttctccccatggccccactgcagaattaaagaaggaagaagggaaggcggaggagtctataagaaggaatcatgatttctatttagcagattggatgggcaggtggagaatgcctgggggtagaaatgttagatcttgcaacatcagatccttggaataaagaagcctctctgtgctgcc

SEQ ID NO: 370030 - DNA, 176 bp, Homo Sapiens
caaggttcatgaaaggaggaaaacattaattctttctgcctttgctgatataatccacatagtaataatttaagctataatttatttttaaaatgagtgcctcttgggaagcttcttttctattctaacagttccctgttaaaatgaaaatcttaggccagtgcagtggctcacac

SEQ ID NO: 370031 - DNA, 817 bp, Homo Sapiens
  misc_feature (416)..(690): n is a, c, g, or t
  misc_feature (777)..(777): n is a, c, g, or t
  misc_feature (783)..(783): n is a, c, g, or t
gggcaagcatccacttaatgttgaattgctcaaagtggtcccttgagttcaggaataggacaagaatgtctcttctcactagttgtactctaggtcccagtcgatgcagtaaggtaagaaaaagaaatgtatatggattgggaaagaagaaataaaactaccatcattcacagatgacatgcttgtgtatgcagaaaattctaaggaagctacagattaaaattattaagagattagcaaagtcagtgtacaatatcaacatcaaaagaccagttatatttctatataccatcaacaagcccttagaaaatgaaatttaaaccaatatttaatttatagtagtatacacaattaccttgaactaaatgtaataatagacgtacaaaacctcaagcaaaagttatgaagctttgttnnnnnnnnnnnnnnnnnnnnnnnnnnnnnnnnnnnnnnnnnnnnnnnnnnnnnnnnnnnnnnnnnnnnnnnnnnnnnnnnnnnnnnnnnnnnnnnnnnnnnnnnnnnnnnnnnnnnnnnnnnnnnnnnnnnnnnnnnnnnnnnnnnnnnnnnnnnnnnnnnnnnnnnnnnnnnnnnnnnnnnnnnnnnnnnnnnnnnnnnnnnnnnnnnnnnnnnnnnnnnnnnnnnnnnnnnnnnnnnnnnnnnnnnnnnnnnnnnnnnnnnnnnnnnnnnnnntttcttgtaaagtcgtagaatgggaaagctggtaacacaatactgagaatgatgaaccgatgccgcatgcaaccaggttgaatctcngaagcnttattggtaagggcatgagctggatatagaaggt

SEQ ID NO: 370032 - DNA, 783 bp, Homo Sapiens
  misc_feature (617)..(629): n is a, c, g, or t
ggaattggtacacctttgatatacagtttggtggtatctagtgtagttgaaaatatacacaatctatgagccagcaattcctctcctacatatataccttgtgtgtgcacatatgtaccaggagacattaaaaacatgttcttagcaacatttttcataattgtccccaactggaaacagtccaaatgtccaccgacagtaaaaggataatctcttgtaaagtcgtagaatggaaagctgtaacacaatactgagaatgatgaaccgatgccgcatgcaaccaggttgaatctcagaagcataattgtaagggcaatgagctggatatagaaggatatatgcattatagttctatttatataaagctccagaaacagtagtgtttgggcatctatatttgagtggtaaagctataaaggaaagtaagaaagcaacagctaaaactgtcatgagagtgttttgttttgttttggagagaggaaagaggttgtgattgggcaaggacttatgggaatttctggagttctgatctgttctgtttcttgatctttatggtgatttgctttataataatttgttaagctgtaaatttatattttatgcactttcctctgctnnnnnnnnnnnnngcttaaagagtgttttagaatgtggaaattttaagataagatctatctcagggcttgttgtaagaatgaaatgaagtataaagccatgtagagcttgtagaatatgcctggcactttgtaagaccttaataaatgttaactatctaaacacaat

SEQ ID NO: 370033 - DNA, 1211 bp, Homo Sapiens
  misc_feature (178)..(187): n is a, c, g, or t
ggatgcagggccttgggccataacttacatttctctcaatttgattagctttgagtcacaattaaggggaagcaaaaacatcttgaaaagactgctaggaaggaaattaatatcagtcatccagaagtacacgtttctgtattttaaaaaatactttgatgcatttatttttaggtgnnnnnnnnnnccccttaaaaaacttgaagtgatatgcagcagtaatctatttgttttgcattgttcttggtgttttgtgtttcccagatccctcaagctttctcagctgttgcgaattatgtgtatctgtgtgtgtgctaagtacagtctctttaccaaagggcactgaaacacacaattgactggacaggtccacgcgccatgacaaaactataatcaagttattaaaactaaagaggagtgggaaaggaatgccttggtaagtaaaaaggcatctatatttaataacttttatccagatggcaacatatttgcaaaatttgcccagatcctattacaatactaaaaatagaaaatttcacctccatattcctgaagtgtaatttcattagactagttttagtttaaaaagaccttcttcagattggaccaaataatacttataagatcagcagaatgttgaatattagctcactggggtggggagaagccactaccattttttaggtgatggggatgccactgagttgcaacggctagaccttttcagggtggttgtgtccatgtttgcctgattggatgcttattcactttgtgttttcttttgttttattttgtccaattttgtctttagctgtgtttattaacttctccggtcttggttgttttaatgctcttggcccagtgggtgtcaagaacactggcttaattcaagtcagttgatttttttctattaaaactgttgttaaaatattttttaaaacaaaaacattatttgtgccctcttttatatatgtcaaagggacactgtcaagtattcatttgtagatcgggttataaaatttctgtggtcatatagtatcctttaacctctagttttccatacatcctttgtggttctcatttatgttccttgaacccatttatgtcgcaaggcacaatcactaaagactttgtactttcacagtctgttaatgtggtagcacctgtaactggtcctggtcctgtcaaaggattgaatggcttatagtccg

SEQ ID NO: 370034 - DNA, 737 bp, Homo Sapiens
gttccattccagggccccaacgtaaacccacaattgggcaggctgccactgaaggttcccgggtaggaagacacagtgtccaggaaaggggaaccaggaatcacctctggttgacttcctgtgccaatgccaaagtctacagaagaagctgatgatatgagtgctgtacacacagaggtagcatctgtcacaacagtcttgtaagcactacaattctcagaagctgagggacttagtggtgttagaacagcactattaccaccgaaagtaaagaactctggacgtttagaaacaaccttcaatccagtaagtggacatttgctgacattgacaaattctacatatgcttttcggatttctccacagagaagccctgtaggaaaatgtataaagaacacctccaacagtggcatttcttctgtgattatgggatctaaacgtcgatcagggccatatttaacagatgttttctcttcttttgtgttgttaagtcgaggacccttgaatttctaaatcctgcttccctcggactgacatactcaaggaatattttcctgtgtgacatccgggaagagcaccaatgccatctactgtcatagagccctgaatagtgccaagattataaacaactcccagaatatgcagctcccctatgtgatggggaaagagctttagtcttgccacttttgattcttcgccattaattaagaactctgaaataacttcagctccaatcc

SEQ ID NO: 370035 - DNA, 1007 bp, Homo Sapiens
  misc_feature (332)..(332): n is a, c, g, or t
  misc_feature (997)..(997): n is a, c, g, or t
ggtccaaaccacctatctgcacactccccaattttctctttgaggatggtgaaagctttggacaaggtcgagatagaagctcgcttttagatgataccactgtgacattgtcgttatgccagctaagaaatagattgaaagatgttggtggagaagcattttacccattacttgaagatgaccagtctaatttacctcattcaaacagcaataatgagttgtctgcagctgccacgctccctttaatcatcagagagaaggatacagagtaccaactaaatagaattattctcttcgacaggctgctaaaggcttatccatataaaaaaaanccaaatctggaaagaagcaagagttgacattcctcctcttatgagaggtttaacctgggctgctcttctgggagttgagggagctattcatgccaagtacgatgcaattgataaagacactccaattcctacagatagacaaattgaagtggatattcctcgctgtcatcagtacgatgaactgttatcatcaccagaaggtcatgcaaaatttaggcgtgtattaaaagcctgggtagtgtctcatcctgatcttgtgtattggcaaggtcttgactcactttgtgctccattcctatatctaaacttcaataatgaagccttggcttatgcatgtatgtctgcttttattcccaaatacctgtataacttcttcttaaaagacaactcacatgtaatacaagagtatctgactgtcttctctcagatgattgcatttcatgatccagagctgagtaatcatctcaatgagattggtttcattccagatctctatgccatcccttggtttcttaccatgtttactcatgtatttccactacacaaaattttccacctctggggataccttactacttggggaattcctctttcccattctgtattgggagtaggcaattcttcaggcagctgcggggaccggcttttgggctaatggctttaanggggtgtatt

SEQ ID NO: 370036 - DNA, 493 bp, Homo Sapiens
ggcagtatgtaattagaaagccctagggtaacctaaaaccctgtagaacgcagagctgttaaatctgttactcaagctcacattttcgtatgctctaatgtttcctattccaaaattgcaaaagctggagagtgtggcaagcatcttgcctattcctgcttaaagcaaccttatattgctctcaaataaaattctaatggaaagttctgagagctatgacaagtctttggtgatggtagaaaatgaaaaatgactgcaatcaactaaggaattggcttacttcattccaaaaccaaagaacaagtattcaccaaaaaagggacctgggagaatctaggtaattttttttcctacagactgtattttttaaattaaatctaaacaaccttttattttattcatttgttttcaatgaatgaccagtaggtttagctgagcgaggacacaaatttgtaaggctcttcaaagggaactttacatcagtttctttatg

SEQ ID NO: 370037 - DNA, 740 bp, Homo Sapiens
ggggaaatagtgaattgagatgatttgattgagtggattcacaactaattaactggtcacagattcaactgttgaataattttgtaaaagaggccgggtttatgaattgaggtcagtttgaaaacaaaaagaatgatgtcaacattttgtttcttactttgtgtgctcttttcaacatatagatgacaaactttgacatgatgtttagaaaacttgtgagtaaaaggataggcgatacgaatatttctaaaattcaaaatcagaagcttttaggttcataaatcatatattttgaaaaatgagcatgtttggaaagaattatatatacatggtttaaaattctggcggctcttaagaatatgctatgaagactcctttctgttccctagttatttactttctccacccccaaagaaactaatgttattgctttcttgtgtgttcttcaggaaatgttttatgcatctccaagtaaacacacatatatcccctgtctttaaaagaaggaggaaaacatttgaacattgcatttactttatttccattaactgtatcttggagatgtttccatgtcagtatatataaagggcattctcattagtttggatgcttgcctaatattccatttgtatgggatgtactggtaatttttggagttttttaaaacccaggggtccttaaaaccagggaaatttagctttgccttttaactttttggttttaaaatgcctacctttcac

SEQ ID NO: 370038 - DNA, 729 bp, Homo Sapiens
  misc_feature (386)..(395): n is a, c, g, or t
gggataggaacgtataagacaaaggttatcttaggagcaagttaaatactttgggaaactatttttttgtaagtctaagtgataaaggtatcttctggaaataactgagtaacacattgagaacatttcgacaaaattgaaagtggaaatgctctggggcaacatatttttttgcacctatcactgtttgaaagagaagctatagcaaatggatgactgggtgagtcactggaatgatggatcttaggggcccaggggtagcagagtgggaaaggctgcacccatgctctggagggtaggaggattgttatatgggactcacagcacaaacacgtgtggatgcagtgattgtcaaatgatccaagggcatgtcttgttgctcctannnnnnnnnncctgtctgaatggaaaacagcaatttcctccattcctggttattgcagatgatctgataatttaacctgagagccgttatttcattttattttattttaaaactcaaaagaagtatactgttctcatcttaaacagtgagatgtctggtctttaatattactctttcttaacatacaataagctagcagtgtgggtgatgacatgtaggatacctcctaatgtgccataaaatcaaaggcatgcattttaaaaatgttttcgtgccccaggaaatcccaaactttttatagtttgtttgagccagcccatctttcataatgggcctggtttcta

SEQ ID NO: 370039 - DNA, 784 bp, Homo Sapiens
  misc_feature (575)..(575): n is a, c, g, or t
ggagttgacagcttaatggaccatcataactgataaactctagtgattccatttgtgtggcattacgctaagccacatgcatacatcgacactaatcctttccactgttatgaaacataaggcctatcgctgagtcctcttaacagaggaggaagctcagacttagatcccataagtggctcacctccttaagttcccacagttggagttagaagaatagcaggcaagacaaaaggacctcagaccaaaacacaactgatcgaggctgccccatctctcctgggatttttataaagggcccctcaagtaccaaattcctgtaaaacacagggataataattagaagcctggacagttccataaagaaggggagagggaggagagggtgttttcagcagtattgctctcacttattccatgtggattattatccagaccctgagatttctgcctgccttccacttttcagacccttcacgaatggacccaactattctagccaaagggttacatttaatcaaaatgccagtttgaaatttttttaaaaaaattaactaaaaattgggaattcattnttcaaggccttggcttttttaagcttggccaagtgaaattaccttttttggcaaggtaaatggggtttgcaacgtttaatttttcggccaaaatacttttatcttgaacaaccctaaccaatttttaataaaacggcccccgggccttctggggggtcagaaaaataccaaattgggcctttatacaaccattcgggaacccttcccct

SEQ ID NO: 370040 - DNA, 962 bp, Homo Sapiens
  misc_feature (295)..(295): n is a, c, g, or t
gggaattcccaccctgaggtgggttacatacctgcccaatggccaaaggaaccgccttgtgagaccaaattgctgacctgggtcagtcgcatgtgctttatggtgtggtgcatctttgggagatcatcgccatattttacttttgagagtctttaaagaggaaggggagtggagggaaccctgagctaggcttcaggaggcccgcgtcctacgcaggctctgccacaaggggttagaccccaggtccgacgcttgaccttcctgggcctcaagtgccctcccctatcaaatgaangggatggacagcatgacctctgggtgtctctccaactcaccagtgcctaaaaagggtatcagattctatctgtgacttcataactgagaattttatgataaattattttttaacctatttttttccatgtgggaaaccttggagtgatactaaatcctggtaaaagtaaggaggtcctccctaatggattaattttcccgaaaaaaggaattgtggggtgaccgcccttttatatttccgtacctggcacttttggtttttttcccaggggaaaaaccaagtggtcctttttctacccttgcctcaaaggaaggaaattccccccccactggggggcccccgggtgaactgggttattggctggccaagtttcacgcccgctgttgaaacccactcaggaaaatcgtccgcggtgggcggggggaacccctaaacgtggggccttgtaaccttttttaaaccattaaagctgccccttctggatttccccaaaggggggaagcccttaaaacgtctttgtgttatccacccttcttcccccaaaagcctttccccccaacacggtgtaaatgtgtcccccttaaaaggggggaaaaacatctgctataacctcacaaactattagggcgaaatacgggagcctacgacctcttgcataccgacctcg

SEQ ID NO: 370041 - DNA, 755 bp, Homo Sapiens
  misc_feature (146)..(146): n is a, c, g, or t
ggcacttcacttccaagtaaaagatgagaaatcaattattcccacaggattttaggtcagggagcaaaaatctcagaacttgaccatgaagatacacaacagactcggcaaaaataaagtgggaaatgaagttcagattccccttnctgtagatttcccttaaaactattatttttttcttctacgtaaaattttgataatctgttctcttaaaaaagttaatgacacaattaagatactgacatcaaattgttgccttttaccaaaatgcaaattttatgaagtgcctacctttatatgtataaagcatttaataaataattctaatgtgccatattttgctgtgagtgaccttaaaatttatatttttatatgaattgtttcatgtatttataaaaattgtatattgaacattggaaatagatgattagatttttgtgtcattttacaattaaatctaaaatgcttaatccaatatcatcatcaaaattcagtgaaatcccaaaacagtgccaagaattttgctgaatgaaacaatcaaacaaagcattttaaggtgtaagttatagtacctgtacttgcagataagaagcttactatatcattattataagtagcatatattactttcaaatacctatattagaaagatattgatctgactgaaaatatacctacctgccagtaaagtccaaaggcctgaatttgttttgaatgagttcccttgatctttaagcactgatgatttttcttac

SEQ ID NO: 370042 - DNA, 750 bp, Homo Sapiens
gggcaggctgggaagaatactttgattacatctttccagaagatgctgccaaccaacctaacctcaaactcctggccatggcaaaactgtggaagaaacagcagcaggaaaaggaggatgctgagcaccatccagatgaggacgtcgatgagagtgaatcctgatctttttttcatagacaaatgttttgttatttttataaattaattgtttggaactcttgtgactcctggaagttcttatatatttcaccagtaagaaattgattggtatctttgatggctactttttaagttattttttaaatgctcttgggttagctaggggtagggattgcaagtaaaggacttttttaactgctggatttgtttttccaaccgagtccaaacttttctaatgtctgtccacatcatgcattagggaaatgtaattaagggtaacattctacagttacttttcatgtcatacccataaagatagtttatgcattcatctgaaatgtgtaactttttcatgtcttcagagtcacagacttgagttcatttcccagctctgccactcatgattatataacttaattttcattttcctcattcacaaaatgggccaatagtttgacagcttcattttgaaaattactttataaaaagaatatccctggtgggtgcataataagtgcctcagtaaattgtttgttctaagccactttttaaaaatggtttccttcccttgtagaaatgaaatgcgagg

SEQ ID NO: 370043 - DNA, 873 bp, Homo Sapiens
  misc_feature (369)..(377): n is a, c, g, or t
  misc_feature (530)..(543): n is a, c, g, or t
  misc_feature (552)..(638): n is a, c, g, or t
accccccgcggggtttgtttacaagcgggggatagagtttttttattacgcgaaggtgggccccaaggggggtttattagatcccccgccggggggtgtgttaagggttttattctcaccgcccccttctgtgagaggggtcgttacccattattgggcggggaaaatgcggttttaagggaggttatcccccacccgtctctgcgcaattaaaagttgcaacagggtcggggggcggttatatttattatttttaagaggctccggctttggaggcccctctgtgtgataaacactccgcccgcaaatgtcccccttaaaaaatccccccctttggggagtttttttccgaaaaaccactctgtgttnnnnnnnnnggggtttttttatttttggcggggatctcccacgccccgtgtttttgtgccccgggtgttttcttaaggaaacaagtttgtggcccctgtttccctttccctaattgggcgccccgccgcccaaacaaaaagttttgagaaagctttttcgannnnnnnnnnnnnncccacaagnnnnnnnnnnnnnnnnnnnnnnnnnnnnnnnnnnnnnnnnnnnnnnnnnnnnnnnnnnnnnnnnnnnnnnnnnnnnnnnnnnnnnnngcagggaacttctgcctttatttcacggctggagaatgagatacaaaagatgtcaatttccatcgtaagaactttccacagtagtgttctttggacattctctcccttgtattaggctcctcagaaatctatctccagactgaaaccagcacattctgatgagatcatagcttagtactcagaaaaatcactactcagtggaattcttgaaattttgaaacaactgattttagcc

SEQ ID NO: 370044 - DNA, 979 bp, Homo Sapiens
ggtctctagaaatttgatcagagaggcatgatagaagaataaggcactatgcggttgtggaaagggagatatgttaagctggggctcatttctctctctggatggtggggtggataattaatggaggaagctgattgggcctgatctttggaggagggataggaagatttgtgagcagaaccgtagtcagaaggacatttctggtaaggaatgaggaatgtcagggcagccaaagagtgcagataacactgcacacagtgatctgctgtggtgagagtagagaatgttgagtaaaagtagaaatgcagatagacgggacacacatgttttggacttgaattcctttaatacaaatagtttcaatagtttcaatatacattgtcagactatcttaaatgcaccttaagttttgtaattcctttgtaaagtatatcactatatcttttaaaattcagatgtttattttaattacgtggtgtgctttataaatgcattgcatgatggctaggacataggtaaatgagttgactaggaaaacatctaagaaataaaaaaatatggtcctgcgtatgtttctagaaattttccagattaatttgcaggtgcagttggtataccatttttccacatatttattcaccccttcaaatcctagaatcaaatactttttaaccatgtcatcaactaattaaatcactatttgtggtcttttctcccttaacgacttgtagtattaataggaaaagttaaatgaatgaatgaagacaaaggtagagaaaaggtaattagtgaaaactgagattagatacatctatgagggtgatgagagactcactgatgaccgaaaagttagaaaaagaaactggaagaatgatctgatttagcattctataaaggtagatgtatgtaagtttgtgtgttatatgtgtaccatatcttattagtttctatgttcatttatttatgttcatttcaaagt

SEQ ID NO: 370045 - DNA, 722 bp, Homo Sapiens
ggggactttaagaaggattctggagtatacttaggcctgaaattatatatatttggcttggaaatgtgtttttcttcaattacatctacaagtaagtacagctgaaattcagaggacccataagagttcacatgaaaaaaatcaatttatttgaaaaggcaagatgcaggagagaggaagccttgcaaacctgcagactgctttttgcccaatatagattgggtaaggctgcaaaacataagcttaattagctcacatgctctgctctcacgtggcaccagtggatagtgtgagagaattaggctgtagaacaaatggccttctctttcagcattcacaccactacaaaatcatcttttatatcaacagaagaataagcataaactaagcaaaaggtcaataagtacctgaaaccaagattggctagagatatatcttaatgcaatccattttctgatggattgttacgagttggctatataatgtatgtatggtattttgatttgtgtaaaagttttaaaaatcaagctttaagtacatggacatttttaaataaaatatttaaagacaatttaggaaaattgccttaatatcattgttgggctaaataggataggggacatgcatattaaggaaaaggtcatggagaaataatattggtatcaaacaaatacattgatttgtcatgatacacactgaatttgatccaatagtttaaggaa

SEQ ID NO: 370046 - DNA, 471 bp, Homo Sapiens
ttgtcctttggttgccttagttaccagagttgaatgaatgtacacatttcggtagtgggggggcagagcggataaccccttccttgtctgtttcctttgagaaaggacactccaccttttcaaaggtacttaaagccatctttacagattgcttgtaatgtaaggaaagagtcatgtcctttggattgattgaggttaaatcatcaaccactagccccctttgcaaaatctagcgagatatgttgatgattaagtgattcattggggtatgtgtctggctatctgattgttatctgaaatgctgcatatcgtggtatgtgtttttaatttgttgcttttgtatttgtaattttatgacatttccaagtttctgtgtcttaactctttttaattaattttctgcacgtggcttttttctccttgtttttaatgccatacagagtatcaatacttgaaacgcagtaaaatatc

SEQ ID NO: 370047 - DNA, 934 bp, Homo Sapiens
  misc_feature (756)..(786): n is a, c, g, or t
  misc_feature (854)..(890): n is a, c, g, or t
tttccccgcttttttaaccccccttcaaatttttttaccaaaaaatgtttggatggttggggaaaaagggaggttaaggttttttggcaaaaagtggccaaaacccctgttcggttccataaggggttttttaatttcaaagtttgaaccttgattggcactttataggattggctagttttttaaaatttaacaaacggtttctctaaaaataggtcaattatcaaatgtctatatcattaaaacagtaattaattttatatataaaaacatgtggtatccttcagagtcatgctagatgttctgaaatccaagaaaatctactcgagataactggtcatcctgatgctttctaacaatttggtcctaaagcttcacattttagaaatgaacgaacaagtatatcactgaaggaatctgttgagtgttctgaactttaagagtttaccataactgaaaagacagctacatgagaaaatgaccagtgcctgcagtcgcaggaatcaccttgggaagactgtacagtaaacattattcagtgagagatcagaaggaaacaaatggcatcttttcagaacgctgtcaactgttcccacaacccaagtctgtttttccaagtttgacaagtgcttggaataactctgaaacaattctcttcagagtttaaaggcttcagagtataggtgatgcttcctaaaacaagaagcctgtattaacatcacaaattggaactcattccaagcctcttcttagagnnnnnnnnnnnnnnnnnnnnnnnnnnnnnnntgtaaagaaggtcatgaaaaattcacatcgctctcgacgaattcgagctcggccgatttggcctgatnnnnnnnnnnnnnnnnnnnnnnnnnnnnnnnnnnnnncgccgccccgcgtaagctccagtcgcctatagtgatgtatctcc

SEQ ID NO: 370048 - DNA, 788 bp, Homo Sapiens
ttccccctaattgaggttattccaacttaaaaggggatttttccattccaagaattattctttaaggcctggtgggtaaagggtgttagttcctggggggaagtccaccaggtgttgtcccaaaccccttgggtaggtgaccccatggggtgaaagggtggcatagaaagaagcaattgaaaattgcatcttgtgatgatgatgataataaaacttgtatgttcatttagatcttgatcctcgggaaacaattttttcctgggatgtcccctgactgtccgtccaacatgcccatacttgttcagaaatatcatctctaatatctgagacatcccacatggcaagaaaggaatcaaagcatgagccctcttctgcttcttggacatatggtttatatgaagaatgtgtaatgatgagcaatggcagcgaggaacatctcaatacagataataaaatccctggagtccggtggccacagcttctacagtttgccattcccacgtatgcttttcagaaataacgccaacttttaccaacaaagcaataactactgcttgccaaaaagaaacaaaaaccaccagctttacacaaagaaatttgccaacaggttggattgggctcagttcttcttttagtactttataaaagagcaggagacaatacatggcaaacaactgtgacatgttgtttattataaccaaataagtccaagcatttgaaaagctaaagttcccttcgtcatatataccaagcagctcacagattaaagcaacgatggtggtgaaagg

SEQ ID NO: 370049 - DNA, 634 bp, Homo Sapiens
ggataaccacttaaaatataagaaaatatttctgtttacaacagtcatcaaaaatgatcaaatatctaaaaataagtgaaatgtgatacacatatgggaagaaaactttaaaactctcctgagagatattttttaaaaaccactaaaataactggaaagatatattttgttcttgagaaaaactaaattctgtaatttttccaaattataagtaagtatttcatttagaaatcccaactaaaatgccaacaggcttagtctggggaacttgaccaacacaaacatggtgagacataaacagtctgagaatgagtaagaagaggaagactaggtgaaacaataactcagtatagagtgaattgtctataacttagagtactagagaaggaagcaccaattcaatggaagagaacagtctcaagagaccgaactacatctgagaatttagtatacaataaaggttggatttcagatcaatagggataatactggcatttcccaataaatgatgttgagataatcagcagctgtttggaaagaaagaaaactgaggctcttcctcactgtttctaccaaaatcaatgtatatgtactttaccagtatatatacagacttctttctagtatgaaatat

SEQ ID NO: 370050 - DNA, 1017 bp, Homo Sapiens
gcgcccgaagtgaggtccactttggatttctagatagtaaaaggtcttttctcttttctagggtggctacgagtggctgttgcccggagacgacaggggtgacgatggcgtcatagcagcactttgattgctgtgagggtcctaaatccggagagaatgaaaaacgagcagaggctggtgcatcgagagaaacaatttctatcgtggttttcccaacatagtttattatgggcctcatgggagcaaaagtggtccagatgcgaagttccaaattttccggaccagctttttataaatcctcgggtatgagaccataattgaaatgtgggagacagaaattttctcacgtgaactgcaaacatttttgattaaggccaaaaatattttaaatgaaaaaaaacacctgggaaaatgttaaataattcagattgttttggcggtaaaaaaggaaatggtactttttaaacaaaagatattgtagtgaattggtgaatgtaaattcgggacagtaatttcaaaaccccaaaatctacacattttactttaccttcgcgatgttagggatctggggactgcaatattacgggaatatgcaaaaatgagtttaatgttcagagataaatagttttcgttattgcaatgcatcaaggcgcaaaaatttcaattcaaaaaagccaaccactgctatatgcagataaataaaacatttgacaacacttttataatcaaacccaacattatacaaaaaatgtgtggcacatgcacatacgtgtgcatatgtgtatgcaatgcctattttagaaaaaaggtgtcttgatgaaaatgattttgaaaatagtcactgacacacattatatacaaaaccttttatataaaaaattaaactattttcaatgaaattccatgttcacatcatatctgaaaattgcaattgaatcataaataggtctactaacgaaatcatggctaaggcagtctctttccaaggttttctttatatccacctgagtccaggtt

SEQ ID NO: 370051 - DNA, 377 bp, Homo Sapiens
  misc_feature (339)..(339): n is a, c, g, or t
  misc_feature (365)..(365): n is a, c, g, or t
aaaagctagtttcctgagtgaacaagccataacctcccctaaacaccacctaggtatttgttagaagtcacactattactccaatgtcatcagacacctaaggtctgccagccaggctcctggctgggcaatggaagatggtgtggccctgttagtctccgtgtgtggcttactagccagccttgggaactgccaactcaaattctaagaaagccactgctttctcatcatcactctataccaatacttatttctggccaaatgaatctgcttctctgcccctcaaacttttagttcacaattcatcttctaccttaacttggggcttcttggggcctntggctttcccttaattaaatgtcttntttttccctact

SEQ ID NO: 370052 - DNA, 980 bp, Homo Sapiens
  misc_feature (39)..(39): n is a, c, g, or t
  misc_feature (60)..(60): n is a, c, g, or t
  misc_feature (488)..(496): n is a, c, g, or t
ggaccgctcccacttcagattggtaccaatctgaagtgnccctcgatcgacataactgtntgcctcaagatgctcagtctagtgttagagtcagacaagaaaaatcagtggttataatttcaaaatgtgttgtggtaggagtaggcaacacaaagtgccatggaaaaatttcagaggcacactcaagttcagccttattacataagacacactttgaaaaggtgacacttgagctgagattttaagaatgaataggaattaatgatgcaagtaatgggggaagggcattccaggtataagaaatagcacagacaaaaatatggagagtaaaaagacatagcacttcaagggaaacgcaagcaggttggcagagctagaacaatggatcaaaaggtattttgggctggatagaagacagaaaaagtgtgcagggacccaggtcacaaaggtactatatgctcttaggtagtctggccttatcctgatgnnnnnnnnnttcagcagcaggatattaagcaggatttcatttcagaagttatggcagatggaggtagtaaggtaggacatatctttatcactagagtccaggtaaccaataatattgtcctgagctggattaatgaagtgcagaagaaaagcagaaggcacagactggagatcaaattagaaggcaaaattgaccaaacggatgtagggggtgtacgaggaggagataatagaatggtttccaattccacacttgactgattatgtagatgctggtgccattctataaaagaggaagaatatatgcatttcagttttttgtagttatatggaacaggtggtaaaaaggatacgtggaagagagagatgctcagttttagatatgtgagtttaagatatctgtgtccttagttgagcatggtagcttacgcctgtagtcctagctacttgggtagctgagatgggagaactgtttgagcgcacggagttcaaga

SEQ ID NO: 370053 - DNA, 147 bp, Homo Sapiens
gggagagaactgtcaaaactctaagacataaagtttaaataactcattaataattgcatgtgaatcccccagtaatgtatgtacatgagcatacctttcaaagatgttcaatggtgctgtaaataaaatttttttaaaaaatacaac

SEQ ID NO: 370054 - DNA, 751 bp, Homo Sapiens
  misc_feature (689)..(689): n is a, c, g, or t
gggtgcacagccccttggggactgtgtaacagacacaacatctcctccctctcatccaattgtcaaagctagtctcagtggagaatcaaggctgggaaaatagactccacctcacgatgggaagagctggagagtcacatggtaaagggtgtggagggtatgtgggcatctttgcaatttatcgctggtaccaaggacaggtgagatgctgagtactggggattgaaagcacaaagcctgccttcaaagagtcctaagacaaatgcaggagataataagggggcagactgttaagtttctgcttgatagtgccatggtagggaaatgtgacttctctggaattacaactgagtgacctgggattattgacacattacaacatcagcagccaaaggtatgtgctagagaatcctatttccctgttacatccttccacagtttcatgattacattctcctttcatggcatgtgaccacccacatctgggccatgcgtttcttaaccaaacacatctttatcgcaaaagaatgacatttcaagcaatgactttcttaattttccatctcaaccttggtcccgttttttctggcccttcttgtgcggggtcctgtcggggatgattgtcttttgaacttttttcttctatttcccacaaaattccttggccaaaccccctttttccttgccgnagcggggccagcgtctcagaaggttttcctgggagagaaacactttccttggggcggggggc

SEQ ID NO: 370055 - DNA, 848 bp, Homo Sapiens
  misc_feature (38)..(38): n is a, c, g, or t
  misc_feature (52)..(52): n is a, c, g, or t
  misc_feature (82)..(82): n is a, c, g, or t
  misc_feature (98)..(98): n is a, c, g, or t
  misc_feature (127)..(127): n is a, c, g, or t
  misc_feature (364)..(364): n is a, c, g, or t
  misc_feature (420)..(430): n is a, c, g, or t
aagtaaagtaacgcctaatacaggaaacccaaaatccnataacagagccccnaaaaatataaaggatgtgggttttgccatncttaaactgatcatgntccatgagaaagcccatatcctaacctantcctgtggccctttgtacattgtagagggaaacttgaaaaagaactaatatttaaaataatttttttactatattattctgctgtcaccatttagagcgaaaaggagatattttgttagtgtagattccaggcctaaatacacatcacatagaccatatatctccaacctgaagaagctcctggagcttgtttacagtgcctcggtattcaagttatcctgactaatatgctctttnccagaaattaactttaaaatattttatttttaaacttttaatgtttgtttatctgnnnnnnnnnnnctgcttggcctattgatatcctgttatatacccaaaatatacaaaaaagtttggaggggaaaaacatatgaggatacagccaatattattcaaaacaatatggctaaacatttctatttttaacataatttagtggcaaatcaatgatacataatagcatattattattaagggacaggccatcatttctaaggtgggttttaaaatgtaaaatgtgtttttaatactattaacagcttaaaattaacattttacatttgccctaactttaaaatttgatacatatttttatttaaaacaaatttatgaccttgaaattttgagggactttataattaccattaaataattccctcctatcaaagttattgggaaaataggtaaaaaaaggaagtttttatttacgaaaaggggaatc

SEQ ID NO: 370056 - DNA, 401 bp, Homo Sapiens
attcttctaatacttgcaacactttaagtgtatgccccactgtggagtgagttattacattactctaatatagtattagaaaaccatcctgaatgagtatagagaaatagcttagagccatctgttgatgatgatttaaaacacagggattctatttccttgactgttaaagagtttgctgactagaaaccatgagctggtttaattagctattataactaaaaagagtcattgaacaaagggtaagtcagataatgtgggagggaatgaaagaattaccggtgcatagtctcaaattatttacttcattgtacaccatacctaaaagagtagatccaaagttgaatgaaacactccttttactctagcaccgtgtaatttacaatggatgtgtacatcgt

SEQ ID NO: 370057 - DNA, 1164 bp, Homo Sapiens
  misc_feature (417)..(417): n is a, c, g, or t
tactaagcatctgctgtgtcctgggcagtccaacccacatgagtatcttggtcactagtgtcatcagcacctttgaggggtagggatcattcctattctactgatgaggtgagataacttgtccaaggtcgcatggtgaagtcgctgttgaaatctgtcttctgactcgttgctctgtcttcatctgaggaaagacttgtgaggcttctgaggaggctgctctccatcctgctgtgttctgtcagtgacactttgtgcacacaggagatcctaagacacataccctaggccctcagagccggcagtgacttcttccaaatcagttccggcagcgctgagtgtccatggaaaagagctcttattcagagcagcccttcctgtgcgcagagctacgcaagtaattaaatcacttcagcnacaagatcaaggggacggataagtgttagagactgtgtttcagtcctgactgcctcttatgcatgacctcaggaatgccacttcacctctctgagtctggtttcctcacctataaaagtgaaggacagttctgactccacagggtgctgtgtgagggttacgtgaagtcgagggttacatgaagcctttgcataatacctggcacaacgtcagtcttccgggagtggtaggactagtctgcattcttggtttgcagattagatgaggaaacccaggcccaaagaagcaaacaaacaatagctcacccagtcttctctgttaattcttctcaactacaccatgctgctttgcaggttggtttgacaaacatttccccacaattagatgcatgatgaccaagggaggaaagaaaattttcacagggtatttaaaaagctcagggaacaaacagatcagtgcaaatcagtaaggctaacacctgaaaatgactctgcacaggtgaggaagtggagcagaagagggaggggctggttcagggaacaggatttaatatgtcagtgaagaccctgcctctctctgtaacaagatgcctaaagaagaatagtggtgcttccagcccagctccctcttgttttgggaacaacagtcatttctcagaaacctcacttgcaaaggcagcccttccaaaaacatgagagctttagtttggagaaattatttaagctcacttttgctggagaggaatga

SEQ ID NO: 370058 - DNA, 1156 bp, Homo Sapiens
  misc_feature (827)..(827): n is a, c, g, or t
  misc_feature (874)..(874): n is a, c, g, or t
gctacatggtccgtccaagtgatttgcagtcacgatagacagtcaggaagcatacttttatgtttcagttgattctaatgtcaaactattacgtcaaaattacagaaaataatctctatatcaacagcttaaaataaatgacttacctaaagtccacttctgaaatggcaaaactcctataaagggtttcagtctgtaccaattagaatgtctttcagttattagtaatagagcatccttaaatcaactggcttaaaaataagtttagtctctcacaaaagaaacagtccaaaggaggagtggctacaaggctgcttggtttggtggctcaaagacatcatccaggtctcagggtctttcagtatttctgctcaggccatgattaaactataatccattgctgaaagatggttaccaggcaccacatccagacaaggtactgttcaccacaagattccacttccctttgcttgaatccttgggcctttgagaaaaccttttccagaagtagtctgtcaggtatatcctttgttttatgtctagaattgggccctgtgaccactgtaaatcaactgctggcaacgagaaggggagtgtcactggttaaaactaatcaggatttatctcacttccttttgaggataaatggataaccaaactccgccagcagagtaagggagtgactaagaaagtcactcggcaatgtctgccacagacccttgttagaatgtgttcttaattcattaacaggaaggagtagagcacaaggtttaaaaccagtacgacatcaaatgaaaacacagtgaattccctatgttacacagcanttgctctgcactgttatgtaagtgtccaaataaaaaacagtagaaanaaaaatagatacaaatgggaatattttaagtatatcttaaaactgtatagagtgcaatgattttctcactcttggaaaactggcattattaattttaaattaccaagcaaagttttctatctattttatacatggatatttatctctctggctgactcagatacagttgaaaacattataaaagcattggtcctttagagctgatattgttcattaagaatgatcaatgcattaaatcctagagaagagtgcaagaaaaagtatactttatacctatcaaat

SEQ ID NO: 370059 - DNA, 283 bp, Homo Sapiens
attcattttattagaggtattcaaaaaatttattgaaagcactgtactaggagctgagaacacgatgatgagcacaacacagttcttccctttggaaacatagataagtggagggaatgtcatcaaaaatgtaaaacttcactatgagatgagttccgtgataggattttcttagggaaacctgagaaagagttgagactaaaggtatgtgtcatatttttcacaaaggcaaactgggggaatgagatatacagaggcttgggctagaaaaaagataccgtta

SEQ ID NO: 370060 - DNA, 796 bp, Homo Sapiens
  misc_feature (570)..(570): n is a, c, g, or t
  misc_feature (574)..(574): n is a, c, g, or t
gcctaatgtgtaggtagcaaaaatattaaacacataccactgcaaattactaaataatacataaaatgaagtgtgcatttacatgcatttacattttacatttgatatcaactgggccataatgtctctgctgtgatgcatctttttcatactttaagactgctgttgtaattttcgtaaggtcacatgagtctctcaaacagtttcatctctgatgattcatgcatatgacaaagtctatttaaagctgaattattaaatgggccaataattctttttcgtgcaaactgccccctctcaatacacatgggcagagattatgactgtaatgagttatctgcaagttatatctacaattttctttgaaaacttagacctgatggtatataaagacaggcctgtagatttgtttgtttgtgtaacttttaattgaagtcgagacttttttcctattgtcatttcataacactaaacaaaatgcattcaaattctgaaagtcttctataaatttatcatataatctctatcccttcaaatcctttatttctgaggatgaataataagatattntccntatcgcaaataaatttatttcagctgcaaatttagaatgaaacacaacactgaatgttagtacagtttagatactttatgaaaataaaagaatgacctattttttggagcactctttgttcttcgatttatatttgaaacactactttctgtacagtggtgtgtccttcaaataatttaacaatttggcttccatgtgaggatatacagtacttccaaaaga

SEQ ID NO: 370061 - DNA, 771 bp, Homo Sapiens
  misc_feature (249)..(257): n is a, c, g, or t
ctcaccaggaattccctcagcagaggaacagttgtctagtatagcaaaaggtgtgaatggttccagccaggctccaaccagtgggaaatattgccggctatgtgatatccagttcaacaacctttcaaactttataactcacaagaagttttattgctcatcacatgcagcagaacatgtcaaatgaactaactaaacatcagtcacctttggtatcagtgtttagtatgttgttctaaccagtccagnnnnnnnnntaagctgtttgaattacatctgggcaatcaggagataattcattatggctgagttgaagacttaaggtgtaatttcattacagtccattagtaaagtgtattattggtgccattttcaaaaaaattaatttattttaccagcagtattcatagctgtggttatgttattttttatttaaaaactttatattaaagtcatttgtaatgttattgtatagttattgtgtagcacatatggtttgcactgtatagtagcttttaaagaaaatagtcacaatacagaaaagcattttagaaatagcttcaaaagcacttgtgtatcttgattttttcttatatgctgttgcagatatatgtatatgctaaaatataacttgcaaagatgttctaaatacacatgctataagttcgccttaagatttcaattcttggataatcacgctctgtttgcactttatattttagcagataccagtctcttaatccctagggctttgcattttggaatgcaact

SEQ ID NO: 370062 - DNA, 1265 bp, Homo Sapiens
  misc_feature (229)..(229): n is a, c, g, or t
ccaatggttaaaggtgaaaggattttattggaaggccaaccacccacataattggctacatttgggaagaaatgcaggaaattcgtacagtatatcagattgcagagatactataatctcaaccacccacaaaagagacccaaagccaatcaatagtcaacaactcagatcagtccatttgagtccccagtcgaaggtggcattcttcctttatcttgcttaagccacnttgggtaatccattccagctctgcaccttctccagttttctcatgtcagaagtccctggagggaggaggctttctggaaataacctctgataagctagactggggccttttggctagcttaaactctgacctggaatgggtaaaactagtccagacactaagaaccaatatcaaaaaacctcatgcagggtgtatgaaagtgatgttagacatgaagttgcttgtccaaagcttctatacaactgaccaacttctccatatgctgaggctgtcaggtatgcttccactatccaccaaagaaggatccagggcctccgagtccttgcactatcattggtttgctactgttgagtcctcactcttgttattagataagttaatcatgactatcatttactgaattaatgggcagaattcaaacatctctttacattattcaaagaaagaagttggatccacaaagactaaaaaccctaatgtctggaaacctgatgactgactagatattttcactttgccctctgatattcaatatcacagatgaagccatagccgcccaccatgctttctacttctggttggtaaggaacacttttccactacatcccagtgcagagaggaaaaactactctatctctcaactccagtacatctggatactcatcaagcaagatatctgggtgggatgaggttctcttccttttcaggaacccccccgagttctcccttgaaagagcctccacatggcccaccctaaaactccgggccttctcttgtctttcacagatcccccttacctccagttcaaatcatccctgatgagtgcagttgtgccccaaatttaggaagatatatttttgaccatctcattctttctctatgtcttccattattcagaagactaggaatgcctatgttttaggggcaggaggtcgggggcaggatttgaattgggctgctatttcttcttgttcccccacaggacagtttctcatcagaaagtcattactcaaaacttgaaatctttgcctcgtcc

SEQ ID NO: 370063 - DNA, 1230 bp, Homo Sapiens
  misc_feature (44)..(121): n is a, c, g, or t
  misc_feature (1042)..(1042): n is a, c, g, or t
ggcctgggtggcgaattcggcacgaggaacgcttgagatcctcnnnnnnnnnnnnnnnnnnnnnnnnnnnnnnnnnnnnnnnnnnnnnnnnnnnnnnnnnnnnnnnnnnnnnnnnnnnnnnagcatccgccccgggtggcacgtccccgagcccaccaggccggccccgtctccccatccgtctagtccgctcgcggtgccatgccattcctcgggcaggactggcggtcccccgggcagaactgggtgaagacggccgacggctggaagcgcttcctggatgagaagagcggcagtttcgtgagcgacctcagcagttactgcaacaaggaggtatacaataaggagaatcttttcaacagcctgaactatgatgttgcagccaagaagagaaagaaggacatgctgaatagcaaaaccaaaactcagtatttccaccaagaaaaatggatctatgttcacaaaggaagtactaaagagcgccatggatattgcaccctgggggaagctttcaacagactggactcctcaactgccattctggattccagaagacttaactacgtgctccgggccgttgcagctgatacccaaccattaccctccccccttcgaggggtgttgcattaacaaactccacgacacccttgacactcctggtatttcacaatttttgcgcacctctcccccttactccacccgtaatagacaacattccatattaccgcataccataccacgccccaccctcatcagtgctcgcccccctttcaaaacactaaacaggtgacgataattcaccacaacccccctctcccattcctatcatgccccgttgtatactttaccgattatctatccgattctacattaccagcccaccttacctcatacttaacctctctttatcctcactaccttatccatctacccattaatagaaatctcatgcggacgataaccctctgtgtctccctatccctttttcagccagcgctcttcttcctccactatctctttatcccccctatatctcgcactnatccatatctccacccgcgctccttatctaccagtttattcctcactaaaccacgcccgaaagtcgtaaccaccaacacaactgcatcgcgctttcccccccatcctcacccctttcgctctatttccgtacacaaaaccactataccgcgtactaaaccgccaaatattacccgcgtgattactact

SEQ ID NO: 370064 - DNA, 1177 bp, Homo Sapiens
agcggagtccaagaagagaacctacaaactagacttgtagattaaaattatctgatcaaaaaggcagactctgtaaatttccttaagacctaccttggcataaaggctgacccagcaaaagaactgagaaatacagcctgagatggacagcagtaattgcaaagttattgctcctctcctaagtcaaagataccggaggatggtcaccaaggatggccacagcacacttcaaatggatggcgctcaaagaggtcttgcatatcttcgagatgcttggggaatcctaatggacatgcgctggcgttggatgatgttggtcttttctgcttcttttgttgtccactggcttgtctttgcagtgctctggtatgttctggctgagatgaatggtgatctggaactagatcatgatgccccacctgaaaaccacactatctgtgtcaagtatatcaccagtttcacagctgcattctccttctccctggagacacaactcacaattggttatggtaccatgttccccagtggtgactgtccaagtgcaatcgccttacttgccatacaaatgctcctaggcctcatgctagaggcttttatcacaggtgcttttgtggcgaagattgcccggccaaaaaatcgagctttttcaattcgctttactgacacagcagtagtagctcacatgggatggcaaacctaatcttatcttccaaagtggccaacacccgacctagcccctctaacccagtgtcccggtctcagctgtactctatcaggaaagagaaaatgggcaaactctaccagacccagtgtggatttttccaccttgatggcatcagttctgacgaatggcccattcttcatctttccactaacgtactatcactccctttaacccatccaagtcctctgggctctcctgctccaacatgaaaatcccttctcacctttgaaattaattggtattcccttttccgccaatggcagggaagggccccctgggaaaatatattcccccaagaggagggaaattcctaacctaaacggtgtctgaaaatccatgtttaacactccccttggttttgtcaatcctccctggtgtggaccccgaaagggtctcctcagagagggggaaaatattctcaatatcccatgaaaagggtgagaaaaaattttt

SEQ ID NO: 370065 - DNA, 802 bp, Homo Sapiens
  misc_feature (52)..(88): n is a, c, g, or t
  misc_feature (626)..(626): n is a, c, g, or t
accgagtatacgactcctatagggcgactcggagtaacgcggtggcgagcgnnnnnnnnnnnnnnnnnnnnnnnnnnnnnnnnnnnnnatcaggccaaatcggccgagctcgaattcgtcgagagcgggagtccaagaagagaacctacaaactagacttgtagattaaaattatctgatcaaaaaggcagactctgtaaatttccttaagacctaccttggcataaaggctgacccagcaaaagaactgagaaatacagcctgagatggacagcagtaattgcaaagttattgctcctctcctaagtcaaagataccggaggatggtcaccaaggatggccacagcacacttcaaatggatggcgctcaaagaggtcttgcatatcttcgagatgcttggggaatcctaatggacatgcgctggcgttggatgatgttggtcttttctgcttcttttgttgtccactggcttgtctttgcagtgctctggtgcttttgtggcgaagattgcccggccaaaaaatcgagctttttcaattcgctttactgacatagcagtagtagctcacatggatggcaaacctaatcttatcttccaagtggccaacacccgacctagccctcntaaccagtgtccgggtctcagctgtactctatcaggaaagagaaaatggcaaactctaccagaccagtggtggatttccaccttgatggcatcagttctgacgaatgtccattcttcatctttccactaacgtactatcactccattaacccatcaagtcctctggctactctgct

SEQ ID NO: 370066 - DNA, 978 bp, Homo Sapiens
ggctccacagatctgagtacttaacacttcccagatgattggagaatattctgggctgttggggatgacaggaaaatgtgagggggagtagcctaggtaagggtgatgatgaaattgttctatctgctgtcaaataatcttttcctgtttgcaatgtttttattttttctgagtccctttgggaaccaggtgctaacaagaagctgttatgtgtgggatttcggagccttactttaacgatagaggaaccaagtatcattttagatatcttttatttatgttctcggtgcatatgttgactttaatccctcttcccccacacctcgcccattaaggggaaggaggttaactctgcagatgatattcaggcccaaccagctcactctctggggtggctactgactaaaggcagagaatgtccatccaacatgcccttctgactatacagtcaccacttttttgggggaattctttagcagatcttattgttctttctgcagaagctatcattcctacctccccaacccccaaaatctctaatacaggccaagtcattttttatgatgggtctctgagatagggcagtttgttagaggagaggctagggtagagagggagagaatggaggtatctgaaaataagtaagattaattttactcatttttctaacacgagtcagtatgcttgaagttttcattgtatttgatgtcatgtaaatttactgtaaaaaataagaaaaaattttaaaatgctttattgattaaatttagggttgcttttcagtatactcagtaactccgaagtcagtgttaacagtactgagcttacataagatttattgaatttacctaacttaggcaaatgttttcaaacttatatgcttttggtccaaagtcaaatcaattattttgaaaaagatgaatgggatttttttcagtgtggatatgaaaaataaaataaaatgatagctatgtttgg

SEQ ID NO: 370067 - DNA, 819 bp, Homo Sapiens
cgctgttctccctccctccctctggcttctgctctttcttactccttctctcagctgcttaactacagctcccactggaacttgcacaatcaaaaacaactctcctctctcaagccgcctccaggagcgcatcacctggagaagagcgactcgctccccgcgccggccgcggaagagcagccaggtagctgggggcggggaggcgtacccttctcccgctcggtaagagccacagcatctccccggagattggccgtatcccaccgtccggcccccagggtcctgcagcggtgatgcatatgtttcggagcaatgatggaaggagaaaagccgctgtcggtggcaactgaaagtggggagaggttgctgcagtagctggtgctgcagaatgcgcgagtgaagaactgagccccgctagattctccatcccgctcagtcttcattaactgtctgcaggaggtaaaccggggaaacagatatgcagctaaccaggcgggtgccaacctggatctataactgtgaattccccacggtggaaaatggtaaacaaagacatgaatggattcccagtcaagaaatgctcagccttccaattttttaagaagcgggtacgaaggtggatcaagagcccaagtggtcagtgtggacaagcatcagagtcccagcctgaagtacacccggctcctccatggtgcacattcctccagggagccagacttcgagtcttccttgtgtcaacatgcctgggtgaacatgctttccaaagaggggttctcctcaggagaacgaggtcatgttcatgggaaactcaatctgggg

SEQ ID NO: 370068 - DNA, 553 bp, Homo Sapiens
  misc_feature (22)..(22): n is a, c, g, or t
  misc_feature (39)..(39): n is a, c, g, or t
  misc_feature (42)..(42): n is a, c, g, or t
  misc_feature (50)..(50): n is a, c, g, or t
  misc_feature (422)..(423): n is a, c, g, or t
caactctgcaataggtcttaanccaaatagcttataatnaanacctatantattacagtatactccatattccatcttattaggagaaaacatatgagaaaatgagagtctttttaacaaggtacaatcaacatcccaccaaaattaagtaccttttcccctttaagtcaaaataccataacaccataatattatggcattgtgccttttcttggtaatatctcagttctgacccccaaaagcaaagagaaaaaagtgaggattcagatatgcttgaatgacaaagccagtaagtttgacctaaacctttaccctcatgtttaaagtgggtaagagacttttcctatctcttcctttaagtgacaaaggaagaaccatcccaaattacatgtttcatctgagatagaaacattttcctttannggtgtgtagctgaaaattttctggacagggcaatcccaaaatactacatccattgcagaactgtgaaatgaataaacactctgcattacaaaataactaaaaattattgaatataacatctctccccacc

SEQ ID NO: 370069 - DNA, 564 bp, Homo Sapiens
  misc_feature (293)..(293): n is a, c, g, or t
aacaagttgagaaggggagggcactaggtgtgtgagcaagtaattggcagggaagaaggaagtaggagttcagtggtagacatagtgaatttgcagcatttgtatgacagcaaaaacacaagatttttagttttaaagacaaaaacagaagcgaagaagtaaaatggaaatcacataatgtacttaatgggtagatcctaaaactactactataagcagtggtgatgctgtaatccagactttgggagggcaaggaaggggggatcctgagggccaggagttaagcaggctgngtatataggaaggaacgcatctcttaaaatactaagtcaacaaaaccactttcggtaaccccctctggggaacagtggtccgaaatacgcgggggtaccttggggccgcaaagagtccgaggaacgagagcctcaacagagagtcgggcggcgaaaaggcgcagtcaagcaaatcgagccaatgggtattgcgcgaagcaacaaggggccattggggcggcgactaaaggtgtcttggcttccctttgtgagccccgcagacacacaccag

SEQ ID NO: 370070 - DNA, 437 bp, Homo Sapiens
  misc_feature (48)..(48): n is a, c, g, or t
gtggaaaccgccttcccctccaaccaccgggtccccagcccagtaatnaaccaatataatccctggggccagatattccaggaataaccattttaaaacccaccatttcccctagaaaaatgccattcctgtaagtgaagccagtgtatggtcctcttttgttccagaatttaaaactgataacccaatgaaagcccttttcctcttattccctctaccgtcatttacatgataatcctgaagtctaatatgacaatatttaaatactaagtggtactagggaactacaagaatactgtaaagcttaagccattgttatcactgtcatttagcatttaataacaaaactatacagaattatgtgcataccaatgaatgttttgtaccatctagttaaattttttaaataaagttttatgggttaagcagaaaaaaaa

SEQ ID NO: 370071 - DNA, 487 bp, Homo Sapiens
  misc_feature (12)..(12): n is a, c, g, or t
  misc_feature (26)..(26): n is a, c, g, or t
  misc_feature (41)..(41): n is a, c, g, or t
cccaacccaccncatagtgaagaganaatgggaattacacngccggcctgttaacctacaccccagaaggtaggaaactgcctttcctccaacatcctggttcctagctagtaaataacaatataattccttgggcagatattccagaataacattttaaactacattttccttagaaaattgcattccttgtagtgagcagtgtatggtctcttttgttcagaatttaaaactgataaccaatgaaagccttttctcttattcctctaccgtcatttacatgataatctgaagctaatatgacaatatttaaatactaagtggtactagggaactacaagaatactgtaaagcttaagccattgttatcactgtcatttagcatttaataacaaaactatacagaattatgtgcataccaatgaatgttttgtaccatctagttaaattttttaaataaagttttatgggttaagcagaaaaaaaa

SEQ ID NO: 370072 - DNA, 1168 bp, Homo Sapiens
gcactaagaaagagggcggaaagtgtaaacgtcaagaatggggacaagaattgtgggatgttgttgcggtttatgaagggtagggtggagggtatgtgaatgcgactgtccaattaatcgaatccaagaaatcgagagggtataaggtcttggggttagggcgggatttatatggtcggggggagtgtataccaatgttgcggaagaggggttatgaatgtgatagattgtaaataaatgcccagggaagcccctcaaatggggaaaaaagggggcaaaaagaaagtggggaacaggttagattttcaggggggaggagggaaagtttctgaaaaggttttgagattcgaacagttgggaaggaaaggggcggggttccaaggattcgcggaaaatcgccggtgtcggggcggggaaaaacggggcaaaggttagggagaaaaaccggaaggccaagggtgggaaaaaaagagggccacagggcataggggtagggttgttctgctggggagccaggtaagaccgggagggggaaaacggtgcagaggttgaggcgttacccagcaattcttctctgggtttagcacaaggaattccccccgaggtttccaggagccactagctgtgcgtggcagcagggagacgggggggatgcgggtggcccccggaaaacaaagcaacagcccagatgagcacttggcaacaggaaggggttctaaaggagagttctgccggtggcaggtcagtgaggcttgaaacagaactccacttccatacgcggaaggcgtacacagaaagtgctgcacctatcccacgcacacacactagaagacgcacagcaaggggagggcagttgcctctgcgggcaggagggacttggctctatggacaaaaggatttaaataagcaaagtctgagggctctgtccacccagagacccccgcagtgagaggtggcctgcagccgtctgttccggagcccagggcaggcagagggcatttcacccaaggcctggccaggctgcgccctgtcctcccacccatccctggcctctcagagagatcactgtatcccatgggatgggcagccttctaacagggtgcagcagtcataaaccaaacgcaggtgtcggcagtttaagaaaatgtctgcgtcctggcaccgccca

SEQ ID NO: 370073 - DNA, 265 bp, Homo Sapiens
  misc_feature (122)..(183): n is a, c, g, or t
tgggttcaagtgattttcatgccttagcctccccagtagctgggactataggcacgcaccaccacacctggctaaatttctatatttttagtagagacagggtttcaacatgacctcaattnnnnnnnnnnnnnnnnnnnnnnnnnnnnnnnnnnnnnnnnnnnnnnnnnnnnnnnnnnnnnncctcataaagaatgattaaacctctgtcctctaaaacaaatttttaaaaaggaatgcatcatatgtagaatactttagttat

SEQ ID NO: 370074 - DNA, 462 bp, Homo Sapiens
  misc_feature (26)..(26): n is a, c, g, or t
  misc_feature (184)..(184): n is a, c, g, or t
atccccaatggaactctctctgggtntgggggttgagagaaccttaaggcattcagctgcacagagccttcttttccagcgatgggaacccagtctcaaagcctttacagtctcgtcctcctgccctcccatcactgctgagaaccctgccccaggctggcctgcctacatgacacaaatagcnagtggactgtcactcatcagtatctgcagttctgtttaccaaagcctgcttgctagagacgtttcagggcctccttccctcaaagcgtccactgtacctccatctggatacaattagctggctccccacttcctggactgacggtaaccaccttttccaatgaccctgaagaaaacatgcaatctaagctgctttaagagtaacctacaactgaggacaaattttctatcaactcccagtacccctctctgccgtggctgatttgttactggttttcc

SEQ ID NO: 370075 - DNA, 764 bp, Homo Sapiens
  misc_feature (93)..(156): n is a, c, g, or t
tttatgtctttaaaatttacatgttgaacttacaaaaagctaaataattgtgcaagaaatcggaataactagccctgctgagtattttatgcnnnnnnnnnnnnnnnnnnnnnnnnnnnnnnnnnnnnnnnnnnnnnnnnnnnnnnnnnnnnnnnngatatctatctaacaatgggtttgtggctaaaaattatgcttaagaacacatctaacaaacctaaagctgcaaagacataatgttaatgtaggtgaaaatttcacttgtgtttattctgatagacaaaattgtattttagatgagaagcaacaattttcatgttgtactgagattgttagtaatgaaatacttccaaatattagtgatggtagaaatctagtgtagggctctttgctgagaagggaaaaaagtcacataagaaatctacttttcagtaaactgcaaatatgtgtgcttcaacctataacatattctgtcactttgagcttgtcatattgacagagaatgaaaacttgataagactcgagatgtgatgatattggtttaacagtacactgcatcctctactaggaccaagagaagtgcctcattggtgtcagcaccaaagtactattctttcattattcaggaataaagagatctcagaacagagaatgtttagttgctgaaatccctatccaaatatcatatttctcatgctgctctgacaatatgcaattaactgcaagacactctgccccagattttactatttctcaaaaaattg

SEQ ID NO: 370076 - DNA, 651 bp, Homo Sapiens
gggaactcagagatgaacatctaacccactagaggaaaccagtttggtgatatatgagactttatgtggagtgaaaattgggcatgccattacattgctttttcttgtttgtttaaaaagaatgacgtttacatataaaatgtaattacttattgtatttatgtgtatatggagttgaagggaatactgtgcataagccattatgataaattaagcatgaaaaatattgctgaactacttttggtgcttaaagttgtcactattcttgaattagagttgctctacaatgacacacaaatcccattaaataaattataaacaagggtcaattcaaatttgaagtaatgttttagtaaggagagattagaagacaacaggcatagcaaatgacataagctaccgattaactaatcggaacatgtaaaacagttacaaaaataaacgaactctcctcttgtcctacaatgaaagccctcatgtgcagtagagatgcagtttcatcaaaggaacaaacatccttgccaaatggggtgtgacgcggttccagatgtggatttgggcaaaacctcatttaagtaaaaggttagcagagcaaagtgcggtgctttagctgctgcttgtgccgttgtggcgtcgggggaggctcctgcc

SEQ ID NO: 370077 - DNA, 893 bp, Homo Sapiens
taaagaaccctgtggaaagggtaatatgcttccacaacaataatcccctttctccccaatcttcactttatttccaaaaatctcatttattttcacttgacaattgttttatactttcaaaaatccttttataaatttttatagatataactcaaaatgactgctggggtctttaaaaaattaacagattaaaaagcaatacaagtgcacttaacactgatcaaagtctgaaatgccaaaaagcaaaataaaaatcctctgaaatatatatgtatttttaaatatagaaaaactccaccaatagtagaaacaaagtatgtttaatggttgctttggaaaggggaagtgggcacctcatgccagggagatttaaaaatgagacttttcaagcaagcactgcctatagcatagtctcatattttgaaaatttaaacctaattttaattatatataaagaactattttaaaaaatcacacccacaagtaaaaaactggtaatctgtttacaaagtgcagcgtcagtacagcaaactcatctcaacaaaagattatgtgtggtttctcgggctttaaaactcccctggtttccatttaaatgctttaacattgagtcatcctgcatacatgaaaagcctgtgtaatgaagcctgggtcctttaacacctgctattaattaattccaacataagtgagtatgagacctgggaagtaaattgtcatcatctgattgatgaggtacagattatctgaataaaatttctgacctggttatgagtcagtaatcccaacacaaactactgctttgtaatgaattctgtatgctttgcatgtccttcaataactgaagattttttctccttttttctccaggtctcagtttcataaaatctttc

SEQ ID NO: 370078 - DNA, 632 bp, Homo Sapiens
gggtttcaggatgtttgcactgaagaaaaacagaaagcttatctgaaatttataaaactttttgttttgctacatagaaaacagaaggtatttgaataataagcagtgatatgcttagtgagcacagctatactgattttgattagaatagtcatcagagtggcttagggacagttaatataaaagaggagcaaggtgtagaccatcatctacttctgctaaaataacttaaaaagaggtccataggccataactacatgagcccagcttttgtaatctgacaaaaaaatgaggagcagcttcgtgtatatcagtgtacacggtattccttaggtcccttccattggtagtgatgctgcgagttattactggagaaaaggaattctagagctttaacttggcagattaaaagtactcattttttattcatcaataattagtaatctgactcggtttcaaaaatttgtttattattgacaacctctttgaagatccatttcacaaactcaacagagtgccacgattaagagctagggatcccccaaactacctcaagcatctaaaaaattgccattttttaaaggcttaaattgtagtagtaaaggggaaaacaggaagtagtagtaaagggg

SEQ ID NO: 370079 - DNA, 1050 bp, Homo Sapiens
cgaggcctgggtggcgaattcggcacgaggatcagcagcgcctccacgctgagcagccgtatctgccgaaggtggtggcagcgcaggggtgggggcggggctggggccggtgtggccagtgggccggagcttctggacacctatgtggcctacctggacggccaggcctttgggggcagcagtactcccggcccgccataccctcctcagctcatgactccctctaagctccggggccgggcgctaggagccagcggaggcctgcggcctggccccagcgggggactccgagaccctgttacccccaccagccccaccgtctcggtgacaggggctggaaccgatgggctgctggccctgcgtgcttgttcaggaccccccacggcaggcgtggcggggggtccggtggctgtagagccagaagtcccaccggtgcccttgccgacggcctcctctctgccccggaagctgctgccctgggaggagggcccgggcccaccgccaccacctctgcccgggcccttggcccagcctcaggcctcagccttggccacagtaaaagccagcatcatcagtgaactcagctccaagcttcagcagtttgggggctcctcggcagctggcggcgctctgccctgggcccgaggaggcagtgggggaggcggagacagccaccacgggggagccagctatgtccccgagaggacctcctccctgcagcggcagagactctccgacgactcccagtcctcactcctctccaagcctgtcagcagcctgtttcagaactggcccaaaccacctctgccgccactccccaccggaacaggggtctcccctacagccgctgcggccccaggggccacctcaccctcagcctcctcctcctccacgtccacccgccacctccagggcgtggagttcgagatgcggccccctctgctccgccgggcccccagcccctcgaagcggcccgcctcggagcacaaggtcagccctgcgcccaggccctcgtccctgcccatcctgccttccggacccctctaccca

SEQ ID NO: 370080 - DNA, 696 bp, Homo Sapiens
cttacggctaggtacgaggctgggtgtcgaattcggcacgaggcttacccttacaggatcgaagtagaatgtatgacagtttgaatatgcactctttggaaaattcccttatcgatattatgagagcagagcatgatcctcttaagggtcgattgagctatccacatccaggaactgacaatctgttgatgttaaatggtcgttcttccctctttccaatagatgatggcttgcttgatgatggtcacagtgatcaagttggagttttaaattcacccacctgttattcagctcaccaaaatggagagcgaatagaacgcttctctcgaaaagtttttgttggtggtcttcctccagatattgatgaagatgaaataactgctagcttcagaagatttgggcctttggtagtagattggcctcataaagcagaaagcaagtcctattttccaccaaaaggctatgcatttcttctctttcaagaagagagctcagttcaggcactcattgatgcttgtattgaagaagatggaaaactctatctgtgtgtttctagccctactatcaaggacaaaccagttcaaatacgtccttggaatttaagtgatagtgattttgtaatggatggttctcagcctttggatccccgaaaaacaattgttgttggaggtgtcctaggccattaagggctgtgga

SEQ ID NO: 370081 - DNA, 1068 bp, Homo Sapiens
taccagacgcgcagaatcgacatgatcgagcctgtgttaatcggcacgaggcaggacagactgctacctgactgccaagtccaggccaggccccaaccagaggtcacctggagaatcaacgggatccctgtggaggagctggccaaagaccagaagtaccggattcagcgtggcgccctgatcctgagcaacgtgcagcccagtgacacaatggtgacccaatgtgaggcccgcaaccggcacgggctcttgctggccaatgcctacatctacgttgtccagctgccagccaagatcctgactgcggacaatcagacgtacatggctgtccagggcagcactgcctaccttctgtgcaaggccttcggagcgcctgtgcccagtgttcagtggctggacgaggatgggacaacagtgcttcaggacgaacgcttcttcccctatgccaatgggaccctgggcattcgagacctccaggccaatgacaccggacgctacttctgcctggctgccaatgaccaaaacaatgttaccatcatggctaacctgaaggttaaagatgcaactcagatcactcaggggccccgcagcacaatcgagaagaaaggttccagggtgaccttcacgtgccaggcctcctttgacccctccttgcagcccagcatcacctggcgtggggacggtcgagaactccaggagcttggcggacagtgacaagtacttcataagaggatgggcgcctggtcatccaacagcctggactacagcgacaagggcaactacagctgcgtggacagtaccgaactggatgcggtggaacagtaagcgcacaagtcctggtggtgaggagcctgggacaggatgccacggaaagggaggcatgtccggacaccgtgaaccttggcttgaagcacaaaaagacagtgagtcacgatgatccaggaagtcactgacagaacaacacaatgcccccaatggcaaaacttggacactcgactttgaggacaccggaactggacccctcaacaaaagtgcacgactggcacagtacccgggaacaaacataac

SEQ ID NO: 370082 - DNA, 708 bp, Homo Sapiens
  misc_feature (579)..(579): n is a, c, g, or t
caggagaagcgaagcaaacggctaggtacaggcctggtgctgaatcggcacgaggctgccgcgtccagtctgtgtctgagtgtctgtttagctggtcgctgcttttgctgccaagcgggtggctctagctgctgtggagggagaggtaggataggggttctgcacctttacctccagtcggctccagtcaccatgcccaacggattgaagccagtggacacgctggactcgctgtcctctgtcagttcagcctactgcagcggcgggcagccgggcacctgcaagtactgcatcctcgacctagactcgctctccgtctccagcaatgacgccagtccacccgcatccgtggcttccctccagccccacatgatcggggcccagagctcgccgggccccaagcggccgggcaacaccctgcgcaagtggctcaccagccccgtgcggcggctcagcagcggcaaggccgacgggcacgtgaagaagctggcgcacaagcacaagaagagccgcgaggtccgcaagagcgccgacgccggctcgcagaaggactccgacgacagtgcggccaccccgcangacgagacggtcgaggagagagggccgaacgagggcctgagcagcggtactctctccacatcctcctcctcggggatgcagagctgtggagaagaggaaggcgaggagggggccgacgccgtgcccctg

SEQ ID NO: 370083 - DNA, 678 bp, Homo Sapiens
gaactggcagtaatctcgctgtataaggtagcgaggcctgggtggcgaattcggcacgaggggagctaacccctggtccgtgtcatcggggtgatgccttcctgagtctgttccaaagtcatggactgaagcctgaggccatctgtccgtgcgccacgtctgctgaagccatgactgtagcaatccgcaggcctggagttccaggagcccctttgccaggaagagccattctctcaatgaatggattgagctatggggtaatacgggtcaatactgaagataaaaattcagcactgacggtccaggatgtagggcatgtaatgcctggtgggatcgatgtgcattgtgaaaccagatggacctccccagctctgcaaaacagatgaaattggagaaatctgtgttcagctccagaactggcaggcatgatgtactccgggcttgctggtgtgacacaaaaatacatttcgacgtaattccagtgaattctgcagcgctctcctgtctggggatgtgccattcatccgatcaagatcgctgcggtttgtagggccgggtagtttggtgttcgtggttgggaaaatggatggcttactgatggttagtggtcgaagacataatgctgatgacattgttgctactggattgggtgtaatcaataaagactgtttttgcgga

SEQ ID NO: 370084 - DNA, 958 bp, Homo Sapiens
acaacttaggctaggtacgaggcctgggtgcgctgaatccggcacgaggccggtagaaatgtataaaataatcgagaccggcggaggcaggtcagagccgtctggaattgcgcgcaccttcaacggtatttggagattattcgcactgaattttctgcccgccaagaacgaataggattgccaagccacaccactttttggagcccgcttattcgcgcctatccaccctctcctgtgccccaggttccctgagcacgggaatcctttccgggcatggccaagtttgttcggtggctcagagcgggaagggaagtgcagttcgacacctgtccagctgctccgcttggagatcaaaggccggctatgggctgagcgacagatttacgggacggtggtacagattaaggcgagaaccctgccggtcctggactcgagttcgcacccaaggaaagcgtacaggtccctggaagcgggtggatgtcggagaggccgaggcagcctgcgctgtggccaggcaggcttggtgggctttagtctcagtatgtgttctttaaagtcttgacaggttattagtaaaggaaggggcaccccagggctcatgaagatgcttctcgctctggcccaagcatgctgaggctcgcttattcctcgtgcaggcccagtaaaacagctcaagcacagcctggagtcttcccgcatctgcgcgggagtagagtctggctttgggccccgcgtaccccgcaagtcgtcggggacccagtttcgagggccacgggaaggggttccgcgggcagagccgcggagttacagaaggggcacgaagggaatccctcttccggtgattcaagaagggccggggcttgttgattactcttcaacacccaaggttccagttcagcccccaaattgttgccccaagaaaacaaagttggggactggtggatttagaacattacac

SEQ ID NO: 370085 - DNA, 1023 bp, Homo Sapiens
  misc_feature (52)..(171): n is a, c, g, or t
  misc_feature (176)..(271): n is a, c, g, or t
  misc_feature (322)..(408): n is a, c, g, or t
aaacatgataggctaggtacgaggccgggtgttgaatcggcacgaggctatnnnnnnnnnnnnnnnnnnnnnnnnnnnnnnnnnnnnnnnnnnnnnnnnnnnnnnnnnnnnnnnnnnnnnnnnnnnnnnnnnnnnnnnnnnnnnnnnnnnnnnnnnnnnnnnnnnnnnnnnaatannnnnnnnnnnnnnnnnnnnnnnnnnnnnnnnnnnnnnnnnnnnnnnnnnnnnnnnnnnnnnnnnnnnnnnnnnnnnnnnnnnnnnnnnnnnnnnnggaaggaaacaacaacaacaccagcaacaacaaaaagcaggaaggaagggnnnnnnnnnnnnnnnnnnnnnnnnnnnnnnnnnnnnnnnnnnnnnnnnnnnnnnnnnnnnnnnnnnnnnnnnnnnnnnnnnnnnnnncacgaaaaaaagaaagagggatactttgagaagctttgaagtgatctgtttattgatcaagtagataggtaaggtgcatgctgccaggaggagctggggtagggagggcagggccctgctgtatgggggtgggcaggggacggcccctgctcagccctggcctccattgctacacagaatggcaggtccaatgtgatctggtcttctgatttttcaggagaaatcaggaatctgaggtgcatgcaaaatctcctgatttttaaatattggcaactaatttgttttaaaaaaacaacaactatgagctaatccaaaactgtttgctggttgggatccacctacctgcctttgcgctggggtatggagaggtgggaggtcaatgttgacaagagccagatctaattttttgttaaagaaaagggtacttggaggtcagatagctctcttcatagctatctgaagccttcctctcccttatctcttacaatctggtccaaactcagaaagctaggccgctctcggtgagatgggcttgtctccgtctctctgtacctgtcagagcagcctgggcgcctgcaagaaaccggggcttccagttggcattcgcccatgcct

SEQ ID NO: 370086 - DNA, 1172 bp, Homo Sapiens
ggacccatggtaggttgcctgcatgagggccgtccagccatgcacgctgtcctgcttggtcaacatccgcgtgcctctccaccagcagctgcaccagagccagctgccccgtaacagctgctagcatcagtggcgtcgccccgtccccattgaccaagttcacgtggctggggtcttcatcggcaatctctttgaccagctggaagtttcccattttcaatgcatggaaaatatcaggtcgccttttctcctcatctgttttgggcctgacggtggtcagcgggtccaggtagtctacaaggtccctgtgcttgcagtccagtgcaacctcgaaggcggtcttctccagcacgctgaggtggtcagggttggcgcccttctccaccagctgctgggccactccaagccgcccagtgagtgcggccagcatcagcgggctccagcccacggtccgggctgcgtggttggggtccgcgccccactccatcagtagacgcaccacggcctcgtgcccgtgctggatggcagccatcagggctgtgatgtccaagggctcatccctgctgccgcccaaccccagttgctcgcctgaagggtggtgatggtccacaaaggcaccggcttccaggagcagcttcaccacacccaggtgaccgccccgagaagccacagtgaccacactggcccccagccggttttgggcattgacatcagccccgtgatccaacaggaggtgtgccacactcacatgcccaaatctggccgcgtgcatgagcgcgctccagccgtagtggttgcggctgttgaccgaggcaccgcggcgcagcaggaagcgcaccagcggttcgtggcccccgtccgcggcgaactgcagtgcggtgttgcccgcctcgtccgagcaatccacgggcaccggagccccgactgcccccgccgctgcggccccgggcccagccacatcggcccccgccggctccgcgcccgcctccggctccgcgccgcgctcggctggctccgccgcccccggctccagcagccgccgcgccgtctccgtgtcgccctggtcacacgcgcgcagcagcagctggaaggccgggggcagcccgccctcgcccatcgccgccgccacgcgcggccccctcgtgccgaattcgccacccaggcctcgctcc

SEQ ID NO: 370087 - DNA, 920 bp, Homo Sapiens
  misc_feature (771)..(876): n is a, c, g, or t
cttaagccgcctaggtacgaggcctgggtgttgaatcggcacgaggctcaattgtccgcagcacgaccatcaccctaacacccagcgcagagacagatgtatccctggctctaccgtggcttcatctacccaatgctgcctggagggccaggtggaccaggggctgaggatgtggccgtgtggacgcgggcccagcgcctacacgtcctggccccggatggcccgtggccctgacacggagaacatggaggaggtggggcgctgggttggctcatcaggagcaaggagacgctggcggctgcatgctgccctgggtctgctcgcctcttccctctgtcctgggcgggacccacaagtatgcgacgtagagatccatgggccacgctctatacggcatcggcaggccctgggcacagcggtagctaagctcgtgctgtgggatcggactggtgtgccacgggaggcagcgagatctccttcttcttcctggagccctaccgctcgtcgtcctgcacctcctattcttcctgcctgggctgcttgggcagatccagggctgtggctgtgtgcctgaccagtgccacctgccacctgcgccagggcggagcccattgcggggatgacggggctggtggggtccctgctggtgctggtgccttaccctctgcccactctgcgaggagccatcggggactggccatcgcctgcacccaggaccccttctgtgagtgaccggatccgatgtcctatttacgaatttacagagggtcnnnnnnnnnnnnnnnnnnnnnnnnnnnnnnnnnnnnnnnnnnnnnnnnnnnnnnnnnnnnnnnnnnnnnnnnnnnnnnnnnnnnnnnnnnnnnnnnnnnnnnnnnntcttggttccattgttgggttggtgccccttgtagtcggggacg

SEQ ID NO: 370088 - DNA, 764 bp, Homo Sapiens
ttacggctaggtacgaggctgggtggttaatcggcacgaggcgcagaagcgggacgtcggcttctaggggcccaggccggcggcggcgatggcctcggcagctgtggagagcttcgtgaccaagcaactggacctgctggagcttgagagagacgcggaggtggaggagcgcaggtcctggcaggagaacatctctctgaaagagctccagagccgaggcgtgtgtttgctgaagctgcaggtatccagccagcgcactgggctgtacggacggctgctggtcacctttgagcccaggcgatacgggtccgcggcagctcttcccagtaacagctttacttctggtgatatcgtgggcctgtacgatgctgctaatgagggcagtcagctggccactgggatcttgacccgggtcacccagaagtcggtcacggtggcctttgatgagtcccacgatttccagttgagcttggaccgagagaattcctacagactgttaaaacttgccaatgatgtcacttacaggcgactgaaaaaagccctgattgctctaaagaagtatcattctggcccagcctcctcactcatagaagtgctctttggcagatctgctcccagtcctgccagtgaaatacacccgcgtgacattcttcaacacctgcctggacacctcccagaaagaacggttattgcgctgctccgaagaattgccttctccagggactctggcctggggaacccatgtggtggaacattcagcggaa

SEQ ID NO: 370089 - DNA, 725 bp, Homo Sapiens
  misc_feature (79)..(96): n is a, c, g, or t
aaaactacggctagtacgaggcctagtgctgaatcggcacgagggtactactgtcagcgtattaactgcctggcatggnnnnnnnnnnnnnnnnnngaaatatgttcttatcctaccatttgaaaaaaatcctccatggcttctattagagttttggaatacttgtgaaaattttcaaaagaaagtaatggattaaccatatttggctgcttattacgatgagctgtgtccattagctgtgtcaccccaattcttgcatttccaagaattagtccctacccaatggcagcgggcatgtatttgagtggtagtgcattccatgtgcttgatattggtcctagaactggcacagcgcctgccctacctgcagcccatgggttgtggccctgttgcgtaccatgtgatttgccaccccgcattctaggccatattaattcagccagaactgaacacctggacccaagggcagcaagcaatcatcagagcatagaagcatgacagaacatgatggaccacgggacaccaccagggccttccagaatctgaaatggcaaacaaggcaaacagaagcttcatagagcatcagaagggtgtggggagcagcacaagatactcaaaggactgaggaacgtgaccctgctggcaggaaggctggccatggaatgtccaggaaccaggcagcagcctcatggccaagtgcgtcccactaagaacctgaactgcac

SEQ ID NO: 370090 - DNA, 728 bp, Homo Sapiens
  misc_feature (20)..(20): n is a, c, g, or t
  misc_feature (77)..(77): n is a, c, g, or t
ggcagtactcccagggttanaggtagcgaggcctgggtggcgaattcggcacgagggtcaggccaggcagccaaggnagaagacgtgtggccgggggctatcagaaggaaactgggacggacgggccgggctcgggctgtcctgtggagcagcagcatccccgtgggccggcagaggcgccagtggctgggcgggatgagtctctgagggccactgtggagcgccccgccatggcccccgcaccctctggagctgctacctctgctgcctgctgacggcagctgcaggggccgccagctaccctcctcgaggtttcagcctctacacaggttccagtggggccctcagccccggggggccccaggcccagattgccccccggccagccagccgccacaggaactggtgtgcctacgtggtgacccggacagtgagctgtgtccttgaggatggagtggagacatatgtcaagtaccagccttgtgcctggggccagccccagtgtccccaaagcatcatgtacctgccgacttcctccgccctcgctaccgtgtggcctacaagacatgtgaccgaccatggagtggaggtgctgtcagggttatgggggcgatgactgtgctgagcagtcccgctccagcgctgcggcctgctgtcttccacagcacgggccctgtgcccgtgctgcccgcccaacctctctggctccagtgcaggagccccctcta

SEQ ID NO: 370091 - DNA, 774 bp, Homo Sapiens
agagagccgaatatggctaggtacgaggctgggtttgaattcggcacgagggttctcacgcctgtacgatttctctgctagtgaccgaagggacgacccttctcccaaacgtccagaaacgaaccccagctggctggcctctccctgcatgtggcccgcaggagagagggagggaaggtctgtccatcctgtggctagaaccggcggggaaggggcgcttctgagtgcccgggaggtcatcatgaagagcggctggagtgactgccctacccccgggatgcctatccatgcccgtggcctggggcagcttctctctgagctcctgaagggcgccagctttagcctcagagccgtgtcgtgttctctgctgctcagccctactggggagcatgtctgtctccgcagagacactgccaggagctacggcttcgattcttcaccatgtttgtcaccagcagggcctgcatagggggtgtggcaggccgagccggggcccggcagaaagcaaatatttcagatgatgggcctgccaagccagcgcgcgcacgttggaggccaaagccttcttgtgccagtcctgtgctagtctagggcacattatgccctttcggggagggcaacaggcccatggcctgtcctgtgggaggtgtgtgacctggggatgctggagggtcaccatccttactaagggcctcctggtcggtgcctaaaggtgcccctgttcgggccctgggggctttccgggagcccaaactgtttctaggggccccgttc

SEQ ID NO: 370092 - DNA, 790 bp, Homo Sapiens
gtgggcaactaggctaggtacgaggctgggtgtgaattcggcacgagggtggatggcaatgacctcctgtcctactggccagccctgggggagtgcgaggcagccccctgtgctctgcagacttggggctctgaaaggcgcctggggctggacaccagcaaggatgcagctaacaacaaccagccagacccggccctgaccagtggggatgagacttctctgggccgggcccagcgccagaggaaaggcatcctgaagaaccggttgcaatacccactggtgccacagacccgaggtgcccctgagctgtcctggtgccgtgcagccaccttgggccaccgtgcagtgccagctgcctcttacggtcgcatctatgctggcgggggcacgggcagcctttcacagccagccagccgctactcttctagagaacagctggacctgctcctccggcggcaactgagccgtgagcgactagaggaagcccctgcccctgttctacgtcccctgagccggccagggtcccaggaatgcatggatgctgcaccaggccgactggagcccaaagatcggggcagcaccctgccacggaggcagccacctcgggactaccctggcgccatggctggccggcttcgggtcacgggatgcgctcgacttaggggcacctcgagagtggttgagcacgctgctccgccccggcgtagccgggagctttgacgcacaggccccagctctggacctgtctcccgagtggcaactctcaagggaacccctcttggcatcccga

SEQ ID NO: 370093 - DNA, 883 bp, Homo Sapiens
cgccggcggacaagttggcaagcgctggccacagccatcccgggtacctgaaagggcggagggatggacctgttggggtcaggcccgagctcaatcaactccaccgccagcggccaactccggtccatgatggcaatgtgcacaatctcccatgggttggtgttgccagtgtctgtcgccccacaaatctgagctgggtcccagcccattccaggaaatcgctgaactggcttttcagcccctagccgggtagtggggaagatgaacgtgccgtcggagctgttgctgttggtgctcccatcggtggactcccggctgcctggcgtgtgacccggctccgcatctccaccgcgatgcctgtctccgtgctccggcggatgttgctgcgcagcttcttggtggccccttcaggctgcggaagctggagtgtgctcttgctccactgagtcaggcccacgatggccaccatcttggcacccaggctgctccgccgcttcttggcggtggtggtcccagccccgcccccggcttgctgggatccgcagatttcaccgctaatgctggagctccgcaccacattcctggaggccccagatgaggcaggacctggctccccgttaaacatggtccccggggtggcagggcctcaggcagctcgaactgatgaatctgagcctggtgttccgcatcacagggggctgcctcccaacagcacacccctagggcatttgcacaaggcttcaattgacttccggaggtggggccggggtccagacagggagggggcatccacaggccgaggcctcgtgccgaattcgccacccagcctcgctaccttataaccgttatgattactgcctctttataagcgcgttgacactgc

SEQ ID NO: 370094 - DNA, 1189 bp, Homo Sapiens
  misc_feature (44)..(85): n is a, c, g, or t
ttctaggcgttaggatcggggcgcggcggcttgcgccctgcttnnnnnnnnnnnnnnnnnnnnnnnnnnnnnnnnnnnnnnnnnnataccgatcgcgtgcaccgcggggcatatgaacggggatggggaggaaatcggtgtacacggggtgtaccccccgcatcgttcgcttttcgctctacgaaagcccccaccggaacgctcccgcgtccctgcgacgccggaggtaagccgggggccccgtggttgtttaatggacgggggggcggccattcggcaaacgggggagtttggtcattccccgatccgccactcttgcagggcaggtgcttcaagaggggggaccgtttgccctccaaccccaagagacccccgccggggctactcttggccccgaaggaggacgtgccctggccccgagtcgtgtgccaccgcctcagcctcactgtcagtgccgtcgtccaccccgtccagctgttcaatgcggggggcttcaggggtagcgctgggggccagaccaggggcggacaccacagtcgcagggaagtggatgtagcgggaggtggggctggactcctcctcggagctgttccccgggcccccgtggctgctccccatggccccagcggctacaatctcttcctggaagggctcagtccccagcaggctggccgcgaagtccaggtcagcagcactcagtcctgacaccacctccatgtcctcgaagtctgggcccaggtcttcagggggtggtggagatggggccgggccagggggagccagctcccctgaggtaggtgtgagggctgtgacgactgaggtaggagggggcaccctgagctgaggggaggtttttagaggaggggaggcccaccgtgatggaggcggcctgggagccaaagggctgggacgacgggaacgtctggggggagctgggaagtccgggtctcccactgtggggatgtggtgggtcagtgaagatggacttccaggggagggcagggggccaaaggagacaccccccaagggcctccgggatggcgagtagttgggcactttgattcgagcccccgaaaaagaacggggggctggaggaggggcgctgcctgaatctggccgcagtggagggtccaggttctgaatgggcgagtggcgctcaggagctccagggacaagaacatctgtgtcc

SEQ ID NO: 370095 - DNA, 678 bp, Homo Sapiens
  misc_feature (481)..(489): n is a, c, g, or t
tggccgggggttaatcggcacgaggtctcaggtaggtaagcatgaatgaagcagataacagagacgagggatacgaaggtcagaaagaatttcagaccttaaaatgtggtatagaatgctctgcttccatggaaaggtttcctaaaaagccatttatttctctagctcccaaataggagcatcttttgtcccatacccttaaattctttaaggatcctacttcctatttagtgattttccttagagggtaccgtgagagctaaagtcctctttatggcttataaggtgctgcatgatatgcctgctcttccattgttttgggggagtataagaatatttctgaggtattttagaggaactgcatgttagatcatttaacgtttcttttcccatcatgtctgaaatgtgtaacgaggagtggtgatattaagatttgtttcagaaatcacaggaacatgaatgacagatgttacttctctannnnnnnnnaatattagcaatcctaacagatttcgagtgatagctcatcattgttttcatttgcagttgcctttggtaggtgatattgagcactttcttatatatctatcggtccattgtatatattacgtggcaaaatatttctttcactctttcaaccatttttcagttggactattatgtccttattatactgct

SEQ ID NO: 370096 - DNA, 200 bp, Homo Sapiens
taggctaggtacgaggcctgggtgttgaattcggcacgaggaggacccatgcttggcatgggggggcacctggttttgtgtccttggagctcatctctggtgggggaggaggagcagcaggagatgcgagggctgtagttctcagtcctggccgcacattggaatcctatgggggagctttaaaattatacaccaaactc

SEQ ID NO: 370097 - DNA, 889 bp, Homo Sapiens
aacggctaggtagcgaggctggagttgaaatcggcacgaggcagtcctttacccgtagtcttggagaaagccctaccctgcggaccgtcaagcacgattcaaaatggttgaaagaaccatactttgttcaagccgtggattacggagattatatctacttcttcttcagggaaatagcagtggagtataacaccatgggaaaggtagttttcccaagagtggctcaggtttgtaagaatgatatgggaggatctcaaagagtcctggagaaacagtggacgtcgttcctgacaggcgcgcttgaactgctcagttcctggatgactctcaatttttatttcaacattctccaggcagttacagatgtgattcgtatcaacgggcgtgatgtatgtcctggcaacgttttctacaccttataacagcatccctgggtctgcagtctgtgcctatttgacatgcttgacattgccagtgtttatactgggagattcaaggaacagaagtctcctgattccacctgtgacaccaagattcctggatgaacgagttcctaaagcccaggccaggttgctgtgctggctcatcctccttagaaagatatgcaacctccaatgagttccctgatgataccctgaacttcatcaagacgcacccgctcatggatgaggcagtgccctccatcttcaacaggccatggttcctgagaacaatggtcagataccgccttaccaaaattgcagtggacacagctgctgggccatatcagaatccactgtggtttttctgggatcagagaagggaatcatcttgaagtttttggccagaatagaataagtggttttctaaatgacagccttttcctggaggagatggaagtgtttacaac

SEQ ID NO: 370098 - DNA, 849 bp, Homo Sapiens
caaaaagtaggctaggtacgaggctgggtgtgaatcggcacgagggtaaaacagctgcaaggcacaggccaggtctgccatgccttgtgctcccccgagggctgctggggcccggagcccaaggactgcgtctcttgccggaatgtcagccgaggcagggaatgcgtggacaagtgcaaccttctggagggtgagccaagggagtttgtggagaactctgagtgcatacagtgccacccagagtgcctgcctcaggccatgaacatcacctgcacaggacggggaccagacaactgtatccagtgtgcccactacattgacggcccccactgcgtcaagacctgcccggcaggagtcatgggagaaaacaacaccctggtctggaagtacgcagacgccggccatgtgttgccacctgtgccatccaaactgcacctacggatgcacagggccaggtcttgaaggctgtccaacgaatgggcctaagatcccgtccatcgccactgggatggtgggggccctcctcttgctgctggtggtggccctggggatcggcctcttcatgcgaaggccgccacatcgttcggaagcgcacgctgcggaggctgctgcaggagagggagcttgtggagcctcttacacccaggtggagaagctcccaacaagctctcttgaggatcttgaagggaaacttgaatttccaaaagatcaaagtgctgggctccggtgcgttcggaccggtgtataagggactctggatccccgaaggtgtgaaaagtttaaattcccggcggatcaagggattagagaagcactcttcgaaagccacagggaactcgtgaacccgtg

SEQ ID NO: 370099 - DNA, 964 bp, Homo Sapiens
  misc_feature (54)..(54): n is a, c, g, or t
atcaggctaggtacgaggcctgggtggtgaatcggccgaggcttgtggagatcnattgaaagagtcatagccagttggcatgcagaggtcttcagtcttgcttattcttctcctgggcttcttgacacaggggcagaagaaaccccagatgtcccagatgtcccagaacatcagcccaaaagacagaagattttatcactcatctaccccaaagataaagttgtatttttttcttagaatggcctttaattccctgtggcaattacagtttttgacttttccatgtgagaataaggccttggtatttccctaagggcaggatcagaaaacaggaaggtccatgcccaggtgatcctccaagggaggaggtgtgaggaggctccagggcatgagctagagtggatattcctcccctagaagaggagatgggaggaaatgcagtttcatgtaatccctgtgaagagtgcctatgcccacagcccagtgggtccttgttcagttcttgtccaggcctttgggtgagggacactggtagggatcaaggctcatgggctctgagccaaagaaggaggcatggtgcagactgctggaaatctcccccttggcacagccagaagccaaaactattcccagaaagttttgaatgcaaaacttgtagattcctgaatttactccatacataattatctccttaagtgattttaacttattaaaggtgcccggtgggacctctgggggatgactctaaaaagggtgcttcgttgggagtcaagttgacagagcagacctggcgccgggagtttgtctgcttctgccttacctcctccgggaccattcccccgggcaaaggtggtcccagggccgccttgggtttcgtcgaagagccccccggtgttaacgcattgaggcctctcaccagtgtggcctgggatgtcccttccaaacgggctcctggtgggcccgg

SEQ ID NO: 370100 - DNA, 1264 bp, Homo Sapiens
gggcctccctttaggtccctggctgtatctcagtgttcccccacctactcccctttcccacgaccctcagcctgccccctcctctagattcgcagccctagttgtcccaggagagactgtgggtctccgtgggagctgagcaggaagaaaggcggggccggcgggggcagccgcggcggggttgaggccctgaggggcagctcccaccccgtagcagcctccgcaggtcctggcggaagcgcaggcccaggaaggcgtagagaacgggattgaggccacagcgggcgagggccaagccgctggtcaccagcagtgcgacatccttgcgtttgctggcagggcagctccgctcgcgcgcagccagtagatcggcagtatccagcagcagggcgaggctgtagggcagctgcagcaccacgaaggccgccaccagagccaccacgacgcgcagcgcacgccggcgctcgggccccctggcggccagcagcgtgaggccccagaagcgcgtagcaggctaccatgacgcccagcggcagcgcgaagcccaggccacctgcgccacggcgctcgcccccttcaccgtctgcgtgaggccctcggggaagatgaggcgacagcgtcgttggccttcccgctgcccatcctggctgaagagcagcgcaggcagcgccaggagcagtgacagcagccacacgatgacggagaccaagtgtgcgcggccgggagtggagggccgcggcccggctgggagcgctcgcgcgatggccacgtagcggtcggcgctgatacaggccaggaagaggaagccggcgtggaaggaggccgagtagaggccagagatggtgcggcaggtggcacttcccagactccagccctgaagagcccctgctgccgcgaagggcagagtcagggccagcaagaggtcggccagggccagctggagcaggtgggcagaggtgggcgagcgcgctgcgcgtcgggctgccaggtgggtggccaggaccaggccattgccggccagacccagcgcagccacggtcagggagacactgggttggaaggcccggctgaaggcctggacatcggccttgtagcaaagctccggcagtggctcagccgagtatgcgtcctcttcatccccagagtaatggccccaggaaaccctagacggctgcgacgaggagctggtgggtcccctgtatgcacgctccctgggcgcctcctcctactacagtctccttactgcgccgagattcaccccgct

SEQ ID NO: 370101 - DNA, 737 bp, Homo Sapiens
ccagtaactctaggggtttcaggtagcgaggcctgggtggcgaattcggcacgagggataaactctcggtgtgtgccatggccagtgcactggatgatgagcacatgtgtgcggcccctgcccccgtggagcgcatgcatggtcctccagccagagaccgcgctgggagaaatcaggggttcactcctggtcggaggtgagcatctgcctctgcatgtaggaaggcatctcatgaaaccccaaaggcctggcagcccctgcacatggaaggagtcactctcctccatgtggggtgagccacgctggccttgtggcattcacatgttccctccacctgcttctccagcgtgaaggggacctcaatgtcctctgatgaccttcttgaagagagacatttccttccttcattggaggctttagacggagccagtgacagctcagctctggctgtttcccatctgtgaaatgggaagagggaggatggcacgagtcccttgccctcaccaaactggccgctagagagaggaaagatgtatccattctgatccccactcacctccaccaccatccttccaggcttctgatcctcattgtaatttaggagctatttggtgatatagtctttgtacttggatccggaggcttctcctaccaaatcattggttaaacaacgtgaccaaaataaaagccctgagcctgggcgcgggtggactcacgccctggtaatcccaaaaact

SEQ ID NO: 370102 - DNA, 1228 bp, Homo Sapiens
gccccgccagggttgacaataaacacgggaggggggaccacacgaaagggggcggaccacccgccgcgcgggggaaacaacctcaaccggaggttttaaagaccaagggaaggggaaagggaccggaaagagaaaggtccgggacaaacagagggcagcgcaaaagaaaataaatacccccgggatcgagaaccaagggcacccttcatcttccggcgtctggtctctttctcagcagaaaagaatgatcctatgcattaatgagagaagacggcgtcggccggatcatatggagggacagagagaaagagccagataggatatggagatagggctgaggttctaattcgcccccaaagggtggaagagtgcgtctttgagccctgggttcgacagtcccctccttcttgcaagttgccgccaaggcccgccctcggttgggctgggggtggaaaaaatattctcgttctctaatgtagtaaaaaaaatcaaaggacattgcacgtgcgatccaagtgtgtggttgcagccgacgacctgccggcgctcagcagaagctccgcgggatgcgtagcaccagtcgccggagcccagagcctggcgttcgccgctgccttcctctcctcccggggcttcaggagtggctggcctggccaggtcctcggcgcgggcctcggctcactggtttaactccagcgcccagacttgctgcggccagccggtgcgtcctttaatcctcttctcgactgggcccagggcaggaggaaaaccttcgtgctgctgcagctcccttttccgcttgctctcacggccgccatccgccttcttgagttcagccttgaaggcctcgggatcgccagactgtgcatccttggccagcacgtccatcaggtaggcgatgtagctggtggctaggcgcagagtcttgatcttggagagcttggtgtcggccggcacgttggggatgcactcgcgcaactccgcgaatgcgctgttaatgctctcagtgcgtctccgctccttcttgggtcctgagcctttccgccggccaagacggccgccaagcgcctccagccgcccggggctctgcccaggcctggcgtcaggaccataggcggtggcggctgcagcggccgcgggcggcggcccgcccgcagggaagtccggggcagcgtcagccgggccgccacccaggcctcgctacctaaaaccggggatagttactgga

SEQ ID NO: 370103 - DNA, 995 bp, Homo Sapiens
ggccagtaactctaacggttctaaggtagcgaggcctgggtggcgcaggtctttgggcttcggcgacctcgcccgcggcagaaaccggtaagaagacagtgggctgcgcgtctcattttcagccttgcccggactctcccaaagccggcgcccagtagtggctccagagcccacaggtggcccccggcagtctctggggcgcatggagcggcgttaatagggctggcggcgcaggccagtagccgctccaacatgaacctcgtgggcagctacgcacaccatcaccaccatcaccacccgcaccctgcgcaccccatgctccacgaacccttcctcttcggtccggcctcgcgctgtcatcaggaaaggccctacttccagagctggctgctgagcccggctgacgctgccccggacttccctgcgggcgggccgccgcccgcggccgctgcagccgccaccgcctatggtcctgacgccaggcctgggcagagccccgggcggctggaggcgcttggcggccgtcttggccggcggaaaggctcaggacccaagaaggagcggagacgcactgagagcattaacagcgcattcgcggagttgcgcgagtgcatccccaacgtgccggccgacaccaagctctccaagatcaagactctgcgcctagccaccagctacatcgcctacctgatggacgtgctggccaaggatgcacagtctggcgatcccgaggccttcaaggctgaactcaagaaggcggatggcggccgtgagagcaagcggaaaacagggagctgcagcagcacgaaggttttcctcctgccctgggcccagtcgagaagaggattcaagggacgcaccggctggccgcagcaagtctgggcgctggaagttaaaccagtgagccgaggccgggcgaggactggccaggacaaccatctgaagcccgcgagacagaggcaggcgaagcaggccgggctcgggagggacgatcc

SEQ ID NO: 370104 - DNA, 1063 bp, Homo Sapiens
  misc_feature (433)..(479): n is a, c, g, or t
cgctgaaaagaacatgaacggcaacgtcaaaaaaggcaaaccagggcgaccgtaaggggaaaccgctaaccttccccgaagccggttttttaattaggagggatgcaggccgggtccaatggctaaggaccgccccggctcccagtgcgggatccggcggaccccggctgacccacacaagttaaatgaagcgtaacagagagatcctcaccacgtggcacagctcaagggaaggtggcgcacattagctagagtcagagaaatagacatgtatgaaatgcgggccaggagcccttccataaagcaatctctctgttgcagtggttcttaaccaggtgtaaacgttataactacctatgggacttttaaaacctgtatgccaggccccatccaaacttactgactcaaaatctccgggcatctgtttttttgnnnnnnnnnnnnnnnnnnnnnnnnnnnnnnnnnnnnnnnnnnnnnnnctgtgagaagtttgatgtagttgtcaacaaacaccaccaacggttcatgaggggccatcactaccttgaggatcatctcagcccgggtcatgcctttgacaacgatcttggtgtagctggcgggtgccttcctcaccacctgcgagctgatggaggggagatcgagcaggaccatcttcagcgagtgggtgtccagcagcagctgttctgctcccaccatgctaattggcttgcacttgaagaggtgggtgatgaatttgggaatgaaggagtttgcaaatttaacgcagaactgagtgaagtacttgcgtgtggaagccaggttgtcacggatgatggggacgttctgcttgatgtgcagaatgacagaggtgacgtaggggctctggtcaccaacgtgctccacgttctgccactgcatcttgctcatggcagtcagggcaggatcacaggcagcatccagatcctgaaccagcagctgaatactgctggagatgacggtgctgaacgtgtccatctctccagtcagattgattcgttcaatccctcgtgccgagtcacccggcggcctcgcacctagccta

SEQ ID NO: 370105 - DNA, 569 bp, Homo Sapiens
  misc_feature (11)..(11): n is a, c, g, or t
  misc_feature (410)..(490): n is a, c, g, or t
gctctcccganctgccgccccccgcccttgtcttatttggaatcttttcctaatagacctcaactgaaggccgcatctccttctcgcaacacttcttttctcctccgcattctcaaagtttgagacgcttgatgcgtgagagtcaaaccagctagcaaggacagcctggaagccgatgaagaaatgacactcaggatcagagctggacggcatcggggagaaagcctggcagagagggcaggggcacagagcagtggttatgttgggaaacaaggtggggatgaggaaatcaggtttccaggcagatttccaaaccttattcctactgtacggctgttacaagttttatggattttaaggaaatttcctctatcctgaaaactttttgagaaggggtctcgctctgtcannnnnnnnnnnnnnnnnnnnnnnnnnnnnnnnnnnnnnnnnnnnnnnnnnnnnnnnnnnnnnnnnnnnnnnnnnnnnnnnncaaaaaaacagatgcccggagattttgagtcagtaagtttggatggggcctggcatacaggtttaaaagtcccataggt

SEQ ID NO: 370106 - DNA, 886 bp, Homo Sapiens
tgtggcgagcaaacatcgtgctaggtagcgagtgctgggttgtgaattcggcacgaggcctctcccggcagcacaggccctggtggtgggggagctggggccccaggcctggccgcagctattgctggagccaaactcaggaaagtcagcaagcaggaggaggcctcagggtgggcccacagcccccaaagctgagagtggtcgaagcggaggtgggggactcatggaagagatgaacgccatgctggcccggagaaggaaagccacgcaagttggggagaaaacccccaaggatgaatctgccaatcaggaggagccagaggccagagtcccggcccagagtgaatctgtgcggagaccctgggagaagaacagcacaaccttgccaaggatgaagtcgtcttcttcggtgaccacttccgagacccaaccctgcacgcccagctccagtgattactcggacctacagagggtgaaacaggagcttctggaagaggtgaagaaggaattgcagaaagtgaaagaggaaatcattgaagccttcgtccaggagctgaggaagcggggttctccctgaccacaggggacccagaagacccgcttctcctttccgcacacccggcctgtcaccctgctttccctgcctctacttgacttggaattggctgaagactacacaggaatgcatcgttcccactcaccatcccacttggaaaactcaagggggtgtggcttccctgctcacaaccacacatgctgcttgattggctggggagtgccccgacccttttctccctttgggtcatttccctctgcatccccttggggcggtccctctggttgggatgcaccaatgaccccacaagcgaagggggaaggaaggagg

SEQ ID NO: 370107 - DNA, 1068 bp, Homo Sapiens
taggctagtacgaggccgggtggtgaattcggcacgaggctggatatgtgtggcatgggctccttcaggtgctaggtggattccttaggatggtggtgtcggcatgaaaggcaggcttgtatcatgaggaatgattgtcatcttgtctgattcttggagatggcaggaagcccctggcaaacacatggtgtggactccttcacaggctgttgaaaccctcctgaatgtgaggccagagacaggcagacagcagtatgtatggcagggagctggatgacatggcccttggaacctgtgcacatgcctgcctttctgatgcacgtccatgttttctctgcacctccccggtggtgttggtgataaaaagcaggcttacatcagcaagggatgattgtcgtctcatgcgatcctgggagatggcagaagtcccgggacacatggagtgtgggctctttcggaggctgttggatccctcctgaatgtgttgtggccatggaagtaaggccagtggctacgagggacagtcttcatcttgggagatccctagagagggcagggagccccttgacatgtggaatgtgatctctgttgggtgctggtggatcccacaggtggtctggcatggaagaaggccagaggctgcgatggatcatctttgtcttgggagattcctgggagatggtggggagcccctgggcacgtgcagcatatgtggcgtgggcttcttcaaggtgctggtgggatccctcaggatgctttccaaggtttcctatgagtcctggtcacagagtctggacatgggcgttggaagaatgcttcgattccaggatgtgggttccagagggcgggtctttggggccggccagatttctacgaagttttctttaacccaaagggcgagggggttctggcaagtttgtctcactcacatgttgtgggcggggaacccgggttttgcacccggggtttgtgtttccatcccgggggagaccccctttgggctccacggtgtgtgtcatctccgcgagaaagattatgccccccggcacaggtgcgactacggcggct

SEQ ID NO: 370108 - DNA, 557 bp, Homo Sapiens
gtgggctgtctagaggatccctcgctatcatcggcaccaacagagatacattccacatgtcaaggggctcccgccctatctagggatctcccaagatgaagacgtccctcgtagccactggccttacttccatggccacaacacattcaggagggatccaacagcctccgaaagagcccacactacatgtgtcccgggacttctgccatctcccaggatcgcatgagacgacaatcatcccttgctgatgtaagcctgctttttataccaacaccaccggggaggtgcagagaaaacatggacgtgcatcagaaaggcaggcatgtgcacaggttccaagggccatgtcatccagctccctgcaatacatctgctgtctgcctgtctctggcctcacctgttcataaacacagaagttaacagacacaaggatgctcatctgggggtcaggagccttcagagtacgtcatcccactaaagagcatgttcagcatccttctcaacatcgttgcttcaatacctacaatgatactcacaaaagccttgggaccctgggc

SEQ ID NO: 370109 - DNA, 678 bp, Homo Sapiens
tcggctaggtagaggctgggtggtgaatcggccgaggcacactagggtggctgagaggggtcctggggtgtttcagacccttctgggcatctccttccacagctgttcagtttgtcggtctctttgaggcagccacctgtccctgagggcccctgcacagagcagctgtgtggcctgtaattcagcctgcctgccttgccttggggcagggagagagggaacctgctcacggccctgcatgcagagcagggctgcaaacccaggacatctgtgccaggcttcccatgccctcccccaacagtccctcagcttcacccagcggggcttccatggccagcctgtgtcccctcccgcatggcctcctgtccacaccagctgccccctgtgggggcctcacacagcccctggctttcctctctgcctgctcctgtctctccctggggtttcttggtggtggaaaagctcaagcctattgcgaagctaatgaccttgcctctgtgcgaagcttacgggagtgctggacctcgacacagactctagctgatggcctctctggcccctctgctggctgtcccggagcccatgtgcttggcccctacaggtggcagccctgccactccatgctggtggcctggcccactgagcacgcttggctccggggcccgttccgctcggaca

SEQ ID NO: 370110 - DNA, 799 bp, Homo Sapiens
  misc_feature (181)..(206): n is a, c, g, or t
cagtaccataacgttaactaaggtagcgaggcctgggtggcgaattcggcacgaggctctcatgtgcttctctgcatctctgattcagccatgatctaattatctcagtctgtttccctatgcgtgcctctgtctgtctgtgggtgtctctaagtctctgtagatagacaggtaggtaggnnnnnnnnnnnnnnnnnnnnnnnnnnaagatccactctttctcttccctgccccttcttccttgcctctcctctcctaccaacttcccagtactctcagcatatccctcctttctagagctaaagaagtagagcaattccactggggaagcagcgtctaaagggtatttggtcaccttctccatgtgcagcctttgcagtacgctgcccctccagtctacagcaagtttttcagcttatgcacctgttgcaggggaagggggcaggagcactgtggtccagcagcatggccattggcggagctgtctccatggtgagcagcagagcccataggagccaggggagcacgtgagcagccctaagggtggatggagaggctgcctcaggtcagaaagccatgcagctcttgaggctgaggatccaatggcactcctgggaaatccctcccaggccctgtactcatctcttcctttcaccttccttcatgaaagcttttgccactgctcttctagagaagattgtgagaccttgagactgggggtttctgacctcgagaggagatccagaatctgtgggcacaacatcttcccacccaggtgcctctaaacagtgccccttta

SEQ ID NO: 370111 - DNA, 797 bp, Homo Sapiens
cacaccaataaagtttgacaacaactcagagtcaatctgccatcaaacacaatgtcaaatccttaatcacggggcctagcaaactatcccgtggaatgcctccgctggaaattgtgccagagaacataaaagtggtagaacggggaaaatatgaggatgtgaaagcaggcgagaccgtgcgttcccggcacacgtcagtggtaagctctggcccctccgttcttaggtccacactgcatgaagctcccaaagcacaactgagccctgggatttatgatgacaccagtgcacggaggacccctgtgagttatcaaaacaccatgtccagaggctcacccatgatgaacagaacttctgatgttacaatttcttctaacaagtctaccaatcatgaaaggaaatcgacactgacccctacccagagggaaagtatcccagcgaagtctccagtgcctggggtggaccctgtcgtgagccacagtccgtttgatccccatcacagaggcagcactgcaggcgaggtttatcggagccacctgcccacgcacttggatccagccatgccttttcacagggcttgggatcctgcagcggctgcttacctgtttcagagacagctttcaccaactccaggttacccaagtcagtatcagctttacgcaatggagaacacaagacagacaatcttaaatgattacattacctcacaacagatgcaagtgaacttgcgtccagatgtggccagaggactctccccaagagagcagccactgggtctcccatacccagcaacgaga

SEQ ID NO: 370112 - DNA, 928 bp, Homo Sapiens
  misc_feature (648)..(825): n is a, c, g, or t
cggcggtaaaggtagcgaggcctgggtggcgaattcggcacgaggctaaagacctcctcagaagagagagtatttgtacacaactttgccagagagggaagcttggcagtgtgaacgtgtgtggggtgtcccgggcgcggcgggcagtcagggtggccaatacaaggtgctggcggtgaggtgggggcggactgagcctgtgtagtgaagtgtcttgaggaacgtcagctgtatcttttaggaaaccaaaactgcatagacattgaacccaggcagaaggtcatgaagtcagagctaagaaatgctagtggggatagggggtgagatagagttgggaaatgtttcagagctacaggtgacagttgtaggtgtccagttggatatgtaccatgaagggaagaagcagttcagagtgggcaccaagctttctaggcctggaggactgaatggttctgtgcaacatttcagatggaaagaatagagggcccacagaaagttacatgagatgcattttatacataccagttttgaattttaaggacctgtggggtagatatccaagatggctattcccagtaatttgtatttatatcttgctacatcgcagaaaggatttgaagctgctaacacacataagatataagattnnnnnnnnnnnnnnnnnnnnnnnnnnnnnnnnnnnnnnnnnnnnnnnnnnnnnnnnnnnnnnnnnnnnnnnnnnnnnnnnnnnnnnnnnnnnnnnnnnnnnnnnnnnnnnnnnnnnnnnnnnnnnnnnnnnnnnnnnnnnnnnnnnnnnnnnnnnnnnnnnnnnnnnnnnnnnnnnnncggtattcacgaagccaaggccgggaaatggttcccggaagcaaaagttgcgcagctggatactgcccttgctcttacccgggtgacaatgtgatcccctttt

SEQ ID NO: 370113 - DNA, 905 bp, Homo Sapiens
gagtcccgctgcgttaagtctggccaagctcgcgaggtgcctttggttttctccccagatttataatccgttgctcgtgggtctaaagttgccaccagctttgtatgattgtgggggacctcgcgtgttatgaaccttgggttacctgatccgccacagtgaacacggtgggcagggggccacagaaggcgctccattgcgtgtttcgagaatttcgcggtactccagttgatctagcgcaggccatagtaatgttcacccggtcgtgccggttcgggcccgtcgcttggtttactgcttattcgggcctatcttgctccgatgggtcgtcgattggttgggtcctcctgtgctctttctcctgtgatcctgctcaggccaatggaggcacagagggcccggtcagggtccgcttcgactgctcgttccctgcgggacggggtcagcagttctggcgcagtgggggcctgcccccctgaccccgttaggggtgacggctgttgtcagaggccctgtccccggctcagtggcccgtggcagggagggcactgcgagagtctggccggccggaggggtggctagcgtggggtccggatcagatcctggcaggtagcccatctctgggcccctcctcagcagggccccatgaagcagttcagccagggcctcagaggccaccgtgggggtctcacttccaggctctggcaatatctcctcctccttcaggggcagaccctggatccagggacagctcagcagaattaggaacagcagctggggaggcggcgggtgctgggacctgggagtccccatggcgactcaccccgatctctctcctctgtgcctctctaagtaatccctcgtgccgaattcaccacccgagcctcgtacctagcctgagggtt

SEQ ID NO: 370114 - DNA, 789 bp, Homo Sapiens
tgaaaataggctaggtcgaggctggtgtaattggcacgaggggagtagtgccgcgcgcccgccgccccgcgccttcctgctcgccgcacctccgtggagccggggcgcacccagcccgcagcgccgcctccccgcccgcgccgcctccgaccgcaggccgagggccgccactggccggggggaccgggcagcagcttgcggccgcggagccgggcaacgctggggactgcgccttttgtccccggaggtccctggaagtttgcggcaggacgcgcgcggggaggcggcggaggcagccccgacgtcgcggagaacagggcgcagagccggcatgggcatcgggcgcacgagaggggggccgccgcggggcagccctgggcgtagctgctggcgctgggcggcgcttctggccgtgggtcggcagcgagtacgactacgtgagcttccagtcggacatcggcccgtaccagagcgggcgcttctacaccaagccacctcagtgcgtggacatccccgcggacctgcggctgtgcacaacggtgggctacaagaagatggtgctgcccaacctgctggagcacgagaccatggcggaggtgaagcagcaggccagcagctgggtgcccctgctcaacaagaactgccacgccggcacccaggtcttcctctgctcgctcttcgcgcccgtctgcctggaccggcccatctacccgtgtcgctggctctgcgaggccgtgcgcgactcgtgcgagccggtcatgcagttcttcggcttctactggcccgaga

SEQ ID NO: 370115 - DNA, 814 bp, Homo Sapiens
  misc_feature (353)..(361): n is a, c, g, or t
  misc_feature (373)..(624): n is a, c, g, or t
cggctaggtacgaggctgggtggcgaattcggcacgaggcgtctcttctctcttggacctattttaagaagcttgctaacctaaatattctagaactttcccagcctcgtagcccagcacttctcaaacttggaaatgcatgcgaatcacccggggttcgtgttaaatgcagattctgactcagcaggtctgagtgggtccaggattctgtgtttctcatatgttcctgggtgatgctgatggggtcagtctatgaaccacactggagcaaccaggttctaggactttctcaatattctagtactttctgaacattctggaatcctccccacattctagaattctcccaacannnnnnnnncttgagacagannnnnnnnnnnnnnnnnnnnnnnnnnnnnnnnnnnnnnnnnnnnnnnnnnnnnnnnnnnnnnnnnnnnnnnnnnnnnnnnnnnnnnnnnnnnnnnnnnnnnnnnnnnnnnnnnnnnnnnnnnnnnnnnnnnnnnnnnnnnnnnnnnnnnnnnnnnnnnnnnnnnnnnnnnnnnnnnnnnnnnnnnnnnnnnnnnnnnnnnnnnnnnnnnnnnnnnnnnnnnnnnnnnnnnnnnnnnnnnnnnnnnnnnnnnngtgtgagccaccgtgcctggcaaattccaacaattcttaaattctctcatccctccagggctccccgtgctatgttctctttaccccttccccctcttctcttgctcaggcctgaccactggagcaccgttcatttattccattcatttaacactgagcactcactctgtgctgggtccccgggaagggg

SEQ ID NO: 370116 - DNA, 743 bp, Homo Sapiens
ataggctcaggtagcgaggctcgggtggcgaattcggcacgagggcaccatgaggaagaagcagctgaagacggaggcagctccacactgtgaactaaaatcatattctaagaactcagccactcaggtatccaccatggtgctgggtcctgaacagaagatgtcagatgacagtgtttctggagatcatggggagtctgccagtcttggtaacatcaaccctgcctatagtaatccctctctttcacagtcccctggggactcagaggagtacttcgccacttactttaatgagaagatctccattcctgaggaggagtactcttgttttagctttcgtaaactctgggctttcaccggaccaggttttcttatgagcattgcctacctggatccaggaaatattgaatccgatttgcagtctggagcagtggctggatttaagttgctctggatccttctgttggccacccttgtggggctgctgctccagcggcttgcagctagactgggagtggttactgggctgcatcttgctgaagtatgtcaccgtcagtatcccaaggtcccacgagtcatcctgtggctgatggtggagttggctatcatcggctcagacatgcaagaagtcattggctcagccattgctatcaatcttctgtctgtaggaagaattcctctgtggggtggcgttctcatcaacattgcagatacttttgtatttctcttcttggacaaatatg

SEQ ID NO: 370117 - DNA, 805 bp, Homo Sapiens
  misc_feature (23)..(23): n is a, c, g, or t
atacaggctaggtacgaggcccngtgatgtaatcggccgaggagaatgactgcttactgaacaggtccataaagctcgggtgaagttcaataccttaaaaggtaagctccgtgagacaagagatgctctcagggaaaagacagtggctttagaaagtgtacagctggacctaaagcaagcgcagcatcgaataaaggaaatgaagcagatgcatccaaatggggaagctaaagaaagtcaatccatggaaagcagaactcttcagaggagagaatacgtcaacgagaacttgaaaatctcttgcttgaacgacaactagaggatgctcgtaaggaaggtgataataaagagatagtcattaatatccacagagactgtcttgagaatggaaaggaagatcttctagaagaaagaaataaggaattaatgaatgaatataattatttaaaagaaaaacgtgcttcagtatgaaaaagaaaaagcagaaagagaagtgattgtgagagaatttcaagaagaactggtcgatcatcttaaaaaattttcaatgtcaagagtctccactggaaggtacatcacagtgtcatattaattgggatgagacatggacttcaaagaagaaattatgtcaagtagaaatccaactgaagaaaacatgagaatcagaaaaggttggattaatatcatacgactatacggggtcaaatagaaaaaaaccgaggctttattgggtgggaaaggggttgaagggcaggtataagggccgacagtttggtcaggaacgcgcccaagaggaaaaatgagc

SEQ ID NO: 370118 - DNA, 789 bp, Homo Sapiens
  misc_feature (66)..(80): n is a, c, g, or t
  misc_feature (97)..(175): n is a, c, g, or t
ggaaaacctacggctaaggtacgaggcctgggtgttgaatcggcacgagggagaactagtctcagnnnnnnnnnnnnnnngtggaaatggagtcggnnnnnnnnnnnnnnnnnnnnnnnnnnnnnnnnnnnnnnnnnnnnnnnnnnnnnnnnnnnnnnnnnnnnnnnnnnnnnnnattctcccggcctcgcctcccaagtagcgtggggctacaggcgcccgccaccacgcccagcgtaattttcgtggtattttttatagtagagaacggggtttcaccaggttgggccaggcgtggtctcgaactccgtgacctcaaggtgatccgcccacctaggcctcccaaaggggcgtgggattacggggcgtgagatcacgggcgccgcggccccaggtgacatatttagtgagaaacaaagagacaaggcagtggcgtgacctctccgagggttacagccgtggagaagagggtgaaagggtgttgggtggttccaagcagcctcagggcagctggtgctgcggcgtgcatgttcgggcccgaaagcggggctatcgggtctaccagatgccttcaaggaaaagggccagaacctgcactggcacggcacagtcactgtgtgtggtgtgggacccagtgtcggctgagaggcctggaggggtcttgcctcccttgtagtcacttggtgtcataacaaggagggcctcatttggcctgggcggccctgtgcccactattcacaggccaggccggcacatgaccttgcctaggggggaagtccccagtgtttc

SEQ ID NO: 370119 - DNA, 922 bp, Homo Sapiens
  misc_feature (16)..(16): n is a, c, g, or t
  misc_feature (27)..(27): n is a, c, g, or t
  misc_feature (46)..(46): n is a, c, g, or t
  misc_feature (52)..(52): n is a, c, g, or t
  misc_feature (64)..(64): n is a, c, g, or t
  misc_feature (85)..(85): n is a, c, g, or t
  misc_feature (128)..(128): n is a, c, g, or t
  misc_feature (135)..(135): n is a, c, g, or t
  misc_feature (140)..(140): n is a, c, g, or t
ttcccgaggtccctgncctaaagctgnggacttttgacctcctgcnacttgnaacgggtgcctnagctccccaggcaagcacagngaaaacagaagctcccccaggacacgggagcctcctttgcttnaggcagnctggnctgtgacaaagcctccgtggtcagaagcaaaagaggggctgggacaaagccgggaggccctcgggaatggattcttcagcatcctccccaaacaccgggaggaagagggagcttggaatggggtctccctctctatctcggtccccaccatgatgtgaagtgaaggtccgacaggttgggctgaccaccctgaggagggcaggggggctgcgggcacggtgcccccagcacacctgggccaggaggggaggcctggtgacttccacagcaaacctccagacccaagactggtccccaggcctactgaggcgagaggcagtccaggccttcaatgcccctgttcaaaggaactgtaaagggtgccacccggcaaccctggggcctagcacccaatgcatgtatgaacccacggacaaacacagcgagtggggcagacgcacaactggaagtttccacggcaggttctcgtagcacctttggtcaagaactgaaggggcctttagatgcggggaggctgtggccaggcgcaccctctgccagttcctcccaccgttgagggggttaggaaagagccagggctggggcagggcatagggggtctacttaggcctcgtccaaaatcgagcagggaagaccccgccctggcccaacttctgatgccctggctgatgtggagggaggagccgagtcaggcctcatccttggcctctgcctgggactttgccaaacaggcaggaagcccctcgtgccgaattcagccacccaggcctcgtacctagccg

SEQ ID NO: 370120 - DNA, 702 bp, Homo Sapiens
aacgataggctaggtacgaggccgggtggttaattcggcacgagggaggaagccctcctgctcctcctcatcagcgaatccatggcaactcgagatgtggtgctgagccgggtgccggagcaggaggaggaccggacagtgagcttgcagaatgccgcagccatctatgacctcctgagcatcacgttgggcagaaggggacagtacgtcatgctctcggagtgcctggagcgagccatgaagtttgcgtttggagaatttcacctttggtaccaggtggccctctccatggtggcttgtgggaagtcagcctacgctgtgtccctgctgcgggagtgtgtgaagttgcggccctcggaccccaccgtgcccctgatggccgcgaaggtctgcatcgggtcccttcgctggctagaggaagcagagcactttgccatgatggtgatcagcctcggagaggaagccggggagttcctccccaagggctacctggctctgggtctcacctatagcctgcaggccaccgacgccaccctgaagtccaagcaagatgaattgcaccggaaggcactgcagacgctggagagggctcagcagctggcgcccagtgacccccaggtcatcctctatgtctcgctgcagctggcctcgtccgacgatctccagtggcctggagcagctgcggacgcccctgaggtacga

SEQ ID NO: 370121 - DNA, 1086 bp, Homo Sapiens
cgatgaaactaggctaggtacgaggctgggggtgtaatcggcacgagggacacctgatgtcaggtggtgccactccagtacaagcgtgggggacctatcattgccgtgcaggtggagaatgaatatggttcctataataaagaccccgcatacatgccctacgtcaagaaggcactggaggaccgtggcattgtggaactgctcctgacttcagacaacaaggatgggctgagcaaggggattgtccagggagtcttggccaccatcaacttgcagtcaacacacgagctgcagctactgaccacctttctcttcaacgtccaggggactcagcccaagatggtgatggagtactggacggggtggtttgactcgtggggaggccctcacaatatcttggattcttctgaggttttgaaaaccgtgtctgccattgtggacgccggctcctccatcaacctctacatgttccacggaggcaccaactttggcttcatgaatggagccatgcacttccatgactacaagtcagatgtcaccagctatgactatgatgctgtgctgacagaagccggcgattacacggccaagtacatgaagcttcgagacttcttcggctccatctcaggtacccagcagacagcagactcaagttccaactcaggccctcgcttctgctctcagacccctaaagagttacttccttactgtcccacctcgaccccagttgatctgcgtgcaagaatatcctagacaaggacagggaggtgtgtgaggctgtttccatcttgccggcttcacctgttacaggtgttaacgctccttatctcctgtggaggacgggagaacgccctggctttcccccaggcctggccttcctccctggcctcagcaggtgctgagagctagcctgttgttcctcttggtgctgggacgcaggagcacatcgggtctgtggatgggagccgggtggggaggactagcaggcagcgacatttgggtccgttgggggtgaccctgttttctgtgttgcaggcatccctctcctcccccacctgaccttcttcgacacttgcatcaagaggg

SEQ ID NO: 370122 - DNA, 633 bp, Homo Sapiens
taacttacggctcaggtagcgaggcctgggtgtcgaattcggcacgagggcactgacaggcaagtttcaagacagtggctaagcccaggtcctgaagaagaggaggaccgtgcaggcggcccaacagaggacggggacagctctctccttctgtaagtgaggcagcctcatccttccctggatcctcagcatctcttaaccagcagtggcagaggttgaattagaatggcaccagcttcggataaaaatccagatctcgcttttcaaaatgtgtctagagctggtggctgtaaggaaccagtcaagcctcagctgtgactctaatcctgccaagtccacctgagagccgactcattcatccaaagagagaacggtttggatggagctcaaggtgcctggctcgctggcatagcccagacaacctcttaaaggccgggccacagagctagaaggtctgtcactacttcagttggggaaatcgtctgagaagttcaagtccactgcctcgcaacttcaaatgagtcagcctcaccaaccaagaattcgcgtttcataaaacagactcagagcctgcgtgccgtggggtttccccgtctgcaactctctcacctggccctcctgcagggcccggcg

SEQ ID NO: 370123 - DNA, 482 bp, Homo Sapiens
  misc_feature (11)..(11): n is a, c, g, or t
  misc_feature (35)..(35): n is a, c, g, or t
tccctggctcnctgaataccccaaaaaacctcttnaaagccgggcccaaaaacctaaaaaggtctgtcaactactaaagttggggaaaatcgtctgagaagttcaaatccactgcctcgcaactcaaatgagtcagcctcaccaaccaagaatcgcgttcataaacagactcagagcctgcgtgccgtggggtttccccgtctgcaactctctcaccctggccctcctgcagggcccggcggggactggggagggtcagtgctccctggggcggggactgggtctgtttcccaggctcagtgcctctgagtcatacagatgccaggtggtcctgctgcttaccctcgctgaacctcaggcttctcgtgtaaacagggcgcttttgaggaattattattaacatctccctgtgagtcaaagcacctactgagataatgtatgtgatgcttgtaataaatgcagctacatgccaggcactcttg

SEQ ID NO: 370124 - DNA, 849 bp, Homo Sapiens
taaggctaggtagaggcctgggtggtaatcggacgaggagctatccttgtttatgcctcactattggcagaaaagaccccatttaaaacccagagaacactggagggggatgctctagttggttctgtgtccattttcctctgtgccaaagacagacagacagaggctgagagaggctgttcctgaatcaaagcaatagccagctttcgacacatacctggctgtctgaggaggaaggcctcctggaaactgggagctaagggcgaggcccttcccttcagaggctcctgggggattagggtgtggtgtttgccaagccaaggggtagggagccgagaaattggtctgtcggctcctggttgcactttggggaaggagaggaagtttggggctccaggtagctccctgttgtgggactgctctgtcccctgcccctactgcagagatagcactgccgagttcccttcaggcctggcagacgggcagtgaggaggggcctcagttagctctcaagggtgccttcccctcctcccaacccagacataccctctgccaaactgggaaccagcagtgctagtaactacctcacagagccccagagggcctgcttgagccttcttgctccacaggagaagctggtgcctctaaggcaaccccttcctcccacctctcatcaggggtgccgggtcctccctttcttttccccggaagtgtttatgggggagatccctatgggctttgcccattcaaaccacatcgaactggtttgcctggtttcttggaaaccagttagaagggaaaaccgcccaggcctggtcccagataatttggcaggaacattgaaagaac

SEQ ID NO: 370125 - DNA, 1966 bp, Homo Sapiens
  misc_feature (1652)..(1652): n is a, c, g, or t
  misc_feature (1815)..(1815): n is a, c, g, or t
  misc_feature (1869)..(1869): n is a, c, g, or t
  misc_feature (1899)..(1899): n is a, c, g, or t
  misc_feature (1906)..(1906): n is a, c, g, or t
aaggctaggtacgaggcctgggtggttgaattcggcacgaggggagactgatccccagaccatcagcgcctacctgatctacttgttcccagcacacgcctgtggaggagcaggcccagcacagcgacctggccctggactgtggcccggctggtcgtggagcgctccaccatcatgtcccacctcttctcgaagctctccccgagtgccgcgtcggacgccgtgctgagcgctctgttgtccatcttctcacgcttacgtgatggcgcatgcggcagagcacggagggcgaggaggtctacagctggtcggagtctcaggaccaggtcttcctacgctggagcagcggggagacagccaccatgcacatcctcgtggtccatgccatggtgatcctgctgacgctgggcccgcctcgagccgacgacagcgagttccaggcgctgctggacatctggtttccggaggagaagccactgcccaccgccttcctggtggacacatcggaggaggcgctgctgcttcctgactggctgaagctgcgcatgatccgttctgaggtgctccgcctggtggacgccgccctgcaggacctggagccgcagcagctgctgctgttcgtgcagtcgtttggcatccccgtgtccagcatgagcaaactcctccagttcctggaccaggcagtggcccacgacccccagactctggagcagaacatcatggacaagaattacatggcccacctggtggaggtccagcatgagcgcggcgcctccggaggccagactttccactccttgctcacagcctccctgccgccccgccgagacagcacagaggcacccaaaccaaagagcagcccagagcagcccataggccagggccggattcgggtggggacccagctccgggtgctgggccctgaggacgacctggctggcatgttcctccagattttcccgctcagcccggaccctcggtggcagagctccagtccccgccccgtggccctcgccctgcagcaggccctgggccaggagctggcccgcgtcgtccagggcagccccgaggtgccaggcatcacggtgcgtgtcctgcaggccctcgccaccctgccacggctccccacaccggcggagcccctggtgatggccttgcaaccgtagccaacttcatgagcctgacccacctactgcccccagcgtcctgcccagtaacccagcccctgatgtgacccacagaggacaacccgagcctttcctcactacgtctacctatccaatgaaacgggagcaaacccacacaaatacaacgccacggcttgtgtgctctcggggaccccgacccctattcctataaattgacatagggtctaattggcaagatcacactctgcgcgcgggccctcgcagcaagtaaacatccaacgctagcattaactcccacctagaaccgctccctccccgcgcccgcgcccttatcgccagacacgccacacgacctgtcctttccgtcccctcgtgactcgctcccgcccggtcccacagtccacatggacgcgacgccaaacatacaatgaggtcaatcacacactgatccgcgacactattcatcgtacacaaactaacactggggtgctctcggttagcggngcgcccgtattgacttagccccacaaccgataaacacgcatacacgagaaggtcgtacaatataccatatctacgtatcgctcgccttacccggaggcactatccagatacccccaaaattgtgagtcctcaccccggcgtcgtccaactgatatgtactctntataagtatgcatctcacctgagactcctgcccaccgatgcccctgggccgctntcttctgtttctccgtgaccgtcaacttancacacanccgcaaacaatatctttgaacactactctctagctaacaacctttcatatgtctcggccg

SEQ ID NO: 370126 - DNA, 778 bp, Homo Sapiens
aaggctaggtacgaggcggggttaatcggcacgagggtgaccacaagctactagagatattcagccgaggtccctacagtgttcaaggtcacagggtcaaaatatatcagccagagggggaagaagggtggctctatggtgtgtgagccatcaggactccatcactcgtcttatggaggtgtctgtaactgagagtggtgagatcgaaggtcggctagatcccaggactaagtccagtgtgatgctgagtggataattcaacgcctcaaagcgaggggggtacgtgtaaaagcagtaaaatcgttccaaaggaaagaagaagagagaaagcatagaggggaaagagtggccggagcgaggaaagagtgcttcggactctgggtgtgaccctgcatcaacagaaattacaaaggagacaggggtgaagtagacagtaatgggagcgagtggaggtgaggcaagccgagggccctggaaaggagggaatgccagtggagagccagggcatggaactcagaagcaggcgcaaagccgaggcccaaacccgggtcagataaccacattacatggatcccccctcacaaagacaaataaaaaacccaggcaaaaccaattacccggacattttcaggcaccaaccttttaacaaccaacaggaaaacggcaggactctgcgtggtgcaggatgagcctgtaggtggggacacacctgctctttcactccatatactacagacaaggtcagacaactatggcccagaggtgggtggagcgaacc

SEQ ID NO: 370127 - DNA, 1446 bp, Homo Sapiens
agtagatcccatatttcctgaaaacttgctgattctggaatcccaaaatcagggcttctatggcatgagatatcagtaaacagctctgctgctgtagttcaacattctcaaaagttgctgagtcagcatcaaaagatgcctggtaaagatctccatatcgagaagcaaggcttcgaaattcttccatggactgtttcatctgattggagatgcgaccacacctctggaggtcatttcctaaggtcatggcaattgttgtggcaattgcaggtggtgggcttgtcttcaggctattacaagtacagataagttgagagaaggcttgtaaaaggtcaatcctgagttttacaaattcacactgaaagcttaaaggattcagtggtgtactagctgctgttaaggaagcaatccctttgtgatagaattttaaagattcagcaatgcaagaaagtgctgaactataattttcctcttgcaacccagtgagacactgttctgcatgtgaaaactccttcaaactatttagccagaagtagaaatgttctgaggcaacctgagtcagcataactctgataaagctctttggccatgtcatgattacccattctggaagcctgtctggcaatacggtatacagtccatccattggagacactttcaagcgtgctgcttaattactgccttactttccacagacaatgccttctgacttgcaacaaaaatcacagtagccaaactcaccagaagttcttgttgcttgtctgtggctgatcgtccaatcaccttgtacagctccatgaggtcaccaagcatcccatcacccagcaccggcagttgcatgggcaagggctgccaggcaatggcacatcaaaatccgggcagcgtcttgagcactgtgcaattgagtcaacaaggtctcaactactgactggctaagatggggcctgcccttggccaacttcaccatacagtttagagcaatctttaaagtggcctgagcacctggactatcatcttgactacaaagtaccagtagggattccaggccaaagacagcatcttgttccagtgccaaaagatccttttcttgacaagaaacagatatattagttaggactctaactccatgagctgcaatgcccctgttattatggtaacagcactcttgggctaatttgactaaatcagaagatctgggagaagaactcacatttcctggaactatactgaagtaatgtttgatggcgatggtccctgatagtgtggaaaggacagacaacatccctagttttaagctgtcataaggagtctggagggcacactcacaaagtgcctgaatattctccctactccaagtatgtggtgttttattagcaagtaatttcagatcttgaatagcaagtctctttactgccttcctgcctcgtgccgaattcgccacccagg

SEQ ID NO: 370128 - DNA, 810 bp, Homo Sapiens
tgacgacaagaactcaacaaaactagctaggtacgaggctcgggtgttagttggagctctggatttgcctgggggtgacgaggatgagaatgaggcagtgggacagccaggaggtcccagaggggacactgtttcagcctctccctgcagtgctcccctggcccgagcaagcaggcttggaagacctactgttgaaggaagcgtcctacagcgtgtatccaccccagaggccccagagcctccatctcagtgagcagatgggccatccctgttggacgcctacctcgccctgtcgtgtgatttcatatcggacctcattaccgctcagtccagcgcttcctagatgggcattttgagccatgatgtgtttcaggaaacaggtcctatcctgcactttggaatcggcatgactctgtctattgtcgcagctcacacattctgcaggacaaaagcagattgtggctgaatgccattgccctggcccagaaacacatgacacgcaccatctacacttcgcccatcgaaggccctgtagcaaccagaagttccggtgacttccgaaacacattcgtgggatgtggggctgctcaccggggatgtacagctgcatccggaggcctcctgcctcatcatgaccacagagatccttcgctccatgctgtacagtggctcatatgttattcgggacctggagtgggtcctctttgatgaggttcactatatcaacgatgtcgagcgtggggtcgtgtggggaggaggtgcttatcttgctactgacacgtttctatcatcttctgagtgcccctcccc

SEQ ID NO: 370129 - DNA, 820 bp, Homo Sapiens
acaagtgcaagtactcataacggtcttaaggtagcgaggcctggggtggcggattggagcctctggatttgggtgggggtgacgaggatgagaaggaggcactgggacagccaggaggtcccagaggggacactgtttcagcctctccctgcagtgctcccctggcccgagcaagcagcttggaagacctagtgttgaaggaagcgtccacagctgtatccaccccagaggccccagagcctccatctcaggagcagtgggccatccctgtggacgcacacatccccgtgtaggtgatttctatcgcctcattccccaagccagccttccagtgggcatttgagccagatgtgtttcagaaacaggccatcctgcacttggaacggcatgactctgtctttgtcgcagctcacacatctgcaggaacaaacagttgtggctgaatgccattgccctggcccagaaacacatgacacgcaccatctacacttcgcccatcaaggccctgagcaaccagaagttccgggacttccgaaacacattcggcgatgtggggctgctcaccggggatgtacagctgcatccggaggcctcctgcctcatcatgaccacagagatccttcgctccatgcttgtaccagtggctcatatgtcattcgggacctggagtgggtcatcttctgactgaggttcactatatcaacgatgtcgacgcgtggggtcgctgtgggacgaggtgcttatcatgcttcctgaccacgtttctatcatccttctgagtgcaccgtccccaagcccttgagtcgctgactggattggc

SEQ ID NO: 370130 - DNA, 858 bp, Homo Sapiens
  misc_feature (775)..(792): n is a, c, g, or t
gccccctgcccaatgtccccagaagaggggacccctcgtactgagaccccccctacgctgacacggtggggtttcccgggggacacaaactgtcgccccccaagagtactccccccgcggcggggcacacagttgccttggcccacaatagtggagacaccctggggagatacgacagtgctcataacacaaagcgggcctttgacgacacagggggcactgccccggcgccgcatctcatgcgggttcaccaccccggggggtctacagtgcgtctcgccacaaaggaggcctctgagaggccgattcacggagagggctccacacgtgtcaaccgtgcccccctgagattgcttctagcccaccccacaggccccggccaacacggggggcggcccctccccacagagagatggcgcacgcacattcggagaagtggaggccaaacactgcctgcaaaagttctggcaagccgcggggccaaccattctctgcagcctcctcctgaaccaacggagcgtttccactcacgggtccactcccggaaatgcttctcgggtccaccgtccccctggggcttctcctgacccagtccccgtgccccgcctccccgaaacaggctaactctcctcggccccctccatcgggctgaggaagcacagcagcatcttcaaacatgtacaaaatcgattggctttaaacacccttcacataccctcccccccaattatcccccattatccccacacataaaaaatcaaaacattaaactaannnnnnnnnnnnnnnnnnacaacaaccctcttaaaactaattggctttttagaaacaccccacaaaagctcagaaattggcttt

SEQ ID NO: 370131 - DNA, 937 bp, Homo Sapiens
  misc_feature (680)..(680): n is a, c, g, or t
ggcagtaactctcgcggtataaggtagcgaggctgggtggcgaattcggcacgagggttcaacacgagccaggggagctccagaagattctacatgacgcagaccggatccacaatgagctgagccccctcaaactgcgctgtcaggcgaatgctgcctgtgtggacctcatggtgtgggctgtgaaggacgagcagggtgcagaaaacctttgcatcaagctatctgagaagctgcagtccaagacgtccagcaaagtcattattgctcacttgcccctgctgatctgctgtctgcagggtttgggccgcctgtgcgagaggttcccggtggtggtgcactctgtgacaccgtccttgcgagacttcctggtcatcccgtccccagttctggtgaagctctacaagtaccacagtcagtaccacacagttgctggcaatgatataaaaatcagtgtgaccaatgagcattccgagtcaaccctgaacgtcatgtcgggtaagaagagccagccctccatgtacgagcagctccgagacatcgctattgacaacatctgcaggtgcctgaaggctggattgacggtggacccagtgattgtggaggcgttcttggccagcctgtccaaccggctctacatctctcaggagagcgacaaggacgctcacttgattcccgancacacaatccgagccttgggacacattgcggtggccttgagggacaccccgaaggtcatggagcccatttctgcagatcctacagcagaaatttctgccagccaacctgcccccctcgatgtgctgattattgaccagctgtgctgcctggttatcaccggaaatgttacgggaggggcagagcagaaaaccattaacctgtgcaaggtaacgttaaactcttgactatagggatgtccaatacgattaatatacct

SEQ ID NO: 370132 - DNA, 820 bp, Homo Sapiens
taggctagacaggccggtggttagcggcgagggtcgcaccaccatgcccctggagtgccagagaaggataacacattcgtcctcaaggtagagaatggagccgaatacatcttggagaccatcgactctctgcagaagcactcgtgggtagctgacatccagggctgcgtggaccccggtgacagtgaggaagacaccgagctctcctgtacccgaggaggctgtctggccagccgcgtggcctcctgcagctgtgagctcctgactgatgcagtcgacctgccccgccccccagagacgacagccgtgggtgcagtggtgacagccccccacagccgaggtcgagatgccgtcagagaatccctgatccacgtcccgctagagacctttctgcagaccctggaatccccgggcggcaccggcagtgacagcaataacacaggggaacagggtgcagagacggatcccgaggctgaacccgagctggagctatccgactacccatggttccacgggacactgtcccgggtcaaggctgctcaactggttctggcaggggggccccggaaccacggcctcttcgtgatccgccaaagtgagactcggctggggagtacgtgctgaccttcaacttccagggcaaggccaagcacctgcgcctgtccctgaacggccacggccagtgtccacgtaacagcatctgtggttccagtcctgtgcttgacatgctccgccacttccacacacaccccatcccacctggagtcagggggctcggccgaatcacccttcgaggctaatttgcgggcccaggagccca

SEQ ID NO: 370133 - DNA, 1044 bp, Homo Sapiens
gacggcagtacctcctaacggtactaaggtagcgaggctgggtggcgaaattcggcacgaggcacccccggagctctcacccctccagtgccgacggtagcgaaagactttcctccaggggcttcctcactggggaattgccggaaagagcaaacaaaaaaggcgctggtgtaggctccaaaataaacacatctgaattcatgatggcatcgacagaggctcttatggattaaaagtttcaaaacaaacaaataacgcttttggaaaaagggtttgaatgcaccctcaggcacgaccatggagaaaggggggaacatacaattggagattccggacttcaagcaactcgtgtccttgagccatctaaaccagtgtgcgctatgcagggccgtctctgtgatatggtggtcaatgtgcaaggacaagcttttcgggctcacaaagtggtgctggctgccagctccccctatttccgggatcacatgtccttgaatgagatgagtacagtctccatttcagtcatcaagaaccctactgttttgaacagctcctttctttctgttacacagggcggatatgcctgcaactggcagatatcatcagctacctaacagctgccagttttctgcaaatgcagcatattatagacaaatgtacacagatcctggagggcattcatttcaaaattaatgtggctgaggtttgaaggcagaattaagtcaaaccaaggtacaaagcatcaagagagacctccagagtctcacaggttacaccaaatctcagcgtccttagcacgactatacccaagggaaaccggagtaggtaggtgcgcggaatcaaaagaaggctacgagggtcacagcctaattgacagttgaggaaaagcgggacctttggatacgcggaatgttggaaggtggacgggtgaaacgaaatgtgggaacacacagaccggggtgctaactggaaggtcgaaaacgtgtcacaggggcaatggacaggacaagttcgtcacacgtcactggttattttatcgttagaaga

SEQ ID NO: 370134 - DNA, 1012 bp, Homo Sapiens
ggcagtaactataacgttctaaggtagcgaggctgggtgggaattcggcacgaggcaggtgggcacctggcctctgtcccgggctcagtcttccccagccgcacctgcctcactgtcagccccagagcctgccagccaggcccgagtcctctccagctcagagacccctgccaggaccctgcccttcaccacagggctgatctatgactcggtcatgctgaagcaccagtgctcctgcggtgacaacagcaggcacccggagcacgccggccgcatccagagcatctggtcccggctgcaggagcgggggctccggagccagtgtgagtgtctccgaggccggaaggcctccctggaagagctgcagtcggtccactctgagcggcacgtgctcctctacggaccaacccgctcagccgcctcaaactggacaacgggaagctggcagggctcctggcacagcggatgttgtgatgctgccctgtggtggggttggggtggacacgtgacaccatctggaatgagcttcattcctccaatgcagcccgctggcgccgctggcagtgtcaactgacctcgccttcaaagtggcttctcgtgagctaaagaatggtttcgctgtggtgcggcccccaggacaccatgcaagatcattcaacagccatgggcttctgcttcttcactcagtggccatcgctgcggcagtgaacagcggagcaggcagcacgatcctcatgtagactgggaagtgcaccatgcacgggccccagcaaacttctacaagacccaggtgtctacattcctgatcgccatgagaggaattctccgggaaggggtgtgatgagcacggcagaggtgaggctcacggcacggcaggacttccggtgaccccaggggactaaaccagcgacaggcagggacctcggaaaacacaaaacggtcgcgagacgacggccgccgcgtccgctacagtgaacatataggcgggcgggcaccacactgggagcggacc

SEQ ID NO: 370135 - DNA, 870 bp, Homo Sapiens
agcggtacttcgtctttagctcctggcgctgctggcttctgggcggtttttgtcttttgatttcaagagttaggagctcgagaaccgtttggcaatatgtacgacgcggatgaggatatgcaatatgatgaggatgatgatgaaatcaccccggatttgtggcaagaagcatgctggattgtaatcagttcctattttgacgagaaaggcttggttagacaacagctggattcttttgatgagtttattcagatgtctgttcaaagaattgtggaagacgctcctcctatagacctacaggctgaagctcagcatgctagtggagaagttgaagaaccgccacgatatttgctgaagtttgaacaaatttatctttccaagcctacccattgggaaagagatggtgctccttcaccaatgatgcccaatgaagctagattaaggaatctcacgtattctgctccgctttatgttgatataacaaaaacagtcattaaacgaaggtgaagaacaacttcagactcagcatcagaaaacttttataggaaaaattccaattatgttgcggtcaacttactgccttttgaatggcttgacagatcgtgatctttgtgagttaaatgaatgccctttggatcctggtggcctatttcattattaatggatcagaaaaaggttctgattgccccaagagaaaatgggcaacaaacacagttatgtgtttgccaaaaagggattctaaaatatgcctaccccggagagtgtggatcatgtcttgagaaattctttcccgggcccccaggtacatattgggttctgccggcaaggggaccacgtgccaaaaggcttgggccggctgtgggactcctt

SEQ ID NO: 370136 - DNA, 804 bp, Homo Sapiens
cgagcgaggagggctgaaagatgtcctgttgtcctatcatagaactttacataaacttacaagaagaggaaaagtctgtaaaggattggtggcactcagaatctcctttttctatcttctctttgcctgataattattatcactaatttgatgatgaggaattatttctcttagtttcatttctgtgagagcagctgctgcctcaacttcacctcctcctgcaccctgctcagctcctggccgctgcagcggacctcctggatcagctgctggttgtgtctctcctcctcgctgccttctttctgcagcctttcattttcttccttcacgctggcatactcccgctgaaggtgctccaggctcacggtcttcctggagagggactctcgtaatttgtcattctccttctgcttatctctggatcctttaatgagcattgcattgagggcctggttctgcttcctcaagaaatgaatttctgatgttagagaactatgaagctctgaaccagaagcaaaaatgcttgtagaaccttgaacaaattcagatccttgccgttccaactgtttccgtaggcttctcatttgttttaatagattcttctaaacgctttctcaaagttcgaatttcctgtatgtgttccattagtaagtcttgagaaaaactgttcaccataactgaagtcttctctgtctcattatcttgcttctggtctcgtgagaagaaggacttttcagatgtttcataatcagagagcgcatgagaggctgaaggctcaggagattcaggcagaagatgttggta

SEQ ID NO: 370137 - DNA, 780 bp, Homo Sapiens
taggtagagccgggtggtgaatcggccgaggattatggttgcgttgtgtctgatttgattttactgttttttccctgatttatggagtagcattgtgacctgtttgcctttgtcttatataactttagtaaactaaccactgtcaatgattgagggcaggtggcacgtggggaagaggggacttggcacgcagtggctacctgggcatttgtggtcatttcagtttccatctccccagcgggggctccctgggtgaaaggccacagtattttgggttggtaggcaaatgcaacattctggacatggcctgaggaaggcctcttcttataagattctcagaccaaattctagaccaaagacacaggcagaccaagtccccaggccccgcctggaaggaagtcgttcctcaactctccccaaggcacctgtctccaatcagagccctctcgcccagccagccctggctctgtgtgcagagcatagctctgcgagtacctgtgtaataatgctcaaccttcatgtctccgtataaacgaaactttccatgagagctcatgactctggtccacctgtctatagagaatgggcaaagtccttacacctgctttctgcttgggatgggtcagaaatgctgatgcccgcacatagcccagccagcagatctggcaaggaagcgagggggttgttaaaatcaatttttaagatgaagagtgggagacctgcgttgagatgggcatgctagggcccagaaatcctgagggcaggaaaaggctcaggtcc

SEQ ID NO: 370138 - DNA, 1003 bp, Homo Sapiens
gctctcccttgttcgttttgttgttcttgtctccttctgtgtacgtgttgtgtccttttctctctattcttccgctcgtctccgatgttgcctgtctgggtactgcattgttttggtcgggatttcacaagccagatgtcggattccttcagatccccgtctatttggaggctcctgcacttggtgcaacttccacggttgtttcccattctgttccaccaggtctggtggagaagaggcccaaagtttgagccgcagggagcccgccaaggccccggatcactgtgatgggatttcgaggggtctgtacaagaactgcagcaggaacaggtgagaaggcatcccgtttgctctccagatagatgcttggtgtaggggggttgagtttttcccggggcagcttctcctcagtgttgatcttcggtttcacagactgggcaggggaaaggtaggactctcgaaacttccctttcaccttggcattcctgctggcgcgcacgacgtcagcagcacagtggctgatggtgaggtctgccatgcgcagccgccgctcttccacctcagaggcgataaaggtctccttgtcaccactctctaccttgatgagccggatcttcagctccttggggggcccctcactaagtgagcgcagcttcagcatgtcggcccggctgacacccggtggccctggggcttcctcccgagccttctttccagggacagaggctgacgggggtgtgggctgggcagaaggtgcaggagctgatggaggggctggagctgtgggtggcttggccttggaggccccgccaagatcgggccgggacttctcacgacctggatctcctcgctctgcaggtccaggttccccagcacccggcggctcttttctttggggaacttggccttggcctttgccctgccctcaccgccacccaggcctcgctaccttagaccgtatagtactgccgtctttaaaactgctggttgacactgacccgtt

SEQ ID NO: 370139 - DNA, 840 bp, Homo Sapiens
atatgcggtagcgaggcctgggtggcgaattcggcacgaggacgacgccgaccacaacaaaaccaaggccaggctccgcgctcgcaaaacacaacaccctccccgcgccgccgcagaccctggcgctgaaaccacagcgtacgacacctctcgccagggacgggcgtctaggtgtccccgtgaggcggcgactacaccccgcgctgcgagcacgtgtgtcggaatgcacgtcggctccgaccacacacccaccaacgcacactcggatgcggccctagtacccctccatcccccggcccgggagaaactgggagaccatcccagagccctctgaactggggacccagtggcgctccccggaagagacaagctgaggaagactcccggcctcgcacttcccggggggctgcccagagagcgcttcccctcaccccaccgcccagccccgggacgccgggggcaggtaacccaacgaggagcgggccaaagtgacgggcaaggccaggaacccgaggagcccgaggggcaaaagcacgttgggcgacgggaggcagcgacgggcgcttggagacgtgtcctggggcttcggggcctctccgcagggcacctcccccctcgagggcaactcgcaccccgcgggccgggcggctgcccgctccccactgcccggtcagccccagcagcgcagacgcggtgcggcccaggggtgctgtcgctgctgcctgcgcgccgcaggggatcagcgctgtgtgcggagaggctcgtgcgcacggaaggggcgaggtgcgggtacgcggggcccgggaacccgggaagcccgccccggaccaaattcccttc

SEQ ID NO: 370140 - DNA, 869 bp, Homo Sapiens
aacagcaggtttgtaaagaggcagtaacctatacggttcctaaggtagcgaggcctggggggcgaatgtatgtcttgtttcacatctcttctggaaaagggggcttcctcgagccaggctcagccccgtgacagccccatgacagcgaagggacctttctgtccccgcccctgtccctgtgctgggcccacgtactcacccacgtactggtaaggatcctctgaggtctggcttttccaaaatttgccacttgaccagtgagcgcaagaggctgagcctcagctgtgctttttgtccctttcaggtgcccggctcccctgggcacccagagccccccagataggccggtggaggaggtggaggagctgtccccccaaaactactggcctgtggtctggactccagggccccatttctgatgtcgccaggtgtgcctgagcccatcggggccaggcctgaggaagtgtttcttgggaggatgggatgaccccctgttcccaagagatggcagcacagtggaggccatggtggaaaaggccctgccatggggtccttgagggccaggacagcctgagggagggatggtggccactgcccacaaggggcctggtgggaacgggtcccaggacagactcatagctagaccccgttggcggcctctgtgttgaaccagaactcattaaacacctcctcttgcttcatcctggtgtgcctctttcatggcagggcctcagacaccctgctaagaatggtacggaccacaggctctgtcactacctggaaagccaaggtcggcaccattgagctggggcctccctctctcccgcggtccttggtcaataacggagtacacagacgccaggcgagac

SEQ ID NO: 370141 - DNA, 1072 bp, Homo Sapiens
  misc_feature (915)..(923): n is a, c, g, or t
  misc_feature (974)..(983): n is a, c, g, or t
ggcctgggtggcgaattcggcacgagggttctcggcgcccgggccttggccagcctggccagccgccgagcagcccccacgccgcgctggcgtcgtcctcgcctccctcgccgccgccccccgcgcgcggccgggccttgccccccatggtgtcccggccagagcccgagggcgaggccatggacgccgagctggcggtagcgccgccgggctgctcgcacctgggcagcttcaaggtggacaactggaagcagaacctgcgggccatctaccagtgcttcgtgtggagcggcacggctgaggcccgcaagcgcaaggccaagtcctgtatctgccatgtctgtggcgtccacctcaacaggctgcattcctgcctctactgtggctgcttcggctgtgtcacaaagaagcatattcacgagcatgcgaaggcgaagcggcacaacctggccattgatctgatgtatggaggcatctactgttttctgtgccaggactacatctatgacaaagacatggaaataatcgccaaggaggagcagcgaaaagcttggaaaatgcaaggcgttggagagaagttttcaacttggggaaccaacccaaacgggagcttgaactgctgaagcacaacccgaaaaggagaaagatcacctcgaaactgcgaccataggtctgcgtgggctgatcaaccttggggaacacatgcttcatgaagctgcatcgtgcaggccctgaaccacacgccaccttctgcgggacttctttcctgtctgacaggcccccgctggtgagatgcaaaagccccccgctccctgtctgggtctgtggagatgtccctccactgtttcagggagtttttacttctgggaaacccgggtccccctcacattcccgtataaaatttcctgccacctnnnnnnnnnaaccccacccccaagggaccctaagccagggcttagaaaccagccagggannnnnnnnnnaagtttccctcaattcgcggggccccgggaacggtggcttcccccgaaacacttggcaaagggggaatgaaacaaggggtaaaaaaagg

SEQ ID NO: 370142 - DNA, 723 bp, Homo Sapiens
taatcgtcacgaggtcttgcgtgtactagttagcaaaggtagtcagaccgcacaacactgtgacgacgacagagttggagcagcctgtggggatgacaacggtggaacatcctgggcatcctgaggtgacaacggcaacagggttgctggggcagcctgaggcaacgatggtgctggagttgccaggacagccagtggcaacgacagcgctggagttgccggggcatgccttcggtgactggtggtgccagagttgccagggctgccttcggccaactagggcactggagatgtcgggccagcctgtgggcaactatggggcactagagtttgcctgggccggcctcatggcaggctggggcactggaggtactcggggcatgtctggggcagctggagcactgttgctttgggggcagcctctggcaacaaggtgtgctggagttgccagtggcatgcctggggcgccagagttgcctgggcagcctttttggcatctgtggcgctgggagatctcctgtccagactggtggttgacaacatcggagctgtcaacgattgaccggtgtcgcagtccctgagaggtgccctcgatgaacagcgctggaatccattatacgggtagcaaagggagctgcctactacattatgggggagactactggacacagctaggagtggttcttgatggccagaatccaaaatagtataacctggtgaccg

SEQ ID NO: 370143 - DNA, 657 bp, Homo Sapiens
  misc_feature (427)..(427): n is a, c, g, or t
cctctcccgatcagtagctgagccctgcaggtcaccttctcctgacctattacaccactgatgcttatgctgggcacaattttatacccttgctgttgttcagtctaatcatccctataaccctatcggatcattcccatatgacagaggagaaaacctggggacacaggggctgtgtcctggaccaaggccttgcttgcagcaaaaggcagagctggggatctagccaggagccccagcacagtcctgattcttcccccactaaactgagctgtgaaatagatcatggcggtctggaaaacgagctaattccgtgccgatggaggtgttgatggatgtccaccactctccacttgggaggaggccttaaacatcccacctcaggtctagcttctctctgtgactgagtaccttgggaaagtgggcntcagagggaggaaagggacttacttgcccaagggccacagactgccacgtggcaggtaagggaccgctattctcctgtccctttcacagaggacaggaggaacagtgaggacaggtgagagtacatgagattaagcctcataagctgcaagcaggcccagatcaagcttgcacacggtaggtgctgacctcaaatgcaggccatagaggggccaactcaggccctgagtc

SEQ ID NO: 370144 - DNA, 761 bp, Homo Sapiens
aactatggctaggtacgaggcctgggtgttaactcggcacgaggatccccggcatcctgtgagcgggaccaggagcagagcgtcatctacggctccatcgacttcggcaagaccgtggtgtcacacccgcggtacctggagctgctggagcgcacgagtcggcccctcaagatcctgcggcaccaggtgctcaacgaccgtgacgaggaggtggagctctgctcctcggtcgagtgcaagggcatcattggcaacgacgggcgccactacatcctcgacctgctgcgcaccttccccccggacctcaacttcctgcccgtgcctggcgaggagctgcctgaggaatgcgcccgcgccggcttcccccgcgcccaccggcacaagctctgctgcctgcgccaggagctggtggacgccttcgtggagcacaggtacctcctctttatgaagctggccgccttgcagctgatgcagcagaacgtcagccagctggagaccccctcctccctggaaaatggtggtccttcctccttggagtccaagtctgaggatcctccaggacaggaggcgggaagtgaggaggagggtaagcagcgccagcggcctggccaaggtgaaggagctggcagagaccatcgccgcagacgacggcacagaccctcggagccgggaggtgatccgcaacgcgtgcacgccggtcggctccatcaggcagcaacgccttcgaaattcgcttcatcctgacatctctcacccgggtt

SEQ ID NO: 370145 - DNA, 1186 bp, Homo Sapiens
  misc_feature (1077)..(1077): n is a, c, g, or t
  misc_feature (1081)..(1081): n is a, c, g, or t
  misc_feature (1099)..(1099): n is a, c, g, or t
atggctaggtagaggctgggtgtgaatcggcacgagggcggggtctggcgccggggtctgagtctctgctggctaagccgccgcctcagccgcctcagtcgcctcaatctcaccttcctcctcttcctcctcctcggctcctcagcggccgggcggccccaccgcccacggagatgcaccctccagtcagcagctccctggcagaggcccagccacccctggctgctccaccacagaagccccagcctcacccacagctcaacaagttcgcagtccctgacaaatgccttcagcttctctgagtcctccttcttccggtcttcagccaatgaggatgaagccaaagcggagaccatccggagcttgaggaagtcctttgccagcctcttttcagattagctcttcagacacacggggcacccagcccaaccgggaaaggcatctaagacattcaccaacaacagtcagccagcttggtggtgatgtcccatgaccttgacgtgtgtggtcccttcctctgctctgttgtactaagtgatgttgtgcagcccagaaaggaccattttgacagtctcagggcaggtgcctacccagcaaggggtacctggcatcagagaggaaagagctgcttccctgtagtcatgagagcttccttctgaagtcatcgttcgctgtgagtttagtggccttattgtgacagtgccatcatgtcttattcttccctgtgaaaccaggattaatcgtggactcctggcagcttaacctagctcagttgcagtgctaagccatgccccgcccccattcagtgatacctgtttgggaagtatatacttccccaaaagtactcttggccctaagttttaggaactttccccgacctggatcccttgtcatacctgtgttactgtttaaagcacacccacccaacttacaagatcttaggctgctgtggtggtgaagcaccttgagtctgctgatattcgggagaacaaggatctgcagtttccccttttctcccctctgaagagtggttcttatgtgcaatctgcagtaaccttgaactccagagctgcactntagnggagaatgcatgccactntgacagcagtatgccaagctttgtgttcatctcctaataaacgttaagacctttggtgtaataaaagcagcagcattcaccaaaaaa

SEQ ID NO: 370146 - DNA, 1156 bp, Homo Sapiens
  misc_feature (271)..(415): n is a, c, g, or t
taggtagcgaggcctgggtggcgaattcggcacgagggtctgcggggtctggcgccggggtctgagtctctgctggctaagccgccgcctcagccgcctcagtcgcctcaatctcgccttccgccctcgctctccctccgcgccaccagaccccgtagccccgcgcgcccccagccctttaagccagatgatgaacttcctgcggcgccggctgtcggacagcagcttcatcgccaacctgcccaacggctacatgaccgacctgcagcgnnnnnnnnnnnnnnnnnnnnnnnnnnnnnnnnnnnnnnnnnnnnnnnnnnnnnnnnnnnnnnnnnnnnnnnnnnnnnnnnnnnnnnnnnnnnnnnnnnnnnnnnnnnnnnnnnnnnnnnnnnnnnnnnnnnnnnnnnnnnnnnnntcggtgggcagcagcttcttcagctcgctgtcccaagccgtgaagcagacggccgcctcggctggcctggtggacgcgcccgctcccgcgcccgcagccgccaagacagcccaggcgctgctggtggaagaaaaaaagaacgccgtctgagggcgaggggtctccggcgcagaaaccgcccattgaaagagatgacataccgcgcaggaagccaggcccgtaccatcggcagggcaagcgcggcgggcccgctggcgggatgagagccggtgggaccgagcatcggaacgggtttggagcgccaggtgagaagcagcggccgacctccgacggctagagcgcagggcgcagactcggaccgggacaggtgccggccgtcaggaaggcaccccggtgtggtgtacgccccatgacgacggaagggagagcgacgcaacgaacggggccccataggtagggttgccaggatttaggttgaatatgtgacacaccgctcctagcatcagtgcttgcaccaacattaaccccaacaccacaaggaccgacgaacgaccgcagctaaaccccagaccatcccacgcacgaccctacaaacgaaaaatcatgcactccaatatccagggccaagacacccaacgcggctagcacccgtctcagtcgacgcgcttcacactgccgataatcacccgcgcgagaagacgatactggtgaggagagtgacggagcgtcgtggtgaggatt

SEQ ID NO: 370147 - DNA, 744 bp, Homo Sapiens
cggctaggtacgaggctgggtgttgaatcggcacgaggccagatggcagttctgatcaacaataaagcttgtggcaaattcctgtgccccaacaagttgcccgggaccaggacaaagtccacgaatttgttcttcaagcgagctgggtgtcaggcttttgcaaggacgaagcatcaagaagtccttcctttccccgagaactgccctcatcaacttcctggtgcaagattgacagccaggaggctgcagctaccacgagggcctctgaggaacctccttccaggcctgggatgagggggcgatgtctgctggcccaggggaagggaaaagacaaatgtcttgactgttgacctcggtcctgtggcagactgcagtcaacagtgtgcctctgtagtgtggcctggtgctggggtgaaggtgagctgggcaaaggagaaatatgagctactgaggagggggttggacatcctgcccctcaccccccacccacactgcaggttagaggaggccatcttgattcccatgggaagccatcagagacactgctggttgggagcaggaaggagcagtgcccctcgagcagccaggaagcctgcggatctgggaaatggctctgccttaggcgcttctcgggaatctgaggccagctgaggagctgcaggactcaggtgcattgtgccagcacttggaactgctaatgagctccagatgtatgaatgtctcttgcctcaggcggatagaata

SEQ ID NO: 370148 - DNA, 758 bp, Homo Sapiens
aactatgctagtacgaggctgggtggttaaattcggcacgagggtctggagagagcgcgcagtttgcgcggcggctcggcgcttccctgtcgtcgcactttgtggttgctgcagctcgggggcctgggctgcccctgacaccccttctgggcgatggtgcagcccaagggcgcctccatcccccgccgctgccgctaacccgggtcccccactccatggccgcctcggcgccacccccaccggacaagctggagggaggtggcggccccgcaccgcaccctgcgccgcccagcaccgggaggaagcagggcaaggccggtctgcaaatgaagagtccagaaaagaagcgaaggaagtcaaatactcagggccctgcatactcacatctgacggagtttgcaccagccccaactcccatggtggatcacctggttgcatccaacccttttgaagatgacttcggagcccccaaagtgggggttgcagaccctccattccttggcagtcctgtgcccttcggaggcttccgtgtgcaggggggcatgccgggccaggtacccccaggctacagcactggaggtggagggggcccccagccactccggcgacagccaacgcccctttcccgtcccaggtcctgatggcgccctgcgtatacaacgatgtgcccgccccgagggctccatggctaccccgaggccgcacggcaaccttgaacctctggcccagggcaaccccttcggcgccacgcctctgag

SEQ ID NO: 370149 - DNA, 737 bp, Homo Sapiens
  misc_feature (22)..(22): n is a, c, g, or t
agttcgacggagattctcaaancagatgctgctccactctggaataaatgaaggatttgtggttcaggatatgcagaaagctgcttagcaaaaggagagtggagaagcatctggtttgagggtcttgaaggacacctactgtactcccagctgagaggactctttctcctcatcttcaggaggatgcctccagagcctggggttactgtaggcctttgccagaggcatgttcggacttagccagctgagtatcccctgtttcctgcttttaccatctcagctgctggtcaggaggtttgggaaggtgacatcatctagctgaatcagctgctgcttctagatacattactggaactgaaagtcattaccccttccttcctgctctgcaagtctcttcagaatgaggctggagtatgggtgttccacctgtctgcagggtcatgactggaatggtacttgctgcttttaaagagctaaaaggtttttaaaagcttgttcatggaaaaagctttcctcaaggcttctcaagctaagggaacagagcgtccttgagaggcaggaggattcacaggaaggccctccccgactccctcttgtccacctacatttagccatatgacccttctgatctcctttgcctaagtccgaggcttaggcctagcactgtaggatgggtaaacaaaacgttatttgtggactttttgaccttaagacttttagagtctggtcaaggggac

SEQ ID NO: 370150 - DNA, 431 bp, Homo Sapiens
ctttggaatggctgatcctactcaaatgggaggcctgagtatgctgctgttagctggagaacatgctcttggcacaccagaggtatcctctggcacatgcaggcctgatgtttcagaatctcctgaattacctcagaagtcaccattgtttcagtttgccgagatatcttcaagtacgtcccactctgatgcttctacaaagcagtgtcaaacatctgccttgtttcagtttgcagagatttcttcaaacacttcgcagttgggtggtgctgagcctgtaaaacgctgtggaaagtctgcaccctttcaactggcagagatgtgcctggcatcagaagggatgaaaatggaagaatcaaagctaataaaagcaaaagaatccgatggtggaagaattaaagaattagagaagggaaaggaagaaaaagaaa

SEQ ID NO: 370151 - DNA, 492 bp, Homo Sapiens
  misc_feature (234)..(347): n is a, c, g, or t
  misc_feature (380)..(443): n is a, c, g, or t
cagttactcccgcgcggttatcggtggcgcaggccatgtgaggtggccgacattctggcacgaggggaggcggaggacgcgtgagatggatccagtagaacaatcgacagcctcattgagctgtccaccaaactccacctgccagcggacgacgtggtcagcatcatcgaggaggtggaggagaagcggaagcggaagaagaacgcccctcccgagcccgtgccgcacaagtgnnnnnnnnnnnnnnnnnnnnnnnnnnnnnnnnnnnnnnnnnnnnnnnnnnnnnnnnnnnnnnnnnnnnnnnnnnnnnnnnnnnnnnnnnnnnnnnnnnnnnnnnnnnnnnnnnnacggcaaagcaacaaaacaacataacgaccaannnnnnnnnnnnnnnnnnnnnnnnnnnnnnnnnnnnnnnnnnnnnnnnnnnnnnnnnnnnnnnncgaaagagaagcaatgaaagcgacagcatgaacgacacagacagaaaaa

SEQ ID NO: 370152 - DNA, 1016 bp, Homo Sapiens
  misc_feature (351)..(366): n is a, c, g, or t
aacagttgtcaccagccagttgtaaaagaggacagtactattagggttctaaggtagcgaggctgggtgggaattcggcacgaagggttatgtgtgaaagtgttactgggggaaccctacctgggaggtagggttacgtgggaacagtgtggttgatctttaaagactattacgaaggctgtttaacaagcatgcgttagagctccgtgtgcggatgtagaggggcagacagccatgatgtggtggtaaacgagaaaagatggctgtacagaaatgtctaaataatcaagttgaatgatcaagaattaatttttattagatgtcctgaatgactgagaagagagaatgccnnnnnnnnnnnnnnnngcaggatcatggtaggaatcacaagcgaccggcaagagatggtgaagaagagacaccacagggtattagagaccgaggcacgtaaggatgtcatgaggacagatggggatgtgccacaaacgatcacagagtgcagcgatgagattccgttccgctggaagacctagttcacggggcacctcacggagtagtcagcactactactaggtcaggttggaatgtattaccaagttgatctagcaatacttggggcctggcacaagttggcctcccaacgcccttgtcattccaccactccccttgaagccgcggtcaagcgtcgggcagactcgctccagaggtcatcgccctctgatagcctctttgcacccagcgtgcgatgaaaatcccccgccttctagctgatagtccagtcccgatcttcagccttggcgatggtaacgggacacctatagtcccagattcctcgagaaaacaggtcgtacactcgcttgactccgcgccgcatacattggcgtgaccgggattatgacgctccctccacgcggtgacaacggaactctctcaaccacacccactccaggcccatcggcaggaaaaacccactgccgccctctccaccgcccgcccccctcgaaaggccaccgaaa

SEQ ID NO: 370153 - DNA, 972 bp, Homo Sapiens
tgcagtatctcggggtataggtagcgaggcctgggtggcgaattcggcacgaggccaggacaaccgagatggctccgccagacctgctgctgccctcccgccctgctccaccccgccatgccccctacttggttcccatagaactgtgggactgggggcagccggcgctgagcagcactgccacagtgactgttagtgtgtgccgctgccagcctgacggctctgtggcatcctgctggcctgaggctcacctctcagctgctgggctcagcaccggcgccctgcttgccatcatcacctgtgtgggtgccctgcttgccctggtggtgctcttcgtggccctgcggcggcagaagcaagaagcactgatggtactggaggaggaggacgtccgagagaacatcatcacctacgacgacgagggcggcggcgaggaggacaccgaggccttcgacatcacggccttgcagaacccggacgggcggccccccggcgcccggtcctcccgcgcgccgaggacgtgttgccccgggcccgggtgtcgcgccagcccgagaccccccggccccgccgacgtggcgctagctccttggcgctgcggctccgcgaggccggacgacggaccccggcgtaaccccgtacgatctcggtgccaggtgtacggtacgagggccgcggtcctcttgcggtccctcagtcgctgggctcggcagcgaagcgggggccccggcccgcggagccgtggacgactggggtccgtcttcggacctgtcgagctgtttgggccagatgcccggccctagcgccggctgcgggcacgcgggggggcgcgggccggcttggtagcccggccaggggcggaacaagcccagccctcctctgggccccggtccggccccttacccccaagggggaccagaatgtatgagctcggggtccgcaccactggacccggctgaaaccctcactttt

SEQ ID NO: 370154 - DNA, 748 bp, Homo Sapiens; identical to SEQ ID NO: 264459

SEQ ID NO: 370155 - DNA, 1305 bp, Homo Sapiens
tctcagtaactcactacgggtttacggtagcgaggcctgggctggcgaattcggcacgaggccggcacatctcacatgacgtggtcgggagacatcggcacgtacacctgccgggtgatctcagcaaggaggcaacgactctcgcagatgcccacctgcgagtcaggcaactgccccacgcgcccgagcacccagtggccactctcagcaccgtggaaaggcgagccatcaacctgacgtggaccaagacctttgatggcaacagccccctgatccgctacattctggagatgtcggagaacaatgccccctggactgtactcctggacagtgtggaccccaaagctaccatcagtgacagtcaagggcctggttcctgcacgctcctaccagttccgtactttgtgccgtcaacgacgtggggaaaggacagttcagcaaagacaccgagagggtctccctccccgaggagccccccacggccctccacagaaccgtcatccggcagtcgggtccaaaccaaaccagttccattcattgattccagtggaagccgcttcctgagaagccaaccagattggacttctcaagggttacttcatcaggtactgcctggccgggctgcccgtgggggtacaagtttatgaacatcacggatgctgatgtgaacaacctgctgctggaggatctcatcatttgggaccaactaacgagatcgatggtggctgcttaacatcagtcgcttggcctggggggtctccagcagttaaaggtccaccgagtgggacgctgcagggagttcccaacggtaccttcgggacaatggtgcacgcggaagcccacacattccacaaccatccgattttatctcttggaaatggctgcctcaagctccccagtgttaacttcaaggggcatctaacgcagggtatctacacggttctgactcggtcttgggtacctcggcaccttggtcagagggacgtttcctgtggtgtagctgccagggccccataatctgttcaagacacgccaatccgacgtaggcccaacgcgcagctgtgcccaggaaacagcgctccacgcagaccatacaaccacaagggtatggtctaaccacaccgccggggcgacgggccccgcacccaccccagtaggagcgccgcgaccacaagaagaatggcgtcgtggccgcccgagagaagcccgccaccgaggaaccccgtgacacatacgcgcggcgcgaacgcggtcacactggagcagaagatgacccctagccaggaccagataccggtgcacgac

SEQ ID NO: 370156 - DNA, 769 bp, Homo Sapiens
taggtagcgaggcctggggtggcgaattcggcacgaggggtgaatgaactgggggacttctccgcgtttactttctcccctggctgtggccctgagtagcaggcttctcgtgaggattcccgttctcttctgggagcatggccctggggctgcggagaagccaactgactgctggagcgaggaaccctgcagctcagaaggtgaacagctcgtctcagatgcttgcagatctttggttaatttagaatttccagcacagacgtggtatttctccagagacggggtgtgtgcgggtcgctgtatgtgaggcctaggggaagcaatgagtaaactccagggtgggggaggagcaacgggcccggggtagggctgcagaggggccggggcggggcagggcctgtgctgcatggtggcttctgcaggggagggacaggggagggctgcagaggggcagggtgggcacgtggcatgtgctgcatggcagcttctgcacagtccagagcaggcaccacaggaaacgagtcgtctcacatggtgcctgtctgtagctagtcgacagtggaggcacgagccagaggccaaagcgaagtcccctgtgggttctggggtctcagcagtttcatgctcctcaggtccccattcgatgccccatcatccctcactttggggacccgatgctccctctttgtgcccagtcatgatgcctctcaggattttgtgctgtggtgcctgagttgtccgtccccaggtcgccctctggctgcggttc

SEQ ID NO: 370157 - DNA, 879 bp, Homo Sapiens
  misc_feature (405)..(554): n is a, c, g, or t
cgacggcagtaacaccgcggtattaggtagcgaggcctgggtggccgaattcggcacgaggcagcaatcctaccccttgtataacctcaggcaagagcaattctcccttctcgctaaggccacagttccgtgccatggccttcgtggcatggtttgtggcacaccaggagctgaagccctggtggttgcatcactcagggtgggaatgatcaaatgtgttgcatccaacgctctgaaatcctctgcaggaggcacaggagtcaactgtacgtctccagggccacagacaaagagctgacgaaaccctgttgaatgacggaagcagtcagcagaataggaatgcagtcacagggcacagttacggtgggtcaaaacctatacatcactaaacaaatcctacaggtnnnnnnnnnnnnnnnnnnnnnnnnnnnnnnnnnnnnnnnnnnnnnnnnnnnnnnnnnnnnnnnnnnnnnnnnnnnnnnnnnnnnnnnnnnnnnnnnnnnnnnnnnnnnnnnnnnnnnnnnnnnnnnnnnnnnnnnnnnnnnnnnnnnnnnaaatataaccaagaaaacagaaaaacatagagaaaacagaagaagaaatgatacacatatccgaacatacttgaaccaagaccacaaagccaacatgggccaagcagcaacagagtgccgagcgtccaggagacgcccagcatgggaccattacaaccgggcgttcaccagctgggaagggaaccgaaacggccaattttaccaccattgcccacgctcatggaccacacgtataccgccaactcgcgtgatccagtacaccgaaggggtgactgacccgtaagcctcacgacagctccctaagcccaaaggccccaaagaaacc

SEQ ID NO: 370158 - DNA, 996 bp, Homo Sapiens
  misc_feature (661)..(946): n is a, c, g, or t
ggacggcagtaactcccgggtataggtagcgaggcctgggtggcgaatcggcacgagggtttctattcattgagacaaacagtgagcgggcaccaacaggccagcagcttggcccttttcacagaggtggccttggagtctggagtctgggcagctgtctgcctctctacggctctgcttcccagcgggcacacgggtccggagcctcagaatgaagtggtgcagaggcgcagggcacacctaggagaagctcaatgaccaccaaagcccttgaggagagacggggtttgctgtgttagagaaatggcaacccccaggaccatgcacggctctggcagtgcacagtggctgattttcaccagttcctcctacccctgcctctgtcggagactaggaaaacattctaccccttcaggtcttcttttaaaagaaaagagctatggcaaagcgtgccatacaaagttaaaaaaaggaagagtggctttgcgttcttgaccatggccacaattctggtcacttctagcatctgaccttgagaacggtgtagaggctctgagccaccgctggcctttgagagagtctcactctccagctagctctttgtgtagtgtccagggccccggcagtcaggatagagcgagcaaaagaagatggacagtgnnnnnnnnnnnnnnnnnnnnnnnnnnnnnnnnnnnnnnnnnnnnnnnnnnnnnnnnnnnnnnnnnnnnnnnnnnnnnnnnnnnnnnnnnnnnnnnnnnnnnnnnnnnnnnnnnnnnnnnnnnnnnnnnnnnnnnnnnnnnnnnnnnnnnnnnnnnnnnnnnnnnnnnnnnnnnnnnnnnnnnnnnnnnnnnnnnnnnnnnnnnnnnnnnnnnnnnnnnnnnnnnnnnnnnnnnnnnnnnnnnnnnnnnnnnnnnnnnnnnnnnnnnnnnnnnnnnnnnnnnnnnnnttggctgctggcaagggttggctcctaggaaatatctggtcgcaggaccg

SEQ ID NO: 370159 - DNA, 985 bp, Homo Sapiens
tgatggtcagtaactcccgcggtaataggtagcgaggcctgggtcgccgaattcggcacgagggcggacgtcacgtcactgccatcgctgtcttcatccggcctgtcgccatccaccaactgcactcaggatcagcttgctaaagcccagcagcagaaggagaagcagccaatcgatgaaaagaactgggagtgcaaaacatacatggagagtgtggtgctgggaggatgagacatgcatgagaaaggccaaggacctggcatttcacacagatgcggattgtcttctacattgcttgaaaccgcagcttggccactcaccacacgttcttatttaacatttaaattttaattaattgttaacatttaaattctatgtagagacaagggtcttgctgtgctgcccacggcttcaacacgaacacacgagaatatcaggcgtgtgactctgatcctgtgattcacttatgacattggcccagaggcaccctcgttaatactcaaagcgtgacttgagttataggaaactcaggggattttctctatatatgctggtacttgccggaaagttcttcacggtgtgctggatctggtaatccccaagtccgctgagggagtattcctactagcacaggctatcttgagatttcagtgtcgcactctggagattgtccccaactgctggccgtggtcttcaggagccctgtacacatgaggtcctgtcgagcttcttgctttatcgccatcttggcagtcttctcccgccttctagagcccctcatggtggtcctgtccaatatccttaacttgatgcgcgtgctccgcccttcctgggcttcctgaaccttgttttacaagctgagcaagcccagatgtgacgttctaagatgtcgttttcatccccattgtgttccctgatagcaagagacctaaccagaattaaacacctaagacactttcaaaatggtggagttgagtataccaag

SEQ ID NO: 370160 - DNA, 1062 bp, Homo Sapiens
ggcagtactaccggcgtttaaggtagcgaggcctgggtggcgaattcggcacgaggcttggccgatgacaagaagaaagtgaggaacctggggtaccgggactcaggctattactgggaggtaccacccagtgaggtgcagctgctgaagaggatcgggacgggctcgtttggcaccgtgtttcgagggcggtggcatggcgatgtggccgtgaaggtgctcaaggtgtcccagcccacagctgagcaggcccaggctttcaagaatgagatgcaggtgctcaggaagacgcgacatgtcaacatcttgctgtttatgggcttcatgacccggccgggatttgccatcatcacacagtggtgtgagggctccagcctctaccatcacctgcatgtggccgacacacgcttcgacatggtccagctcatcgacgtggcccggcagactgcccagggcatggactacctccatgccaagaacatcatccaccgagatctcaagtctaacaacatcttcctacatgaggggctcacggtgaagatcggtgactttggcttggccacagtgaagactcgatggagcggggcccagcccttggagcagccctcaggatctgtgctgtggatggcagctgaggtgatccgtatgcaggacccgaacccctacagcttccagtcagacgtctatgcctacggggttgtgctctacgagcttatgactggctcactgccttacagccacattggctgccgtgaccagattatctttatggtgggccgtggctatctgtccccggacctcagcaaaatctccagcaactgccccaaggccatgcggcgcctgctgtctgactgcctcaagttccagcgggaggagcggcccctcttcccccagatcctggccacaattgagctgctgcaacggtcactccccaagattgagcggagtgcctcggaaccctccttgcaccgcacccaggccgatgagttgcctgcctgcctactcagcgcagcccgccttgtgccttaggccccgcccaagccaccagggagccaatctcag

SEQ ID NO: 370161 - DNA, 787 bp, Homo Sapiens
aactgagcagtaccctaaggtttaaggtagcgaggcctgggtggcgaattcggcacgagggttactttcccggcccctcgtgacaccgttcacaggtggctgtggtctttagtaagggtgctgtcttccctgtctgatccttagcaaagtaggaaggtagagttgtggcagaaatcctgggataagagaatagtttcctggaagatctgtgcctccaaccagcagagagggatgagcttcattgaactcaacagagccaacatttcatagcaccatgttcaagaggaggttgaagtggcatggcaatggttagagaccctgctgggcgtgaacaccctctggctacctagggacctgtgggcctaccacctggtgccctcatggagacaagaagccctgggttgaacaacatgaagccccagtcactgcagctggtactggaagagcaggtgctggcactacagcagcagatggcagagaatcaggcagcctcctggcggaagctgaagaactcccaggaggcccagcagagacaagcaacccttgtgaggaagctgcaggccaaggtgctgcagtaccgaagctggtgccaagagctggagaagcggctagaagccactggaggaccaatcccccagaggtgggaaaatgtggaggagccaaacctggatgagctgctggtccgattggaggaggagcaacagaggtgtgagagtctagcagaggtgaacacccagcttcgactgcaccatggaaaaagctgacgtggtgataagccctaggacta

SEQ ID NO: 370162 - DNA, 581 bp, Homo Sapiens
cacaagagcagatgacaacttggggaggccttggcacaattcataccaagtttatttcatttccagcaaagcagaagctcagctcatgctgtgggcatgaaggagaagcaaaatgtcctcatctctctgctgggctagacctcccttttgccagctggctgtgtctgtgggcccagcagtagtgcccaccttcccacaaacttggggcacagaaaaacctcacatccctaggtcccaagtgctgactcctgacctcatgcccaccctcagcccaggctggcagctgactcggtgggtatgctgaggctgggcccctggcaagtcaggagcctcctacgtggcccatgctacatggaccccaaaatttgtgctttgcttgtggggagggtgtggaggtgtcttaagggggaactcagtgctttggctgggcttggggccttcaaagtccaacacagaatggggaatagagggtggcagtgcaggataaaggagatgcaggaggagacagggacaggaaatgcctctatcaggcaggcccctgggattgcctcctgcctgggggaaaaggggaccaagcagag

SEQ ID NO: 370163 - DNA, 970 bp, Homo Sapiens
aagaagcgaggcctgggtggcgtttcagcacgaggcgctgtttgaagcgggatggatggcaagcggcggccaggcccagggcccggggtgcccccaaagcgggcccgtgggggcctctgggatgatgatgatgcacctcggccatcccaattcgaggaggacctggcactgatggaggagatggaggcagaacacaggctgcaggaggagctgcagtcagtcctggagggggttgcagacgggcaggtcccaccatcagccatagatcctcgctggcttcggcccacaccaccagcgctggacccccagacagagcccctcatcttccaacagttggagattgaccattatgtgggcccagcgcagcctgtgcctggggggcccccaccatcccgcggctccgtgcctgtgctccgcgccttcggggtcaccgatgaggggttctctgtctgctgccacatccacggcttcgctccctacttctacaccccagcgccccctggtttcgggcccgagcacatgggtgacctgcaacgggagctgaacttggccatcagccgggacagtcgcggggggagggagctgactgggccggccgtgctggctgtggaactgtgctcccgagagagcatgtttgggtaccacgggcacggcccctccccgttcctgcgcatcaccgtggcgctgccgcgcctcgtggccccggcccggccgtctcctggaacagggcatccgtgtggcaggccttgggcacgcccagcttcgcgccctacgagggcaacgtcgactttgagatcccggttcatggtggacaccgaacatcgtccagctgcaactggctgggagctcaccagctgggaaaatacgcccctgaaggcctgaaaggaacaaagcctacccccgtggcccagcttggaagggcggaacgatggcctgggggaccctgaaccctggggtcacgtccaccccc

SEQ ID NO: 370164 - DNA, 993 bp, Homo Sapiens
tagcgaggcctgggtggcgaattcggcacgagggactttggatccctcacgtcggcaggctctgggcctggagcccgtggtcctgcgtgatgtccgaacagcctgcaccctccgggcccagttcctgcagaacctcctgcttccccaggccaagaggggcagcctcccaacccctcatgatgaccactttggcacttcgtaccagcagtggctgagctcagtggagacgctgctgacaaaccacccccaggccacgtcctggctgccttggagcacctggctgcagagcgggaggcagagattcggtccctgtgcagtggggatgggcttggcgacacagagatatccagaccccaggccccggaccagtcagactccagccagaccctgccgtccatggttcatctcatccaggagggctggcggactgtgggtgtgctggtctcccagcggagcagccctcctgaaggagcggcaagtcttgacccagcgcctccagggcctggtggaggaggtggagagacgcgtcctgggatccagtgagaggcaggtgctgatactggggcttcggcgctgttgcctgtggacggagctcaaggccctgcacgatcagagccaggagctgcaggatgcagctgggcatcggcagctcctgctgagggagctacaggccaaacagcagcggatcctgcactggcgccagctggtggaggagacccaggaacaggtccgcctgctcatcaagggaaactcggccagcaagacccgcctgtgccggagcccgggggaggtgctagctctggtccagcgaaaggtggtccctacatttgaggcagtggcaccacagagccgggagctctgcgctgtctggaggaggaagtccggcatttgccccacattctgttgggcacctgctgcgcacaggccgggagagtgagactggggctgccccacccctccctgcatcccctgccatgggtgactgtcactccc

SEQ ID NO: 370165 - DNA, 886 bp, Homo Sapiens
  misc_feature (755)..(755): n is a, c, g, or t
  misc_feature (804)..(804): n is a, c, g, or t
  misc_feature (821)..(821): n is a, c, g, or t
  misc_feature (838)..(838): n is a, c, g, or t
aaacggtgcgaggccgggtggcgaatcggcacgaggggcaggtgtctgcgtcttagagacccttggcccatgctccccaagctcggggagtaaaactgggctatcccccgtcagggcggcaccctggtcaccagccaaacctcagtatactccctcccctccttccctgtctgaacgctaggatctgctcctgaagctccaggatgcctgcacttccactgagaagctgctggcggatgttggactagaggaaagaagaaggcagggtgggactgatgggctcagtggggagcagggccaggcacactgagccagacatgtcatgtctgagccccagattcgtggccatcaggtaggcaggagcaccccgcagatccaagatgatcaggcagcccttttgggtggcctgctgtggcaggggtctgcagagctccttcttgaggtttggaaacagtcgtcatacctgttgattttcctgggggccaatcactagggatctggagctcaccaaaaacaaagcttacattttaatttgtgttgcacacctaccccataatgtctttataccccaaagatccttggtaaatgcttgtgggttggaagcggagttgtcatcgtttaaaaggcacttaagtcccttcttccaatctgtcctgtctaggaatgtggagctctgcccccagtgaggggttctcctgtctgggtgagccaagctccagaacagaaccttggcctgacaacacacttggataggntacattaggttgggagtgctggtgttgttccaaacactgggtgggtttngaacaacagggagtgtntttcctggacagttctngggagggtgcacgttccaaggttcagggtgttcctcaggagtttggtt

SEQ ID NO: 370166 - DNA, 848 bp, Homo Sapiens
  misc_feature (13)..(13): n is a, c, g, or t
  misc_feature (279)..(342): n is a, c, g, or t
  misc_feature (836)..(836): n is a, c, g, or t
tcccgggggtatnaggtagcgagcctgggtggcgaattcggcacgagggaggataggaagcaggaaagcgggagagctcgagggacaagggggctcggtgtgtttacaccaggcacgggctacgagcgtccatcccggcccctggcttgcgctcccgaagaggagagcaaggctgttctgggatccggccgtcgtgcggcaagaggcttgtctgtccgggttgccggaaccaggagaacccagagggaaaccgagggaaaggagcggcgcgttttactnnnnnnnnnnnnnnnnnnnnnnnnnnnnnnnnnnnnnnnnnnnnnnnnnnnnnnnnnnnnnnnnacatgaggacctactggctgcacagcgtctgggtgctgggctttttcctgtccctcttctcattgcaaggactgcctgttcgcagcgtggattttaaccgaggcacggacaacatcaccgtgaggcagggggacacagccatcctcaggtgcgttgtagaagacaagaactcaaaggtggcctggttgaaccgttctggcatcatttttgctggacatgacaagtggtctctggacccacgggttgagctggagaaacgccattctctggaatacagcctccgaatccagaaggtggatgtctatgatgagggttcctacacttgctcagttcagacacagcatgagcccaagacctcccaagtatacttgatcgtacaagtcccaccaaagatctccaatattctcctcggatgtcactgtgaattgagggcagcaacgtgactctggtctgcatggccaatggcgttcctggaacctgttattcacctgggngacaccttacac

SEQ ID NO: 370167 - DNA, 647 bp, Homo Sapiens
gtggttgcgatttgggtaagtgccttatttaatcggttcctttccgataccccagagttcactgggtttcatgtactgtgcgtgttcactactgtttgaagccttttttgagtaaattagtgtagcaagttttctggggattaactcctggcaagctggcgaacccctcatttttagcaatagtttgcatcaagcgtccgtgcaagcactgttggtctggctgataatggcctctgctccccactccggcctgtttgtcttggcattgggccctccatgcgtcatctttgtcctaggcagcctgtggaggtctatgaaagccacacctccaagccagctgatgctgcgcccgatgtcacatggcaggcgccacaggcaaccccggtgctcacagggcatcagggagcacagcagcatctgccatggagcaggcttataggtttatgcctgcagtaaatgggatagttataaagctaatgcttcataccaatgcaactagtgcatgaagtgggtgaggacagctttctgtactgatatgggtatcagccagactggctatgtccccagcactagcccaggctcagggtcaagtacacacagctgtgcatcctctgaagcgctggagggagagaaagaagttcatctgg

SEQ ID NO: 370168 - DNA, 904 bp, Homo Sapiens
  misc_feature (31)..(32): n is a, c, g, or t
tggcccgagttctacaccccccccgatgtannggtagcgaggcctgggtggcgaattcggcacgaggcaaaaagggacaaacactaactgctggggtgggccatttgatctcctttcaccttgcattgctgtcacagcaccttgtatgatggcaggacaggctccagcagagagaactgcacagtgaccactgtatttttcacgctcttccagtggatccctgtcccccgacattgaagaggatctcattcaggccagagacacagagaccacatagcccagtgattaaaccccggtttcactctggccccaggagtggagcctggccactcctgtttggttctcactgggaggcccactggccttggatcatctcctcatgcacacccggagttttacctgcttgcttgctttcctggactgctgtttgcaagaaagtaactaaaacatgaaaagtaaacctccagcttccacagtatattacctgccgttgcatgcatttgaaagttagcctcctcccttgccaccgtcttggtggcagtagcgatgcaagaatgatgggagctttccgagagcgttcagtgtttcactgaagacaggacccatagccttcatttctggctctgtgtctcctctggcatatggacacatttcctggcatttgccctgagtcctacaccactttttgagaacctgaaatagaagggaatcttctgtggcccacagtctccatattggccctagaagactggccctggcggaggaatttgcgttggcttgctttcaggggttagctacaagattcagctttatatctctgttgcttcttggccagtgtagtcaataagggtcttctttaacatctaagatagaggtttggttggccgggcgtggtcgcttactc

SEQ ID NO: 370169 - DNA, 262 bp, Homo Sapiens
  misc_feature (191)..(191): n is a, c, g, or t
gagtaagcgaccacgcccggccaaccaaacctctatcttaggatgttaaaggaaggacccttattgactacactgggccaagaagcaacagaggatataaagctggaatcttgtaggctaacccctggaaaggcaagccaacgcaaattcctccgccaggccagtcttctaggggccaatatgggagactntggggccacagaaggattcccttctattttcagggtttttcaaaaagtgggttttaggacttcagggcaaa

SEQ ID NO: 370170 - DNA, 905 bp, Homo Sapiens
  misc_feature (806)..(806): n is a, c, g, or t
caaaatactgtgtaaatgtctatgggtgacagtctgctgatggtagaaacctttctttttagttcacaagtcagttagagatttggacagagctgacacaaagagtttggagctcccccatttctggctctcctttcaggggttcctcccccaactcttttcagcagtggtggctgccccccattctgacccctgactcttccagccagaaagatggtggttttctaaaggaactttagctgtcctgcacaatgcagacctgtgtcttgcactctgggtaaaagccataaaaataagaaactcagcctgtggcctttctttcttccaaggctgggcttctttttttaagtgacttcatgcagtttgttgcttttaaaaatttgtccagaatcgttttctgcagaagcatggtctgttaggagcttactggccgtagcagaagcaattgtttcctgaattcttgacatttatctttgctgtattcatttagggcttgggagagtccgaagataattcagtcactgtcagattaataattttgtcaggacaaagaataccgttatgattatttaatcctttaaaattgtggtctccagagcttgttctcagaatggcccagaccaagccttaattgtgatagtgaatattaatggtcactttaaggagaaattataggccaagatgaaatgaacataaacctgtttgccctggctttcagtggaagatgatattagagaccaaaatctggttctgaaggtgtgtatcagccctaaggtgaaccagacttgggaaagattgtctttaanaatcaatgagtttatgttttaacttctcagcttagttctatgcattgctctataacacaacctagttaagtttttatggttattctttgaaactggtga

SEQ ID NO: 370171 - DNA, 896 bp, Homo Sapiens
  misc_feature (48)..(48): n is a, c, g, or t
tgagaaagcgggcccagtgtctcagggtagttggcttccaccaccttnggatgatcggcagcagcgctttcaacaccagggtctccacaagtggcgcatgttcagcccttcaaagtcccaccaggcaggtccatgagctgataggccgaccaaagacttttgtattctcttcgcatcgccttagcccttcttcatttatggagagaacgtatctcagcagggcttcctccccgagcgctctcaccaagcctttggtgtccatctgccccagcctgagcacgtagaggggccgcccatctttgtcgtgatgatgccagcctcccgcgtagtaatcctgaaggacctgaggaggggtccaggtttcaagaatgtagtctacctgatgctgctttctccacgtcaaagactgacacatgatctctctggctttgtcaatattaaaatcccgtgcacggaggaaccgaagaatatgctcatcttttggaattttgcccttgtgggtctcctggagccactggcgaagtctaatgaggcagctctcctgcagcggagtcaaatcgcccaggtatctcttgatgtagtcggcatctagtttgtcgtcaggggtgcccaccacgggctcaggtgcactggggctgctgagggcatcaccactcagcccctccttgagggcagcttctgggatgacgacggccatggacgctgcttgtttcttggaggatgatgaagatgtctctgaagagggcgtgatggaaggcggactccaacggggcacaaaggttatgccttcttcttctaattggcgaaggtagtattcgatgatttcctttccttttttaatgttgctggtatattgtttcatagcaatcctttcccactgtactttcaaaaccaaa

SEQ ID NO: 370172 - DNA, 1070 bp, Homo Sapiens
  misc_feature (726)..(755): n is a, c, g, or t
  misc_feature (780)..(836): n is a, c, g, or t
gtcatccaggttgtggataaattgaaaggcttttcaattgcaccagacgtctgtgagaccacgactcacgtgctttccgggaagccacttcgcaccctgaatgtgctgctgggaattgcgcgtggctgctgggttctctcttatgattgggtgctatggtctttagaattgggtcactggatttctgaggagccgttcgaactgtctcaccacttccctgcagctcccctgtgccgaagcgagtgccacttgtctgcagggccgtaccgcggaaccctctttgccgaccagccagcgatgtttgtctcgcctgccagcagccccccagtggccaagctctgtgaactagtccacctgtgcggaggccgggtcagccaagtcccccgccaggccagcatcgtcatcgggccctacagcggaaagaagaaagcaacagtcaagtatctgtctgagaaatgggtcttagattccatcacccagcacaaggtctgtgcctctgaaaactacctattgtcacaatgacagtgacctcactggcctgtggtgactgcacacagctcgcaaaactgtctttggatgttcaaatgagaaacaaaactgtgaagagaaggaactggcgtatacaagatgacttctgatatcatgtttgccatgtgttgtggttcttaagaactcataggtgactttctgatgactgaatgtgtgtttcagagacgcttcgggccnnnnnnnnnnnnnnnnnnnnnnnnnnnnnngagacggagtcctgcctgtttttcnnnnnnnnnnnnnnnnnnnnnnnnnnnnnnnnnnnnnnnnnnnnnnnnnnnnnnnnnggttcagggggattttggctggcctcaaccctcctggggtagctgggaattaccaaattgtgtggccacccatgccctggctggatttttggtagtttttgggaagaaacaggggttttcgcccaagtttgccccaggcatgggttcccaaaccgcctgaaccttcagggtgaatctgggtcggggcctctttcctaagaagaaattccagtccttgtgggggttctataaccg

SEQ ID NO: 370173 - DNA, 660 bp, Homo Sapiens
  misc_feature (534)..(555): n is a, c, g, or t
catgaatgaatgaaatggctcaccttccctattatgaactagaagaaaggatgaaggaaggttggcaggaccccagccttactctgtagtgacaacccagaggtacttttcccggaatgcagggtcaagtttatgtgtgaagggactctagaagtagctggtaaaaatggctacatggtaaccatacatgacttagtccagtattcccataatttgtaattccataaatttattctcagctgtcccccagccatttctaatagaaggatgtgtaccccagttttgacaatgttcttgaaatcaagttagtgttacctgcattgcattataatggaactatatgtacatgttaaagggatccgtttgattcctttcggcaaggaattgcaaaaatagtttttaccaataccagttaaaataggataggttagactttgggggcagggtgagacagtgcagccttttcactctgaaatggcaaatcagctgtactctttgagtctaccagagattcctatttgagtgtgaatgggnnnnnnnnnnnnnnnnnnnnnnctcattcatcttcatgctttcttccatggtgttaattcaagctctcctaaataaagtatccaaagagtactgagaagtgaccataggtattttggcatgagtaaa

SEQ ID NO: 370174 - DNA, 1707 bp, Homo Sapiens
  misc_feature (35)..(35): n is a, c, g, or t
  misc_feature (61)..(61): n is a, c, g, or t
  misc_feature (69)..(69): n is a, c, g, or t
  misc_feature (85)..(85): n is a, c, g, or t
  misc_feature (110)..(110): n is a, c, g, or t
  misc_feature (300)..(328): n is a, c, g, or t
  misc_feature (467)..(467): n is a, c, g, or t
cttcaaataattccataggcctaaatttaacattnggaacccttaatcctgctggaaactntcaagacncccctcaacccacccntgtcctctgatttggggacattacnttcatgaagttgctcccaaaacacatttgtagtattatcactttccaaagtttaacattgtttgggtggaaaaggggggaaaactactcctggtcactggcccaaaataaataaatcccagctaacatgcccaagtagttcccaggttcatatgattctcaaatatcagtagtggtgaaagctcataagnnnnnnnnnnnnnnnnnnnnnnnnnnnnnaataggatagaatcgttaagcatcagaaagagatttgtttccccatacccatgaacaaatttgcaccaagtatgaaacagaaaaaagcaagaggattcatgggcattttcatctatggcttaagatctccttaaaaagnaaaaaaactccaacaaactaaagagcatgacaataactacaaaaagtaaacaacgaaatcagaggcagaatatgaaatagtaatatactgtttcagagcctgcaccatcctgcagaaccaggaaacttaaaatttgttcttaacaaatccaatctaggcgggatatgtaaaaaaacagaaagatagcatcacaaaccacacgacacattatcagagtttaagaatcaggaaaaaacagggtcagctaacactcagaaaaattggtcatcaattctgaaagggggcctggtgacatcgtcaggatggataaagacagagattggactttcccgggttctcagtcactagctgctgcagtttttttgccaaacggtcatcaggctggttggggtcccctccgtcagactgtggagaggggatgctggtggtgctacctcgcctctggagctccagtgtcagccggttggctgccttgacatgctcaatggcggtgcgcaagtgctctgccgggtctgagcgcacagaggacagcttccgggcgtgaagcatgactgtctcctcagacagatgttccagcatgttgcactgagggatgaaataattggggcacatcttgttgaccagacagtgttgcaggtcatcgatgaggcccagcaaaaagtgggctgcatagtcttcttgagccaaagtagttgggcagggaagtctgtcgcaggcccagagcatcatgctccgcaggtgataggggctaatagccttgggccgggacagcagtttaatgatgatggctttgcaggcctgataggcctgcatgaggctgctggagatgcacttcttcaactgcacctcgctcctggcaaaggacagccgccattcattgtccttcttacccttgtaggagcaagcaggcaccaagtaaaacccactgatgacctcttcctcagtaatcttcccatcccaaaagtggttctccatgagccagctctgggccactgcaggccaacctttgaaagataccacagggacaatatcatacaacatgcgactactccctacacccagaatgatggagatgatggtcccatttttttccaccttttctacctttggcatccctcgctggggtttcttctgtatttctgataggacaatgctgatagagtcatagaaccagtcagccactttggtaggtgagaagaagtagttggtggcaccattgatgtgatctacaatggtgcag

SEQ ID NO: 370175 - DNA, 348 bp, Homo Sapiens
agactctagcaggatcccccctacatttgcaggatgattctaaactacaactggttggtttctcctagcgacatttcactaagctgtttagaactaaaagggaaaagccgctaagttctgatggaatcttttgaaagcctacgtctgcttaatccaaatgtttcacggacatcttacaggttttgccttttctttatcactttctattgcaatgttgcttttcttcttggaggttcttggtaactatcatacatccaacttttactcttccacagacaatactatctacttttaaaatgttcgatttcaggtactatactgtagtagaaaatgtctgctttatggtaa

SEQ ID NO: 370176 - DNA, 1213 bp, Homo Sapiens
  misc_feature (266)..(291): n is a, c, g, or t
caactgttagcgtctctatgagcaatcagtagaacttacacatcctaggaaatctttctttgtaagtaattcttttggtctcaagtgattctcttcatgttgtctcttgatgtacatacccccaagcaagttggggggactgtgatgacaattaaatcaccttctctgaagttctggctctgcagagaccaaaccttactgacttgtacagacttgtacaagtaaagacttatacagatagatttttgttttaacttacaatccgnnnnnnnnnnnnnnnnnnnnnnnnnnctggtgttggagtcttatttagaaaacaggataaatgacgctgttatcaaaagttgcctggggttctgtatttcttctctgccctccaatccccgactgctaatgatgtttactacagttgaacccagcccatggtaaacaccattggcttcacctgatcttgtttgttagccttgactgtgaggcaggacttccctcgcttgaactgttacacatacgatgtgtgtgtcacatcacatattgtgcagctgttgggtttcatgtagtgccctgcgatggaaattagatatatgtcatgtatttttccattgaaggtggagtttttcaatgatcatgtgttttgtcctcctaaacagtataccaaagtttgtttttatagttgaggattgtattgataaccactggggtttccgcatatgaagcaggaacaaattgcctctttttctaggccttctctggtgggacctctgcttttgtgaagcaactattttatttgaagacccagggtatgggcaccttttgccttctctcctctctgacttatgagggtattgaaggcgcccttagtacatagtctcgactccgcaccattgccttctcctcggcgtacctcacaactcttaatagggcctagtgaaaaatgggggcacggtgagaagtccattttgagaatcaagcgtaagtgacattaacatttcctagatacacagaaggacttaactaatatgcactgagtcaccccgagaaagtgaaaaaatgccggcaggttgaaagccctgagcaggcctcggtggttgacccaggaacagaagcgccttcctgacagaaaaatggggacccctgtggtggggccgaaagcctaccaaagggggaggaggactgtaggtctgaaaaaaagagggcgaagcacagcgggggccaa

SEQ ID NO: 370177 - DNA, 919 bp, Homo Sapiens
gtctgtgcaatcaaggtggagaaattctgctgtgcggtgtttgccaaagtgcctagttcctggcaggtgaaggacaaccgtgtgagacaattgcccacaagagaatggactgcttggatgatggaagctgacccagacctttccaggtgtcctgagatggttctccagttgagtttgtcatctgccacgccccgcagcaagcctgtgtgcattcataagaattcggaatgtctgaaagagcagcagaaacgctactttccagtattttcagacagagtggtatatactccagaaagcctctacaaggaactcttctcacaacataaaggactcagagacttaataaatacagaaatgcgccctttctctcaaggaatattgattttttctcaaagctgggctgtggatttaggtctgcaagagaagcagggagtcatctgtgatgctcttctaatttcccagaacaacacccctattctctacaccatcttcagcaagtgggatgcggggtgcaagggctattctatgatagttgcctattctttgaagcagaagctggtgaacaaaggcggctacactgggaggttatgcatcacccccttggtctgtgtgctgaattctgatagaaaagcacagagcgtttacagttcgtatttacaaatttaccctgaatcctataacttcatgaccccccagcacatggaagccctgttacagtccctcgtgatagtcttgcttgggttcaaatccttcttaagtgaagagctgggctctgaggttttgaacctactgacaaataaacagtatgagttgctttcaaagaaccttcgcaagaccagagagttgtttgttcatggcttacctggatcagggaagactatcttggctcttaggatcatggagaagatcaggaatgtgt

SEQ ID NO: 370178 - DNA, 877 bp, Homo Sapiens
  misc_feature (127)..(127): n is a, c, g, or t
  misc_feature (604)..(623): n is a, c, g, or t
  misc_feature (717)..(730): n is a, c, g, or t
ccccagtggaattgtgtagtgtacaagtggatgcggggcgtatatcagtaaaatttaaggtggagtgatgatggggtggaaataaggaaaaggggggaaggtagaattgatttggtggttgtgtacnatatggaggggggttcagcccccggggggaattgttaaagcaaaatggcaagtttttaaaaggaagagtggaaattttctgcaaataaaaatccttatttgttttggtggattttgtaatgcatatcattagccctcactgtgatcattactgcgggggctttgaactggcacatagtacagtggatggaaggtgcccgcacaccagctgagaactggttttggcctaggtgggctctagaaccatttacacagcatgaaagaaacaggttgggttaggagcagaaagaaataaggctcacacccctccagacactactttataagcactgcagaacctgaaacagatggcagaaggaatggaatgctacaggggccagcaggagtgaccacagggaggggacagttcagtgactggagcattcaggaagaggctttccagggaacactggacattgcttagtgaccttttgttccnnnnnnnnnnnnnnnnnnnnactgttcggaaagactttgagtctgtggttcaccaccagcccatcagtgtttctttgaggtgattgcattagggaagttggctctgggattgcnnnnnnnnnnnnnnggtggaacatgttttccttaaaagatggaaggttttagaaaatatactaggccatctggttagaaaaaacagaccagactagaaaaagctgtgaatttgattttgtagattaaacaaagccagatgattaaaatgtgatttatttat

SEQ ID NO: 370179 - DNA, 909 bp, Homo Sapiens
ctcacgttgctttcgattgcatgaagaattatttagatgcaatttatgatgttacggtggtttatgaagggaaagacgatggagggcagcgaagagagtcaccgaccatgacggaatttctctgcaaagaatgtccaaaaattcatattcacattgatcgtatcgacaaaaaagatgtcccagaagaacaagaacatatgagaagatggctgcatgaacgtttcgaaatcaaagataagatgcttatagaattttatgagtcaccagatccagaaagaagaaaaagatttcctgggaaaagtgttaattccaaattaagtatcaagaagactttaccatcaatgttgatcttaagtggtttgactgcaggcatgcttatgaccgatgctggaaggaagctgtatgtgaacacctggatatatggaaccctacttggctgcctgtgggttactattaaagcatagacaagtagctgtctccagacagtgggatgtgctacattgtctatttttggcggctgcacatgacatcaaattgtttcctgaatttattaaggagtgtaaataaagccttgttgattgaagattggataatagaatttgtgacgaaagctgatatgcaatggtcttggggcaaacatacctgggttgtacaactttagcatcgggggctgctggaagggtaaaagctaaagggagtttcctccggctctgtccatttcccatgaaactaatgaccaacttgagaaggcctgggaaggatttgtgtatttttgccaagtccagatgggcctgcatttttttgagcctttaatttggcagcggaattttcaccttttttccggttaattttccaaattaattaacaaacttgaacacctcccaagctcgttaattactaaaagtattt

SEQ ID NO: 370180 - DNA, 1140 bp, Homo Sapiens
ttaaaagtcaaaaactttaaacgaaatttaaggaatgctgattccccacatggtggaaaacaaaactctgaaagtgactttggatttagcattgacataaatggaaactgttggttttctacagaaaggaaagaattaaagcatgatctgggggaaaaggcaccgcactaccacttcacatgggacagaaaagttcatttatcatgtccttaaaatctctaagccctatatgaaactgtccaaatatacaaagctcaataaactactagcaacatatagtgtaaggtcaaagtagttattacatcggaaaagagacaacaggtaccctggagaccgactgcccgcaagccagcagtgtccacgagaaactgcaggaagagcctgtcttccctggcccagggctggtgctcttgatgcgttcttgagtttcttgccccctgcctccacggtggcgggtctcctgtcagttccacgtgtgacacctctggagtcctgagtatattctgacactcggcaacccagggcaccttctgaaggggtgtgtcacctgcttccgaatggagatgaaggcggtttctggggtcagtaccagctgttatttagtggcccctgaaacacagctcatgccccactgctttgtgatggccttgggggacaacttgcatcagcagctaagaacttaggattcaatgacaaagcacagctttcctttatttcctgtgcatctgatttcctgatgtcttcttgatttgccttgtagcaatatgtggttgctcagcttcagtgaaaaatatattgccttttcccccatatatatgcaatagcacacaccctttctgctttcaccaaggttgcccttgataacaaacggatgtaatcctgcataagacctgggtctgaatgtcttcttaggaacacatttgtcagtgctgccctcgagagcttgctccactcgaccgaagggcaggagcctcagcctacaactatgttccaggacttgccacagaaaactttgtggtggggcagaaccaggaggaagcaacatccaccccagccagaccctctgattccagttgggtggctcgatttctccccgttagggagagggcaaggaaataagctttaaatttaaaaggctgg

SEQ ID NO: 370181 - DNA, 1131 bp, Homo Sapiens
  misc_feature (168)..(222): n is a, c, g, or t
  misc_feature (1063)..(1063): n is a, c, g, or t
cgggtgcccggcgcgggcccaggaggcggaggcggctcctggggagagggatccgggagtccctgaggcggccccggctccgcactaggaggtggggtccgcagtatcgccagcggccggcgcggcttcccggagccccggagcccgaggcgcgaggtttaggctgannnnnnnnnnnnnnnnnnnnnnnnnnnnnnnnnnnnnnnnnnnnnnnnnnnnnnntggagcgcgcctccctcgcctcccagggtctggcgagccggcgccggccgagctgcgggagccgcggagagcaccagctgtcgccgcgggagctgctccggccgcaccatgcgggagctggccattgagatcggggtgcgagccctgctcttcggagtcttcgtttttacagagtttttggatccgttccagagagtcatccagccagaagagatctggctctataaaaatcctttggtgcaatcagataacatacctacccgcctcatgtttgcaatttctttcctcacacccctggctgttatttgtgtggtgaaaattatccggcgaacagacaagactgaaattaaggaagccttcttagcggtgtccttggctcttgctttgaatggagtctgcacaaacactattaaattaatagtgggaagacctcgccccgatttcttttaccgctgctttccagatggagtgatgaactcggaaatgcattgcacaggtgaccccgatctggtgtccgagggccgcaaaagcttccccagcatccattcctcctttgccttttcgggccttggcttcacgacgttctacttggcgggcaagctgcactgcttcaccgagagtgggcggggaaagagctggcggctctgtgctgccatcctgcccttgtactgcgccatgatgattgccctgtcccgcatgtgcgactacaagcatcactggcaagattcctttgtgggtggagtcatcgcgctcatttttgcatacatttgctacagacagcactatcctcctctgggccaacacagcttgccataaaccctacgttagtctgcgagtcccnagcctcactgaagaagaagagaggccacagtgacagcgcacccaggttgcctctggaggggatcacct

SEQ ID NO: 370182 - DNA, 923 bp, Homo Sapiens
  misc_feature (445)..(467): n is a, c, g, or t
atatttccaaagttacatggtttcatgcccataaaattaaaccacacttggcttttaacatcgtttcagaaatgggtacatttaaacaattggaccatacagcactgtaaacaatttcaaagtccattgagtttaccatgaaagaactgaaacgtatgtaggaactgtgtcctgctgcagacaagcagctgctctggctctggtgcggtgcgggtgcagtgaggtgaggtgggcaggtgtggaagggagaattcctgaggccagtcacaattattgaagctaaattaatttcttcctgacactttagcattaattctaagtagttctaagttctaaaccattaactgtatagttaatttttttaaatcaaagaagaaaaaggctttcacacagatgaatgtataggaaaacacaagtaatgacaattttcaagagccttattgtnnnnnnnnnnnnnnnnnnnnnnngacaattatttttggagttactgtctctaattcttaaaaagtaagtacagtgtctgtatctctaagttttagtgctatacagcactaaatgtactttatgaatttggggtaggtaaagtttgtattttatcttaaacatgttttctatgatgaaaaggaacaaaattgtaaaaaatgaggatcttccctctaaaggtttcaaagcgttagaggacatgcaattaaatgttgttacaccttgaacaatgagcctcttgagtttgtaggaagggcagaccggctccattaccaacaactttggggtagaaagcacagctctcctcttttacccagcacaaatgcaatcctgattataaaactatttgtgtttctaaatacaaccaaaggaaatcttagagaaacataaattagaaacctcttttattaaggggaaacaacaaaaaaaggtgctttttt

SEQ ID NO: 370183 - DNA, 603 bp, Homo Sapiens
  misc_feature (378)..(378): n is a, c, g, or t
  misc_feature (463)..(463): n is a, c, g, or t
  misc_feature (482)..(482): n is a, c, g, or t
  misc_feature (500)..(513): n is a, c, g, or t
  misc_feature (517)..(517): n is a, c, g, or t
  misc_feature (525)..(525): n is a, c, g, or t
  misc_feature (551)..(551): n is a, c, g, or t
  misc_feature (573)..(573): n is a, c, g, or t
gagctttagtggaatgtagaatgtggcaatcttaaggtcaccaatcagtttttgttcttttttcctggatctaccctcatggtcgttttcaacatagcgggttagagttcttatactgttccagttcaattccaagaattgcaaatgtttattggacccctccatcttgatgatatataaaaattggaagccaaaccagttcttaaatgctacatgcaactcccagattccaaaggattcaagttctaattataacctttgaagcgtatagaatggaactcattcagtttgattcagttcttacctctgtcaggaggaatacagttcctgttcatcctgtgttctaagatctccattgaacagcactgatttcctttncattaggcaaagtgatctttgtctctgttctaaaatgggaggcagtaggggagccaaaactattccttcttcaaggcatcccttnacaccatactttaacttcngggtatgggttatttacnnnnnnnnnnnnnnaagnggaaaaangtgttggggggggagacactactccnacttatcttggctcataaggcntttctgggtgggattttagggcccggggtc

SEQ ID NO: 370184 - DNA, 832 bp, Homo Sapiens
ctaccacaggcgatttgcatgtactgcacacacacagggattgagtcctggctgttatgatacctatggtgcagacatagactgccagtggattgatattacagatgtaaaacctggaaactatatcctaaaggtcagtgtaaaccccagctacctggttcctgaatctgactataccaacaatgttgtgcgctgtgacattcgctacacaggacatcatgcgtatgcctcaggctgcacaatttcaccgtattagaaggcaaagcaaaactcccaatggataaatcagtgcctggtgttctgaagtgggaaaaaatagactaacttcagtaggatttatgtattttgaaaaagagaacagaaaacaacaaaagaatttttgtttggactgttttcaataacaaagcacataactggattttgaacgcttaagtcatcattacttgggaaatttttaatgtttattatttacatcactttgtgaattaacacagtgtttcaattctgtaattacatatttgactctttcaaagaaatccaaatttctcatgttccttttgaaattgtagtgcaaaatggtcagtattatctaaatgaatgagcccaaaatgactttgaactgaaacttttctaaagtgctggaactttagtgaaacataataataatgggtttatatatgtcatagcatagatgaatttagaaacaatgctcctactgtttaaatacatatggacacatctggtgctgagaaagaaacaaacacattaccattggtgtcaagaaatattactatatagcagagaaatggcaatacatgtactcagatagtta

SEQ ID NO: 370185 - DNA, 1008 bp, Homo Sapiens
ggaaaaggtgttagctactggcgggtgcctcatgagctgatagagtgttggactctagaagaacggcctttacttggaagcctgcgtcacatggctccaattcgaaagaggcgactgataacgttcaatgaagcggacgaaagtgtgaactataagactggtcctaagccagttagatttttgggcccttccacaagtacccaaattaaagtcaagaactcggcctcagtcacggtgtctccagccagtgccatccagacgtcggctggggcgacagcaaaccggtttcaaagtggtagccgcagaaaggcagctcagcgctctgcaccttccagagccacggccctggtgggaacgggggcacctgggcatcctcaggcttcccctggggctgcgagcgctgaaaatggaggcacgcacttacctccagctaaggtgctactctccgacaagaagcctacaccccagcggtgataaagctgaagaggactccgctgtgcgccaccgcgccttccctgccctcccccacggccacgaggcaggccaactccctcaagccgcttcccggcgaagctgcccgtgccttgggagtgcggactgagaacgggaagaacaagggaaattgatgaaagtggtggacttggaatttcccgttcatctcccaaagctttcaacccattcgacgcaaagaagtgacactttcttaatgcagcagaggggaagcttaggtttatgttgaggattctgttcctggaattgtgtgagctaggaatgggaggaggggagacctttcaatggttaaggctccatttctcattttcccaactttttatatgattgtctatggggcagtttgaatttctggttttcaatttattttttaatgattaattcgtattaaggcaacaagacagtacaacaaataatctctagagaggtccactttgtagctgaagtaaacgttacttgttgcaacccgaggatgggcatgaaaggcctcgatatgaa

SEQ ID NO: 370186 - DNA, 823 bp, Homo Sapiens
attaggggggaatatttattaacataattttgtttaacacatttctttctacacaaactgaatttaaaagtgtctataacattttcaattacagtaataacacatgaataaattataaattaacaaaatcttcatatctactttaaaaaatcatttatcaaatgctaacctccaaattatctggaaaattaaagttgcaaattgctataaacctggcatcccaattaaattacagtttttaaaggtatataaaatctccctcaaattccaagttcctctccagaaaattttattttacccttttcttaagtttacagcctgctaaacattttacccaaatgtgagaaaactgcctggagatgcaaagcacaataaaataattaagtgaaaagaacaaacaaaagatacccgttaaaacagttattttagctggcagcacttgaaattggtaatctgtattttttttaaagtgcataactgcaagatgattcactgctgattaactgttgagcagttttatgtaagaggataagaatatttaataaatcgcaattcagtaaaatattcaatatttgattaaaaggaaattaaggaaaaggatttgccccttgggaccgcctttccgaaatttaaccctttaattaaaaaatattaaacctattttgacctttcccaatggaaaaaatctatttttccactccggggggggagaaaaatgggaaaaaacttggaaaacaggggtccaaattttcaaaaggttttttaccggctttgaataacccttctcctggggttccacattttaaaaaactttccatttttt

SEQ ID NO: 370187 - DNA, 1418 bp, Homo Sapiens
aggtaaatggcccagacccgggaggccccccatgtggccacttgccatgctcggggggaggggcaggaccggcccaacctggacaaggtccgggcaattccgggtgacgctggggccggggcagtcggggccgaggaagggtcggccagtgggggcgagggtgggtggccatccggccctggtgtgaggagcagagctgcaagtttcctacagacaatccactgagtgccccagagacgtcactgaaaaacttcccagtgctctgacgtgccagcagtagggcctgaactgtcatccctccacggggctccctgaggcctcaggccctttcctttgcagcaccaggtctgccttgcacgcatcccaggaggaaacacacaggcagcctcctgctgcgcggagggcaacggagagattcatgaggcccctggtcgctctgcagacatttaaaatgacgcttctccttgcaccagctcccagggaaatgtcagcccgggtccacctgacggagggcagctcacccgcctgcatctatcctcaatgcacttaaaatatgaagacatgaaaggtggctggaaaggccagagcgggagcctgacaaacactcctgcttctgggtcaccacgcgggcactgctggcaaccgagctgtgggttcacagacgctgcctgaaaacaaccgccacccccgagagcagcggagcctcttcatcagccatggcggctggcaacgccgaggacggagcccagctctaaaaggcgtggggcctcttctgggccctgggaaccctgcgagggacggtcctgttccgcccagctcccggctggcagtagacggtgactccacggcgacagaacctgcatccacccgcgcctgtcgggtccggggagcggccctggaggatcctcctcagtaggtgatcttccagtgggtgggttgctcacacgccttctcttggtctccgcagaacctgttgtacgtcgtcttggggtccaaccccaggatttctctttcctcatgaatccgaaaagaaaatgttgagactgaggtgccaataaaaaaccacacactgtctagccagggcatggcgggtccttatcgtgaggcacagtagacatcacggaggtcaaggccccctccacacacacgctgtatgggctgggtggggacacccttctccaggggtttctccagacctcaggtcagcggcctgcccgttcctccggctcctgcgcagctggtctctggctctccagcggcacttcatgaacttcgtgaacaagcaaaccccagagatgtttccagagcaaatgtaacatgcacagcgctgtacacagagccacagggccagcaggccacacaggcctgtatgctgctgcggggtgcagcactggtggggagaccctcaccaccccaca

SEQ ID NO: 370188 - DNA, 837 bp, Homo Sapiens
caccgagtcgcccctggaagcagattcccattgagttttccccaccaaggggaccatgcacatggtagaaacattagattctgcattgacagtagcctttccttggcccgggcctgtggtgggaagacgggcaacaagtataccccaccagggcctgagtgactagaggaagaggacgaggccttgttggcactagatttgggtattttctgcatgtcataacatatcctaactgctatttcagaagaggcagcttgtaggtgattgtacaagtgagaattaaagagagaacaaatatttaaacaggtgctgtattagtaacagccagtgccctttcagcccttgcatctattaaaaggagattcaggattttattggcacaggcccttcttagtaggaagaaagggtgcttagctttggacctgaccgggtgtgtgtaaaaccatgggactgagtcacagcagacacttcgatggtgggtaaatgttgacgggtgcttacacactgtaccttttcctttcatactgatgctgcagttcaaggctgggagttgttaacgcattgacctccacccacctgccccatgtccactgggctgcccaagctgcatgtcacctcgaggctggcaggaaggggcgagaaatccccaggcattgtaccaacgacctagttccctctaggggaataaatttcccgcgaatgtgtgattttttaacgtgggggagatgcactctttttggtgtaaccagaatagggttccccaacgcaaccccggtcaacaagtgcttctttctagaacagggttcctaccaaccatcccgtgggtgaggaatgaaa

SEQ ID NO: 370189 - DNA, 639 bp, Homo Sapiens
  misc_feature (578)..(578): n is a, c, g, or t
  misc_feature (589)..(589): n is a, c, g, or t
  misc_feature (602)..(602): n is a, c, g, or t
  misc_feature (623)..(623): n is a, c, g, or t
gccaatctgccctctgacatgcaggcccgtatcttccagcccacaccacctggggcacgaaaggtggttgtggcaacgaacattgctgagacatcactcaccattgagggcatcatttatgtgctggatccagggttctgtaagcagaagagctacaacccccgcacaggcatggaatcgctcactgtcacaccctgcagcaaggcctcagccaatcagcgagctggcagggcaggtcgggtggctgcagggaagtgcttccgcctgtataccgcctgggcctatcagcacgagcttgaggaaaccacagtgcctgagatccagaggaccagcttgggcaatgtcgtgttgctgctcaagagcttagggatccatgacctaatgcactttgatttcctgggaccctccaccatatgagacactgctgctggctttggagcagctgtatgctctggggagccctcaaccaccttggggaagctcaccacgtctgggtcgaaagatgggcagagttgccggtgggaccccatgctgttccaaaatgatctttaggcttttgaagaagttacagttttttnagaaggagatncttgacattgggntgccatgtttttttgttcaanaattccatttttttac

SEQ ID NO: 370190 - DNA, 1218 bp, Homo Sapiens
tccgaaggccaaccggttgaacctgtgggcatatcaaccttattagtccttccgtaaggaaagttccgttgctttgcacttgtgaccctccagagatggggtaaaatattagagccaagaggcctgcaaggttaggggcatagggaatccaacacaagaggagcttggagagctatgaattcgacaagagaattcaggcagagacctggacagtgttaaaaccagtgtaaagctgagttaggaaatgtttaaagtttgagcccccaggacctctcatactatagtgaagatatagtgtatttgttcaaagcgctatctacatgtgttgcaagtgtgaggtacagaggaatttctgtagaagcccggactcctttggaagtatgaaaggagcacagcttacgaatacatctgagatgtatcaagaatacagatgagaaaggacatccctttgacccagtgagcagctggaagaaagaggcatttagcagaggaggagaaagatgatagccccgtacagaacctgtcagactgagcctatgatgaatgaggttttttagagcaagatcaccctcaaaaccagcttgtggaatgggggctaccctttttaatagcaaattctaagaattcatatatcaatgtccttccagattaaaaaaatggtattttattataacttttaaaattgcggaacatcagactgaatatcatcagacacatacacaaaaccactcatctctaaagtcattttctataccctctcaaaatttggccagtgagttttgcctcagggaattttccagttcaaccccatacaccaacatggaataaatggaaacactagccttttggttttgcccacagttccaaagtgctattacaggtggaatatctgctgcaggaagtcattcttgatgctgtgggtgtgagtaaaatgcttagttccttctaaaatcataattgcaatatggacttctgcttcacgctgcatcctaaggcacaaatcaggtaacctacatctcccaaatgatcaacagagcactccatcctattttaccctcaatgctgagaaattactcctgggcccagaaggtgtcacataggtggcttgggttacttggtgctcaggcaacaacttggcacagggcccaggttgatgaacaacaacaatttctttaaatatgtgtggactcaagatggaggcctctgggcagagggaac

SEQ ID NO: 370191 - DNA, 510 bp, Homo Sapiens
  misc_feature (296)..(296): n is a, c, g, or t
  misc_feature (424)..(424): n is a, c, g, or t
  misc_feature (460)..(460): n is a, c, g, or t
  misc_feature (471)..(471): n is a, c, g, or t
  misc_feature (485)..(485): n is a, c, g, or t
agctccaggcccgggtagcaggagcatcacccagagagcagggaggacgtggttgttgttctggaggatttgcagctggatcttggagaaacaggacaacaggtggacccagaccagccaaagaaacaaaaaatacttgtggaggagatggcccctctgaaaggagtacaggaacagcaggttcggcatgagtgtgaagttacaaagcctgagaaagagaagggtgaggagacaaggattgagaatgggaagcttattgtagtaacagactcttgtgggaagagtagagtcatctngggaaaatatcttgaacccatggaggctcataatgagggctctaacttggaaaggcatcaggccaagcccaaagagaagatttgagtataaatgctcagaacgtgagcagagattcatccagcacttnggacctgatttgaacatgcgagttacacacacgggnaaggaactctncgagttttgatgtnttttcgagtttccgtttttacaggg

SEQ ID NO: 370192 - DNA, 1171 bp, Homo Sapiens
  misc_feature (463)..(473): n is a, c, g, or t
  misc_feature (877)..(964): n is a, c, g, or t
  misc_feature (978)..(996): n is a, c, g, or t
  misc_feature (1000)..(1101): n is a, c, g, or t
acagccatgcaattgaatactgctcagcaataaaaaagaatgcactgccagtacagcaacatggataattctcaaatgcattatgccagttgacagaggtcagactcaaaatactatgtacagtgtgaccctacttatatgacactgaaaaaagcagtactataaggacagaaaacaggttagtggttgccaaggagtgggagaagcagccagggagaactttgaggaggtaaaaatgtgccaggccttggtcggtggtggtacataactgtgcatttgtcaagactcagtgctatacgctgaaaagggcaggttttactataagtaagttgtacctcaataaacatgatttttaaatgattaaaactttggtttttgtttgttgtggttcagttttaaggtttcccataaatctattggttttagattctaagttgtatataagcttctgttttaaaagaannnnnnnnnnnaaatccccttatcgtcaacaatatttagttgtgctggaaattttattttggaattgtttaatagagaaagacaataaataatgttcaagaacagacattgattcataacatcaaagtatatggtgagaagatggtatttcaaaataaaagaagaatttcttatgtgctggtaaaattgtagataatcatttctgcataattctcatagctggattgctttaataaagccacttaaaggttaagttctagattgcttcatgttgcttatcaatgttttaaagctaaaatagaaaattagctgttaagttggctcaaccggaaattcagtatatcctttaaaaagagaaatttagtaagcagtgtgtctaaagaatgacatatggttgggtacagtggctcgtgannnnnnnnnnnnnnnnnnnnnnnnnnnnnnnnnnnnnnnnnnnnnnnnnnnnnnnnnnnnnnnnnnnnnnnnnnnnnnnnnnnnnnnncatgcctggctaannnnnnnnnnnnnnnnnnnggannnnnnnnnnnnnnnnnnnnnnnnnnnnnnnnnnnnnnnnnnnnnnnnnnnnnnnnnnnnnnnnnnnnnnnnnnnnnnnnnnnnnnnnnnnnnnnnnnnnnntatttggttttttgtttggttttcaagcaacctttctcaattttgctatgctcactctttcttcacatcc

SEQ ID NO: 370193 - DNA, 457 bp, Homo Sapiens
caggtcatattgattcagcgacagtctaaggcctttctccagtctaaactttctggtgttgaatacggttaggcctttggctgaggccttttaccatattcactacattgtccactctgtgaactgtccagtgttgaatgagtttggaggtatagctaatggatttccattagtaaccttcaagacttttttacaccgtgaactttctggtgttgaatgaggttgaaacaccagctaaaggatttctcacaatcattgtatttctccagtgtgaatccttcgatgtttaacaagactggagctgtggcgaaaaaatttcccacattccctgcactcataaggctttgctccagtgtgaaccctctgatgtttaacaaggctggaatactcactaaagaatctcccacattcattgcacttaaaaggtctttctccagtgtgaacttttcgatgttgc

SEQ ID NO: 370194 - DNA, 702 bp, Homo Sapiens
  misc_feature (692)..(692): n is a, c, g, or t
ggatgggagtgatatcaaatacaaacgatgttgtgttccttctctcgaacaaaacagcaaagggaatgccagctaacttctttgattagaaggtaatgtcatggaatagaatgctgtcaccagaaaatgctctcccactgctagataaatgcagaggcaaagtgtagacatctgtaggaactaaatatcaaggaaatcaagacatttattttcaaagcgagaattctatctacattctattctgcggatgttatttctgttatacatctgaattttaaaatgtttactgatagataatggatttaaagggcggctaattgattgtctgccattgttgataaactgttctaattggtttgtgaaagaactctgagaattagctaaatggaggctagtgtatttatttttagaggtacatgttttaagtaaatgtatttaaaacaaattttcatggtctgaattgtatatgtaaatgcatatctgtgtaagtatatgcaagtgtatattcttctactgattcagtcagacacgaaatccaactgaattacccggtagactgaatatctgacgggatttctatatggacatagcacagatgaacaaaaaatgtatttatattcacctgagttttaatgtttttaaacaagttttctcctgcagtgcttttctattatggaatagttgagtcaggntgggggtttt

SEQ ID NO: 370195 - DNA, 427 bp, Homo Sapiens
  misc_feature (17)..(17): n is a, c, g, or t
  misc_feature (37)..(37): n is a, c, g, or t
  misc_feature (42)..(42): n is a, c, g, or t
  misc_feature (66)..(118): n is a, c, g, or t
  misc_feature (241)..(377): n is a, c, g, or t
cccacatgccttttaanccccagcaatcgggacgctnaggcnggaaaaatcgcttgaaccccagtnnnnnnnnnnnnnnnnnnnnnnnnnnnnnnnnnnnnnnnnnnnnnnnnnnnnnagacagagtgagaccctgtctcaaataaacagataaattaaataaataaataagctcactctcaataaaaaggaaacagaaaataagaattaagtattctaacactgcaggctgggcacagtnnnnnnnnnnnnnnnnnnnnnnnnnnnnnnnnnnnnnnnnnnnnnnnnnnnnnnnnnnnnnnnnnnnnnnnnnnnnnnnnnnnnnnnnnnnnnnnnnnnnnnnnnnnnnnnnnnnnnnnnnnnnnnnnnnnnnnnnnaggtgcctgtaatcccagctactcaggaggcgacaaagcgagactgtctc

SEQ ID NO: 370196 - DNA, 591 bp, Homo Sapiens
cagtatagcaggaatgagcccctgacctttgcatggttacgccgatacatcaaatggcctttacttccacctaagaatattaaagacctcatggatcttgaagctgtccacgatgtcttggatctttacttgtggctaagctaccgatttatggatatgtttccagatgccagccttattcgagatctccagaaagaactagatggtattatccaagatggtgtgcacaatatcactaaattgattaaaatgtctgagacgcataagctgttgaatttggagggctttccatcagggagccagtcacgattgtcaggaaccttaaagagccaagctagaaggacacgcggcaccaaagctctagggagtaaagctactgagccacccagccccgatgcaggagagctgtcccttgcttccagattggtgcagcaaggactcctcactccagacatgctgaaacagctagaaaaagagtggatgacacaacaaactgaacacaacaaagaaaaaacagagtctgggactcatccaaaagggacgagaagaaagaagaaggaacctgattcggactagttttctgttcccctg

SEQ ID NO: 370197 - DNA, 473 bp, Homo Sapiens
  misc_feature (26)..(26): n is a, c, g, or t
  misc_feature (65)..(65): n is a, c, g, or t
aaaactggcctcccctgatggaaaancccctcccaaaattccaacagccttaatgccgtcctcanaacattttaaatccaatttaagtgaatattgtgcaacacccatcttggaataaatacccatcctagttcctttctggagatctcgaataaggctggcatctggaaacatatcccataaatcggtagcttagcccacaagtaaagatccaagacatcgtggacagcttcaagatccatgaggtctttaatattcttaggtggaagtaaaggccatttgatgtatcggcgtaaccatgcaaaggtcaggggctcattcctgctatactgcctggcaaactgtaacagtgaagaacacacaaaaggctgcttcttgttgataggagctgtgcagaaaacatacctcactcgcagacttagtggaatatgctggatcaactctgcagaaaatttaaaatcatccatattgcc

SEQ ID NO: 370198 - DNA, 676 bp, Homo Sapiens
ggatcatccccctgaacgttcccagggaagtgacagttgataccactttggctgggtaccacctgcccaagggtaccatgatcctgaccaatttgacggcgctgcacagggaccccacagagtgggccacccctgacacattcaatccggaccattttctggagaatggacagtttaagaaaagggaagcctttatgcctttctcaataggaaagcgggcatgcctcggagaacagttggccaggactgagctgtttattttcttcacttcccttatgcaaaaatttaccttcaggcccccaaacaatgagaagctgagcctgaagtttagaatgggtatcaccatttccccagtcagtcaccgcctctgcgctgttcctcaggtgtaatattgttaagaaagaaaggggcaaggaaagtaagaagacatggcacgtgttctgaaaccactggtgtctgctcagatgtgttgggacaaaatgaaagtgactttcaagaaagatcagaggaatttgactcagagaaaactagatccaaatcccagctctactgtctcgtccgaattagccttgggaaaatcatttatatgctaaattatttacctttttatctaggagatgaaaagaggataatgtttccttcataaagaagttctgtaaaatcaaaaaatgggact

SEQ ID NO: 370199 - DNA, 796 bp, Homo Sapiens
  misc_feature (31)..(31): n is a, c, g, or t
  misc_feature (87)..(87): n is a, c, g, or t
  misc_feature (102)..(102): n is a, c, g, or t
acctttgggctaacttttccactgtttccanggttcccccttttgaaagcccacttgtttccagcctaaaagggaccctcccctggntcctataaaagcccnggctatgacctaatactctttcccccagcacacgcctggcctcctgaggagaccacaggggaataagaggggaactacatgaaccggtcattaagactttttggatttaaagcccaggagaatccaacttcacttgtaaacgttccgcagaaaccacaacaccaacactaacattaagacctgttactcaaggcttacgtgctataaatacgacaatgaattttattcttttataggaccaaggattaaattctctactattgactggatattgtcacactgaggtggctacttgatgttattttggaaggaagaggtcaatgaattacacaaacaaattttcttattgtgtcagcatgatctgacttaaaatttcttaacctggagaaaatatgtattttgcacattaattagaagttccatagaaacccatttgtagctaggtttttgtccaacatgaaaattcgtattagagctaagaaattatggatttgggctgggaattctaggtcaaatctgagaaaaggggtggggaacaggaaggttagaagaacattcacaggggtttagcaagaatgaaaaccggaagggcaatgacaaggacacgatgatggcatccaatacagcaaacttcccctcctgaagaccaacactcttccttaataagataatatgaatttcgttcagagagtcc

SEQ ID NO: 370200 - DNA, 383 bp, Homo Sapiens
tgaaccactgtgcccagccaaattcactaaaattctatcaatggatttgccaaatagcaaaactgctttagagactgctgtataaaggaagtacaggtagtctcttcttacccacatgtgatgcatttctgaaaacatggaaaaactactgcatctgagagaaagctgagaaatgaacagaagtctgatggtgccaggtcagagaggtctgtgtcatttctcagctcattggttaattcacacaggattgatcaggtacctcatgcatggggccttacccaatgtattgtaaaaatgaaatgtcaaaaggaggctgccgcgggtactcaatgcaagtccagggttagggaagaactaaaggaagcactttcatagccagcatt

SEQ ID NO: 370201 - DNA, 1209 bp, Homo Sapiens
caggtttcatccccgaataatttgctaaaataacattgtacatacaagagagggaagaagagtatgtcagtatattatgcagaagatagatacagccttttcagaagatctccactagtttttgttccaaaaattcaagtttatgggagaaatctcaattagccaccttttcacagttgtgtggatataacatttgggggactctttctggactcctacctatctgtgcattttaccggcacctcaggaaaggagggtgaccaggttgtcttagcttgtactgcttggtgatctctgaggaccttctaattcagttgtaccccagtgttccatgtatagaaaaacttcattagaacaaactttacttgatatgaaactcctattaacagtctttttttgaaataaaaagtagcttgagctttcttttaaaatcatgtatcttgattgttgatttaatgaaggatttccttttaatgctgcttttgagcttcaaggtaataggacagcaggaacctaaaatatctgccatcatctgccataggaaagatacccagagacccatcatgttctctttttgttgttacactgttgggtgggtataacaattggaaaatgaacaaactgatttgattgtgcaaactacctttttatgacaagcctaaaccctcataatgcggcagcttaaagtgtatacatatgcactaactttgatcaattatattctcatatctgttagctacacagtctcctattatctcaattgcttatgtgcatatggaatatgttacttaaaacgtgtgcattcttactgaaaatgttttcaaaggaaggtatcagctgtgggctaattgccaccaatttcagcctgccacgattcttggaaatatgtcttccaagtgccatccatcatcagtaggacaagtgtcgggagtttgtttatttttttccagtagcaacgatgggttacatggagccatgaaacctccttctggcctcccttgtgattaatggcatgtgtttgtaaaatggatagctggggttggcagatggctagagaagaatcgcctttggtttaaaatgtatgtggtcccctaatgattgtgaccccattctgtaatcaactgagctagttccaataaagttaagcaggtttaaatccactttgtgcctatcttttcactgacaataaagttagctattttaaaatgc

SEQ ID NO: 370202 - DNA, 590 bp, Homo Sapiens
  misc_feature (407)..(415): n is a, c, g, or t
ggatatttttcatttctatttcattgttaatcacaactacttactaaggagatgtatgcacctattggacactgtgcaacttctcacctggaatgagattggacactgctgccctcattttctgctccatgttggtgtccatatagtacttgattttttatcagatggcctggaaaacccagtctcacaaaaatatgaaattatcagaaggattatagtgcaatcttatgttgaaagaatgaactacctcactagtagttcacgtgatgtctgacagatgttgagtttcattgtgtttgtgtgttcaaatatttaaaaattcctgagatactcttgtgaagtcactcttatgacctgagttgattttttatagtctcagaaacatttatttatatttatgtgattannnnnnnnncaacccactctgctctaaacttaattattaaatattataacagtacatcacttgttatttattgtatttattaaacactgacagctctctcatctccacaaaccataatcatatcacttaactaacaaatcaagactaaaatacccacattgttcatcctcttattaatattagc

SEQ ID NO: 370203 - DNA, 1095 bp, Homo Sapiens
  misc_feature (46)..(46): n is a, c, g, or t
  misc_feature (48)..(62): n is a, c, g, or t
  misc_feature (249)..(249): n is a, c, g, or t
  misc_feature (252)..(253): n is a, c, g, or t
  misc_feature (258)..(258): n is a, c, g, or t
  misc_feature (271)..(271): n is a, c, g, or t
  misc_feature (418)..(418): n is a, c, g, or t
  misc_feature (549)..(566): n is a, c, g, or t
ccaatatatctatagctttagattatattcgataaaagtaattggncnnnnnnnnnnnnnnngactcgttgacaagtgtctttgtaatatgtttttagttccctttttttgttgtattataggcagatgaacaaattaaatttggcctcaaagagagaacttactcccttctggatatttttgccacatttcttttgcaaaaggagatatatatatctttagtcagttttgttgttatgagaaattatnggnnatttngtggcatgctctntgggagctgcacagttatggggaggactcccactgctgtgcaagttaagtcttttacaaaacaaggacagcagaggagggtttgcagagacctccctctgaaaaacacaaagaatggactctctcctgggatgaggacttgctttcntttacctccggttctttccatgtcttagttggatgtccctgaaatggacacaggctgtgccattgtgccagaaacattgtgttatcttttatgttgttgttgttgctgttaaactataatatgtgacttcnnnnnnnnnnnnnnnnnngtttgaatgctttaaaaatcttttaagtctgtggatctgctgatgtacagtgcctttgctgctatggatcaaaatcaaaagaaccgtgtagatatactttattgtataagtagaaaattacttaatttcatactagaaatggatggatgctgcaagttgaaatggactgtccattgacgttcctaatgtggtagcagaaaaaaatggtgtcttaagtgcttagtgtttgatgtcattaacagtttcgtaaaactctacagtgtagaaagattttgatactaaactgtgcgttgtacatagttctaatgcattgtattgaccaccagtacttctataatggtagattgtttgtgaattcagacttttaagcattaaacataaataacttctagtatgcttatttttctaattctttgtcttgatgacattagtttattttttatctttggctgtgccactcctatatattaaaaatgcctagttttttcaagggagattgttgttaaagtaaagtggtttttttgttgtt

SEQ ID NO: 370204 - DNA, 881 bp, Homo Sapiens
  misc_feature (35)..(35): n is a, c, g, or t
  misc_feature (113)..(113): n is a, c, g, or t
  misc_feature (166)..(166): n is a, c, g, or t
  misc_feature (169)..(409): n is a, c, g, or t
aaaaaaggaaggatataaattaattccagaattangcatccagaaataaaagagaagaatatataaaaaaatgaacacagtttaaagcaaattggggcaacagatggaaaaangggagaaagaaaaagagtaaatagaacagaagagctcttcaaaataaataaanaannnnnnnnnnnnnnnnnnnnnnnnnnnnnnnnnnnnnnnnnnnnnnnnnnnnnnnnnnnnnnnnnnnnnnnnnnnnnnnnnnnnnnnnnnnnnnnnnnnnnnnnnnnnnnnnnnnnnnnnnnnnnnnnnnnnnnnnnnnnnnnnnnnnnnnnnnnnnnnnnnnnnnnnnnnnnnnnnnnnnnnnnnnnnnnnnnnnnnnnnnnnnnnnnnnnnnnnnnnnnnnnnnnnnnnnnnnnnnnnngaaggaggccctgtctctaaaatacataaataaataaatcactaactggtggtatagtgaggagcttatttcttcccaaaatatatgaaaaatattactggtcatgactaagaaaagtgtctctggagtcttcaagttagagaaaataattttttcccaatataattctcctattccacataagtcttataatccaacctgtagaaagttgccatgcactgtgacttactactttgtataatctagttctcaaccttttacactcatgtgtgcaagaaactctcaatacctctcattacacgcagtgattttcaacatactataaaggagctgattaaaagtgaggtcactttatgtatgaggaaatactattctctgagttacacggttcaaataactcacaaaacgatctacacaacatcaaagtgcagatggggtacacaagtaaaacctactatcagctacaaattca

SEQ ID NO: 370205 - DNA, 764 bp, Homo Sapiens
  misc_feature (33)..(33): n is a, c, g, or t
tggtctattcgtgccgggagggacgttaatgcntgggctggcgctcctactgagattcacgcagccggcacacagaccatatggcaggccattgatatcaagtttcaccagatcttgcttggaacggaattctttgaggcaagatgcgcacttatacagtttttggacgtgctggccccgccctgtggtctgaactgcagacccattccctgtcttttgcatgtggaacgtcccatggattttgagttccaaggtggaggtcactgtctgcatgcacaccacgcagcgaaagcctgtcagggaattcctcaagtcagggtgcatttggcaatgctctaaaaactcctcttcactctggagaggcatcttgcaaatccggcagtttccagtatcaagactcttactatgcgtgactttgtgttcagtaagagttaaaagggagggaaaccgctctccgcaaatagggcacatgtagtgtttgacagggcctaggtgggtctgcatatgttcccggaggccattttcggagaagaaggttcgagagcacacgttgcacttgtaattccctttaatgagctcagctttccttttcacgatggcactttctccaggtctgatgttgtggtctcggagctggtgattctgcagcaaagtttccatagtgtaggctgccccacaaatgtcgcagccgtacataggctcagaggtgtcaacgtcattcttcgctcccatcgtgacacttgtggactcctggctagacccag

SEQ ID NO: 370206 - DNA, 1081 bp, Homo Sapiens
  misc_feature (928)..(928): n is a, c, g, or t
  misc_feature (1046)..(1046): n is a, c, g, or t
gtaaattcttactagtcatttaaataaaattagttctttaaaataatacaagcactaagacctacagcagaaataaactagaaacagcatgattacaggaacatccaagcatcatttggcaaactgggtttcagggaagcaaagccttttcagtagtaactaatggaacatactcactttcattttccttctaattatcttcaggttaaaagtaaggtttggcctacagcttgcacagagaattagaccacctattactgtgaagattaggttctatgttatggagcttcaaagactgcagggaaatcagcagagatttctaggcttcccagtggagctctgtaaactctggtaaacacaatccataaatttgattttgccatggtgcttagaaacagtctaataaaaaggaaaaaagtgtacagagagagaaaaataactacactaaaacagaactgtttttacctttttaaaaaatttggtgggaggttaggatcatattctgaattagttcggtaaacctcaaaatactgtctcccaccgcacatggtttcaccacttaagaaatgatgatcgtatctgctcacaaccattttacttgcatctcatttacagatgctaaatctagtctcagaggaggcaaaacatgtatgcattcttaagttataaagtgtactgatttcacaaatatgaagaattttagaaattcaaatttttaatggatgtgtcaccatctacagctgtcatcctgcatggctgatatctgctgcaaatcttgaataaatttccagttcagttgggcagcaaaaactcaattagctctaaaggcagcttgtgtttcaggattccgccactgcccattttccccaatatgtcaaaatatggaataggtgaaatcagcccctcttatgtatagtacatggacacnatctgttgtgactacaccatgttcgaactgctactaaatatcagctattgtatgaatttatggtgttgaatgagcaccagcaatgtgttttaaataatttgtgtatatgtgtagcccnagtttgttttatattggtcaataaattctaaagac

SEQ ID NO: 370207 - DNA, 836 bp, Homo Sapiens
gtctcttcttacacctccctgcaacactttcaaggtgctctgaatgacccagctatcctggcacagctgctgccttacgacatggccaacagtggcagaagttgtagaggggagaggctgggactgagtctcccttacagccagcccatcaagagcaccctgaaggagtcagatggctatgcattgcccaactccaccaatcttaggaatctccatcatcttaccatccattacccagggatgggagctgtttatctccatccaactcattttctgctcaataatccctccatctccactcccagcaacctgatggcagggaggccagggaacactaagggagagcaagggcaggtggctgccttgcccaagcctaagggagagcccaccccaccacaccagtgatgggcctctcctctaccgaaaaggagcagcgggctttaagccctggcactgcccaggtgccattgctccttctggactgggtgccctggcccattatctcacctgcaagcctagtccctgctcagaactcaaggtgatcaggttgcaaagcagctgctccagccacctgtaggatggcactgcactggcccctatccaagaaacacatgccagatgcttttcctttcctctcactttgatgaagccctcggttccatcatcccaccctgaacataagtcttgaacattttcaggcaccttggtaggatgagggagtaggtgaggagcgggtatttcttgggaataatattcctaccaaatcaggacctgtatccctcagcttgggttcccatcatgctgctggggaaagcaataaaatggtggcagctggg

SEQ ID NO: 370208 - DNA, 489 bp, Homo Sapiens
  misc_feature (22)..(22): n is a, c, g, or t
  misc_feature (40)..(40): n is a, c, g, or t
  misc_feature (77)..(77): n is a, c, g, or t
cctaaaggaaaagcccaacccnaccaaaacaattgatggncctctccctctaccgaaaaaggaaccaagcggctttnaaagcccctggcactgccccaggtgccaattgctccttctggactgggtgcccctggccccattatctcacctgcaagcctagtccctgctcagaactcaaggtgatcaggttgcaaagcagctgctccagccacctgtaggatggcactgcactggcccctatccaagaaacacatgccagatgcttttcctttcctctcactttgatgaagccctcggttccatcatcccaccctgaacataagtcttgaacattttcaggcaccttggtaggatgagggagtaggtgaggagcgggtatttcttgggaataatattcctaccaaatcaggacctgtatccctcagcttgggttccctatcatgctgctggggaaagcaatgaaaatggtggcagctgggcctctgccga

SEQ ID NO: 370209 - DNA, 422 bp, Homo Sapiens
  misc_feature (50)..(93): n is a, c, g, or t
ccttgtggcaacggggtttcactgtgtttggtcttgatctcttgaccttnnnnnnnnnnnnnnnnnnnnnnnnnnnnnnnnnnnnnnnnnnnnatgagccaccgtgcctggccccagataaccctttttatgtgagagtgtagagaatgttgctgcagctggtgtgggatgggggatggctgggttgagactgtgttgtcacctgacagaggacaccagaggtgacatggttctgaacatcactttccgccattgaaggcccgagtgacctatcacttgcttctcaaaattcaggaactaggtgaccctaggagagtgcacaggaagctttctgcatattctttcaagagatttcgaggtcactgactcttttttcaagacttaaacacaaaatccacatccatcattcttgcgtaaagaaa

SEQ ID NO: 370210 - DNA, 745 bp, Homo Sapiens
gttggggaagattagaaaaaagctcaagataaatgttcaaaatattattaagtacatgactaaaagctaattactacatatgataaatgcagtgttggtaatagtagatcatttcttaagccatgatacttaatgatatttatcttattcagaggaaaaacaaaaaaggtacccacttcccatgtagaaaaaattagactcagcaaagaggttgcttcttctgaaattagcttttgagagaccttggaataaaccatgtgttatccatgatagtatgactcagatccaattaaaacagtttaaattctggatataggatctcctatagcaaaacattttactttcatttttcagtatttgctgctttctagaattctattagataagctatgtcatttttctgaaaaagaaactgagttattgagtgtattaagacaaggcactgagaactacagtgtcaaaatcaaagggcataaatgggcatggcagtgctggtggaaaaatctgtggtactggtgatctggttagggcctgttgcacaggctgggagtaactggtttgctgtttcaagcctccaagagtaccttaaacaaggtgatagctcctctcttctttagcattatattcctttagtcaacaaagaactttctccactctgctggcccagctctgagagtatctgagatgagaataggatgtgtgtggaggggcttttagggaagaagggtcataaatgaatagaata

SEQ ID NO: 370211 - DNA, 763 bp, Homo Sapiens
aaggtaagtaaaatcttcctgttacacccacctgcatgcgttcggtaaataacctaattatattggggaagttatgtcaacattttggtcctggggactgagaataagagcaggaagcaataaacagctaactatgagagtgacttaatgtaattatattacctgtcaatcgctactttcctttcttaccaaaattcacacaggtatgaaagcaatatgacattcaggctccattatgtgtatttgtgcacatcacttcccacgataagggagaagaaaagaaaccactgcacattcggataaaacatgctgggaatacagcagtaaacagaatagaaaaagtctacattttaattagcagataagtaaaaataagtgactaaatgtatattattcagggggccatatgtgcaattgctgttaagtaaagcagaacatggagtggagtagggatgacaggtttcatcagttaatacttgagcagagagctgaatacagtaagatagttgtaggatatcttgaggcagagtattctcagaacagaacatggtaagtacaaaggccccaaggcaggaacaagcttggtgaatgtgagaaatatgcaagctggttaatgtggctgaagcacagtgaccaagggaaagttttacagagatcacggaggtgcttgagggctggattatgtaggccattaaggagcatcacaggccactgcagaggttttgtcttttaaatgaggataggagttgctctttgggagatt

SEQ ID NO: 370212 - DNA, 1885 bp, Homo Sapiens
  misc_feature (321)..(335): n is a, c, g, or t
  misc_feature (528)..(583): n is a, c, g, or t
  misc_feature (633)..(641): n is a, c, g, or t
ctattctttctgtggttatccttgatgttttccatatgtgtttaacttataaagtctaaagttaaacaatattttagcccccttcttaaagaatgcaggaagcttagaaaccttcaactctagtcattcctctcctgatcacatactgttgttttcaaatatgttagtttgttcctttttataaacctcacaattttacatcattgtcagtgttattttatatagacagtgtttgtttggacttacatgcatacattcttgtatcacacatcatcctttgggatcattttctttcattatgaatatagtgtttaagtgagnnnnnnnnnnnnnnnagtacaggtctcttgatgttaaattcttccagtctttcttatatgtaaatgtctttattttatcctcattcttaaaagatagtttgttacaggtatttttactcaacacttagaatatatgggttccattctcttttggctttgagatgtctgttgctattaagaagtcgactatcagactaattgctggttnnnnnnnnnnnnnnnnnnnnnnnnnnnnnnnnnnnnnnnnnnnnnnnnnnnnnnnnggaatgtgcaggggtcctgcagttttactctaacatgtttacatatgtannnnnnnnnaattctactttgggtatgtcatgcttcgtggctcagtgaattcatgcttttcataatttctgggaaattctcaaccattatctcttcaaatattgcctttcattttttctagtttttctttcttggaatacagttagtcatattttggacctcctcattctatcttccgtatctcataacatctctgagattttctatctccttgtctttctgcacttcattctggataatttctttaggtatatctttcagcttactgattctcttttcaactatgtttaatctgctctaatctgcccattgagttttttatttcaaaagttatatttttcatttgtacaaacctcatatattttacttgctaatctgcctagtcatccctaatagtctcttattgcttggtcatcttagtgattacatctgttattacttctttaaaacattttatataatttttgttcaaccagtagtcactgtttgcatgagtatgacattgtaaatattgttcacatcaaaactacatagtatattctgattacatatccttcgttgtataccctttcgttttccttggagctaataattgtgtattttgttttcttttgcttagtgttctagtacctatactattcttctctgaaattctttatacaatccaaatcagatcatgtccttccactattcagaattctcccatgctcccacctccctcaacaaaagccaaagccctcaccatggcccaaagtccctacataatctggttccctttacctctcttaccttgtctcctgtcactctcaatatcactcactcttctccagctacactggcctccttgctgttccccaagtgtgctagatacccttccttttcagggcctttgtacttgttcttctcactgcctgaaacacccttcctcctaaataatctgatgagttgccctagtacttccagtgtgctcaaatgtcacctccctagagaagtgtttcctgatcaacatatctaaaatcgccccatcacatgcattttatatccctttatcctattttatgtatgtttttctacaaagcactgatcaccacctggtatattttatatttatttattgtggttagtgttcgtctctcttcagtagactgtaagctccataaagcagggacttctgttttgttcactgctgtatccccagtgccaaaaacaacagtgcatagtagatactcaataaatatttgtggaataaactg

SEQ ID NO: 370213 - DNA, 942 bp, Homo Sapiens
  misc_feature (93)..(136): n is a, c, g, or t
  misc_feature (327)..(350): n is a, c, g, or t
gggagatcccagctgggtcacccgcactgagtcaacagactgagcgcgtccaggcctgacagctctgcggctcgggccctgagagacagcgtnnnnnnnnnnnnnnnnnnnnnnnnnnnnnnnnnnnnnnnnnnnntgaacgtctggactctagggaccctgctgaatagctggggctacaggcgtgtgtcactgcgcccaggtttattcagaaaacatgtccactgcaattagggaggtaggagtttggagacagaccagaacacttctactgaagaattacttaattaaatgcagaaccaaaaagagtagtgttcaggaaattcnnnnnnnnnnnnnnnnnnnnnnnnggttaatattaattagcatgatgcatccaaataagaaatatgaagaagtgcctaatatagaactcaatcctatggacaagtttactctttctaatctaattcttggatatactccagtgactaatattacaagcagcatcatgcagaaagtgtctactgatcatctacctgatgtcataattactgaagaatatacaaatgaaaaagaaatgttaacatccagtctctctaagccgagcaactttgtaggtgtggttttcaaagactccatgtcctatgaacttcgtttttttcctgatatgattccagtatcttctatttatatggattcaagagctggctgttcaaaatcatgtgaggctgctcagtactggtcctcaggtttcacagttttacaagcatccatagatgctgccattatacagttgaagaccaatgtttctctttggaaggagctggagtcaactaaagctgttattatgggagaaactgctgttgtagaaatagatacctttccccgaggagtaattttaatatacctagttatagcattttcaccttttggatactttttggcaattcatatcgtacc

SEQ ID NO: 370214 - DNA, 853 bp, Homo Sapiens
aaagctaatgcttgcttcactgctgaacatagtgctggtgctgtgtgcacaaccaaagctaatgctggctgcgctgctgaagctggagctagtgctcagtgtaccaccaaagctaatgctggctgtattgctgaagctggcactggtgctgggtgcaacaccaaaggtaatgccaggtccaccactgaagccaccactggagctgggtgcaccattgaagctaatactagcaccatcgctgaagccagccctggtactagctcctctgctgaagttgacgttggtgctggcatctgcattttcttgggctctggcctcaatttcaaatgaaaatctgctccaggcctgagcatcatcgcctaactcttcccttgttaggcagtcgatatccatgtcatcccaattccagggcccagccacagcttcctctccaatccccatttgggctcttgcctcagccctggcttcagcctcagccacagccacagctgcagcttggacttccatctccactgcctcgcggtactgcacagcccagtccttggggtctttcttctgcaccctgcatgcaaacttgaggactttcatcttgctagtctcgtggtaggagcgcaagccccagaagaactcatattcaggtggtctgctgttagggaccctcttgtactccaggtacttctgcttcacaaactcgtctgtgatgagcttcctcacttccccaaagagtgaatgcctcaccctgacaatgggaaaaataacccatgaacacagatcagaactgcccagatgagggcagaggcatttcccaacatggaagagacctctctagcacatggggcagtctcaatgaagt

SEQ ID NO: 370215 - DNA, 683 bp, Homo Sapiens
ggatcttaagagtccaaatgtctctggtgatgttcctaagacccttgtcccagatactctaaatgtgaatgtatgagctgggggagtcaacccagcccaccatgccttggctgatgataccagaggcagagagtgctggtctgtctgggaagcttagcaatgtatcttcaaatttatttttgtttttaaaaatatttcttaaacatgctgtcccaacatttgtgagttgtgtcacaagtgagtcattatcaatggtagataaaatatcaatgtttgtgatgaatttactgtaaaaaaattaaggtcaatgaaagccattctgttatttttagcattctcacttatttagactctattacactttcttggatgagaggggagagtgtggtgttagctagtgagcagaggtctgtatattgtccttgccccagcctgcaatctgtggatgcccaggggaaggcatacaggcctcatccaccaggcaatagacaggagagaggtgagaactatttttagaaggaggaaaagtagatacgcaaattgtcacaactaagagtgataatttggtagctctgtatgtatgctggttccaactgtttaatcccttctgtctttctgttctcacaaagatggaaaagatgcaagagcttgccggaaataaagctacatctatccaaaaaaaa

SEQ ID NO: 370216 - DNA, 756 bp, Homo Sapiens
  misc_feature (650)..(650): n is a, c, g, or t
  misc_feature (678)..(678): n is a, c, g, or t
ggtacaggaatcgggacgggctttccatccaagagtcagtgttgctgtgagatttgacgtgtacttgctaaagacgagagagaaaccacgtgaaacctacattgctatgttcataattgccaaagcagtatttatactattgtaaacaactcgcacatctctcctgtctgttagtaataagaatacagggaaatgtcttcagccccacgtagatgctgcttaagatgagcgtttcaattgcatcatcactgacctgttagaatttaacccggaaacatcgcaatagcatttagggatgcacgcacagtggtaatttattactcagttccggttatgtttttctccaaaacctgaacatttttactctgttggctcattctattttgactaatgttacaaagtactgaaaaaactgtagaatagatatttttaaggctatatgtagtgtatgtgtcttttaatagatataggcatctgttcatccacatttgaacacagagctaaagaaacgttttttaaaaaactacttttaatccagatccatggaataatatgtaattcttgttttccttgtcttttagtccagtttttctttttccctctcatatatttgtaaccgggggtcctaaactgactgaagagtttgtccnggactttatttaattgcagtctcacagnaatgctcatcattctccttcagctgttgcccttttcttttcaatctggaaaattaaagacatggggggaggaagggct

SEQ ID NO: 370217 - DNA, 661 bp, Homo Sapiens
ggattgcaaagactagctttatcaaaagaatgtgagcagataaagaaatgttagacacctgtgaagtcacaattaatatgctaaatgcagatctttatgcattcaagcagattcattgagaaatttagtgataagaattgaagaatttatttagaaacgtccttagatttttcatctgtatatatcacttgaagtgctaaacccacaagtatttaaaatacagactcttcacttactcaagttacttttccccattattactcgaaatcagagagaataacaaatgctattgttttctagtgttttgaataagggaagtgtttgaataagggaagggaagtgtttgaaaaaccttattaagtaccccatggcagagaagaaaaattcagacatgaggagtctggagaggtaacactaggaatcaagggtaaacgcttaagtctatttctaccctgaaaatccatgtgaaaactttttaatccataaatcgtgagtgtcttaccgtttaaaaaagttcatactcttcagtaaagcgaagcttgagggagatgtgccacatttttctggtggcttcaaacactccccaactctccaagggatctgtataccccagttggaaacaatgtattaaaaactattcaatctcccttagggttaatat

SEQ ID NO: 370218 - DNA, 583 bp, Homo Sapiens
  misc_feature (49)..(49): n is a, c, g, or t
  misc_feature (108)..(108): n is a, c, g, or t
  misc_feature (520)..(529): n is a, c, g, or t
gagggtaacgggaattcccttcacctgcctaacctttccttgtgtgggnaaaatcctaatcctcctagctgttttccaaatatacaatcaaataatgttaaaatgcantctcccctactgtaaaaaccgaaatgctggaactaatcccttcctatcctaactgtaattcctgtgccccactaaattcaacttctgttccatccccaacccccaggcctgcgcatttctgactgtgcttgttagaaaagccccagctggagggggtgagcagtccctgttgctgtgaccacggaaggccgcaggggaaggcagattacatatgtgaaggaggtgtctgtggccatgtgtctttaagggagagcccacagaaaaatgagcctaagggaaataaagcgagaagtctgcttcaatcacagagacggtaaggtgtaaattcttaagaaggtcagaggaatgattgacaattatgtgagtgactcacaaagtgaaatgatggaaagactgaactgcatgagagttnnnnnnnnnntcttttccagggcaataaagctctgtctacacagcgtaacgaatggtttaaaaa

SEQ ID NO: 370219 - DNA, 705 bp, Homo Sapiens
ggttaacaccatgttgctgtctctattccactgaacaaaaatgacttgaaatagaggaaaagaatagccagttttaactggcgataatttttaaaatcacattttcacaacactacaacatatggagatgtagacagttagtctttaacacagagtgctgtagtattttatactgtggtgcttggggaaatattcctagtgaataaccggcagtctgtgcaggaaccagcagtccacacttctaggtataaatatggaggacaagcttctgctcaccgcctcaagagaggtggactcccgaagggtagcctgtctcattttaaaacctataccatgaaaccaattcccagttcctacactctgttctaccttcataatttgttctttctcatatatctgtccgccagccattccaggctcctgccagtgattagcttccacaagatgatccacatttcccttctttcacactaagaaggacatcttataaaatatacacagatagagaagaaaggcattttatacagaagcagtataaaatttacaactgaagcagtgtcagaaatcaggtcaacagcttatgtgaagctgcaaattgattggaatgggactctgagatcagaagggactagcatcaagcacgcagcatgcagcatccaaacgcttagcctacccacacccccataggataccctacgcgacgag

SEQ ID NO: 370220 - DNA, 673 bp, Homo Sapiens
  misc_feature (20)..(20): n is a, c, g, or t
  misc_feature (44)..(44): n is a, c, g, or t
attctgtacacccaataggnttcaccccggtatgaattctctcnatgtttcacgaggctcgatccataaatgaaagccttcccacactccttacatttatacggggtttcgcctgtgtggattctctcgtgctgagtgaggtgatagccacaattgaaggccttcccacattctgtgcacttgtacggcttctcgcccgtatgtatcctctcgtgcttaacgaggctcgaaccccagcgaaaggccttcccacactccttacattcgtgaggcttctcaccggtgtggatcttctgatgctgagtaaggtaattgactcgagtaaaggccttcccacattcttgacattcatagggtttctcacctgtgtgaattcttttatgctgaatgaggcttgaaccacaaataaaagccttcccacagtctttacactcgtaaggcttctccccactatgaattctcttgtgctgaataagtttatacacacggctaaaggtcttcccacagtctttgcattcgtagtctttctccccagtgtggaatctctggtgctgagtgagctcatcaccacgccgaaaggcctttccacagtctttacattcatagggtttttcaccagtatgaatcctcttatgaataacgaggcttgagccccatcgaaaagccttccccc

SEQ ID NO: 370221 - DNA, 662 bp, Homo Sapiens
  misc_feature (506)..(515): n is a, c, g, or t
ggaacctctaacatttggtaaaaggaagtatactggtctgttagcagagacaaactttttttagaattgaagtctgaaacaaacaaaagcaattcaatgtcaatagacattaagcaacataatagacaaacatctcctaagggaacatttgttacagctgctccttccctgaactgtgctttggaagataagctctgtcctgagtccaaaccaagcccttccaagagagaacaaaggtcagagatgttgaagattccagcaaatttctcctcttatttctaccaagcctttgtgaacattgctcttcattttggcctgtacttctccctcagggacgtagaacaatggaatgtcagtcagtctctgtagttaaaactttttctttaaaattcaattaaggtacttctccctcagggacgtagaacaatggaatgtcagtcagtctctgtagttaaaactttttctttaaaattcaattaagttacaccagaatttacaggcaagannnnnnnnnncattgctcccataagcaaatttgttttaaaataattgtaaatgaggtatatacttagttcttggttaaaaaatattgctttgttagtattaagattattgtagtcatgtattatatactaataaattatcagccttatgcaggtcag

SEQ ID NO: 370222 - DNA, 1036 bp, Homo Sapiens
aggaaagcgaagatgagcacctccttttcttgtgttggtcttgggaacaaacagtattccgtctttcaaatatggcatatttctaaacagtttgggaaagatgttagaattttttaaaagtcagctcttttataaattggaagtactcagtagtcagaaattaagatcccctctgatagagatagattctcaaaaccaaaattggactgaaaattagattgagaagaaagatacaacttcctccatagccaataaaatctgtctttccaagtctgcttattaatgctgtgaatcgctccttctgtttgtgaaaacatctcctggactggaaatgtggtgctgtaaccagctgagccgaaagttggagaatgttaaatatcttatatgggacttacgataaaatgtattgatgttagtgattgtcaaaataggtttatcatttaaaaaactaggaaattactaagtataaagaagaaaaaccagtattaattaagtgatgagacctgttcattttgttttccctgacttatttccattaccaaacatagtaaaggccagaaaagattaaaagaaaaattaacacagccattccattgttttttaccacatggagaaaggaccaggctggaagcatatgtccccccacccttatttatattcctttgagcattgccgttttctagacagacaatccgaaaataattgtgttgataggtctgtttaagcctgaactctgggtgtaaaatgttatccagaagctatagggagctgccttgctcaggtcattggaaatttcaaccctaagactcattggaatttctaagtccgttatgcaccattatgggcatatggagcatattcataccatgaggaggagtctttgtttatgatggactttttaatatggccataattaaactcacactcaaaaaggatgagctattgtcaaaagccaaaagaaaaacagacaaaatgaacatgaagcaaggagtccataaaacaagagttctttaccacgtttaagcaaatgtctctc

SEQ ID NO: 370223 - DNA, 676 bp, Homo Sapiens
tagccaaagtgaaaagggatctgatagccagtctgttagtggtctttaagatcaactcatggactttcgggatttcatacaatgaagactactgcaattctatgaagactatgagatcagtcaaaatttaaaacatcgtatacaaaatcattcttgaaatctctaaatgccttttaagtaaccagcatgaaaattttaagtacttgcctcacagtaccaaacttagaagtcaaaactagttaaaattcagtgctatcatgacttctcatttacaaggtaactcatgggtaaataaatagagggcataaaaattaagatttacaccttttttaaaggataaatgtatgtaatcagagtatacagaaaattcaatgtattttacaataaaataactttaaacctctatccctgtacaacagggtttaggttaattctagtgaacttgcatggttttaaatctcttttacagttcattccattatgagtacttaaattgctttagatacatagcttttttcaaaatattacagttgtattccaggataagatttaatatattgagatgttttaaaaatatttataaatttgtttctagtatgcaaaagcatttggcaatacttttacagcatttgattttatagaattaaaatctcatacagtactcatcttgatgtta

SEQ ID NO: 370224 - DNA, 600 bp, Homo Sapiens
  misc_feature (350)..(384): n is a, c, g, or t
ctcacttggttttggagttatttcacagcaatagataagtgaacaagggcaagagtggtggatggatgcaggacacaagccagctttggggttcatttaggccagaaaggatggaggcctggagcagactggcggaagtgaagatagtgaatcgtcagattcaggacgcacttgatgggtgcagctttcaagctggatgagaagggaaagaagtagaatagaaaagcagcaagtctctgcctggctttctccagacgactccttagagctttagaccccccgctctctttgataactaccaccatcctgcacgaaccagttgcttatactggcttatattgtgatcgtgnnnnnnnnnnnnnnnnnnnnnnnnnnnnnnnnnnngctctttaagtaaaaaataaggttaaatctttgagaagtccttcttaagcaacaaaacctcagagacacaaaggaaattattaatagatgtaaccacttaaaaataaaaaatgaaacttctctatcataaaaacatgccataaacaaagctaaaagatgatgagctataatggagagaaaatatttgcaaaatataacaaaaatctcagacactcc

SEQ ID NO: 370225 - DNA, 623 bp, Homo Sapiens
ggcggctattactccatgccctgcctgacatcactgtcatgtatagtgctaatcaccaaaggatgcccttgtttgattctggattctaggtgatagtccttatcctctgatgggggaagagtttgggtgggagagaacaaaccgacaagttggttccagatgaggtggctggaacccaaccctcaggtacttggcctctgaataaagtgtacggccccggccaaaagggctcccactgcccaatgaggaacaaaagcctcaaggtctagtagtgtattcagcacatgcctaggaaacaagagttgggaccgtggacaaggagaggagcaaaggcccaggggttaactgcttttggtttttcctctataaaagtcagggactatgatttatatgggtgagaaggtttggagtaggactgaagctgccatttacaaaccccttgccctaatttattgtagttttgggtgtgtttctgaaagaaccttttgcaggtgatttttattcagtactcattaacttacagcttttatgaattcacatcttctacactattgaaaaacatacttttgtattgtgttaagtgcagcatgagttattatatgaataaatcacattaaatttgc

SEQ ID NO: 370226 - DNA, 491 bp, Homo Sapiens
tctaattcataatttaacatatttagtccatgcatttaattacaataaccagtagaataaatatgttacacaattgactggcaagagttgtgcacaagcatggttgagagcattcagcgtgatgtggatgctggtcatcaagcttttcacagggaactgggaggatccatctgaagactcaggtaagtggaaatcagataagggagctttgactgagttattaactccattttccagacgaggctattgaagcttagaaagttaattgtccatttttaaatgaatgactcatataagaaaggctctaacagaaatacaggaaagagaaatctaactcaaccatgtaaaaggtgatgctaagtaggaaaagtaagagaagaaaaatcaggcaaataagacaaagaacattctaggccgagaaaacaaaggtagtaaagtccaaaaagaacatgaaaggctgagcactgtagctcatgcctgtaatcccagca

SEQ ID NO: 370227 - DNA, 932 bp, Homo Sapiens
  misc_feature (861)..(861): n is a, c, g, or t
ggactttggaggatctttctggacattctgtgagtgtctcatcagataagggaagatctcagaaaactccaacttctcccctgtcaccaagttcccagaaatcattgcagtttgacgttgcaggaacttcttcagaaagatctaagtcgtcagtaatgcctccaactataacaggatttaagcctaatgcacctctcactgatctgaacccggcagccagcagaacaacgacagagaacatggctccaataccaggttctaagcgcttttctcctgctggcctccatcatcgtatggcagcagaactcagttatctgaacgccattgaggagtcggtgcgccaactgtcagatgtagaaagagttagaggcatttcacttgctcagcaggagagtgtgtctctagctcagataataaaggcacaacagcaacgccatgaaagagacttggccctcttgaaactaaaggctgaacaagaggctctggagagtcagagacaattagaagaaacccgaaacaaagcagctcaggtccatgcagaatcattacagcaggtggttcaatcacaacgggaagtaactgaagtcctgcaggaagcaacgtgtaaaatagcagctcagcagtcagaaactgctcgcctcaccacagacgcagcacgtcaaatctgtgagatggcagagttgactagaactcatatctcagatgctgtcgtggcttcaggagctccccttgcaatactgtatgaccaccaacggcagcaccttccagactttgtgaaacagctgaggaccagaactgaaacagataagaaaagtccatctgtttcactctctcagagtaaagaagggacccttgactcanagcatcagaagtattctgcttcatatgatagttattctgagtcttcaggatacaagaatcatgatagaaga

SEQ ID NO: 370228 - DNA, 1167 bp, Homo Sapiens
  misc_feature (1055)..(1055): n is a, c, g, or t
ggctaagaaacaaagtaatctactgtaaagtactctgccccttgaaagaagtattaaaaagagtgaggatggatttagaaaaaaacatgaatttagaaatattcaaaatggtttttgtggcagattcaatattatgaattcacagatatttaaagaatgagaaacatagtaattaagtagaaatgccagaaacagttcctggttcctcttgtgtttgacactaagaaaatagcaagagtgtgaaatctcagatacttatgaaatctcacagatgtaaggactcaagtgtagaagaaaatatccccttcttacaaaaagaaatgtcaatttatggagtttgtgggaaatagggcaagaattcttatgcttatgagagccaagtagtcagtggaagagagtagagctcaaaactggattatcaccttagcaacttagaatagtttgaaatagaaaaaaaggtatttaaatttggagtctggatctggttaagatatgcacagtctattttttgtatagtattggaaaataaaaatgctataatttgggtatgggttcttttgtatacattacctgcccattgaggaaaggggcaagtccattatgcaacttctctccaaacccttcatattctggatatgatacttaaagagccatgagcagctacattctgcctattcagaaggcatttattaaatgactgcttgctgaagatgtgtccaaagagatcctacattaaggtcatttgtcagaatgatgtttgtgtttgtttagagttggctgacctccaactcctggggtcaaggaatcctactgccttagcttcccaaatagctaggactataggcatgcacccggccatgtgttttatttatagctcttaaagcccagatgaagaaatcacatttttgcccatagtgaagaaacatttggccattgattagtccttattttcagtgactgtcctgttttcattagattagagagaccctgtgtgggcacagttaatataacattatcactttaagtaaactgcacatcttagattcatatttccntatgtctgatcaaatgactagagctttcctttgttgtagtctcgagatcggtctgcatgcttgctgcagattgactcatatgcattgcactaatctgcactctgtattgagt

SEQ ID NO: 370229 - DNA, 596 bp, Homo Sapiens
  misc_feature (18)..(18): n is a, c, g, or t
  misc_feature (116)..(117): n is a, c, g, or t
  misc_feature (119)..(119): n is a, c, g, or t
acatgatttcccacagcngagacatgtcagagcacttgcagaaacgcccatctcagagactagagctcacctgtgaaagcagcatcttctcaagcttttctggtcacacaccatgnntnaaggaaaatgggaaagtgacatattaaggggcctttctcgaggactgagatgaactggaagacagacagactgtggctccagatcaggaagaggcttcagagtaagggccacatgcagatgaactccacatgaagaaactatctgataaaggctgaccattttgctgataatcaagcagactgcatgtatatatgaatatatcatacatacatatgtagtgaatatatgtgtacatattaaataggcatacacacacatcacacacaaccagataaaataaatggtacatacattgctactatgaacactgcacgtcccagacagaccaatgactaatatgttcaattaaactacttgaattaaactactcttcctctccccaaaatattctgcttgcagcaaacatattccagttgctcaagcgttatttggggagagttctccgtcgaacttgggatcctctagatcacctcagc

SEQ ID NO: 370230 - DNA, 751 bp, Homo Sapiens
  misc_feature (587)..(587): n is a, c, g, or t
  misc_feature (616)..(616): n is a, c, g, or t
  misc_feature (668)..(668): n is a, c, g, or t
  misc_feature (670)..(670): n is a, c, g, or t
gggatcaaagagctcagatctcccctccagaaagtttcattcaaacactcatgaccatatcaacacttatatgtcaataatatctctttaagaaaatgcgaatgtcattgctgtactcctctgtgttgcctatggtggttcaattgtgtgagtcaaaactccaagcctttgggtcgcttgttcactcatgcctctatcaataaaccctgagcacctgggaggcagcctgacagagggaagaacaaggactttggcatcaacgcctcctaggtccaaatcccagacaggcaatttgctaactacagcttggccaagtaatttaacctctctgatcaaggtgcccacttgtaaaactggaacattcacaatatctacctttgagggctgtagtgaaggtaaataagattatgtaaatacccagcctggttgcagcagcaacagtaagcactccaggggtacctgttagatgaatattaaatgaaagaaactgggaaagacggtgaggagctaagtgttaacactgatatgcagagtctttgccctcattttcagttctgatgggcgccctgacataagcaccttacccntgagccagagcatgcgcagtattctaggngccttgatatgctgtgatttttgggcatcactgcatagaaatgggtggactnangctctcactgcctgagactacctctactcttcagtgaaacatcgctagacatgtgtaacatcatatctacattcattcgcc

SEQ ID NO: 370231 - DNA, 572 bp, Homo Sapiens
ctgtagcagtacactgggatatactgcacagcataaagagtagtttctacacaggacatttgtatcagaatcaatataaatattctagtcagacatttccatggctacagatatttggttccttgatttatatgcatagaaagaaacagttgtcataactgtaaaaagcagtacttaataagtacttttaaatgattggaacagttttcctttaatattacaatactacttatttattggtttggaaactaggtcaccctacatgatgttttgatttttctcaaaggcatcatgagtactctgcttattctttcattcttgtatttttagccttctagttgagttagggaccattttatcagaaatcattttagcactgtaataagaaaagctctgttaagggtagattatataccataatgattttcagacttctttttataaaaaaggtatctggagactctgaacaggcacatgcatactcagggggaagggaacaaaacatggaggagtctgccaaagcacaaaacttccttctggtcctcactgccttcaaataaatacaactattt

SEQ ID NO: 370232 - DNA, 851 bp, Homo Sapiens
tagaggatcccctgtgttagccaggacttggtgagattgagtgctgccacctcctgcggatactcttggagagttgtcccccagtggctctgcacacactggagaaggaagctgcctggtgtggagtgactcaaatcagtatacctatctgctgcaccttcactctccagggtacatgctttaaaaccgacccgcaacaagtattgggaaaaatgtatccagttctgaagatgtttgtgtatctgtttacatccagagttctgtgaacacatgccccccaggattgtctggcaaagatcccaagggcattgattgcacttgattaaggcttttgtctgtaggtgaaagaacaagtttaggtcgaggacttggcccctaggctgctgctgtgacccttgtcccatgtgggcttgtttgcctgtccgggactcttcgatgtgcccaggggagcgtgttcctgtctcttccatgccgtcctgcagtccttatctgctcgcctgagggaagagtagctgtagctacaagggaagcctgcctggaagagccgagcacctgtgcccatggcttctggtcatgaaacgagttaatgatggcagaggagcttcctccccacttcgcagcgccacattatccatcctctgagataagtaggctggtttaaccattggaatggacctttcagtggaaaccctgagagtctgagaacccccagaacaacccttcccctccttttccccactcttacagtgtttggacgggagggtatggtgctgctctgtgtagcaagtactttggcttatgaaagaggcagcacgcattttgcactaggaagaatcagtaatcacttatca

SEQ ID NO: 370233 - DNA, 833 bp, Homo Sapiens
  misc_feature (223)..(223): n is a, c, g, or t
agagagatataaccaagccacattgttacactggtcacacgcagttagtacatagggggccagatctcgaactaaacttgttcttacacctacggacaaaagcttactcaagtgcaatcaatgccttgggatctttgcagcaatctggggggcatgtgtcaacagaactctgggatgtaaaacagatacacaaaacatcttcaagactggatacatttttccnaatacttgttgcgggtcggttttaaagcatgtaccctggagagtgaaggtgcagcagataggtatactgatttgagtcactccacaccaggcagcttccttctccaggtggggcagaagccccctgggggaacaactctccaagagtatccgcaggaggtgggcggcaccccatctcaccaaggtcctggccgggtcttcgctctgcccaaaccctcctccagcctgtgcaggcctcctcccacctcttagtgctttcagcgagaaaaggtgagtctcattacgcagaacttttgtttgctcttcggttctttccttcttcaagtggtatgctctactatttggtagaaattcacattggcttgtcacagcacacttcagttctgctggctacatgaaacgcatacccagttttctattcttaacagtgagtctgagcctctgtggtctcagagatcctttcatccccatgaccattttatacatcctcccctcaacaactgctagagttttatctttcccaacaaatataccagaaactatgtgtgctgttgcaaatggggacggcccaagagtctggagttttgttccctgctgccctgcttttaccc

SEQ ID NO: 370234 - DNA, 575 bp, Homo Sapiens
atctcgtgctaaaagttagtgtcagggtataacacatattgacactttgaacagatggagtgaactaacatctccacttgattcctcagcgagcatcaccatggctagtttttcctctgaagattgttcgcctcaaggcgagtggacaattctggaactggaaactcagcattaagtgttaacattttggaaaaatttatgccactcctttattttttgatgcctatattatatccaaatgataattgcattagccggatataaactttctttaatattgagtctttccaatttaatgaggtaaacatagtttatttattaatatatcacatatagaaaaatgtttttctaaagtttttgagcatgttttctctaattattagagaaattagaagacttataaggaaaccctagcttcagttttcctttcctagctgatgatttgttcacttaatcattattcaagaatttaaaatgtgaatgcagaagtagatcagtccctttactttttgctctgcatagggtaacatagtaatttaacaataaaaacttaccgtgcttgtgtccaaaaaaaa

SEQ ID NO: 370235 - DNA, 1087 bp, Homo Sapiens
  misc_feature (112)..(112): n is a, c, g, or t
  misc_feature (1076)..(1076): n is a, c, g, or t
gacgcttcactgatagtctcatggagagtgctaacgatatctggggagcgtgctacactcactgtctccaatggaacagtcatgtggcatctccctcagcatatcattctcntggaatagcatcacttagactgacaactgctccgcatagcactgtttcacggctaggggcctttcatccttgctgtaggattcaaaaatgtgccctgtttttaaccctgtgaaaccattttagggtgactggcaacatgttgaggtttgtgggaagtgggaaaaaaaacaccacccatagttcttttagctaacatcttgaacttgaacaaaatcaacataattagttctgcagagggaagttatggagaatcccggtgaggtggcggggtgatttctttgattaaaatgacaccccaaagtgtcagaatgctttggcaccagccacaaatacctccttgtaggtttaatttcatgtgtcttgcttactcttaaaatgaaaatgttaaaagcctcagaggttatatctggccatcaaattcaagcctctcatctgagacacattacttgtctttgatgaccaaaatatttaaagtatagctaagaagcaaaaattctctagagatgaaccttgtatggtggctctcggtagcctagccaagactgaagggactggcaaagatgaaaatggcgggtaatgcgaagttgctggtctcttcctgtttggtgcccacaggaagtctcaatcctggtgctgacggcctccgctttgggtatgaaacggaggcagtctaagtgggtaagccaggagcagccaacaggccctctctaaacagctctagcaccccaccacccatttgaaacacattcagtcatacaaatccacgactggaaagaacctaggtcccaccctcagaacaagcaagtactacagagtaatttagaatcatctgggcaaaactggcacatgatgtgtatcggtggagaatgggagcctgctctagagcctagatacatttgtcttacacaccaggggcacattcaggccttcatttttcagcttcttcaactgcagcttatttagnttgttatcaaa

SEQ ID NO: 370236 - DNA, 622 bp, Homo Sapiens
ggagtgcacaattcacacatgagggagcttccagagcaggtcctattgagttatctaaaagtgggccgaattcatactgaagaatgtactgaagtacatgtagaggagctgcatgttgaacgggtcaatcagatgccattggaagtacaaactgaacttctagaagcatatttggaccacgtgaccccagaaatcatgaaccaagaggagagagagtctagccaaccgtatgctgctgaggctgccagggaagatcacaaagatgctgaggatttagagaccaagccaacaatggattctgaagcagaaaaggcagagaatgaggacagaacagctctgccagttttagaatgaaattacacatgaatatatttttaaatttacttgttgggtttttgaactgattatcggcagtttgactgtccttaattaagcctaacagacaagtggaccaaagttaagctgtttcctgttgtgctgaactgttgtccgttgaaacacattgattcccctccccctacttattgccacagaggagggatcttttccataactgaaggggagttttgagaaggatatttctggaaacttaaatggattatattcttattatatagttggg

SEQ ID NO: 370237 - DNA, 642 bp, Homo Sapiens
  misc_feature (538)..(562): n is a, c, g, or t
  misc_feature (617)..(617): n is a, c, g, or t
tcggctctaccttgttcaaggacttaattctcagatttggtatggattctgaaaacagaattggaaatagtggagtagaagaaataaaaggtcatccctttttggaaggtgtcgactgggagcacataagggaaaggccagcagcaatccctatagaaatcaaaagcattgatgatacttcaaatttggatgacttccctgaatctgatattgtacaaccagtgccaaataccacagaaccggactacaaatccaaagacggggtttttctcaattatacctataaaaggttggaagggttgactcaacgtggctctatccccacctacatgaaagctgggaagttatgaatgaagataacattcacccataaccaagagaactcaggtagctgcatcaccaggcttgcttggcgtagataacaatacactgaaatactcctgaagatggtggtgcttattgactacaagaggaaattctacaggattaggatttctaagactactataggaattggttggcagtgccagctggctcnnnnnnnnnnnnnnnnnnnnnnnnngttaactttattatatgaaggtactggaataaaagaaaagacatccctttttaangaaaattaataaacacaataaataa

SEQ ID NO: 370238 - DNA, 1038 bp, Homo Sapiens
  misc_feature (68)..(343): n is a, c, g, or t
aaatgtatttttaaaagttaacgtgatgatgctatcttatctcagatttaacactagaaattgctcannnnnnnnnnnnnnnnnnnnnnnnnnnnnnnnnnnnnnnnnnnnnnnnnnnnnnnnnnnnnnnnnnnnnnnnnnnnnnnnnnnnnnnnnnnnnnnnnnnnnnnnnnnnnnnnnnnnnnnnnnnnnnnnnnnnnnnnnnnnnnnnnnnnnnnnnnnnnnnnnnnnnnnnnnnnnnnnnnnnnnnnnnnnnnnnnnnnnnnnnnnnnnnnnnnnnnnnnnnnnnnnnnnnnnnnnnnnnnnnnnnnnnnnnnnnnnnnnnnnnnnnnnnnnnnnnnnncacattttctttcttacgctcttattttcactttagagctcatgagaggcctctaatcgactagtatgagttttgagctaaatatgtatttagttattagtgagaaaatggacaatgggcaattgtgagtcaaataaatgctaaatttttgcctctccaagaaggcagcaggtggctgaaatcctggtgtgatatggctgaataatgcatgatctgaggaccctgtactggttactcctgtacacgttcacaatttttctgtaaatgtattaatatactgagcagtccaggagcagccattaggcaaacaccactccttgcttccttcatgtgacctatcactgagctcaccagctgaggtcaattacattcttcccaacctggagaacagaatttgggtctgctcagaggcatgatgtgaaacatgtctgggataaaagctttgttctattgacagcaaacctttttgtgttaaggggtaggggaagagcaagtgaaggatgcagattaatttctatttaggaatatacttttatatattgtttgaaattttgtcttttaaaaatattcatacaaatttaaacaaaaaattacttgtgaacagattgacaaatgtcatgtgcacacatatttattaatttgaaaaagcattcactgtgttaaatttatggtgaaataaagttgattaaactttg

SEQ ID NO: 370239 - DNA, 891 bp, Homo Sapiens
  misc_feature (671)..(765): n is a, c, g, or t
ggaccttcacttccctgggctatgaagtccagaaattcttgcatctcagtatgcatggtatatcccagattcttggccaatttgcctgtatgcccgagcaccgagactacgacagctttgtgtgtgtcctggtgagccgaggaggctcccagagtgtgtatggtgtggatcagactcactcagggctccccctgcatcacatcaggaggatgttcatgggagattcatgcccttatctagcagggaagccaaagatgttttttattcagaactatgtggtgtcagagggccagctggaggacagcagcctcttggaggtggatgggccagcgatgaagaatgtggaattcaaggctcagaagcgagggctgtgcacagttcaccgagaagctgacttcttctggagcctgtgtactgcggacatgtccctgctggagcagtctcacagctcaccgtccctgtacctgcagtgcctctcccagaaactgagacaagaaagaaaacgcccactcctggatcttcacattgaactcaatggctacatgtatgattggaacagcagagtttctgccaaggagaaatattatgtctggctgcagcacactctgagaaagaaacttatcctctcctacacataagaaaccaaaaggctgggcgtagtggctcacacnnnnnnnnnnnnnnnnnnnnnnnnnnnnnnnnnnnnnnnnnnnnnnnnnnnnnnnnnnnnnnnnnnnnnnnnnnnnnnnnnnnnnnnnnnnnnnngtaggaatgcaaaattagctggtgtggttttggtacctgtgttcacagttactttgaagcccgaagtgagaagggttccatgtgacagcagtgaacatggtcagtcgtcccgatcgtggcagaaaa

SEQ ID NO: 370240 - DNA, 669 bp, Homo Sapiens
  misc_feature (567)..(567): n is a, c, g, or t
  misc_feature (605)..(605): n is a, c, g, or t
  misc_feature (617)..(618): n is a, c, g, or t
ggcacccagcccagtgaggacacgaatgccaacagtcaggacaacagcatgcaacctgagacaagcagccagcagcagctcctgagccccacgctgtcggatagaggaggaagtcggcaagatgcagccgacgcagggaaaccccagaggaaatttgggcagtggcgtctgccatcagccccaaaaccaataagccattcagtgtcctcagtcaacttacggttaggaggaaggacaaccatgaaatctgtcgtgtgcaaaatgaaccccatgactgacgcggcttcctgcggttctgaagttaagaagtggtggacccggcagctgactgtggagagcgacgaaagtggggatgaccttctggatatttaggtggatgtcaatgtagatgaatttctagtggtggaaaccgttttctaataatgtccttgattgtccagtgagcaatctgtaattgatctataactgaattccagcttgtcacaagatgtttataaattgattttcatcctgccacagaaaggcataagctgcatgtatgatgggttactatcaatcattgctcanaaaaaatttttgtataatgacagtactgataatattangaatgataccgnncagcaatgtatatcacttaaaaatgtcatatattctgtctgcgtaaactag

SEQ ID NO: 370241 - DNA, 890 bp, Homo Sapiens
  misc_feature (20)..(20): n is a, c, g, or t
  misc_feature (473)..(486): n is a, c, g, or t
  misc_feature (803)..(811): n is a, c, g, or t
aacccattctctgaaatcgnggcctacttgctttatgttttagtccaacaatgtctcgcattctgattgatcatgtgaaggaatcattttatgggcccccgtcccctaagagaaacagaagaggagttcagaaagaaagatgccctgtgttttcctctgtggggccccgtgcacttccctggagagatgctacaatgcaatatacagcgctgccaatcccactggggaagctgctgtgatgagactagatgagccttcaacacactcagaaaatgcaacagcaatagggggcagacagctcctacctgtgtttctaggagcaaaagagagggaactaattgcccgtgaagacgccagtggaaggatcagcctcattctaagcaaaaacatagtattagtgatactcttactgccttatcttaaccaaggactaataggatacctttccattaaacaccagtgacttctcaggnnnnnnnnnnnnnnggagcaaaacaaatgatgtgtacacctgctttgttatggtccaccagtgaccagcttcaatgaggggaaccattctggagggctgcggtctcctgtgcaaacagacatgaggtagaagagcaaaaagaccaacctattgggacctattatacttcgtaactctttaataacttatgttagtacctctcttcttacttccctttccctcaacctgctttttcttattttttatatttatctaaaataaatttacttctatctttttccttatttatctcaatttacacattacttattcaacttactatcttccttannnnnnnnnatcatcctcatctatccttattttgactcttattatttcatttttatataaaatattatatattctaatttatacaacc

SEQ ID NO: 370242 - DNA, 908 bp, Homo Sapiens
  misc_feature (340)..(348): n is a, c, g, or t
  misc_feature (728)..(740): n is a, c, g, or t
ggactgatgaggatgctcctttaaacagcccaggatcagaaggaagcacgctgtcttcagatctcatgaagctttgtggtgaagtgaaacctaagaacaaggcccgaaggagaaccaccactcagatggaattgctgtatgcagatagcagtgaactagcttcagacactagtacaggagatgcctccttgcctggccctctcacacctgttgcagaagggcaagagattggaatgaatacagagacaagtggtacttctgctagggaaaaagagctctctcccccacctggcttaccttctaagataggcagcatttccaggcagtcatctctatcagnnnnnnnnnttccagagccttctcctgtaacaaggagaaaggcatatgagaaagcagaaaaatcaaaggccaaggaacaaaagcagggcataatcaacccatttcctgcttcaaaaggaatcagagcttttccacttcagtgtattcacatagctgaagggcatacaaaagctgtgctctgtgtggattctactgatgatctcctcttcactggatcaaaagatcgtaattgtaaagtatgggaatctggtgactggggcagggaaaataaatggcactggggggggtccttccccaacaattgtccgtggcctggtaaaaaatcccggaaatttattcccaggtttgggggctttcccctgggattcaaaccttctttatttttaaannnnnnnnnnnnnatattccaaaaaatttccccccaaaagggggctttttccaaaaaccctttaacccttcctttccaggggtccaagggttaccctcctttgggaaaaaaagccttttgggttttctgcccaaagaaaaccccaaatttccgaaaaacaggggaagcccttttttctccc

SEQ ID NO: 370243 - DNA, 693 bp, Homo Sapiens
ggatctgagactggatattataaaaatgtttaattgactcacagtcctgcaggctgtacaggaagcacagtggcatcttcttctggagaggcctcagggagcttttactcatgacagaaggcaaagcaggagcaggcacttcacatggtgaaagcaggaacaagagagagagagtgtgttggggtaggtgcactaccatggagacagcaccaagtcacgaaggattcgacctcatgatccaaacacttcccaccaagctccaccttcagcactggggatctggtttcaacatgagatttgggcgggacatccaaactatatcatctgtctccctcatccaagaccatgtgatccgtagctcacttttgtctagcaacagattaaatacagcattttctgtgtgatatctttgttgaggtctttgcagatggctgtttctttgtcctgaaactttcttcatctgctctttcaaaatgagtgactcttcatcctcgaagtctatgcttatatattgcttttcagaggaatcttttctgaactgggcactctgccttcaaccaactattttctattatagtttcctgtttgtgagttatagtccttttgaaaatttgactactcatttaccttcttgggtttattgaaatatctcctctcactagatctatagagcatagcatgcctgcctctcac

SEQ ID NO: 370244 - DNA, 635 bp, Homo Sapiens
  misc_feature (231)..(231): n is a, c, g, or t
  misc_feature (547)..(547): n is a, c, g, or t
  misc_feature (598)..(598): n is a, c, g, or t
ggagacacactgctaggatactgcctctactcgctgaagcagaatcctctgaagagttgctgaggcagaactgaaatcatggctcacctcaaagaagcagcagtattggccgttaatgatgcctcacacagaaagacgatgctcctttaactcggggttttaatgggaagtttctaagcctgaaacaacagctttagacctggggtgtgccatcagctgccttgcagctanccactgtctactgctttcacacagcgtggtcgggaagaatggaaactaaagaggcttgtaactacctgtaactgttccaccaggaattggatcaagtgtttgttcagccagagccagtattaaaattagactctatttcctgagcacccacaaatggacctgacaaagggaagacacagatgtactgcgtgatgaggaaagcctatcaggattaaaatatggctataactcagcctctccagagtgcagccaccatgacctccgcagattgatgatggaagaaaagaaaaccaggatatcctgtgctctggcttcnctggaccatggatggaggacagcccatcccctcatccctagtgccccttgngaacgaatcagcagattctagcatgtccctggagcag

SEQ ID NO: 370245 - DNA, 839 bp, Homo Sapiens
  misc_feature (569)..(569): n is a, c, g, or t
  misc_feature (606)..(606): n is a, c, g, or t
  misc_feature (710)..(718): n is a, c, g, or t
ggaatgtactgctgttttatggctttagcatcaaagtgtgttgttaataccaatatacatttaattgaactaggaaagtttataagtctcccattcagggactactgcagtatagagagatgtagtctaaaagaaacaacatacaaccgcaagaggaaaagaaataaaagcacaggtttagttgaaaacttagttactcctgtagtactcaggccattttccattataaccagctatgtggactttgcagtcaccaaggtgaaatatcctgagtactccaagagtgacctttaaaaagataggcacctcttaggctgctactgagctcttgaggaaacaacagcggccagaggagcttcctgaaagcgtaactgattcatttatgcatactgcaggcagttatcactatcctgagagtcatcctattggaaatgttgataaggaatttgttcttgactttagctgcagtcatcagtgacaccacctcagctctggatggcacttaagtcagcctcaattcattggccagggtggttatgggtgatagaattgctcttcctctttgtggngccaaattggagtcagtgcaatcactaatacatcccnctgtgactggattaatgtctcagaccgagtacagggtcaatacagaaacttgagaatgccacttggctttctaaggtagatcctgatggtttatgattgttggnnnnnnnnncctaccttgttggatacaggcccttggatatggctgaagtcagtactgattggtcttatcctgttacatagagttctgttgatagtacctttaattaaatgtaataaaatactttgaatgg

SEQ ID NO: 370246 - DNA, 544 bp, Homo Sapiens
  misc_feature (411)..(421): n is a, c, g, or t
  misc_feature (425)..(487): n is a, c, g, or t
ggatttcttgaagtggtgtaaaaacttagagattttataagagaaccaggggctcccttcacctctcctggtccctcaggtcacatatgaaagcatttttacaagatagaaactggaattcctcatttctcccatgttcctgcttgttcttaaacttcatgaagctatttttccagcctatggggtagttcttgctccagtaagaggaatcttagttgtcataatcccttggagcctgggtttttggagaaagagatctccgtgccctacagaccttttctcaacgaatgtgggaaggacctggctttaaaacacgcacacaaacacacaaataaacagacataagatgtcatcacgaaactgcccacggatctttaggctttctgcatcgacataaatacattttctaannnnnnnnnnnaagnnnnnnnnnnnnnnnnnnnnnnnnnnnnnnnnnnnnnnnnnnnnnnnnnnnnnnnnnnnnnnncagtgctcatgtcataagctatgttgacagttgccagtggaaatgttgggttggttc

SEQ ID NO: 370247 - DNA, 197 bp, Homo Sapiens
cagccctaatgtagtatttttaaatgatatgattatacaacaactttctttaaaatctaagttcacaaaaatttgtcagtacatcatctgttttatctctattgactataattaccagttgtaagaacaattctaaccatattaatacctgacagaacgttgaggcctgattataactgggatattggggtagcatc

SEQ ID NO: 370248 - DNA, 681 bp, Homo Sapiens
  misc_feature (597)..(598): n is a, c, g, or t
  misc_feature (656)..(656): n is a, c, g, or t
  misc_feature (660)..(660): n is a, c, g, or t
ggaacatcgacttgactattgtggaagatgaagaggaggagtcagtggccctggaacagcacagaaggtacgctatgagggtagctacgcgctaacatccgaggaggcggacgctccgatggggaccccgtgcagcccgccgtgctccaggtgcaccagacctcctgagcttagagccaccgtgccatcctgtgctgtgctcaagcgggcagccagggctgaagaacaaactcttgcacatctccagcacgactcacccactcctgcgttcctgtccaggcagtaatcattgaccatatagtcatagtaagacacacgagaccaggctttaccatgaaagcgacctgtcacggactccacttttaatttgctcttaggttctatctctgtagaatgtctccaagattgaaggaagaaactgagcagttgaaaaatgctaatctctttggacttagttcagaaaaaaacagaggataattaagatactagtcatgaaaagtgattcattcttttttgtcattccataagcttgctgaatagtgtaccggtaatatattgtatttccaccgtactctgtgaatctaattattattcttnntagtgtgatatataatatacataaatatgtaagctaaacatataactatatgttttangaangaaacatctacgaaaggtaaa

SEQ ID NO: 370249 - DNA, 857 bp, Homo Sapiens
  misc_feature (725)..(725): n is a, c, g, or t
  misc_feature (794)..(794): n is a, c, g, or t
  misc_feature (819)..(819): n is a, c, g, or t
  misc_feature (830)..(830): n is a, c, g, or t
  misc_feature (844)..(844): n is a, c, g, or t
gggtgagatgtgtgggaagggctttagtcagagttcgcgccttgaagcacatcggaagggttcacacaggagggaaaccatacaaatgtgaggtgtgtacaaagggtttcagtgagagttcacgccttcaagcacaccaaagggttcatgtggaagggagaccctataaatgtgaacagtgtggtaagggtttcagtgggtattcaagtcttcaagcccatcacagagtccacacaggagagaaaccatacaaatgtgaggtatgtggaaagggcttcagtcagagatcaaatcttcaggctcaccagagagtccacacaggagagaaaccatacaaatgtgatgcatgtggtaagggtttccgttggagctcaggtcttctcattcatcaaagagtccatagtagtgataaattctataaaagcgaagactatggtaaggactacccttcatcagagaatctacacagaaatgaagattctgttttgttttgaagtcctcaaatgggagctgaaattttccagtcactagagttctttcagtagaaaaagaatttttaaaaattaaaatgtaatgttgctgcccaacttcaacattcataatggccaggagaccacacaacagagacatttaatgagaggggtttcacgagggattttgttagaacttttaacatcagtcattgcacaggagcaaggcttataaaatatgagtatggtcagganatttaataaaagtacagtgatgagcatgcctaaatcccatggttctcctagaatgtaagccttgggtgnaagaaagggaccttggttcattgcnagtcttcaaanctagggcatttccntacgccatggtag

SEQ ID NO: 370250 - DNA, 674 bp, Homo Sapiens
  misc_feature (449)..(468): n is a, c, g, or t
  misc_feature (556)..(621): n is a, c, g, or t
ggaacagtgaaaaactgaaaacaacctggaagtccagtgatgggaaaatgaatatatttctgtcttagattggggaacccaaagcagattccaagactgaaatttaagtgaaagcagtttatttgctaggtcataccagaagtcatcaatcgaagtatggagaaatggaactgagaaggtaaaaaccagttcaaaatcagtgaggaggttctcaatggtaacgagctccatactgctgagatacagggaaacggaggggagaaagctagagtatttaacccccactccttggttgtcagctccctgtcctgtgtgtgggcagaacgtactccacctactcaatagcaagttccaggtgtttgctgaaagaagctgctgtaatgtacgggaacggtgaatgccaaacacttaaagcaattccatgtttaagtatgtaaactcttcatacnnnnnnnnnnnnnnnnnnnngagacagagtttcactcttgttgcccaggcggagtgcaatggaacaaccttggctcacggcaacttcagccttcccaggttcaagcannnnnnnnnnnnnnnnnnnnnnnnnnnnnnnnnnnnnnnnnnnnnnnnnnnnnnnnnnnnnnnnnngtatttttggtggggacatccatgttgtcaggctagtctcgactcctgaccta

SEQ ID NO: 370251 - DNA, 944 bp, Homo Sapiens
ggagatgaagagagaaagatttatcagtctgtgaaaaatgaaggcagagccactattggaaggtattttaatgaagggactgtcctggcacattatgcagatgtcctgggtcttttgcttagactgcggcaaatttgttgccatacttaccttcttacaaatgcagtgtcttccaatggcccctcaggaaatgatacacctgaagaactgagaaagaagttaataaggaagatgaagttaattctgagctcaggttcagatgaggaatgtgcaatttgcctggattctttaacagttcctgtgataacacattgtgcacatgtattttgtaaaccctgtatttgccaagtcattcagaatgagcagccacatgctaaatgccctttatgcagaaatgatatacatgaagataatttattagaatgtcctccagaagaattagcacgtgacagtgagaaaaagtctgatatggaatggacatccagttcaaagattaatgcgctaatgcacgcattgactgacttaagaaagaagaatcccaacataaaaagtttggttgtttctcagtttacaacattcctgtctttaatagaaataccacttaaagcctctggatttgtgtttactcgtttggatggttccatggcccaaaagaaaagagttgaatcaattcagtgttttcaaaacactgaagcaggatctccaactataatgcttctgtccttaaaagcaggtggagttggtttgaatctgtctgcagcttctcgagtgtttttaatggatccagcctgggaatcctgctgctgaagatcagtgctttgacagatgccatagacttggtcagaagcaagaagttatcatcacaaaattcattgtaaaggactctgttgaagaaaatatgctgaaaatacaaaacaaaaagagagaacttgcagcaggagcct

SEQ ID NO: 370252 - DNA, 835 bp, Homo Sapiens
cactgaccactgacaagcccagggactgagcatacaagcctccacctcactcaggcagttcttcagtcgctgaagcagctcactattaggaaacctcctctcacgagcctcagactccagtgcccttagctcttcaaagcctggagagtgtaagttgcaacaggtaggcagtgttagcagaaaaggaaggttgagaatacccaaaagaaagaaataaggcttacacaagggttccttccatttcctgtcactcactgcgtttacggccatcctccacctccaaggccactcgcactttgttggcccaggtgtcaaaagactcagcccgaatcttcagtttatgcagcatggtggggagctcatccaaggtgtaccgataccggaggtactgtcggctactagagcacttgcagaggtcattgatgtgggaaaggcatacaaggccatctgggcagtcgtagacaggccagggctgacaagaagcacgtggtcttgcacttgatgcactggcgttcatcatctgggagcagctcaaaagcctctcgctcagcctccgtgacgcccttctccaaaagggcctttcgtagacgtcgctcctcctgaaccataatgaacatctccttgtgcacagctactgctagattgagatccaacgtctctgggaaggcagccatcttgcagatgagctcctcgtgggagaagacacaatatgccggagccggcggtagtgttcaatgcactggcgtccagcaggtagccagtcagcagtacaaaagttgacagcttcagcaaaattgtagccttggttaaaaccactgtggtaagcacgaggaaa

SEQ ID NO: 370253 - DNA, 754 bp, Homo Sapiens
agcgggctaacaaagtgcgagtggccttggaggtggaggatggccgtaaacgcagctttgaagagctaagggcactggagtctgaggctcgtgagaggaggtttcctaatagtgagctgcttcagcgactgaagaactgcgtgagtgaggtggaggcttgtattgctcaagtcctggggctggtcagtggtcaggtggccaggatggacactccacagctgaccttgactgaactccgggtccttcttgagcagatgggcagcctgccctgtgccatgcatcagattggggatgtcaaggggcttttggttatgggtgccaagatagcctccagcccttctgtggacaaggcccgggctgagctgcaagaactactgacgattgcagagcgctgggaagaaaaggctcatttctgcctggaggccaggcagaagcatccaccagccacattggaagccataattcgtgagacagaaaacatccctgttcacctgcctaacatccaggctctcaaagaagctctgactaaggcacaagcttggattgctgatgtggatgagatccaaaatggtgaccactacccctgtctagatgacttggagggcctggtggctgtgggccgggacctgcctgtggggctggaagagctgagacagctagagctgcaggtattgacagcacattcctggagagagaaggcctccaagaactttctcaagaagaattcttgctacacactgctgaggtgcttgcc

SEQ ID NO: 370254 - DNA, 648 bp, Homo Sapiens
ggatagaaagttaacatttcaggagcacaattatttcctgatttcaaatatgaacagaagactaaatgtcatttttttaaatcataaatttggtatccatagttactttacacattccagagtctaagcatggaatttaagttttgtattttgaacaaaaatagcaacatctgttttctgtatggcaaagaaaaactaaatcccagacttttatttttaaccacagaaaccatcacttctttctaaattatttgcttgcctgctcatttcccctaaacatctctgtttatgccaatggctttttaaatccaaataatactagttattgccaaattgcattagaatcctattgaattagaataattcatatacttcatatactaggcagtaaatggttagagacggtaaagatctgattgtgatcaaaagtagggtttttgttttgtttttaatcatgagcacatataaaaggaaattcaaatgaaaccaagccaatttctgatttagtaagattaaaaccatagatggagctcagttattaaggatggaataggaggaaagcacagagtgaggagagaaaaaggggaaggaaaaaaagtagtgtttttgtgggaacagtataatatcagaagtcttctctctatcctg

SEQ ID NO: 370255 - DNA, 935 bp, Homo Sapiens
ggatacaaacatagtgcaaaaagatgtttcagggaaaacatcagtttacaacataatgtctttcatgactcaagtaaaagctcacaagtaatttcttctgaaacccagatcactgaattacaggtttgcctatagatgtaccaggtcaaaggctgtgccagagagaatgaaatactaattattttcaggctgataggttcagttcctgcaaagcctgtaggtcttgctctaccctttgactgccttaatcagctgccgagcttcatgccattgtttacaaggggaattgggtgaataaatgtagacagattacagtaaatccacgttgcctgcaaaagtgactaaggtgtatcctttactgataaagtaaggatgaaatgtggaaacatataattaaattataaattaccaagcttttgtgataattcaaatgcttttaaatattttgaacctaagtgttaccctcaaaatggtttaaaatataaaaatcaagaaatagagcaagcaggaaatgggattttaaacattttgatttcaagaaatagaactatcttaaatatgatgctgaaacaatctgagaggcaggagataggactcaggcaacagagatccgaggaaatatatatgggcattttgtggttcatttttcttgtgtggcatgtggtacaactgaagcataaatctttttgatatcatctagttttgccagaggtatgggacagttcatattctgtccataagttcggctacttacataaactgaaatacaagtgcaactccaaacaggttttttcttttctggacaccatcatcaagcatggaagactggatctggaatttccctttcatatcttgccagttggcctcccagttttcttgcttatgttttctcctggtgtgtttcaacattgtaattgttttcaatcaactgtata

SEQ ID NO: 370256 - DNA, 586 bp, Homo Sapiens
ggaggcccagctttcaacctgcttactcatttctcaggggattttgggaaggaatcagcaggtgacagttgctaagcaaccaaagggggtggtgtttcccaactgtcttgggacaaaaagggtaagagcacccttagatccagatgtagccaaggaaacccagaatgcccagctgtctggaatgaagtgacagaggtagaaaacagtaggccctcacaggaggccaccttcgctagcagggagtgggaggcttctttccagggatttgtgtctccgttctgaaggttctgcgtcctgttttgtcaattccctagacggttttgaagttatattctgttaaagcatcttcataggtgcttggtgggaggccaaggtcgccgaatcctcgtggtttaaatagactttcagtgcattagtttgaaccatataaaactgacaattttcaatagtttttgagttaaaaatggcacttttgatatgagacaatgtagcagaataccaggcagacagaaccttgcaaacaccttaacttctaaccaaagactttaaaactctggctggacagagttttaagcactatgctgca

SEQ ID NO: 370257 - DNA, 585 bp, Homo Sapiens
ggggggagggaaggcatcctagaggaggcaatgcctaagctgggagctgaagaatatgagtcagccaggtggctgcaggaggaaaaggcatgttctgggtgggaggggctgcagcacagagaagagggtgtgagagagcgtggtggactctttcccacaggcagcctcactggccggggattgcagagaaactaccagggctggggcttgggacaagtggtttggtcacaattcaccccatgtgctctgacactgggaagtgtccacggaggaatccagtggggccccgtgcccctaaagcttactgcctgctgggggaacccagggcagggcagccactgaagagagagggagggtggctctctgcaaagtaacacagcctcggcagtggagtgacattccaagtggagaaaacactgagcaaggcaggggacacagaggtggtgtccacagggggtgctgcacggtgggagaggggagaggaggccagtgtgctagattagggccagcttgagatggcctcagttttcttatctgttcaatggggataagaatgtctaattggctgtgcgcagtggctcacac

SEQ ID NO: 370258 - DNA, 756 bp, Homo Sapiens
ggagtttactaaaagtaaaagggcagttggcaagttgattgcagaattatcatttaatttactccgaattacctctcttcatactatattctgattctgcaaaaatgctaatcttaacagtgggaattatgtcatgctggcagtatttgaatggcatgaagtctctttcccttaggcagagtggactgtcactctattttccctggttacagcagtccccaaagccactgcagcaggagctgccatggggaaacatggtacctgctttagtagcttccagtacttaggggaaaggatccaggaagaatgtctgagcctaggcattaagaagcagatggacccacgatgatccagagacagtggagggggaagacatactgaaataatgaccatgatgaggatgttaaaaagagcttacgttcactgagcattgataaggtgccatttactgttctaagtgctttatataatcttatttaatccttaccgcaaatcttcgaaatagggtttattatacccaacttacaggtcaagaagtcgagatgcagaagtgaactgcccagtgccagccaatgagttgaactggtgagcctggcccggaacccaggtagtctgactgcagagatgatgtgctcagccctacacccaagaagggagggcccatctgataagactatgataaaactggactctgcaagtctttgtggattgactcttctgctcttgtctctgcgtttccaattttgaaaaatttat

SEQ ID NO: 370259 - DNA, 566 bp, Homo Sapiens
ggaaagagatgagtgattattcactactaaaagaagagaaactggagcttctggcacaaaataaattacttaaacaacaactggaagagagtagaaatgaaaacctgcgtctcctaaaccgcctagctcagccggctcctgaacttgcagtctttcagaaagaactacggaaagccgaaaaggctatagtggttgagcatgaggagttcgaaagctgcaggcaagctctgcacaaacaactgcaagacgaaattgagcattctgcacagctgaaggcccagattctaggttacaaagcttctgtaaagagtttaactactcaggttgccgatttaaaattgcaactgaagcaaactcagacagccctagagaatgaagtgtactgcaatccaaagcagtctgtgatcgatcgttctgtcaatggattaataaatggcaatgtggtgccttgcaatggtgagataagtggggatttcttgaacaatccttttaaacaggaaaacgttctagcacgtatggttgcatcaaggatcacaaattatccaactgcatgggtggagggtagt

SEQ ID NO: 370260 - DNA, 1042 bp, Homo Sapiens
  misc_feature (16)..(16): n is a, c, g, or t
  misc_feature (47)..(47): n is a, c, g, or t
  misc_feature (104)..(104): n is a, c, g, or t
gcgatcttgattcctntcagactagatacgtgcttaaaggacaattntgcatcttctctgtaatcatccagaccctcatcatatgattttgatctttctgtctntgagttgggctgagcatccaggctaggagggccaacagattcgtggtcatgtgagagctgacggcgaattaatggagctgaagttgtgaggcaaggaggaactgttgctatggaggggacctgagaggtagaggctgatataacagcagaggcagggatatgtgcaatatcatgatcaatgctagggctagttggttcatctataaatgggatggaagccaaagaatcgccaggcggactggtactcgaggcttttctttcctccattctttttatgtggacctctcgacgtgcatcattgggcagccagcaggtagtgtctgacccggtctcctggtcatttactgccaagatgtaagactgatgccttaaaggctgcggtgtctggcgtccagatggaggtttttcccttaggatgacagcttctttattatctaaagtatctgattgctcagtttcagcctcttgtaaacttaaatcttgactcctttgactgacaggtagttctaaatctgaagtaccagcgttttcactcgactgaggggcaggcttggcagaggctccagataaagagggggatttcccagtctccacttgctgatcgggggcactgtcagtccttacccatgtctgctgattcaacagactgttctgatgcaagtgatttactggtctttggtctttcatagaaacaaatgatttctggctaaatgatggttttgtgacatgcgtggaaggagctttcagagaattacttcggactttcacaagaggtgacctgtcttgtgaaataccccgaggcacgtgacattccacaagtagtctgaaaatctctctgtttgacggcaatgtttttagatctggtggaatttttttaaactgcgacacagatcccactcctataccactcagttcgcctggctcattggttcaaaatg

SEQ ID NO: 370261 - DNA, 755 bp, Homo Sapiens
agatacttcggcttgagctgcttcgggagtcgcgaggccgagcgggagccagtggtgaatgacgtggccaccatcctgtcccggcgcattgccgtggagtacagcgactctgacgacgactcagagttcgacgagaacgactggtccgactgagcaaaggccggcggagaggccgcgtgtgggagcgtgttgaagattttaagtggtctctacacccaaatagtggtattctaatcccgtagcatagcaccttttgtataaacaatgtgatattgcttctgcacatccaaaaattctgggtcttttcagtatttactgtgtaatacttaagtgccactaaacatagcaaattgtgctgcacatgaggaaataggctgtcactatcacattgtcctgaaaacagcatctgctttcctcttggccatgagagtatttagtgcagtttgggtttactcttactgatcaatataactctgcagacttgctgtgtgtttgtgaagctgcctggtgttaggtctctgcaagactaatgactatgtcagagtgatgtcttccaaccagtaagtgatattgtttcaccgctttggtttttccttttgtttttttaaaggatgtgtttctgaataagttggttttagagggaaaggttcaacaaacagggagaatccagtgtttctgctatcagtttcttggcttggtagcctctgagtgaatctgagctagctgaataatctgcaggggatactctagagacg

SEQ ID NO: 370262 - DNA, 375 bp, Homo Sapiens
gtgattgtatgctgtatctgaggttcacgcgggaatatttggggctatgcatgtcttcgggagttacgatggccggcgggcagccagctggtgaatgatgtgaacaccatcctggcccggcgcattgccgtggagcacagcgcactctgacgacgactcagagttcgacgagaacgactggtccgactgagcaaaggccggcggagaggccgcgtgtgggagcgtgttgaagattttaagtggtctctacacctcaaatagtggtattctaatcccgtagcatagcaccttttgtataaacaatgtgatattgcttctgcacatccaaaaattctgggtcttttcagtatttactgtgtaatacttaagtgccac

SEQ ID NO: 370263 - DNA, 1402 bp, Homo Sapiens
  misc_feature (97)..(97): n is a, c, g, or t
  misc_feature (174)..(201): n is a, c, g, or t
  misc_feature (318)..(326): n is a, c, g, or t
aaacttcacatcatacttatttttgtttgcctttcaggatcatattagcttttataaaaaatggtcttgctgctgaaattgtacttattttatcagnggctgggtgcagtcaagacaaaagtaaaatggtttacctgagcccaggggagggaaaattgattaagatatcattannnnnnnnnnnnnnnnnnnnnnnnnnnncctcttactttaattgaaatactctgaattcccctcatggaaacagagagcattgagagcactttctttaaaaggaccaaaaataaattcctaatagattttgtcctaagagagtgnnnnnnnnnctagcatcattttctttacatgccactcatgtcataaggcatggacaggctatctttcagtggccattactatgtttcgtacacatgctttattttacttgggctctgagaaatgtgtggctttccttcagcattttatttgtgcttctctttttaatggagattgaaaagggagaataatgtgaatatcacggcttatattattaaatgttgattgatggcttgtaatgtactgcacacaatatatgttaactctgcagaatgacagaccctgggagaagtaatgccccagttgtcccccactcctaatgccaggcagagaaggacagcctttatagacttaatctgctttttgtcccatttgacaaggtaccaggaggaaattttttaagggatcaactgtatcacagtgcccactctggacctaagtctagtgtatccatacaattggtgcagagaaataaggtgtaaatggtgctttgttcctgctggttccaagctcagaaaccaagactagctttgtaggagagaatgagagcctgcaagcctctctttggattggctgaggagtggtgggagcagggggttgatagaaaacatccagacacacatataagcaagtggccgtgctacctttttagagaataaggaaacagactttggagtttatatgcaatgccttcattaggtaccaccggcacttacaaaatgtgcggactgaatcccagagaacactggcagatgtatacagtatatggattgtatcgcttccccaatgtttgtaaattcacagtatttggaaaactgccttcattttccagtgtgggaaaaactcttgctacctgtattacttgatctcagacccatacctgatggttcagtctgtccttaagttaaaagaattttgcttttctaatgttatactatttacctgtcagtgtattactgcaacttgaatcactcttttactgttgttggatataaacttatcctgtaccaatgtatttattaacacttgtattttattattgagcatatcaataaaaatattaaaaaataacagattgttttttacc

SEQ ID NO: 370264 - DNA, 947 bp, Homo Sapiens
  misc_feature (133)..(192): n is a, c, g, or t
  misc_feature (475)..(475): n is a, c, g, or t
  misc_feature (483)..(483): n is a, c, g, or t
  misc_feature (519)..(519): n is a, c, g, or t
aagcttagtatcaacttacttgatatctaatatcaactgcatatttatgcagattttattaataaaattgtatgaacattttatataattaaaatgttaacttaatgttaccatattggtgggaaatgttgtnnnnnnnnnnnnnnnnnnnnnnnnnnnnnnnnnnnnnnnnnnnnnnnnnnnnnnnnnnnngttcttttccattgtgattcttaaagaggcttttgcaccagctcccctctcctgcccctttcttccctcccagccctcatggttttaacgtcacacacccaccacatttcagaagtgttacctgttggtcgtcaggagtccatatgccacacgtaatttgactttccaagttgatttcggatgaccagtgtctttgtccactgacagacccaaccaggacaaacccatctcgatagtaaataagtgcttgagttccatcatgtctccacgtgaaatcactcancctggccncgccgtcgttgaccagctccacagacacctgccctncgtactgaatcacacgaaatatgcctccgtccgcatcgcacgtggccagtttctggtagcgctcattccacctcaccagcacaacctcgctattgtggccccggaggttgaaatttatcctctgtggagtactcctgtccctgcgacagtgactagaggtgaaagtcaccccaaccactcctcgcccgttgcccgtgctcagccagccttcctcatagtagcgtctcctgcacacaggcttctccttctcactcattgcgacacgccccttccaggacaggcacaggatgttggagtcactgcaaagcacaggcccatgttccactgctgcatacatactttcttcaatgaactgttttacttaaaaagtaatgttaatgctgtgaaatttaaaccaatttctttcattggtatatgtgtttttggtc

SEQ ID NO: 370265 - DNA, 760 bp, Homo Sapiens
  misc_feature (25)..(25): n is a, c, g, or t
  misc_feature (37)..(37): n is a, c, g, or t
aaaaatggataacttacccttggcnattgcccaaganccttcgagcagacaacaagcgaattctatttattttatgttgtgtaatacatccttgatcattagcaagacattaagctttaaccattatggcaccattttgtgagaatgattgttctttcacttgggctgtttgagagcataattatggtaatcatgagattaatgtttcatgatttctacctccaaagtgtgaagacaagtaaaacaatgtttctaaattgtcttattttgttggcggagaagattacaatggctattagtgctacatttggtcaaatgtaatcacttaaatagcttcttgtcaccttaaactaaagcagaataaaaagtatcctttgaaattataagccctcctttgctgacagctattattttgtaacatcttaccaggtcatgtgctttcagttataactgggctgagcctcctataattacaatgtctatagggactgttttactgcctgtgtattttctgctagagagttagcaatgttagagctagaacagattagaatttctaaacagtatcatgcacagttggtgtgagtgatcagtgtgcattgtatggcatgcatggttgtgaattattctctgttctccaatactgtttctttactcagatatttttgttagtgtctaggccacttcatttatttttcgtcatggtactttactgacttctctttattcattctccacgcctcacaaaaaaactgtctca

SEQ ID NO: 370266 - DNA, 1088 bp, Homo Sapiens
  misc_feature (11)..(11): n is a, c, g, or t
  misc_feature (44)..(44): n is a, c, g, or t
  misc_feature (925)..(925): n is a, c, g, or t
taggccagganggaatatatcttgttcaaaaaaaaggtaacaangacagtggttgttgtggcaaaaatacacttgccataagtatacctgtatgcttccgacgtcgggcgccagcggtcccggccccaacgctgggctgtgctctcctgcgacacgatccgttaaaacactccccacggcgcactgggcagctgaagcacttctcctagatttgctcttaacagaacgaatgcatacgctacagattcctcaacggaatcaacagaattcctttctccacattcctaaaactgggtaccacggtccgcaaataatagtcaccagacccatcatcacaggctatgtcactaaaactgaccgaagcgttttccagttcacattttcctaaagattttataatgtgacaacccttctctccttagaaagttaatacttctggcacttgaaaatgctggatttgttgtcccagtttaaaagaagtgaaaaccaaaacattaaaactctgtggtcagagcaggacaaacgcctggggcccgacagcagggccacgggcagtcctgcccaggtggctctggagccaagccctttggaaaaccttcagggcgacctggctccttcactcacttccgaccaaaagaaaagacatcaaaataaaaccccaaacccctcatcatggtgtttgtaacgatgctcgtcagacaaccagccgacacgatgacccaacttagaaaatgcagctcgggaaaggacctaagcttgtttaaaaaaaattccctcctcccttaaatataacttatgtgaaaataggaaattaaataaaaaatatctgagttattgcacaaatcataagttttcaatatttacatagaaaaacagttctgaaatttcaaacaaaatgtgagggcagtagaaacaatgacctccnaagcttatccatggaggaaagacacacgaacggggtttgatctcctctgctgctttgacgaacaggaaatgaaaatagcaacccgcgaaggaacagacacggctacctcaaacgcaagcgcatgttcacgtccctgcagttcctgagcccaacctgcctcagc

SEQ ID NO: 370267 - DNA, 589 bp, Homo Sapiens
tacttttcccaggggggtggataaattcacccaaggagagagtaagagcgagaagaaaagagagttgacattgggtggcggggaatggagaagaagaacccatgaaggaaactgaggaagagcagccagacgaataggaggaaaaccaggagaagatggtctttggagtccaaatgaagagttctgaggaggaagtggtccacagcgtcaagtaagttgtaagctgaaaagtgctctttggatttagcaattaaggtagactatttagctggaagcatccaaacagtggattttaaaaatactcatctaacattaatgttaatgatagctggtatttatagcatttcccatatacctggtactcttctaagctctttacatgtattaacagattgatcaggtaggtagtattgttatccccatttgatatgcgaggaaacacagaggaagcacagagaggttaagtaacttgcccaagatcacacacccaaggaaacaagagagccaggactcaagcccagagtcttggctgcagagtccctgttcttaccactttgtcacattgcctctctagttaaaacaaaataca

SEQ ID NO: 370268 - DNA, 728 bp, Homo Sapiens
acaaggtaactggatctccctggtgctaggctgtgttcacatctgggttctgacactttctagctttgtagccttgggcatgctactccatctgccctgccctcaatttcctcattcataaaagagagataaaactagtaactgcattatatgatttttgggatattaaatgttttttcttttataaaagcctgaagcaatagtattgagaagcaatactagccctggcagaaacggggctgggagtttggggagaggtaagagaaagagataaattatgagcttggactagacagctggcaagacttttcaaaaggaaggaggcagagggcgatgtaggcctgaggaactcacactgacagtaggagagggcaggaaatagggaaatagctgcatggtacacgaatgtgtctgaatcaagttctgagaaaaatttccatgcccaggaggagggcaaaatagcagcagaagcactgctactcatccatcgcagccaaagtgaagtcagtaccagtggaagtcctcaagtgtcttcattagatccctggaaattttagaggctgaaatgggcaggagggaaaggtgggagaaagggaagggtggtacaataatggtagatggaatttccagggaactcactaggaaaagcgtccagaatcagatgaaatttgattttaagaaaaatgaatgatgaaacatttcttgcaattgagagtttgtggagcacc

SEQ ID NO: 370269 - DNA, 1174 bp, Homo Sapiens
taacttggattaagtaaccataataaattctaataaaatattggttgtcctttccctctactaaattcagctctttctgtgaattttaaggtgtttctttttttgcagtactatattcattactctgagtgctgaactacatgctgttttactaaaatgtaatgctttttcacattttatctcattgttgatgttgttccctcttcccagaaagccttttccctgattcaaccacatgacaaatattaattcacactattaaaactactcttggtgaggtcacctatatccttctaattgtcaaatccaataaacagtgtttcagtctttctcttaatactctttggtggcatttaacactcttttcttcattcttgaaaatctttcatttagcttccttgaggccattctcttgtgatcatcctaaggctcataattgattctacagattccctgaagcctccatgttctcctcttctgttagtatttcccgaggttctgtccttggcctacttctcatgcttcatccagtctccttacgcagcttgccattcatgaccatggctccaaatattacctacaggtagtggactcccaaatctctagctcagatctgtctcctgaaattcagacttatgtatccaaccacctcctagacctctgtatctctatttgtcccacatatatcttcattatgtacaaaaatagatcttatcttcccttggatcagttatcgactcctttcaatgcttcctcccaaacattgtttgaaccttcttctccttctcatccctactgccactgacttagcaataattttaaggccaggggttagccaactatatagcttgtgggttaaatccatcctgttgcctgtttttatagggtccgtgagctaagaatggttttaacacttttcaaggacgttttaaaactgtctttaaacaaaatattttgtaccatgaggaaattatatgacattcaaatttcagtgttcataagttttattcaaacagccgatgttcatttgtttatgtactatgactgtttttgtgctacagcggcagagttgagtaattcgacagagaccatgtgaccacaaagcctaaaatactatctaattcttatagaagaagtttgttgttctttgttctatagtaaacaggatttttac

SEQ ID NO: 370270 - DNA, 687 bp, Homo Sapiens
  misc_feature (53)..(53): n is a, c, g, or t
  misc_feature (143)..(255): n is a, c, g, or t
  misc_feature (452)..(541): n is a, c, g, or t
  misc_feature (544)..(568): n is a, c, g, or t
ctgagacaggttctctctctgtcatccaggctgaagtgcagtggtgcccactnagtcctcaacatcctggactcaatcaatcctcccatctcagctgtccctgtagctgggactacaggtgggtacccatagggccagctaannnnnnnnnnnnnnnnnnnnnnnnnnnnnnnnnnnnnnnnnnnnnnnnnnnnnnnnnnnnnnnnnnnnnnnnnnnnnnnnnnnnnnnnnnnnnnnnnnnnnnnnnnnnnnnnngtgtgagccactgtgtccagccccattagtttttatctcacaaaaaaagtaaaaatgtagatattaaaaataataggccaaagcatcaccttatttataacccatcttgtttgaaaagtaatttaaggcagttcataaagtacagtctgacatttcaaatatgtaacttaaatgaaacaagttaaaattaagggtgnnnnnnnnnnnnnnnnnnnnnnnnnnnnnnnnnnnnnnnnnnnnnnnnnnnnnnnnnnnnnnnnnnnnnnnnnnnnnnnnnnnnnnnnnnttnnnnnnnnnnnnnnnnnnnnnnnnnggtagaactgtatcatcaataccactaaaatgtcagtgtcaaaataaacttcttaagaattaagtacacttacatatatttggactgtaagaataagaaatttttcactattgctacag

SEQ ID NO: 370271 - DNA, 808 bp, Homo Sapiens
  misc_feature (520)..(520): n is a, c, g, or t
ggaataatgatgaaattagaaaggaagacaagaacaacaaggttgtggaattcagagccatatagacaagaggtaacacacctgagaaagatgatccctaaatttgtcttggagaaaactcagaagtacctgactacatcatagacctcccaaacagcttccaaatgtcagataccactgaaaatggggataaaggtagggtcaaaaataggaggattgggttataagtctgtataagaagttgttagatccctacatcctctcttcaaacctgtatagccagataatggtccctctcccagcctggcagaggctggaaaaggtaaatagagaaacttacttcctggagaacagttggcacatttggggatggagttcagtaatataaatgaaggggtagtgaaaatttatgggaacatttataagctaacagaaccccatgtcttttaccccattctaattccagaccactagagattagaaaattattctctggggtatctgaccacttccagagganagacataaagatgctgatgtcgagaatgacccaactaaatggcccagccagatgacccagttgaagctggtggacaagaagtttcattcatggaatcagaacttccaataaggtcttttagtacctcactcctaaatttgaatagactaccaaagattatcagacatctaaggggaactaccagcatgaaaggtagagaccaaagcaaacaaacaaacaaagaaaataattttggaactaaccaagactatgctggggaagaaaactattattaatatccacagagcg

SEQ ID NO: 370272 - DNA, 1053 bp, Homo Sapiens
  misc_feature (944)..(952): n is a, c, g, or t
ggaaactacacccggccggtgattatcctggggcccatgaaggatcggatcaatgacgacttgatatctgaattccctgataaatttggctcctgtgtgcctcatactacgaggccaaagcgagactacgaggtggatggcagagactatcactttgtcatttccagagaacaaatggagaaagatatccaagagcacaagtttatagaagccggccagtacaatgacaatttatatggaaccagtgtgcagtctgtgagatttgtagcagaaagaggcaaacactgtatacttgatgtatcaggaaatgctatcaagcggttacaagttgcccagctctatcccattgccatcttcataaaaccaaggtctctggaacctcttatgggagatgaataagcgtctaacagaggaacaagcaaagaaaacctatgatcgagcaattaagctagaacaagaatttggagaatattttacagctattgtccaaggagatactttagaagatatatataaccaatgcaagcttgttattgaagagcaatctgggcctttcatctggattccctcaaaggaaaagttataaattagctactgcgcctctgacaacgacagaagagcatttagaagaacaaaatatatataacatactacttggaggcttttatgtttttgttgcatttatgtttttgcagtcaatgtgaattcttacgaatgtacaacacaaactgtatgaagccatgaaggaaacaaaggggccaaagggtgggacaaaaaagacattgcagtatgaaggaaggctttggtttgctcaaagtgccagggtgtaggggatgaacctctggacgggctttctgcccaaagagatgagatgaggagcctcctcaccccagcaaatgtccaaagctgatttagctgcaaagctctctgtgtcttttgctttnnnnnnnnnttgccagccctcgaacctcatcagccttcccattacccccatctgtaattgggaccctttgaattttataactatgcacatcttttgatttcttaacaagc

SEQ ID NO: 370273 - DNA, 780 bp, Homo Sapiens
ctgaggaacatttgtcctgcatactcttactgatttgtccacagaaacaccgggttgtcttcctctgcccctctgccccgaagtgggggcactctctgtaactcagcatcacagtggggggcagctgggaggcctggttccaggtgaccttctccacctagatgttcaccccactcagttccagctttaccaacagggccccccgcagggactttggggtcgcagaagtccccggcctgtctcagaggccttgtccatggaagggagatgagtcaggttgaaagctcatcgtgtagggttctgtgcagggcccttacaggactggaccgcagccaagatgcctgcctgttaaccatgcccagcccccgtcatttccgcgtgaagccgcaggcctcggagccttggtctgaaatgcctgtggagtaacctcggtccataaacatgggtgcacagtctgttctccccaagtacagggcaggaggaaacaccgccctctgtagctgctcgaatggaaagggctcttttctctgaggtctttatacattagaaagctcttctgggaagaatgtttgaatccatagtgtctttctgtattcacttttaattgctttctaaattagctgagaaattctgacttgaaatattgtcaggtaagcatttcttcagttttcatgtgtgtatgtaacagtagctttgcatggaaattgtaatcagagtcaaatacagtattgaatggaatgtactgccttctcctcctaaatcaataaacatctttcatgg

SEQ ID NO: 370274 - DNA, 715 bp, Homo Sapiens
  misc_feature (163)..(228): n is a, c, g, or t
ggacaggcactctgcattgtcctgtagaccaaatctacattgtcctgtagtctggtctacattgtcctgtagaccgaatggtagagtgattcagagctaattctgggttagactgcacaggtctgaatctatttgctcactgtgtagtgctttaggaatacannnnnnnnnnnnnnnnnnnnnnnnnnnnnnnnnnnnnnnnnnnnnnnnnnnnnnnnnnnnnnnnnncccagttgtgaaaattaactgactgcatgtcaagcactaacagtttctggcatatagtatgcataatgtaaattatgtgctgagaagcgagaaagaataacttgggaaaacgctgaatatcatcaatgtcgaatagctaaccagtagctaaggtccaaggtctcctctcttccttctatgtggcactcttgtttctggttcatctactccccttgggtgtcacctccttgagtgaagtacctgctggagatgagaagagtggaactggatctgcatgacagctttgattaggatggagctaagacttggctatctccctgttttgtgttttggatgggtgacattttaaaactgccaatattcaaatcctgctaatttgctttgtacagtttaaaatgtttgatatcttttgttgtttaaagtttgagattggttttgaatatacagttttcctacatcttgaagaaagttatgtttgtttactctg

SEQ ID NO: 370275 - DNA, 904 bp, Homo Sapiens
ggagaaacccttacacgggacataaatacctctgtggagctttacagtctggaattgttttacttcagtggtatgagccaatgcagaaattcatgttgataaagcactttgattttcctttgccaagtcctttgaatgtttttgaaatgctggtgatacctgaacaggaataccctatggtctgtgtagctattagcaaaggcactgaatcgaatcaggtagttcagtttgagacaatcaatttgaactctgcatcttcatggtttacagaaattggtgcaggcagccagcagttagattccattcatgtaacacagttggagagagataccgttttagtgtgtttagacaaatttgtgaaaattgtaaatctacaaggaaaattaaaatcaagtaagaaactggcctctgagttaagttttgattttcgcattgaatctgtagtatgccttcaagacagtgtgttggctttctggaaacatgggatgcagggtaaaagcttcaagtccagatgaggttacccaggagatttcagatgaaacaagagttttccgcttattaggatcagacagggttgtcgttttggaaagtaggccaacagaaaatcctactgcacacagcaatctctacatcttggctggacatgaaaatagttactaagcaacagaaactgatctcaaatgacaggaaaatgaatatactccattgaaaggaaaaataaggaaattcaatacaaactgcactatgatttgctttaactattatgggttatattgcaaatgatctgtactttagggtagaattcaatattttctgcagctggaaacagctagtctatctcttgccactgtgtggtggttatatcaagtttgcttaataaaagctatgagacaaatagtcctct

SEQ ID NO: 370276 - DNA, 624 bp, Homo Sapiens
  misc_feature (587)..(587): n is a, c, g, or t
ggaggtaagagggagagagatcacaatttccaactgggtaaacagcttgaaaaaagaaacagaagcctgggcacaaatgaaaattccatattaattggaagttaagattcatatagagacaatgaaaggttaggttagaacaataaactgagaagtacgaatgtggacttcaggaggctaggggaaattacgaagtcataaaaagttcacagagatacttgagtacaaaagatacattattaaaatttctgcagaagtttcatcttatttgtgtgtgatggtttggaatataacaagccagttaggcgtataagcttatagtggctaatatgaggatgaaatccgtactcttgtgacacaagtcttcagcggagatgggggatgataggcccaaatagaaagaaaagtggcagacattaagctttgactaacagacaacataactgagagacatggtgtgttgggtggaagggatcctgtagtagatacttgcttgcatgtagatgggtacaaagacaccataaggaaattctgaatgtaatacaaaggcttatttttcctgttgatttatctttttcacacataanagatgaagaaaaaataatctgaaaatgtaatcctaag

SEQ ID NO: 370277 - DNA, 835 bp, Homo Sapiens
ggcattattttgctgagaatgtgtctctcttgactttgaacttattgagagcaggaatcatgactcagccatatatcccagcacttggcccagggcctgtcgtttccagggtaggtggtctaggctgattgaaggaatggcatttagtctttaaaatgaaagcatgttgcctagcttggttatttttgaactctataatcaaggactacgtttacctgcatagcctctgcagaacaccaattccgtaaggtgcttcacacacacacaccaattctatcatttaatacattttggaaaggctacatactactacagcctcttttacagattagcaatgtccatgagcgcactaaaggttgagacattctgcagtgaagaagcctatttcattttgtttaaccaagtatttctcaaatttattttgatcatatgtggcagaaaatgctgtgtctggcattcttcatttccctcttcctcctttaacatggaacccctgatgtctttagcttggcacatcgccacccagaataaaaactacctttcccagctcttcctgcagctaggggcagccctgggataaattctggacaatgaaatacaggcagaagtaaatcatatacgatttccatgaagggaccttaaacagaagtgtgcccttctcttccccacacattcctcctcctgtctgaaatgtagatgcaactgctggcatttgagcagccatcttgggccatgtggtagcttcttatggatgatctaggactaattcaagggtctagatttacctccaaactttgtttatctacaaaaaataaaactctatcttctttaagct

SEQ ID NO: 370278 - DNA, 400 bp, Homo Sapiens
aaaaacccctgggatggaaggcaaaacatcaacccccaaacagcatcaataggattgaagaaatacagctccctcattgtctcggtccttctcctaggaaatggcggggccacatggctgggtaagatattccggagcatgttctcattgtgttccctcagctccttcatctcattgatctcctctttggcctgtactcgccaaaggaagtccaggcgggctgtgtactccagctgctgtccatggtagaacacagccaggaggaacatggccatcagtagcagtgatacctccttggtccccaggaaatcttctccactgtggttgaggttgtcataacgcagaaagaggcctgcgtagacggtctcagtgagcagggcatagatggcaatcatgatca

SEQ ID NO: 370279 - DNA, 688 bp, Homo Sapiens
  misc_feature (261)..(271): n is a, c, g, or t
  misc_feature (409)..(434): n is a, c, g, or t
ggaaggggacaagaatttaaggcccattagtattgcttgttcacaaaggtactgctcactattggaccagcttgctgtgtacctggacacctgaaaaacattttctacttctacaggcagaaactgagcagcatcttgatgctccctaatgcgttaacataagcagaatttacacccttttcagccttggccgagtgcctctgcttacccaacattcctactaagctcctttgtctcgatcgtgtcttgctttggttgctnnnnnnnnnnntcttaactaaaataacacatgttttggggtaaatatttaagtatagcttttggggacagatctaataatttatgttgccaacttgtgcttgtatgttgctaacttgtgcttggatgttgatctgttgaaagtcatgcnnnnnnnnnnnnnnnnnnnnnnnnnnccataattgtggtgacaatacatggagaggtatgtgcaaaagatatttgtgtggtttatgcagatagctgggctctctattaaccactgtgatggaatctgggttgaaggtgtgcccgtttatactcctctactgtggacccttaggcatgtgaagtgcgtgacccgcgaagtgccattctttcctctcaaaagtgtctttgttttaagcctgggggggatggggaacggctaaatgtgaaaggagctgaaaac

SEQ ID NO: 370280 - DNA, 1411 bp, Homo Sapiens
  misc_feature (1260)..(1260): n is a, c, g, or t
  misc_feature (1263)..(1263): n is a, c, g, or t
  misc_feature (1297)..(1297): n is a, c, g, or t
taattgcctttcaatgctcagcagtcagtttatagtccatgtatagacgccctccaggccagcagaatctccctgctgaggtcgtgtggacacctcagatacgcatctgtcactgacaaagttggttaatgcaaaataactcgcaaaaaaggaaagaacatgatgtgagaggggttaaaacaaggtctggcatggagttaaatgtttaaccaatggaaaaaagatcagaccaatttgtgtgtgtgtggatatgtaggaagggatggagacgctgggaaaaaaaattccccacgggaaagaacaaattggaatggtgggggatatgggtgtgtggtgggggcggggcaggaggtcctccggggtccagcatgggtcgggagtgggagcaggacagaaggtggccacgtcacaggcgactgatgctcagctcaaggggagtgtgaagaggttggcaaagagctggggagccgggcagagggacaacactgactgaggacattgcagttgggaatcagaaaaaaaggggcagctcaggggcatctgatctgcctcatttttgaaaaagaaacagagtaatgtacaaaattctggatatcttctcccagagttttgtgtttattgcttcactgaagtctttacatctgttgaactccagcccagcaaatcccagggtggcagcttgcatgggccctgctgcctctctgcaccctgtggccatgggcagaatggaccgagatgccctcacttctgaggaatacagcacactgaaggcccgatgtgttacaaagcaagagacaccattctacggggtacggtctagggttcacagtaacaaacaccaatcagctatcctattccactggcccagatctgcccttaattgcatgactgggtgaaccacacacaggctgatcacagacagactgatcttggtctcagaaacaatcctgtttgtctttcattttgggaggcatgtgggggatgtgggagaggcagtaaagaggtatgagagggtgaaccagaaggacagatcttaatacctctgtttcaaaggaggcagctgtggtgagatgaaagaacactgactggacaaggagtcagaaggcccaagttcaagccctaaccttaccttagtttaccagctatgtgatcttgagcaaaaatcccttcacttctgtggatttgcatatccttgtctgtacgatagatcatttcaatgagatcagctctgggattccttcacatgccgaaatccgattntgncctaagctagatgccttgtacctatttccattcncctcattatggaacacccatttaatactagtgtgctgataggaggaacagcagcttcaggtgaggcctgagacactgtttggtggacgcttatggctctcctggatggttctcc

SEQ ID NO: 370281 - DNA, 636 bp, Homo Sapiens
  misc_feature (573)..(573): n is a, c, g, or t
ggaagacaataaaagattgtaggctatctctgtaatcatgcaatagcggttcggattgagaactcttcagccatgattagacgttgactgcatctccctgatagaccaatcagctgtgtcgcacttaaactggagaagttacactgaagtataatcacactgaatgttagactttttcatctgccaaaaccaaaaaccattttgatctccctgtggttatcaatataacgcacaatcacaagtgtatgaggacttagaaattaatcctttgtggtaggagttctgttgaatgatggaaatcttattactaccacaagactatttgatctggtaattggagacttcgggatttaggagatctccatgtctgtatttactctaccactgctaaagtgtgtggtcctgggtagtttacttgcttgcggaaaatgagaattgatggtgtccccaatgccccacctcacagagttactaaaaaatgtctgtaaagcatatttacctcttgggagataggcactatgtaaataaggtaaaatttctgttattacaattattcataataatattcttttnctatttctaagcctttctgggaaatcatttcagtccacaccaaccatattattcagggttctg

SEQ ID NO: 370282 - DNA, 1023 bp, Homo Sapiens
ggcattgttcaagaaataaaaccaactgccctcataggagttgctgcaattggtggtgcattctcagaacaaattctcaaagatatggctgccttcaatgaacggcctattatttttgctttgagtaatccaactagcaaagcagaatgttctgcaggagcagtgcttacaaaataaccaagggacgtgcaatttttgccagtggcagtccttttgatccagtcactcttccaaaatggacagaccctatatcctggccaaggcaacaattcctatgtgttacctggagttgctcttggtgttgtggcgtgtggattgaggcagatcacagataatattttcctcactactgctgaggttatagctcagcaagtgtcagataaacacttggaagagagtcggctttatcctcatttgaataccattagagatgtttctctgaaaattgcagaaaagattgtgaaagatgcataccaagaaaagacagccacagtttatcctgaaccgcaaaacaaagaagcatttgtccgctcccagatgtatagtactgattatgaccagattctacctgattgttattcttggcctgaagaggtgcagaaaatacagaccaaagttgaccagtaggataatagcaaacatttcctaaccctattaatgaggtctttaaacctttcataatttttaaaggttggaatccttttataatgattcataagacacttagattaagattttactttaacagtctaaaaattgatagaagaatatcgatataaattgggataaacatcacatgagacaattttgcttcactttgccttctggttatttatggtttctgtctgaattattctgcctacgttctctttaaaagctgttgtacgtactacggagaaactcatcatttttatacaggacactaatgggaagaccaaaattactaataaattgacataaccaacattaaaactcataattattttgttgaccattttgttaaaatctacttttcaaaaaaaa

SEQ ID NO: 370283 - DNA, 727 bp, Homo Sapiens
  misc_feature (47)..(47): n is a, c, g, or t
acagtcaccccttgaggtatcaactgcaactgtccagtagttgaccntgtcccttgaattactactgtcaaaccttgattgccaccgtgcccctgtgttaactgagtaagtgagcccatggtgagcttcacttgtcctgttgggggcgagggggttgtgaggctgaagactgtatatttgaagtggacgttgctgaagttaagcttttctgcccaggtgttgaggaaaccgtgttaggggcggagactgcagtggagacaggctgccccctgatgatttgagtcatcacttgctgaggagcacctggctgtaccatcacaggtgttcgaataattgcctttcctagtgttgactgttggagtggtgttctaatcacggtcataccagggcgaatctgaggccctgtgattacttgtgaattgcttgtggttcctccagagcctgaggtattgggcctaattgtgactgttgctgtcctgggctggaatgaagtaaaggtttgctgactggtacctgtacttgatggaatgatacccaggactttctgctgtacttgaacaacgcctgaatttgactggccttgcttaacccatgtagcaaaggtttgatgaaagttcttgttttgttggaatgttactgtagctggagatccaactttagtagttagtaccattttggttccagttgtaactgagccacttatgggggccaccataaccttctgtgc

SEQ ID NO: 370284 - DNA, 595 bp, Homo Sapiens
  misc_feature (64)..(183): n is a, c, g, or t
  misc_feature (337)..(382): n is a, c, g, or t
gctcaagcgatcctcccgcctcagtgtccacagtagctgagaccacagacgtgcaccaccacannnnnnnnnnnnnnnnnnnnnnnnnnnnnnnnnnnnnnnnnnnnnnnnnnnnnnnnnnnnnnnnnnnnnnnnnnnnnnnnnnnnnnnnnnnnnnnnnnnnnnnnnnnnnnnnnnnnnnnngtgtgagccaccaccacattacagaattttagaagtaaaacagttgctagaaatccttgtctaacaccttcatttttcagaatatgatactgagtaccagaggggctgtatgtgtcgacacatgtcacatagatatttcaggcaggcctgaaannnnnnnnnnnnnnnnnnnnnnnnnnnnnnnnnnnnnnnnnnnnnnttttgtttctacacatatcctagagcagtggtcttctaacatatcaagagtcttctctcactcaacacctttgaatccatatgtttatttatccgccagagtaagattaaatagcacaactcatccctctacccctaaaatcagtttctggacttaataaataaaatgataaaatgatttatttatgtaattttgaaaaatatacaaatgatc

SEQ ID NO: 370285 - DNA, 640 bp, Homo Sapiens
tttaaaatagatactacctgttccctgtttcttcgtcaaattaggaaatttttagaatcactagcagtgtttcaagttgtctctgccataactcacgcttagttataattgtggcttaataactgatatatccaggaactttatacctacatacttacatcacattaaaagatgttatacatactgctaaaactgagctgaagcatagcagaaagaaatcaagcaactcacactttaatctctgaatgagtctgtctgtacaacgggcattgattgcattaaaaatgtggcttacactagtgacattttcataacagaatctaaaacaaaagatctgaaggtcacgagctttggaagactagctgtattgatagcaccttgaactctgtttcacatatggtaggtactcaataaatgtttgttgcatgattaataattgaatatatctgaagagactttaataacaatttttttcactatttctatattacaaaatgtacactactgcaagcaaaaatattaacatccccaatctcccactcttaaagatctaaaaagcaccaaaagaattttggagcatttgtgattttaacaaatctcactgaagcaattttgtcttctatttaatggcaaaagatcc

SEQ ID NO: 370286 - DNA, 872 bp, Homo Sapiens
  misc_feature (551)..(613): n is a, c, g, or t
gactgtagaactattcaagtaatagaacaatcacagatgtctctggtacgcaggctattgggttatttgccattcaagattatcaaaaaatgacacctcattattcacagatgctcattatttccccattttaatctttacattatatacaacacagtttttgtggtactggcaaccccatgccttccaaaagtactttttccacaatacacaagtacaaacagtgactacaggaacattttacactggtgcgtctttaacaggagccaccaaatagacatctaaattgtaccaaagtgtcatcatcacagttagcctttctgaggggcttatgggaaatatgtgaaggatatgcaaggttcaggcacactgatacataacattatttatttacaattttaaaggaaaaggaaaagaaagtaagtagccttttgtggctaacactttttaacatgacaaatacatttttaatttcctttactgagtggtttgcgacgtggcagcagaccctgtgtgtgcgagccgtggttactgatacaaaaagtaaagannnnnnnnnnnnnnnnnnnnnnnnnnnnnnnnnnnnnnnnnnnnnnnnnnnnnnnnnnnnnnnaaacagaagtttaattacagcaacatttgttactctgtgataaaatctgtaatttacaaaaatgaaatgactggtttttgcctgccattaaggcatttcaaattaacaccatggaactgatgtctgtataaagcgcttccccatgtgatccagtcacatgacaatgtacatgcccaatcttgttattctctttagcattatgaaaataaatgtctccatttgcgactttatcttctttgtccaggaaacaccccccgct

SEQ ID NO: 370287 - DNA, 656 bp, Homo Sapiens
ccataatacccatctttctggcctgctactgaatttttcacagaaggataattgaatcaagtttggaaaaagaatacatcttaggacttaagaaatagaatatcataggccagttacattgtaactgtagaactgccagcagccttaccaagaaaatgcattgacaataggagagcataaggttacccctggagagaagcagatatgacaggaagattaatggtacacaagcccagttagtacctgttaggaccagttagtccctgagaatcaaaacatcactgtttactctgtttttgtaatacttcctaatataaagcaagtctgtctttaaactttttttactcaagacactttctgaaagaaaatatttagaatcatctctcttcctgccccttttaaataggatatttgaggattatgactgggtttggtattaaggatcaggaaccctgtagggtgggaacttgattcaccgaggtgggcctgagttcattggggaggccagggtggcaaagccccatggactggggactcaggctttcacctgctgttcccttaggcagagggcggcccacaggatacctttcatacatacatcacaactggaaacatggtctgtgctctatctgtatgctcctctcctgctgttgatt

SEQ ID NO: 370288 - DNA, 333 bp, Homo Sapiens
tcagctcggacccactttcagagtagcactggggtctgaaaccaatatgaaatacagcaatgtttcaatattacttacagaacaggtattgatcagtcctgtaattgggtttagtggttaggggtagcgtaataccctgttaaggttcctgcaaacgattcagggtttaatcactgtctagctgtcactttctagctacaggacctcacaagtcagtttgctgctctgtagttgcttatccctaataaaatggatgtaatatctcctcctactctgtgagaattaagatctaatggattgaagagactttgtatactatggagagagatttat

SEQ ID NO: 370289 - DNA, 1011 bp, Homo Sapiens
ttttttttccagtaaagttcttttattcggatttaacctaaaatagttcgcttgatctctctttgatagagaaatgaaatctccagttctatagactataatggaaaagtattgaatttgcatatttccaataaaagatatttgcttcatgctttgggcatctatcatagttgcccaaaagactatgtccagtaaacataactgtcacagtactgaagcgcaaacttacaaaattgtctttgtgttaccacaacacacacagtctttagtcagctgactattcatgttgtttgaaaagcatgaaaatacaggtttttagcatgcacacccagttggaaaaggacttgctcctccggaaacaccattcattcgctttggcagagctgagagcacctgtgcatgtgaacaagcaggtgggtatctcactggtttctgcagtcatcactttccttgataggtaagttttgataccagccaggggagagtccaggcatttaactcagcttatgatttaattttccacagtcttatattaaatcctagaagatcacttataacacctgagacagcagaaaggataactactcttgtgatattgtagattaagggattcattgtcagtccataggagtctaaatggtgtgtccagctctttcaacaacttggtggacagctttaatacattgtttactagagtaagctgttctttcttatttggctttttttccatcttaagatataaattaatctgttctgtaagtaatattgaaacattgctgtatttcttattggtttcagaccccagtgaggccagacgcaataaaaaaagtagtaaagctgtttcccagatcaaaaactcccagttataagcatcattcaggaaagttttatgtccttggagaacctgagcacaacaaatgaaagcaatcgaaagtgtcagtaggaaaaccgaggatacaaccacatcaactgaacgctgtggcccccgtctctttagataggaacgcagtg

SEQ ID NO: 370290 - DNA, 464 bp, Homo Sapiens
ggaatattcctaagtagcaatggggttggctcaagtctttattaacaaagaaccattctctttcatctataaagaaattcttaaagatgcattgaccagtgttgaattaccaacagcctgtgaagatcagtttgaccggtgtggacacgtgctggttaagcactcaggcctacgtgggccgagcgggatcttgatcatggggctggtgtatggatccaccgtcggattccgtctgcagaggaggacgtagggggccgtcacacccaccaggcctccctgctgtgctttaacacaggcagaagaggttcatggcaatataatagtcaatgaactttcagtttaaattgtgtacatttttaaattgtaagatttttactgtatattgatgcatagtgtgattcaataaattgcttgtaatttaaaaactatttaatattcaaaataaatatagttatatatttaaa

SEQ ID NO: 370291 - DNA, 490 bp, Homo Sapiens
  misc_feature (19)..(19): n is a, c, g, or t
  misc_feature (41)..(41): n is a, c, g, or t
  misc_feature (52)..(52): n is a, c, g, or t
aaaaaccccaaaacaaaanccctaagtagcaaggggtggcncaaacctttantaacaaagaacaatcccctttccacccaataaagaaatccttaaaagatgccattgaacagtgttgaattaccccaacagccctgtgaagatcagtttgacccggtgtggacacgtgctggttaagcactcaggcctacgtgggccgagcgggatcttgatcatggggctggtgtatggatccaccgtcggattccgtctgcagaggaggacgtagggggccgtcacacccacccaggcctccctgctgtgctttaacacaggcagaagaggttcatggcaatataatagtcaatgaactttcagtttaaattgtgtacatttttaaattgtaagatttttactgtatattgatgcatagtgtgattcaataaattgcttgtaatttaaaaactatttaatattcaaaataaatatagttatatatttataaactctg

SEQ ID NO: 370292 - DNA, 560 bp, Homo Sapiens
  misc_feature (356)..(505): n is a, c, g, or t
ggcttatccagaatttatgacaaggtcctgttgttcttattatcagtgatacttataatatggtttcttgggatgagtaatggagtttactccaagaaactcaaagcatttcatacattattcctgtgataaatcaggaaatatgtggataattattttatgaatatgtattacctaaagttcattagtccacatttaattttggcattccagaaaatctaattctttacccatcctaaccttttagccaagccaatttggtagtcaccctcagccaagccaataatgtagctatactctggaaacccttcacttcttgaagaaggaaaaagtcttcctgattgaaaattggtggnnnnnnnnnnnnnnnnnnnnnnnnnnnnnnnnnnnnnnnnnnnnnnnnnnnnnnnnnnnnnnnnnnnnnnnnnnnnnnnnnnnnnnnnnnnnnnnnnnnnnnnnnnnnnnnnnnnnnnnnnnnnnnnnnnnnnnnnnnnnnnnnnnnnnnaggcacctgtggtcctagctactctggaggctgaggtagaaggattgcctgagtg

SEQ ID NO: 370293 - DNA, 504 bp, Homo Sapiens
  misc_feature (47)..(83): n is a, c, g, or t
  misc_feature (494)..(494): n is a, c, g, or t
ttcacatgttggcatgctggtcttgacttctggcctcaagtgatctnnnnnnnnnnnnnnnnnnnnnnnnnnnnnnnnnnnnnctgagccactgctttcggccttacagaattgttttgttttggggcattcagaagtctgacataaaaattaacttgagacttttatgttcattctttttatcttccattttctttccttccttgctttaaaaataccttggacttattttctgccctcgattttatttacttctttaggcattcagataccaaaacctcgtcctctacctatgcttgcgaattgagtcacagcttgtggtttaccttatttccccaagtccatgctcagttgatgtgatgatatagcgctccctcagctttcccctctttccccagtgctcatttatgacccgtctgtgtgttcatttccccttccccataactggcatcatgctctgtccatagtagacattcaagaagtgtgaatttcantagggaatgt

SEQ ID NO: 370294 - DNA, 570 bp, Homo Sapiens
  misc_feature (22)..(22): n is a, c, g, or t
  misc_feature (51)..(51): n is a, c, g, or t
  misc_feature (56)..(56): n is a, c, g, or t
  misc_feature (108)..(108): n is a, c, g, or t
atggccaaagtccgtcgcttcngggctacagacctgtaccgccatggtacngtatngaatactgtaggccaactgtaaccacaatggtatctgtgtaatctaaacatngaacagataatacattgtgctaccaatgtaacaatggccgtggccatcactaggtgaataggaatttttcaagttcccattataatccttataggacctctgtccatatgtggtcaattgttgatcgaaacatgactgtatgtcgtattttcagaaaatggaataggtaatcatcacttgtgtgaattttaatcaaatgacttaggaaagaaactggatgtttcaaaagctgttgcatttattacaaatgtcacaaatacagctcttgccttttgagaatgttggagagatgtctttaaaaaatatgtttgtgtgtaaaaatgtgtctgtatgcaatagctagaaaaatgcctgtgtcttaagtcattactcatgttctaatttttgttctttgtactatttatctgtatgcttgttcttcagtatttcagactcaaaataaatttatttttttatgttaaa

SEQ ID NO: 370295 - DNA, 673 bp, Homo Sapiens
  misc_feature (45)..(83): n is a, c, g, or t
ttttttatttaaaattggtgtttatttatcagtctgtttatttgnnnnnnnnnnnnnnnnnnnnnnnnnnnnnnnnnnnnnnnagcacatgtacatcaagtcataagataaagtttaatcatttgatcatgttaaaagacacaaaacacagccaatctaaccaaatgtcaggcatgcatttacataaatatattaaattaagaaaagaaattgtacacttaaacgtccttttcacctagaaatcattaaatccacagatcaacaataaaaccaattctctgcatgtaccacttcaagatacaattgttctatattaaagataacacaaatacacttgttagaattaatatgcataatacatatattatattttacatagatagtgtgtatacatatgtagtgtttgtacagatagataaataaatatacatgggtgtctgcacaacgtacagatacacacagaatgtactttaggccatctgtactgttactgctgaattctaaaattgagctgaactggtgccgttggatgtgattattgtcttttgcttcagacatgcttatgatgccgattgggcccacaatcccccctagtaaatgtccttgtcttttctacagcacataatcatggtaggcactttaataaatatttgttgaattaataaatggatcc

SEQ ID NO: 370296 - DNA, 456 bp, Homo Sapiens
gactttctcagaatctgtccttaacaacgatcattccatccccaagtgtctcaaagaaaggtagtactttcattttcttaggctacaacaccaacccctggtgtttctttcaaattctttctttctcaatcatccataaagcatgaaagccaattatgcagagcagtgctttccaactcttctctcctcaggcacatatagaacagtaacataaggcaaccagtctggaggccccagacactcatggcacacaggttggaaagctccaatttagagtatcaaaggataatccaggaaataaactccaccttttgtaggcatcataaagatgctttataggtaagcaacataggatcactgaatgagtgaatgagtaaacactgactcagttacacaaaatgatgtcttcttgaacaagtctcaggcagcctgctcttcatgtgtgccccctttctt

SEQ ID NO: 370297 - DNA, 789 bp, Homo Sapiens
tgagccaccgtgcccggccgagacttttaattatgcaatgccagactgcattgcataaaccaaaggccaacagagaggtgacctttcaaattactggcacaagaagagccgagatcagaaagctccaacttaatgcaaacatcgacaagaaatccgacagaaatgacttctgtgtctggtcaacttaacataacatgacatattgtcaagcacatttggctttttaggtagaattgtctataaaggtttaactgctttagaaaatataaatgtgaagatttgtggtatttgggtttatatataagatatttctacattgaaaagagacagtggaaaagcttggtataagatttgtaaaatatgtttgtaataatgctaatggaagaggtgagagttgggtggggtggggtgtagatgggaacatggtttggggattggggaaagggaagtcatgctgttaataaaatagtgaggcatgttgtataaagtgtgttttatgtctcaattgaaatgttatagagataaatttaaaatagatcataatgggttttgaatctgatttctaattttaaaatgttatgagcttttgttgctttcctatttcatacacatttctttatgggtttcacttagactgcatgaaattgcagatgccaattaccttttaacaaaattaaattcacatatatgtataatttacatgtatatattcatggaattttttattctacacgatatattattttaaaatggtttttcaatgacaaaataaaaagtatttttctatac

SEQ ID NO: 370298 - DNA, 696 bp, Homo Sapiens
tcaaaataaaaaagggatcaaataaactctgatacccatcgttaccaccattggctgtgtgctgtggagaaatttagttaacttttctctgaagaagtattccttcctttgtaaaaatagacataaatatgccagtttcccaaagtgaatgggattaaattaaatcatgtatacatatataaagtgtttggcatgtagtaagggattaataagtgatacctgttatatcaatggttgtggttatcttgcaatatgatagttgaaagatgtgctgattcaaagctgtcaacccaacatcttcctgggatctcacctgccttgctgtgttatctgctggcgtctccaagggtgaccagcttgaacgatttcattatgtgtcactactacaacattttacacaaatacaattaaacaagttcgtcttccagcacactagttgggagttaaaaacagtttctattgatttatatttttgatgaacttcattgagaatgttctgatttgtgggttaatgctttcttacattgagggttcccaggagccctgcagtgaagatggtaacctttacctaaactcaccagaatgattaattaatgtttacctctaatgagctaattaggagtctgcgacattttggcattttgaatggcttacttgatgtctatagggcagagacctctagaacgccatccccag

SEQ ID NO: 370299 - DNA, 511 bp, Homo Sapiens
  misc_feature (464)..(464): n is a, c, g, or t
  misc_feature (472)..(472): n is a, c, g, or t
  misc_feature (483)..(483): n is a, c, g, or t
gtgattaacttaactttaattcagacctgaatataacgagaaaatgagtgattatcttgaagttgacacagaatataccacatcccacgaattacttaaatttactttccaatgaaaaaaatcagccattggcgattataactacaacaactatggcagaaatgctttcaggctgaatattgctgcttcataaataagacaattttagcaactaaatccagacacaattagttggagatgacttccaaaatagatgaaactttagagatggaaaagtgatttgggctgagggatgatactccctatgccatctgcatattgggcaccctgctttgggggtttgctgcaggaaatgggtgccaatcagatgggatgtgagggaaggcagttatgggactgggctcacaacttctcaggagaaggctacactgggaatcttttacagctttacccgttttctccantttgttcnggtacaggttnttcccccaaaaagggttttagggggggg

SEQ ID NO: 370300 - DNA, 803 bp, Homo Sapiens
  misc_feature (690)..(690): n is a, c, g, or t
  misc_feature (721)..(721): n is a, c, g, or t
  misc_feature (730)..(730): n is a, c, g, or t
  misc_feature (736)..(736): n is a, c, g, or t
  misc_feature (748)..(748): n is a, c, g, or t
  misc_feature (755)..(755): n is a, c, g, or t
caatctatatgtcctcccgtttaatatcaagaatagaagaaattaagaggaaaactccacagaagagcataggccacttttagccatgtaaaaataagattaagtcacaaatacaacttttgaatttacctgtcaatatctctttaggacacaaaacaatgctcgaagttaatataatttctaattttaaatgtcatttaagtgtagattatgccatctaggaaggtaagtaggaaaggtaaattaaatctatttttaaaattcaaaatattagagtatttttcccctctaaagccttttttggtgattattctgtatctgacataattgagaaactggtaagctgtaaagattccagtgtagcttctctgagaagttgtgagccagtccataactgcttcctcacatccatctgattgcaccatttctgcagcaaaccccaaagcagggtgccaatatgcagatggcatagggagtatcatccctcagccaaatcacttttccatctctaaagtttcatctattttgggaagtcatctccaactaattgtgtctggatttagttgctaaaattgtcttatttatttatgaagcagcaatattcagcctgaaagcatttctgccatagttgttgtagttatatcgccaatggctgattttttttcattggaaaagtaaatttaaggtaanccgtggggatgtggtataattctggggtcanctttccaangattantccactccattntccctcngttgataattccagggtcctggaatttgaaaggttaaaagtttaaatc

SEQ ID NO: 370301 - DNA, 687 bp, Homo Sapiens
gcgccgttgccagagaagccactagccggttactagctgcgcttttgttccacttgagcgggcactcttctgcggcaacaggtctaggaattcgcctggttcccacctcgcgtcccttgccttccttcctagtctacccactgtagtgccccctgcgtcccgctccctcctagccgactcagagcacaagaaggattgccacggtttccattgcagcagccgtgggcctctgaccctttttttatatcgcggcgacggcgggctgtcgtcacgacgacgtgcggacgcagacggcgggggcctttcagcttatgtggagaagtcgctgtgaagccacctataaatccatttactgaatttatggagaaggctgtaaatgatggaagtcattcagaagaactcttttgccatcttaaaactatatcagagaacagaagatttaccacggtgcaccagtgaaagtcatctcagctggtattctcatcagtatcaggggaaatctaaatttccgattctaggatttcctgttttgtctataatataaattatttgaatcaaatacagcattcttttaagagtatcttttccaaatctagtatttatttattaaaatatatttaatctgattacaagtgtactcatctagcagaattcaactagtttttttgaatcttcatgaaagcaatt

SEQ ID NO: 370302 - DNA, 946 bp, Homo Sapiens
  misc_feature (534)..(576): n is a, c, g, or t
  misc_feature (877)..(877): n is a, c, g, or t
  misc_feature (912)..(912): n is a, c, g, or t
  misc_feature (914)..(914): n is a, c, g, or t
tgcattacatcgagtcctcgcaaatcattgtagatgacagttagacgtgtaatctgcatgtagttcttcaggtcatgttcagtcagaagtggagcatgataagttgccacatctcacatttggatttttccaggtgatttctgatgtcagtaggaagagagcattgaaaggattgccacattctgacattgaaaggttctctccagtattacttatattacgtctatgtaaatttgaaaagttatcaaagattttaacatatttattatattgaaagattttgctatgggtacttgatgaacaatggttaagtccattataatctttttgcaacttacactcatctaaactttcccagtctttccttaaatataaattatcaaggccacaatttccatatcctctcagtattctttttgggaatgcatcttgtatgccctgctctggcagaaggtcttgggtaaaatgagaagacatagcagtgaatttgtccacagaaacattgaggcctggctgggcacggtggttcacacnnnnnnnnnnnnnnnnnnnnnnnnnnnnnnnnnnnnnnnnnnnttgagcccaggagttcaagacaagcctgaagtagcatggtgaaatcccatctctggatgtccgtctgctgcctcctgtctcttcacattccagggctcttttcgttgctccaggcaggtgatcaggcctggcttacagacagtgagaccaacggagaacaagtttctgtagttctccaacatcacatccctgtacaaattctgctgagcgaggtccaggcatttccactcctccagggagaattctatggccacatccctgaacgtcaacagagtcatctcctggcctccagagagcctgncgtttcacttctggatctcccggtgctgcgggtcnancacctacggctagcaggggacacagagccgcg

SEQ ID NO: 370303 - DNA, 1154 bp, Homo Sapiens
tatatcccccttcgtgacgggtcggcatagattatgctggaagtatggcaaagaaagtcctgctgcacattgctgcctgtgagaggccaaggacaacaggtggagtgacatccacgtggtacagcaattggtcactatggtgggctcattccatgatacaaaacactgccacctagacagcctagccctgcgtggcctgagaaagctgtggtcaggaccaaagtcaaaatccagtttcctcatctatgtggtacgcttcagagtagttaatcatgatatgtagtccagtgactggttcccttggtaagagctgtgataatgacacaaggaggagaggtttcaggacagacttgggattcatgaatatgtaagtggtcactgattccccaggggtaggatgacaacaatcaagagacgaatagaggttggcaaagcgagtcatgaggggtgggaaactagcaggggcacatggaagctagggaaagaattttgcttgagatcgtcaaagtgaggggaagagggtagtaagcaaaggagaaatgttatatggggttcggaggttttgtgtttgtaaatctggagtgatgggcatgttcaaatgcttctgggaaaggagctaataggagagaaacttagcccttcgaaaaacaggaagggatggatcctaggggagaggaggaaggattggctttagaggaaagatgtcctttacgtgaggaaaaggaagaaaaggtgggtttagatactaaatctgtaggtttgctgttaggaaattaaggacttttcacctttatctctgaaatttctctggagttagcaaggcaaggtcatacactgagaaggagggatgaggcagtgtagatttgcagacatacaggttgtaattccttatggaagaaaggggagagcacttttgtcagactgcctgtggctttgagacccctttggctacagtccatgaggtgctcagaggatgagaaagcttcagggtagaagcagtattcaagctgcacctagaaaacagtgcaatacagaacagtggaaattggaaattccaatcttggaatctctaggaaagtaactgagacatacgatgcctgaaaaggagtagaaaataaaattaataaggtgggaccatatgataagagatttga

SEQ ID NO: 370304 - DNA, 768 bp, Homo Sapiens
gtcttgtgtctttatttctacacactctcttgtctccacacatggggagagacccaccaaccctgtggggctggtccctacagttgtactaactgtatcttttcaaaacgctttggttctcctctagcttagtttttatatgagaccccttatattaactctctttaacgtctcagaatggaagtgttaaaaagtcctgctctcaattttccagagaacaaaaaacacatttttcaaatttatggcattcataaagttacattaaaatgctcacacggggatctttttcttaagacttcacttaatataaagatacccactcatgtcttcaaaaatactttgctctcaaataataaagacaatttctctcatatgttaattgagagatctccgtatgaaaatattattatgaaattgtactgaataattcagaaattgttctcatggtagcttctttggatgctggcagtattattttattaaaacaatttaatactggatgtagaacaattcagctgtaaaatgctgagaaaaatcttttatattcactctattcctcccgtgagatgtaagagtgttcaactgttttcaacgtcagttaaaactactctggcccataagcataaatatgcaaggcaatacagatcatgtgacagtttgcattcttggcttgtactcagagaataatggctgaggtagaatattgctctaaacccacctgatacgtatgagtttataaaggagaaagtgcatatctgatatgtatga

SEQ ID NO: 370305 - DNA, 858 bp, Homo Sapiens
  misc_feature (51)..(51): n is a, c, g, or t
ataaacgtagtgctccgttgctcatcatgtgtcagactttacatacatgcngatgagagactcagaagccaggcagaatcatgaagaaataactgaatagttctgatccaaagaactgtgtgaccttatgacatttaaagagtgaggaagagaaagcaacaggttccaagtattatagcaagcataccagctttacttcaggaaggctcgtggagaagctgtgatcacattgtggttatttagatacttccaaatggaaatggcattgataactattcagctgtgatatgaaggtacaaaaaaattttccaaaagggaaaggcagagaatggtcaatgcatactgattttcatgaaccacttctggtaaaggtcttctggcatgtgagatgcattttgttttctttattttattccaatcaatgaatgattcagttattccaatcaaatgatcgggttaggttataatgcctaagaaagttgaatactattgttaatgcataaattaataaaatctcttagaaatcacttggccaaactgccattaaaccatctcaagatgatatttgagattcacaataagtgaggcacttgaaacattggattggaaaatactttcacattttctctttacaattaagtgatgctggtattttctaactcccatgatgagactgagttttatctactgaaaactaaaagaaaaattaataatattataaagtctttctaataaaatgcttgatggattgatataccatcaacattgtatattatgagatatatatattttaaaactaaaaaatcaccttcaatgaacaaagcaaaacttgcagctgtgatgggtcgcggcacgagg

SEQ ID NO: 370306 - DNA, 603 bp, Homo Sapiens
  misc_feature (16)..(16): n is a, c, g, or t
  misc_feature (42)..(42): n is a, c, g, or t
  misc_feature (292)..(367): n is a, c, g, or t
tcctatttacaagagnaactgagcagaaagtaggaactgctncagtcaccagctagtaacagcaggccagattcacatcagcagatttgcatcagatgaggggtagatgataaaaggtgaacacatggataactgatggatagaacacaaagagacaatttctagtctacccaactgaggatggagacctgggctgcattcaccttgggagcctttgtggctaccagccagcctgcctctcctgatgatttattttatctcaacacctgatgtttccatccaaagtcctgannnnnnnnnnnnnnnnnnnnnnnnnnnnnnnnnnnnnnnnnnnnnnnnnnnnnnnnnnnnnnnnnnnnnnnnnnnngtgccaggtatctctgactccagagttcttcccactgtatggcattccagcaacctcagggggctcatgctgtactgatttctcccagggttggggctggctaaagaaagacttcccaagattgaaaaggaaatatactgggaagagctgaactcagaaccgggaccactgctgcttcagtgcttccacttccgatctgatcagctttgggcaggtcacttcctctttctttcttc

SEQ ID NO: 370307 - DNA, 1156 bp, Homo Sapiens
gaggaagacgaacccgaggagcggagcggggacgagacgccgggatccgaggtgccgggtgacaaggccgccgaggaacagggagatgaccaggatagtgaaaagtcaaaaccagcaggctcagatggtgagcggcggggggtaaagagacagcgggatgagaaggatgaacatggccgagcttactatgaattccgagaggaggcttaccacagccgctcaaagtctccactgcctcctgaagaagaggcaaaagatgaggaggaggatcaaactcttgtgaacctggacacgtatacctcggatctgcattttcaagtgagcaaagaccgctatggagggcagccacttttctcagagaagttccccaccctttggtctggggcaaggagtacttacggagtgacaaagggaaaagtctgctttgaggcaaaggtaacccagaatctcccaatgaaagaaggctgcacagaggtctctctccttcgagttgggtggtctgttgatttttcccgtccacagcttggtgaagatgaattctcttacggtttcgatggacgaggactcaaggcagaaaatggacaatttgaggaattgggccagactttgggggagaatgatgttattggctgcttggctaattttgagactgaagaagtagaactttccttctccaagaatggagaagacctaggtgtggcattctggatcagcaaggattccctggcagaccgggcccttctaccccatgtcctctgcaaaaatggtgtggtagaattaaacttcggtcagaaggaggagcccttcttcccaccaccagaagagtttgtgttcattcatgctgtgcctgttgaggagcgtgtacgcactgcagtccctcccaagaccatagaggaatgtgaggtgattctgatggtgggactacccggatctggaaagacccagtgggcactgaaatatgcaaaagaaaaccctgagaaaagatacaatgtcctgggagctgagactgtgctcaatcaaatgaggatgaagggtctcgaggagccagagatggaccccaaaagccgagaccttttagttcagcaagcctcccagtgccttagtaagctggtcagattgcttccggaaaagaggaacttattctgatagtgaatgt

SEQ ID NO: 370308 - DNA, 1015 bp, Homo Sapiens
atacttgggattttccatgtttaatttttaaataatgttacatattttcataacacatgtcaattttgttaaagtcattttaaaattctagatgaccctttattcctttaaaaaattcttattgagttccaagcattggagaatgtaacaacgaataagacaagcaggggccctgctctcatagagcttatattctaatggaagctaaagctttctgttttaaataaggctcagaaagcacacactccatcttttaatagctagatgacattcgtacttttagaacagtacttctctgtaatccccaggcaacctggggattgggggagagacagagagtcatctggaagacctgaaactccaagccttacccagtggtatccgatgttgcctcacaaagtccaccagatccagggatcctccctcaccggagttgagaaatgttccatgcccgattctgtcaggaagcagatccaggagtatttgtgtttcctttttttggttcggaatctatgaaagaagcaatgctaacttcagaccggctgtatgagcgttctaaagagaggtaccaagaagtcttttgcttgtcctacagtagggactccactgaggtcaaggccaagaactgtaccctcagacagaaaggaagaactcctcggcaagttgtacagactccttggctactaaagggccacctcttctgtcaactgctataaaatacctaacatcaatgtccaagtctttcttggctggactgttttataccttcaagcatagattccacataagtctttttagacattccaggagaattttctcttctgggcgtgctccttagttccaggaacttgacgccgacatctgcaaattcttttatgacatcttttgtgaccattagaatatcttcagggctactaataagcggatgaatatttgacacctgcgaaaacattcttccaaagttcttttctttcccttgtcaatcacagtcatctgatcgtggattttaagatct

SEQ ID NO: 370309 - DNA, 715 bp, Homo Sapiens
  misc_feature (105)..(163): n is a, c, g, or t
  misc_feature (205)..(276): n is a, c, g, or t
ttcagtgggtctggggtctgattctctaaggcgctgccagttgatgctgttgctccttggcttgtggaccaccttgttgtttagcaaagctctagactaggaggnnnnnnnnnnnnnnnnnnnnnnnnnnnnnnnnnnnnnnnnnnnnnnnnnnnnnnnnnnntgctttcatttcatagtagagacaggtttttgccatgctggnnnnnnnnnnnnnnnnnnnnnnnnnnnnnnnnnnnnnnnnnnnnnnnnnnnnnnnnnnnnnnnnnnnnnnnngtgtgggggaaaaaccaatgaactaggaattatcagctagaggtggggagtaagaaaagcagatacgtgagtagtctgaaaaacataatctctataatcatttaatttttctttttggaaaatgtatgtatacatacacacagtttccataaaaaaacatagatagtaaagctgattaaaatcttcctgtcctattggtaccagcacatgaagcccttctacaaaattcctgacggactgggaataaaaattcctagtgacagcccactccttctcaggcaggtgtgattgtttgaaatctctcccaatattgagatgaaacctgcttccctgtaacttccctgtaattctgtgggtcccttgtagccacagagaaggcagcaatcagtaggggaagtgctataaaaatatactatcccggccaagcgtggtggctcat

SEQ ID NO: 370310 - DNA, 494 bp, Homo Sapiens
tttacaggccctgcactcctccccccagctatgcaggatctgcttcagctctgccactctcatcttccgcaggtcaactgatgccaagtccagtgttttttcatatttcagctcacagatctggctatccaacttcttcagcttctcacaaatcttcattgcaggcatatgcacactcattgggcgagtgacttcacttaggatctttgtggctgcgtcttttgtggctcctagataatagcacaggcggttttcttttcctttggtgtccaagcaaaaactgatcaattctttctctatagtgtccagcgaaaagttaactcctctgtctatcagtgacttgtagaatcggttcaagaattctttacatacttcacagtcggcccctggccgccccccggcctcctggccctgcgtcagcaccgggtgagagaccaaaagcccggcgcaaaaggccaccacagcaactgggctcaaagagaaaggcccccccc

SEQ ID NO: 370311 - DNA, 980 bp, Homo Sapiens; identical to SEQ ID NO: 264429

SEQ ID NO: 370312 - DNA, 685 bp, Homo Sapiens; identical to SEQ ID NO: 264430

SEQ ID NO: 370313 - DNA, 909 bp, Homo Sapiens
tccagcacaaggagctgatggccgctgacaggggacgcaggatattgggagtgtgtggcatgcatcctcatcatcaggaaactctaaaaaagaaccgagtggtgctagccaaacagctgttgttgagcgaattgttagaacatcttctggagaaggacatcatcaccttggaaatgagggagctcatccaggccaaagtgggcagtttcagccagaatgtggaactcctcaacttgctgcctaagaggggtccccaagcttttgatgccttctgtgaagcactgagggagaccaagcaaggccacctggaggatatgttgctcaccaccctttctgggcttcagcatgtactcccaccgttgagctgtgactacgacttgagtctcccttttccggtgtgtgagtcctgtcccctttacaagaagctccgcctgtcgacagatactgtggaacactccctagacaataaagatggtcctgtctgccttcaggtgaagccttgcactcctgaattttatcaaacacacttccagctggcatataggttgcagtctcggcctcgtggcctagcactggtgttgagcaatgtgcacttcactggagagaaagaactggaatttcgctctggaggggatgtggaccacagtactctagtcaccctcttcaagcttttgggctatgacgtccatgttctatgtgaccagactgcacaggaaatgcaagagaaactgcagaattttgcacagttacctgcacaccgagtcacggactcctgcatcgtggcactcctctcgcatggtgtggagggcgccatctatggtgtggatgggaaactgctccagctccaagaggtttttcagctctttgacagcgccgactgtcatctcagcggggatcctcatagagtag

SEQ ID NO: 370314 - DNA, 693 bp, Homo Sapiens; identical to SEQ ID NO: 264432

SEQ ID NO: 370315 - DNA, 524 bp, Homo Sapiens; identical to SEQ ID NO: 264433

SEQ ID NO: 370316 - DNA, 884 bp, Homo Sapiens; identical to SEQ ID NO: 264434

SEQ ID NO: 370317 - DNA, 308 bp, Homo Sapiens; identical to SEQ ID NO: 264435

SEQ ID NO: 370318 - DNA, 686 bp, Homo Sapiens; identical to SEQ ID NO: 264436

SEQ ID NO: 370319 - DNA, 333 bp, Homo Sapiens; identical to SEQ ID NO: 264437

SEQ ID NO: 370320 - DNA, 332 bp, Homo Sapiens; identical to SEQ ID NO: 264438

SEQ ID NO: 370321 - DNA, 641 bp, Homo Sapiens; identical to SEQ ID NO: 264439

SEQ ID NO: 370322 - DNA, 652 bp, Homo Sapiens; identical to SEQ ID NO: 264441

SEQ ID NO: 370323 - DNA, 671 bp, Homo Sapiens; identical to SEQ ID NO: 264442

SEQ ID NO: 370324 - DNA, 846 bp, Homo Sapiens
gagggtggcacagcggtgtgccccggacgccagctcctggagctcaacgcagacctgatctccgctccatacttgggccttccccagccctgagcagaccacctctgcgtccagccgcaggtcgcacccgctgcggaagttgttgtccagtctgcagctgcggatggtgggctcggtacccctgcaggccaggtacttcctgacgacgcccacgtcccggcggggggcctggagcacagggccgcaccccagctcccggcagaacaccatggcctcctccacatgcaggacacagaggcggtccaccccattcacgtttctgatctcggggagtcccgcgcagggactgcggcccttcaccagccggagctcccggaaagtgccgttggagcacagcgcgaccaccacccatgcgtgggggcacgggctctggcaccatgagccaaggctgcactcccagagggaggactcgttgccccggcaggacacgttgtgaagccagggcttggccatctctccaggcagcgggacatacttgggggcgcccacggcagggccgcagcccagctgcctgcacacgacagaggcctctgccagcgtccactcctggttgcacacgtatccccatgccccgtggtgtcggaccaacaccactccgtcgcacgtgctgtgtctgtacgccagcctcagagcacctggtccaccaatggggactgcccagagattcagaagaaggggcccgagtcccagggtccagagagctgccctcatggtcccacagccctctgggcttcagcaagctctcgctgcttagctggggcaatggcggaggtcacatcccccgct

SEQ ID NO: 370325 - DNA, 562 bp, Homo Sapiens; identical to SEQ ID NO: 264446

SEQ ID NO: 370326 - DNA, 395 bp, Homo Sapiens; identical to SEQ ID NO: 264447

SEQ ID NO: 370327 - DNA, 294 bp, Homo Sapiens; identical to SEQ ID NO: 264449

SEQ ID NO: 370328 - DNA, 322 bp, Homo Sapiens; identical to SEQ ID NO: 264450

SEQ ID NO: 370329 - DNA, 718 bp, Homo Sapiens; identical to SEQ ID NO: 264451

SEQ ID NO: 370330 - DNA, 272 bp, Homo Sapiens; identical to SEQ ID NO: 264452

SEQ ID NO: 370331 - DNA, 1069 bp, Homo Sapiens
gtagcgaggcctgggtggcgaattcggcacgaggccctcctgagcctaccaaggtgactgtgcagagcctcagcccggccaaggaggtggtcagctcccctgggagcagtcccctgaagctctcccaggtcctgagggtaccactcttcgacagggtccccctcagaaaccctacagcttcctggaggagaaagccaggggccgctttggtgttgtgcgagcgtgccgggagaatgccacggggcgaacgttcgtggccaagatcgtgccctatgctgccgagggcaagcggcgggtcctgcaggagtacgaggtgctgcggaccctgcaccacgagcggatcatgtccctgcacgaggcctacatcacccctcggtacctcgtgctcattgctgagagctgtggcaaccgggaactcctctgtgggctcagtgacaggttccggtattctgaggatgacgtggccacttacatggtgcagctgctacaaggcctggactacctccacggccaccacgtgctccacctagacatcaagccagacaacctgctgctggcccctgacaatgccctcaagattgtggactttggcagtgcccagccctacaacccccaggcccttaggccccttggccaccgcacgggcacgctggagttcatggctccggagatggtgaagggagaacccatcggctctgccacggacatctggggagcgggtgtgctcacttacattatgctcagtggacgctccccgttctatgagccagacccccaggaaacggaggctcggattgtggggggccgctttgatgccttccagctgtaccccaatacatcccagagcgccaccctcttcttgcgaaaggttctctctgtacatccctggagccggccctccctgcaggactgcctggcccacccatggttgcaggacgcctacctgatgaagctgcgccgccagacgctcaccttcaccaccaaccggctcaaggagttcctgggcgagcagcggcggcgccgggctgaggctgccacccgccacaaggtgctgctgcgctcctaccct

SEQ ID NO: 370332 - DNA, 708 bp, Homo Sapiens; identical to SEQ ID NO: 264455

SEQ ID NO: 370333 - DNA, 656 bp, Homo Sapiens; identical to SEQ ID NO: 264457

SEQ ID NO: 370334 - DNA, 453 bp, Homo Sapiens; identical to SEQ ID NO: 264458

SEQ ID NO: 370335 - DNA, 531 bp, Homo Sapiens; identical to SEQ ID NO: 264460

SEQ ID NO: 370336 - DNA, 604 bp, Homo Sapiens; identical to SEQ ID NO: 264461

SEQ ID NO: 370337 - DNA, 596 bp, Homo Sapiens; identical to SEQ ID NO: 264462

SEQ ID NO: 370338 - DNA, 618 bp, Homo Sapiens; identical to SEQ ID NO: 264463

SEQ ID NO: 370339 - DNA, 1067 bp, Homo Sapiens; identical to SEQ ID NO: 264466

SEQ ID NO: 370340 - DNA, 385 bp, Homo Sapiens; identical to SEQ ID NO: 264467

SEQ ID NO: 370341 - DNA, 382 bp, Homo Sapiens; identical to SEQ ID NO: 264468

SEQ ID NO: 370342 - DNA, 677 bp, Homo Sapiens; identical to SEQ ID NO: 264470
  misc_feature (492)..(492): n is a, c, g, or t

SEQ ID NO: 370343 - DNA, 458 bp, Homo Sapiens; identical to SEQ ID NO: 264472

SEQ ID NO: 370344 - DNA, 833 bp, Homo Sapiens; identical to SEQ ID NO: 264474

SEQ ID NO: 370345 - DNA, 511 bp, Homo Sapiens; identical to SEQ ID NO: 264475

SEQ ID NO: 370346 - DNA, 372 bp, Homo Sapiens; identical to SEQ ID NO: 264476

SEQ ID NO: 370347 - DNA, 444 bp, Homo Sapiens; identical to SEQ ID NO: 264477

SEQ ID NO: 370348 - DNA, 949 bp, Homo Sapiens; identical to SEQ ID NO: 264478
  misc_feature (768)..(768): n is a, c, g, or t
  misc_feature (809)..(826): n is a, c, g, or t

SEQ ID NO: 370349 - DNA, 641 bp, Homo Sapiens
  misc_feature (24)..(24): n is a, c, g, or t
  misc_feature (517)..(517): n is a, c, g, or t
  misc_feature (577)..(577): n is a, c, g, or t
  misc_feature (582)..(582): n is a, c, g, or t
  misc_feature (616)..(616): n is a, c, g, or t
catctacggagcccagcaggcgtngccagggcaatggggagtctttatcacactgactgcttcacctgcgactcgtgtgggagacgactccgtgggaaggcgttctacaacgtggggtgagaaagtgtactgccaggaggacttcctgtactccgggttccagcagacggccgacaaatgcagcgtgtgtggacatctcatcatggaaatgatcctgcaggccctgggcaagtcctaccacccaggctgcttccggtgctccgtgtgcaatgagtgcctggacggggttcccttcaccgtggacgtggagaacaacatctactgcgtgcgagactatcacacggtttttgcaccaaaatgcgcctcctgtgcccgtcctatcctccctgcacagggctgcgagacaaccatccgtgtggtgtccatggacagagactaccacgtggcatgttaccactgtgaggactgcgggctgcagctgagcggtggaggagggacgccgttgctatcccctggncgggccacctaactgtgtcgtcgttgccacctgcggcgccttccaacctggggcctgttnccctnacccactgttgcacgttcaattgagctcttgagncaggggaaaacccgttccctggggc

SEQ ID NO: 370350 - DNA, 329 bp, Homo Sapiens; identical to SEQ ID NO: 264480

SEQ ID NO: 370351 - DNA, 941 bp, Homo Sapiens; identical to SEQ ID NO: 264482

SEQ ID NO: 370352 - DNA, 764 bp, Homo Sapiens
gggccaacgggaaatcccagtaggaggaactctgtgatggatgttatattgtcccccatatcctgtaacactccagaaggtccaactcctctcttggcatggccaaggctgagatccaccgaagcttttcactttgagtctccgtgcggaagaggaactcggcctgggcgccctgagtgttctgccgcagaaagagtcggaacaggtttttgtgaggtccatgtagcttcatttcacacttttccccccgaatggaggagaagggagcatggtcaaataccaggaatcggctaccctctcggggccgagacagcagcagacagtcattgaagaggtgcaggtggactggacgcgtgttcagcttccttcgtagccctggggaagcactgaactccaaggctgtcagctccccacttttcaccagccagcgtgactgagaaatgagcgggaatattttgcactcaaactcaatcttctggctcaggtagattagctcctctgtccgtcgcatactctggacattgttattgcagtcccggatcagctgctccagggcgtggtgtgccttcgtggcctctgcctcctccgaggagccaggctgtgttctcttcagaatgttctggagcagcagtattgaggcgggtgatgcgttggaagggcagaatcagaaaggacttgagggaaaggcgctggcagacggggtcgctctccagcttctccaagacctcccggaaattgctgttgctattcatcaggctctggag

SEQ ID NO: 370353 - DNA, 594 bp, Homo Sapiens; identical to SEQ ID NO: 264485

SEQ ID NO: 370354 - DNA, 430 bp, Homo Sapiens; identical to SEQ ID NO: 264486

SEQ ID NO: 370355 - DNA, 557 bp, Homo Sapiens
ctccgtgattgatacattctcgaaaatgacttaatttggtcattaccttctccttgaacagatgaatgacatgctcaacaatctctcggtttcgattctggcccagggcatacaggtatttctccagaagaggaacatttttcagattccagatgaagttctcccgatgaagactacttaactttgggtgatggaatctctgcagtgtcttatccaatttggcagctagttttccaatttcatacaatagctgggggctgacgggaagctcagcgatgggtcttcctgggaggtaagtcagcagcctcaccaagtagcttttgatttcagagccactatctacagacacgagagaagctgtgttgtctcctttagtgtgacacacagaggctgttggaaatccagcggctttcagaaacatgatgatgtgattctgcacttcaatcaggtctggatttttgctagccttggtgttgcttattttgaggacatattcagttgggccatctttggtttttgaaacgtagacatgaaagttttggtcatcatagctagga

SEQ ID NO: 370356 - DNA, 601 bp, Homo Sapiens; identical to SEQ ID NO: 264488

SEQ ID NO: 370357 - DNA, 750 bp, Homo Sapiens; identical to SEQ ID NO: 264490

SEQ ID NO: 370358 - DNA, 410 bp, Homo Sapiens; identical to SEQ ID NO: 264493

SEQ ID NO: 370359 - DNA, 730 bp, Homo Sapiens; identical to SEQ ID NO: 264494

SEQ ID NO: 370360 - DNA, 607 bp, Homo Sapiens; identical to SEQ ID NO: 264495

SEQ ID NO: 370361 - DNA, 400 bp, Homo Sapiens; identical to SEQ ID NO: 264496

SEQ ID NO: 370362 - DNA, 453 bp, Homo Sapiens
aggtacgcaaaagggctggggaggttactcaagccatcactggcttcccccggtacagattgttcttcaaaatgttgagatgtcatagaagcattcaggtcactgcttccacatagcttctctggctcttctggtgcatcccctccaagggaagttttctgaagatcaaagatgccgttgctggacacccgtctccgctcagcaggagaggcataggcctcctctgagtctgtttccaccacatggaggtgactggcttcttcctggctccaatccaattcttcttcagactgtttcaaggagctactgctgctcttgggaaagatccctgcagtggacagactgctgggcaccgaggtgtaggaagactgtggcccggagtaaggccggccctctggggccaaggcctcagcctccaggagatcaggcacagagaggctgagacggcggtcc

SEQ ID NO: 370363 - DNA, 769 bp, Homo Sapiens
tgcggttatagtttagactggtcactggtagaaaccgtttctgaattacaaatggagagaatctttgaagaccatgaaaacttggttgaaaatcttcttaattggacaagagatagccaaaacaagcttatatttatggagcgtatagaaaaatatgcacttttcaaaaacccacagaattatcttttggggaaaaaagaaacagctgagatggcagatagaaacaaagaagtcctcttggaggaatgtttttgtggaagttctgtaactgtaccagaaattgaaggagtcctttggttgaaggatgatggcaagaagtcctggaaaaagcgttattttctcttgcgagcatctggtatctactatgttcccaaaggaaaagcaaaggtctctcgggatctggtgtgctttctccagctggatcatgtcaacgtttattatggccaggactatcggaacaaatacaaagcacctacagactattgtctggtgctgaagcatccacaaatccagaagaaatctcaatatatcaaatacctttgttgtgatgatgtgaggacactgcatcagtgggtcaatgggatccgcattgcaaagtatgggaagcagctctatatgaactaccaagaagccttgaagaggacagagtcagcctatgattggacttccttatccagctccagcattaaatcgggatccagttcttccagcatcccagagtctcagtcaaaccactccaatcagtctgatagcggagtttctgacaccc

SEQ ID NO: 370364 - DNA, 707 bp, Homo Sapiens; identical to SEQ ID NO: 264498

SEQ ID NO: 370365 - DNA, 562 bp, Homo Sapiens; identical to SEQ ID NO: 264499

SEQ ID NO: 370366 - DNA, 764 bp, Homo Sapiens; identical to SEQ ID NO: 264500

SEQ ID NO: 370367 - DNA, 733 bp, Homo Sapiens; identical to SEQ ID NO: 264501

SEQ ID NO: 370368 - DNA, 724 bp, Homo Sapiens; identical to SEQ ID NO: 264503

SEQ ID NO: 370369 - DNA, 306 bp, Homo Sapiens; identical to SEQ ID NO: 264504

SEQ ID NO: 370370 - DNA, 620 bp, Homo Sapiens; identical to SEQ ID NO: 264505

SEQ ID NO: 370371 - DNA, 488 bp, Homo Sapiens
accactgagtcatctacaattaatgtggttccctcttagttactttgtaggtatgtgtggtgatggagccaatgactgtgggggaaggacgtgcagctctcgttacctccttttgcatgtttaagtacatggctctgtacagcatgattcagtatgttggtgttctgctgctctactgggagacaaacagcctttcaaattaccagtttctgttccaggatctggccattacaactcttattggtgtaacaatgaatctgaatggtgcctaccctaagctggtgcctttcagacctgcaggacggctgatctctccacctctgctactctctgtgattttcaacattcttctcagcctggccatgcatattgcaggcttcatccaagttcagaggcagccttggtattccgtggagatacacagtgcctgcacagtacaaaatgaaagcatctcagagttaaccatgtctccaactgctccagaaaaa

SEQ ID NO: 370372 - DNA, 748 bp, Homo Sapiens
aggaatggcgtcagcttcagactcaagcaaaactggttttagaggaaaacaagttgttgctggagcagttggagattcagcaaaggaaagccaaggacagccaccaggagcgcctccaagaagtttctaagctgactaaacaactaatgctcctggaggcaaaaacccacggccaggaaaaggagctggcggagaacagggaacagctggagattttacgtgccaaatgccaagaactcaaaacacactcggatggcaaaatcgcagtggaagttcataaatcaattgtgaatgaattaaaaagccaattacagaaggaagaagagaaagaaagggctgagatggaggagttgatggagaagctgacagtcctgcaagcgcagaagaagagcctgctgttagagaagaacagtttgacagagcaaaacaaagcactggaagccgaacttgaacgagcacagaaaatcaataggaaatctcaaaagaaaattgaggtcctcaaaaagcaggtggaaaaagccatggggaacgaaatgtctgctcatcagtacctggcaaaccttgttggcctggcagaaaatataacccaggaacgtgacagtcttatgtgtttggcaaaatgtttagaaagtgagaaggatggagtgcttaataaagtcataaaaagcaacattcgcctgggaaagttagaggaaaaagtcaagggctacaagaagcaggcagcactgaagctgggagacatcagtca

SEQ ID NO: 370373 - DNA, 1039 bp, Homo Sapiens
  misc_feature (81)..(81): n is a, c, g, or t
  misc_feature (1000)..(1001): n is a, c, g, or t
  misc_feature (1005)..(1005): n is a, c, g, or t
atccccctttccatcctggttccaactcctcgttccggcagtacacaaaacctctgagagtaccatgtaatccagatcccnatttgcttactcctcttccaactgagttagtagtatacaggtaaagaccatctgccgtgagacagcgtcccaagtcagcatctttattttcagaactggagccagtgttgctatccggcgcaggcaacatgtcttcataaccccatgatactatgtgtttgcccctaagcaaacaggagggagatccaggccccccttccaaaagcaacagcctatatagcacatcagctacaggcagggaccctagatccgtctgtttctgtaatagatggactgtgtggacgaaagttttcaatgatcccctggcacaagccaaagccaccagggcagcagcagcattttctttttgcttatgtgggatgtgtcggcctgtgtcagaagtctcctctagccaagagcacagcaaagtttcaattccattgagacagtcagcaggctccttggtcaagctcaaaggctggcagtcacgaaggcagttcaatagcacctcagcagttatgttacagagagaggggtctgttctactctgggactgaataagggggaagaccagcaggagccccatcctcgatgtgaagggcgcttgctcaggttgctgcaacaagccctggcgtttgagcagggccaaagtttcctcatcacctgaactttccctttcatgctgttcttctaaggccagctggcgctgggcattccacagtcctcgcaaggcattcaggcggtattccagcagccgggcataggcattgctctgattcccacaaacagagcgcaaacgttctgctaattccgacgggttcttggtctcaaaggttaaaatctccaggtcggtgtccgcggcctctggggccccgaggatctcgctgggcagctcggccaggtcggtgacccggatcagcccgtcgtgcaggaagatganncaantccttcaccgagagaccagctgcgccgagtacag

SEQ ID NO: 370374 - DNA, 536 bp, Homo Sapiens; identical to SEQ ID NO: 264509

SEQ ID NO: 370375 - DNA, 737 bp, Homo Sapiens; identical to SEQ ID NO: 264510

SEQ ID NO: 370376 - DNA, 691 bp, Homo Sapiens; identical to SEQ ID NO: 264512

SEQ ID NO: 370377 - DNA, 725 bp, Homo Sapiens; identical to SEQ ID NO: 264513

SEQ ID NO: 370378 - DNA, 906 bp, Homo Sapiens
  misc_feature (698)..(698): n is a, c, g, or t
  misc_feature (900)..(900): n is a, c, g, or t
aaagaaacaaaacccgagctaactttggctcccggccgtttgcctacgcggaagggcaggcccaccgcaatgctgctgactgtgcactgacctagcagaagagatcagcgctaactttgaggccctgcctttcgccatggcatctgacagtgacaatgatgctggcaccagtattgcatcagacccaggcactcatgggccaccatgccggattgctgccgtggccaccgctcagcaacaatatgatagtgacacctcctgtcattataaagtcgagctcagctatgagaatttcatcacctctggcccagaccctcacccgcctcccattgcagatgatgaaagcgatgatgatgacgatgatgacatccctcaggaggaccactacgccctgctggtgaaagcatgggagaccaaggtttttcctaccatccgaagacgcttccgcaatgaagcagagcggaaatcgggcctggaccagataaagggggccttacaactaggtatggtggatattgcccgacagacggttgaatttctctacgaaagagaatggtggcatcccaagagaactttatcttcccaccattggaagacattaaagacgaagcaaacaagttcacaattgataaagttcgaaaaaaggtctcacagttagtaacccgctctccagacagcaattaatatagccagcaatngctgttggaacttgctctgccaaaattttggccatccgaagggatgctgaaaacctttgggcttcatggagtcgtcttagatgttgattcagtgaatgaactggtgcaggtagaaacgtacctccgcagtgaaggtgtgctggtgcgatacttggtatcctatttgacatgttgggaaagggcccccagcaggctaccgaanggactt

SEQ ID NO: 370379 - DNA, 578 bp, Homo Sapiens; identical to SEQ ID NO: 264515

SEQ ID NO: 370380 - DNA, 746 bp, Homo Sapiens; identical to SEQ ID NO: 264516

SEQ ID NO: 370381 - DNA, 428 bp, Homo Sapiens
tcctaccttccaaacaggttacactcctggcacaccttacaaagtgtcctgttcccccaccagcggggctgtgccaccgtactcctcctccccgaacccctaccagactgccgtgtaccctgtgcgaagtgcctacccccagcagagcccgtatgcacagcaaggcacgtactacacacagccgctgtatgcagcacctcctcacgtcatccaccacaccacggtggtgcagcccaacggcatgcctgcaacggtgtaccctgctcccatcccccctcctagaggcaacggggtcaccatgggcatggtggctgggaccaccatggccatgtcagcaggtaccctgctgactgctcactccccaactcctgtcgccccccacccggtcactgtgcccacgtaccgggccccaggaacgcccacttaca

SEQ ID NO: 370382 - DNA, 728 bp, Homo Sapiens; identical to SEQ ID NO: 264518

SEQ ID NO: 370383 - DNA, 460 bp, Homo Sapiens; identical to SEQ ID NO: 264519

SEQ ID NO: 370384 - DNA, 438 bp, Homo Sapiens; identical to SEQ ID NO: 264520

SEQ ID NO: 370385 - DNA, 550 bp, Homo Sapiens; identical to SEQ ID NO: 264521

SEQ ID NO: 370386 - DNA, 324 bp, Homo Sapiens; identical to SEQ ID NO: 264522

SEQ ID NO: 370387 - DNA, 604 bp, Homo Sapiens; identical to SEQ ID NO: 264523

SEQ ID NO: 370388 - DNA, 367 bp, Homo Sapiens; identical to SEQ ID NO: 264524

SEQ ID NO: 370389 - DNA, 749 bp, Homo Sapiens; identical to SEQ ID NO: 264525

SEQ ID NO: 370390 - DNA, 1231 bp, Homo Sapiens; identical to SEQ ID NO: 264526

SEQ ID NO: 370391 - DNA, 687 bp, Homo Sapiens; identical to SEQ ID NO: 251757
  misc_feature (360)..(397): n is a, c, g, or t

SEQ ID NO: 370392 - DNA, 267 bp, Homo Sapiens; identical to SEQ ID NO: 264527

SEQ ID NO: 370393 - DNA, 437 bp, Homo Sapiens; identical to SEQ ID NO: 264528

SEQ ID NO: 370394 - DNA, 407 bp, Homo Sapiens; identical to SEQ ID NO: 264530
  misc_feature (321)..(321): n is a, c, g, or t

SEQ ID NO: 370395 - DNA, 608 bp, Homo Sapiens; identical to SEQ ID NO: 264531

SEQ ID NO: 370396 - DNA, 746 bp, Homo Sapiens; identical to SEQ ID NO: 264532

SEQ ID NO: 370397 - DNA, 396 bp, Homo Sapiens
tggtctccacgcggatgtagcgagagtctggggaacctgctgtgccatctgggggggcgatcttcatggggtacgggggcacatgggcagtgtcgggacccccatctttgcaggggcaggtgaacgggatgcgctcctggctgcaggcaaacttgatgaacttgcacagctcctcctgggtgaacatctccagggccccccagaagaactcgatgtgctggtccgtctccatcagccccacttggtacatggtatgggccttgaggaactcgaggttgatgtaggggaggccgcaggtgcgcagctccatctccagtgggctgagcatggtcagcagctgcagggggatgatggagcccaggccggcccgcacggccgtcacgcactccacattca

SEQ ID NO: 370398 - DNA, 510 bp, Homo Sapiens; identical to SEQ ID NO: 264534

SEQ ID NO: 370399 - DNA, 737 bp, Homo Sapiens; identical to SEQ ID NO: 264535

SEQ ID NO: 370400 - DNA, 551 bp, Homo Sapiens; identical to SEQ ID NO: 264537

SEQ ID NO: 370401 - DNA, 765 bp, Homo Sapiens; identical to SEQ ID NO: 264538

SEQ ID NO: 370402 - DNA, 743 bp, Homo Sapiens; identical to SEQ ID NO: 251226

SEQ ID NO: 370403 - DNA, 363 bp, Homo Sapiens
ccacatgggtgtaatcggtgcatcagaaatagccttcttcatcctttaattaaaacaggaatggacttgaggaaaccaaagaatttttaacacactcaatcattatgtccagtggaaaaatgtgagatgtctgttttgatgctttcacgtgtggggggactttacaatcttggcaaagaacccttccgcacagtagcccatacatccctgagttggttgtagtaagtatacaaaaaagttcccacagtttcttacagacactgggatttgaaagagacagcagtcttttgtagtgctgaacaaaaactgccatgttgcacaagctgtcaattgcttgatctccccaggagatggcagtgtttc

SEQ ID NO: 370404 - DNA, 376 bp, Homo Sapiens; identical to SEQ ID NO: 264539

SEQ ID NO: 370405 - DNA, 832 bp, Homo Sapiens
gctgtggcacagctgatcccacttctccaggtgggctctggcagaggccaagctcgggcagggcaggccccatggggagcggggaggaatggtcacctctgctcaggtctcgccagcacgtttcccgggggacacagcagccagagagccagaaggtggccggtgccgaggtggccgtcagctggccggaggtggaagaggccctggatactcctgcagcgtctgggcaaaccatggatcgtgctactggtggcctcttggcaggagctgagtcggcacgtgtgcgccgttaccaaggctctcgcccagtatcccctcaagcagtaccgggaatcccaggccttctccttctgcacagcagggcgctgggcagccggcgagccagtggcaagagacggcgcagggctgcaggcggcctggcggaggcagatcaggcagttcagtcgggtcagcccagccgtggctgatgcagttgtcacagccttcccctccccccgccttctgcagcaggcgctggaggcctgcagcacggagcgggagcgcatgggcctcctggccgaccttcctgtgccgcccagtgaaggcgggcgtccccgcagggtggggcctgacctctcccgccgcatctgcctcttcctgaaaagacctccaggtgctgaagccccggccccacgcgccctctcatgcctttgcctgctcctaggcgctggaggcgtgcagcagagatcttttttcgcatgtgcctcctggtcaaccttcctgtgccgcccagtgaaggcgggcctccccttagggtggggcctgacctctcccgccgcatctgcctcttcct

SEQ ID NO: 370406 - DNA, 346 bp, Homo Sapiens
ccgccaatctgctgagttggacaaccggctcttcaaacaggactttggagacaagatcaacagtctgcagctggaagtcgaggagctcaccaggcagcggaaccagcttgagttagaactaaaacaggaaaaagaaagaagattacaaaacgacaggagcatcccaggaaggggttcccagaagtcagaatccaagatggatgggaagcacaaaatgcaagaggaaaatgttaaactaaaaaagcccctggaagaaagccacaggctgcaaccccaccctatggatgaacaggatcagctgctgctctctgaaaagccacagttgtgtcagctatgccaggaagac

SEQ ID NO: 370407 - DNA, 373 bp, Homo Sapiens; identical to SEQ ID NO: 264545

SEQ ID NO: 370408 - DNA, 545 bp, Homo Sapiens; identical to SEQ ID NO: 264547

SEQ ID NO: 370409 - DNA, 715 bp, Homo Sapiens; identical to SEQ ID NO: 264549

SEQ ID NO: 370410 - DNA, 400 bp, Homo Sapiens; identical to SEQ ID NO: 264550

SEQ ID NO: 370411 - DNA, 662 bp, Homo Sapiens
ccttctggccgcatctacaagctcctgatcccccacttccgctacaccatggcgatcaacacgctggcccagagtagtcttgtctccgaatggggaatttttgacctggtggtgagcactggtagtggaagccacgtggacattcttcagagagccatggcttgtttgacctatcattccctctgtcctcctgatgacctggctgaccgtgggctcctggatgtgaaatcttctttttatggctaagatgccatcaggctgtggggaatcatcagccgggaataggtacgtggaggggatggttgggcttttctacaatagtgaccaagccatgaaggatgatctagagctgcaggcctggtgcagagagatgactgagactggactgcagagggcccaagaccaggggttcctcatctccttagagtcccgggctcagctctgccactttgtcaccatgtgcatcttcacatgcacaggtcagcatgcttctaaccacctgggccagctggactggtactcctggatccctaatggcccatgcaccatgcagaagcccccgcccatatctaaggatgtgacagagaaggatatagtggacttactgcccaatctccaccaggcacgtatgcaaaagaccttaacaaagttccttggcagac

SEQ ID NO: 370412 - DNA, 593 bp, Homo Sapiens; identical to SEQ ID NO: 264552

SEQ ID NO: 370413 - DNA, 734 bp, Homo Sapiens; identical to SEQ ID NO: 264553

SEQ ID NO: 370414 - DNA, 668 bp, Homo Sapiens; identical to SEQ ID NO: 264557

SEQ ID NO: 370415 - DNA, 874 bp, Homo Sapiens; identical to SEQ ID NO: 260515

SEQ ID NO: 370416 - DNA, 861 bp, Homo Sapiens; identical to SEQ ID NO: 264560

SEQ ID NO: 370417 - DNA, 1026 bp, Homo Sapiens
cttcaaggtgcccaaggagatgttcacagtgggctgctgtgtctttgcattcctcgtggggctgttgttcgtccagcgctccggaaactactttgtcaccatgttcgatgactactcagccaccctgccactcactctcatcgtcatccttgagaacatcgctgtggcctggatttatggaaccaagaagttcatgcaggagctgacggagatgctgggcttccgcccctaccgcttctatttctacatgtggaagttcgtgtctccactatgcatggctgtgctcaccacagccagcatcatccagctgggggtcacgcccccgggctacagcgcctggatcaaggaggaggctgccgagcgctacctgtatttccccaactgggccatggcactcctgatcaccctcatcgtcgtggcgacgctgcccatccctgtggtgttcgtcctgcggcacttccacctgctctctgatggctccaacaccctctccgtgtcctacaagaagggccgcatgatgaaggacatctccaacctggaggagaacgatgagacccgcttcatcctcagcaaggtgcccagtgaggcaccttcccccatgcccactcaccgttcctatctggggcccggcagcacatcacccctggagaccagcggtaaccccaatggacgctatgggagcggctacctgctggccagcacccctgagtcggagctgtgaccactgcccaagccctgcccgcctctccccccacgctcaacctgcccacttgtccaggcctggcctctttcttgaggtggccaccaggcccaggccaggccctttgcccaagaagagagggtctgccctgcctcactcccctcttcagtcccagtagactctgctccctagccctgagcaggaggctgggagcagctctgtttcctaattcaggaccccactcatctagccctccaagagcctccgccaaattgtagccatgtaattggaacaacccataagtcctgcttcccagtccatgtgga

SEQ ID NO: 370418 - DNA, 538 bp, Homo Sapiens; identical to SEQ ID NO: 264563

SEQ ID NO: 370419 - DNA, 609 bp, Homo Sapiens
tctcaacatcttcctctcgggcatcgccaactcagagagagcagaccacctgaagaagcgcatctccaacatcaaccgctacctgacctacagcctctacagcaacgtctgccgcagcctctttgagaagcacaagctgatgtttgccttcctgctgtgtgttcgcatcatgatgaacgagggcaaaatcaaccagagtgagtggcgatacctcctgtctgggggctccatctcgatcatgactgagaatccggcaccggactggctgtcagaccgggcttggcgagacatcctagcactctcgaacctgccaaccttttcctccttctcttccgacttcgtgaagcacctctcagaattccgggtcatcttcgacagccttgagccccaccgggagcctttgcctggcatctgggaccagtacctagaccagttccagaagctgctagtcctccgctgcctgcgtggggacaaggttaccaacgccatgcaggactttgtggccaccaacctggagccacgcttcattgaaccccatacagccaacctgtcagtggtgttcaaagactccaactccaccacacccctcatctttgtgctgtcacccgg

SEQ ID NO: 370420 - DNA, 665 bp, Homo Sapiens; identical to SEQ ID NO: 264566

SEQ ID NO: 370421 - DNA, 548 bp, Homo Sapiens; identical to SEQ ID NO: 264567

SEQ ID NO: 370422 - DNA, 727 bp, Homo Sapiens; identical to SEQ ID NO: 264568

SEQ ID NO: 370423 - DNA, 372 bp, Homo Sapiens; identical to SEQ ID NO: 264569

SEQ ID NO: 370424 - DNA, 564 bp, Homo Sapiens; identical to SEQ ID NO: 264570
  misc_feature (474)..(474): n is a, c, g, or t

SEQ ID NO: 370425 - DNA, 624 bp, Homo Sapiens; identical to SEQ ID NO: 264571

SEQ ID NO: 370426 - DNA, 436 bp, Homo Sapiens; identical to SEQ ID NO: 264574

SEQ ID NO: 370427 - DNA, 629 bp, Homo Sapiens; identical to SEQ ID NO: 264575

SEQ ID NO: 370428 - DNA, 834 bp, Homo Sapiens; identical to SEQ ID NO: 264576

SEQ ID NO: 370429 - DNA, 428 bp, Homo Sapiens; identical to SEQ ID NO: 264577

SEQ ID NO: 370430 - DNA, 649 bp, Homo Sapiens; identical to SEQ ID NO: 264580

SEQ ID NO: 370431 - DNA, 870 bp, Homo Sapiens
ctattcccatgtgctcagctttctgagcctctgcgcatctgaacttctacaggctgctctttgtaaatctggttatctgtaagttggtaccaagagtgaatgaggcccaggggttgaagaatatggcaagtggtgatggaggaagggaaaaattaaagaagacttgaagtggacaaagcggcctggtagtgggaacagaggtcaggggtccaggagtgacagtacaaggaagctgcttctcttcaactgggatgtggaaggctctggccaggtccagccctaacaccactgatctggaacaaggtagatggtcaggaccaagtaggagtggggcagctttggcccctccaaggatttgccaccccagtcttccagcatttacaggttgtgctccagcagattataccccaaggtctgttctggaaggatgacatcacccaggatgcaatgatccaaaagatggagcatgccagcagactgcatccccaagaaccatgcctgaaggatgggaaggcacttttccccactaaaaccactgagagccccctggccaaggtgaacagggatcagtgcattacctccgaagtggtttctaaggccctgaaacaagaggtggccaaccctgtcaagattacctataggtgttcatatggggggctggacatgatgcaggcgccgggaccctctaaggaagaaattatctataagatcatgcggcttctctgggccacttcctactgtgggccgcaaccctgtggctgattgagacctcatgtgaagcctccctgccccagcacccttcccattgcccttcagaggagcagttcttggatgacccagatttgaatcattaaagtagactctaatgca

SEQ ID NO: 370432 - DNA, 609 bp, Homo Sapiens; identical to SEQ ID NO: 264583

SEQ ID NO: 370433 - DNA, 503 bp, Homo Sapiens; identical to SEQ ID NO: 264585

SEQ ID NO: 370434 - DNA, 647 bp, Homo Sapiens; identical to SEQ ID NO: 264586

SEQ ID NO: 370435 - DNA, 708 bp, Homo Sapiens; identical to SEQ ID NO: 264589

SEQ ID NO: 370436 - DNA, 1288 bp, Homo Sapiens
gttttgacaaccaacaaaactacaaagatctgacttctggtcttggagaaaatgcttgcgtaaagaaaagtcatgaaaagtaccttatagctttaaagagctctggacttacatatcctgaggataagcttgtatatggtgtgcaggagccatctgctggtactagttctctggctgttcaaggtttcataggcgcaacaggaactttgggacaagtggattcttcagatgaggatgatcaggatggtagtcaaggtctgggcaagagaaaaagggtaaaactaagcagtggcaccaaagatcaatccataatggatgttttgaagcataaaagcttcctagaagaactattattttggactataaaatatgaattccctcaaaagatggtaactttcttactcaacatgcttccagatcaagagtataaggttgcttttacaaaaacttttgttcagcattatgctttcattatgaaaacactgaagaaaagtcatgaatcagacacaatgtctaacagaattgtgcatattagtgttcagttgttcagcaatgaggagctagccagacaggtaacagaagaatgtcagctgctggatattatggtcactgtgctattatacatgatggaaagttgccttattaaaagtgagctacaagatgaagaaaatagtttacatgtggtagtgaactgtggagaagcattactgaagaataacacttactggcctcttgttagtgattttattaatattctttctcatcaaagtgtggccaagagatttttggaggatcacggtttgttagttacatggatgaactttgtatctttctttcaaggtatgaacttaaacaagcgagaactaaacgagcatgtggaatttgagtctcagacctactatgctgcctttgctgctgaacttgaggcctgtgcacagccaatgtgggggcttttatcacattgtaaagttagggaaactcaagagtatacccgaaatgttgttagatattgccttgaagctcttcaagactggtttgatgctattaacttcgtagacgagccagcacctaaccaagtcacttttcatctgccactacatcgttactatgctatgtttttgagtaaggctgtgaaatgtcaagaactagatttggattctgttttaccagatcaggaaatgttaatgaaactaatgattcacccactccaaattcaagcaagtcttgcagaaatccacagcaatatgtgggtaagaaatggtctgcaaatcaaaggacaagccatgac

SEQ ID NO: 370437 - DNA, 698 bp, Homo Sapiens; identical to SEQ ID NO: 264591

SEQ ID NO: 370438 - DNA, 372 bp, Homo Sapiens
  misc_feature (20)..(20): n is a, c, g, or t
  misc_feature (28)..(28): n is a, c, g, or t
  misc_feature (60)..(60): n is a, c, g, or t
accaagctgcatggatgccnaaaccgtnccctggtggaaaaaggccgcggtgcctgcggncccgctgtgcctggcctgcccaggcctgctgcatgctggccatcttcctgagcatgctggtctcctaaccgtgccgccggaacaaggcaaggaaggccccacatctcctacacacatgtccgacccatctcaactggaggcctgagactacctaagaccagaatttaggagaaattggttctaatcttgattctaaatctaactcactgtgtagcatgatgcaagtgatttctccgccttggacctgcttcctcatctgtaaaataagggcattgaacttgattcaataaatgctagttgagtatctactct

SEQ ID NO: 370439 - DNA, 819 bp, Homo Sapiens; identical to SEQ ID NO: 264592

SEQ ID NO: 370440 - DNA, 612 bp, Homo Sapiens; identical to SEQ ID NO: 264594
  misc_feature (351)..(360): n is a, c, g, or t

SEQ ID NO: 370441 - DNA, 223 bp, Homo Sapiens; identical to SEQ ID NO: 264595

SEQ ID NO: 370442 - DNA, 170 bp, Homo Sapiens; identical to SEQ ID NO: 264596

SEQ ID NO: 370443 - DNA, 304 bp, Homo Sapiens; identical to SEQ ID NO: 264597

SEQ ID NO: 370444 - DNA, 517 bp, Homo Sapiens; identical to SEQ ID NO: 264598

SEQ ID NO: 370445 - DNA, 762 bp, Homo Sapiens; identical to SEQ ID NO: 264599

SEQ ID NO: 370446 - DNA, 884 bp, Homo Sapiens
ctgccgtgcacctgcacggcctgacagcgctcccccgtgtagaagaaagcatgtccagagatgcacctgcagctcgccatccccttcacgttcacacagatgccgtcattttggcaagggtttgggtcacatgggtctctgaagtactgtggccagttatggtcctccagggggcctgtgttctccaccgaccgcttctgtcggctgggctgcccctggctcaggctgacaggtagggcttcctctaacatggcctttcccgaaccttcttcggagacctgctgctcctggccttggagaatgaggccttgggggctcagtcttttgcctttagagggaacttcagtctggctgaggtgggtgatatcttcaaagtccacaaatatgatgaggtcatcatttttcaggaaactcctccttttcagcatttggtgggaaatgaaaccactccagcccaagtcgatgcttctaaaacaattacagtctgtatgataggttcccaccctggacggcctgtcccagatgacagtgtcatttatcgctggagatgtgtgcgacttcgaggtagtgaacaccatgcttgaggacatcctgttccggacatcaggctcctggtcaaggatggtaattatcacctgtctgttttctaccggccactccaggatagcatcgttctccccactgcacacatgaaaagcaagtctcaagtaaccagagaaagctctgctatttgggtataaagttaccccaaaaccatatccctccgaattgtagaatcgagggctctgaagcttgtcccctttgctggtgttctcaaggacttgggagaaattccggactgtccagacccctgtggggcagggggtttctgtcagagtgatgtc

SEQ ID NO: 370447 - DNA, 939 bp, Homo Sapiens; identical to SEQ ID NO: 264601

SEQ ID NO: 370448 - DNA, 715 bp, Homo Sapiens; identical to SEQ ID NO: 264603

SEQ ID NO: 370449 - DNA, 962 bp, Homo Sapiens; identical to SEQ ID NO: 264604

SEQ ID NO: 370450 - DNA, 344 bp, Homo Sapiens; identical to SEQ ID NO: 264606

SEQ ID NO: 370451 - DNA, 766 bp, Homo Sapiens; identical to SEQ ID NO: 264609

SEQ ID NO: 370452 - DNA, 463 bp, Homo Sapiens; identical to SEQ ID NO: 264612

SEQ ID NO: 370453 - DNA, 715 bp, Homo Sapiens; identical to SEQ ID NO: 264613

SEQ ID NO: 370454 - DNA, 364 bp, Homo Sapiens; identical to SEQ ID NO: 264614

SEQ ID NO: 370455 - DNA, 1334 bp, Homo Sapiens; identical to SEQ ID NO: 264615

SEQ ID NO: 370456 - DNA, 726 bp, Homo Sapiens
tggcaagagaaaatcaagaaatctcattggaattggaagcagcagtgcaagaaaaagaagaaatgaagagcagagttcataaatacataacagaggtgtcacgatgggagagcttaatggctgccaaggaaaaagaaaatcaagatttgttagatagatttcagatgcttcataaccgtgctgaagactgggaggtcaaagcccatcaagctgagggagaaagcagctcagttcgactggaacttctttctattgacactgagaggagacatcttcgagaaagagtggagctattagaaaaagaaattcaagagcacataaatgcccatcatgcttatgaatctcagatctcatcaatggcaaaagccatgtctcgattagaagaagagctgagacatcaagaagatgagaaagcaacagtattaaatgacttgtcatctcttagagaactttgcattaaacttgattcaggcaaagatattatgacccagcaattgaattcgaaaaaccttgagtttgagagggttgtggtggaattagaaaatgtaaagtcagagtcagacctactgaaaaaacaactttcaaatgagagacatacagttaaaaacctcgaatcattgttggctacaaacagagataaagaatttcattctcacttaacctcccacgagaaggatacagaaatccagctacttaaggagaagttaaccctttctgaaagcaaat

SEQ ID NO: 370457 - DNA, 314 bp, Homo Sapiens; identical to SEQ ID NO: 264618

SEQ ID NO: 370458 - DNA, 428 bp, Homo Sapiens
  misc_feature (101)..(102): n is a, c, g, or t
tgatcttgttgtggtcattataaatctgatagatcctctcctctaatttctctgtcagatccgaaaccttggtcttcaggctgttcctgaagttggtcagnnatattattctccaatatggctgatctttgccattttctgggtgaactcttggagcttttcctggatgatcttgttgtggtcattataaatctgatagatcctctcctctaatttctctgtcagatccgaaaccttggtcttcaggctgttcctgaagttggtcatgagtgcatggtccttttgccggctcttgttgatgttttcgatcagctcctgggctctcttctgcaggatgtcaatgcttgagtccagagaggagaagtagagtcccgacttcccttccaggaccgtcagctggcaactggcactagctggccctccaccag

SEQ ID NO: 370459 - DNA, 603 bp, Homo Sapiens; identical to SEQ ID NO: 264620

SEQ ID NO: 370460 - DNA, 1199 bp, Homo Sapiens
  misc_feature (182)..(244): n is a, c, g, or t
ggaaaagtcacctaccaaaaaaacaagaagtccctgaggaaaaatacctgacgctggaaggatttcacaaatttgttattgaccgagccaggcaagatatccgtagcgtctggagggcgatcttgtcctgtggttacgatcttcactttgagaggtgcgcatgcatcgatgtccgacatgcnnnnnnnnnnnnnnnnnnnnnnnnnnnnnnnnnnnnnnnnnnnnnnnnnnnnnnnnnnnnnnngctatgccgccacctcgccatcacacccgcacggctccatccccatgaggtgtacctggaccccgcggatgctgctgaccccagagtggcctgtctcctgaacgtgcccatcgagagcctgcgcctgcgctgcgccttgctgcagtccctcaacaccacactggagaccttcttcctgcccctggtggagctgcgccagacacccatgtatacccacagcatcgccgccctgctgaaggaggccaaagggctgatcttctatgacacgaaggtgaccgtgatgaatcgagtgctgaatgccactgtgcagaggacagcggaccacgcggcccctgagatcaccttggacccactggaaattgtgggaggggaaatcagagcttctgaaaactcctacttctgtcaggctgccaggcagctggcctcagtgccgtcgtctcagctctgcgtcaagctggccagtggcggtgaccccacatatgccttcaacatccgcttcactggcgaggaggtccatggcaccagcggctctttccgccacttcctgtggcaggtgtgtaaggagctgcagagttcctcgctgtcgctgctgctgctgtgccccagctcagctgtcaataagaacaagggcaagtatatcctgaccccgagccccatcacctacggggaggagcagctgctgcacttcctggggcagctgctggggattgcaattcgggcagacgtcccgctgcccctggacctcctgccctccttctggaagacgctggtgggcgagcccttggaccctgagcaagacctgcaggaagcggatatcctcacctacaattacgtcaagaagtttgagagcatcaatgatgagaccgagctggagaccctgtgcgctgagatcgcctcccagcacctggccacggagagccctgacagccccaacaagccctgctgcaggttcacc

SEQ ID NO: 370461 - DNA, 791 bp, Homo Sapiens
tcatgaggatggccgcgtgcgggtgtgatggcgaggtggcggcatagctggttgatgtactgcacaagtgccacgtccatctccagggtccactttcttgaggccttctgtgcatgtcggacatcgatgcatgcgcacctctcaaagtgaagatcgtaaccacaggacaagatcgccctccagacgctacggatatcttgcctggctcggtcaataacaaatttgtgaaatccttccagcgtcaggtatttttcctcagggacttcttgttttttggtaggtgacttttctgggtccttttcatctggtttgctcttttctggtgattttggcttcacagttggcttcttctcacttaaggcagtcctgacgctgttgagcacagccttgtccttggcgggcggcttggtgataggccgcttggtgctcaccaccttcacggggtgctgctccttcccggccttgctgtacttgctcttgtcaaacttgggctttggcacgccatacttcctcaggacctgggtgagcggatcctccagcaccttttttggcggccggacattggtgaagaagaggtggaggaggttgcctggggtctgggagttgatctgctctttgctaagataaatgtcagagactctgatgggcttcgctggtgtcaggctcagcctctgctctgaacgggcacaactcttaaatatctccgtcagaacctctctggatccgggcaccagcttctcccctttaattgacttatcagtgaaataatcttctaactgtggaaaagtagc

SEQ ID NO: 370462 - DNA, 663 bp, Homo Sapiens
ttctcgttctgctccctgctgagctcagctgctctttcatcctggtctggtatgcactgtgctgtggcctcagtggttatggctggagcgactgggggctgctgctgactggagctcacttctggctctgtgttaactgagggagaaagggctacctcacaggaggagacctggctgggcagatgggacaggaactcttcagaggcaacttgctcatcctgtccaggcagctgcagggcagacaaggggatactgatctgtttgttaggatgggatgtgctcacaggcatttgcatggccacctgttggttggtgccatgtgtaccagggggtcctctgtttggtgaagccagagataccctagcagtcttctggacaattggtctggagatcacagagggggatgcagacataccgtgtgggtctagctccgtgctgatggcagatgtgacatggggaatcagtttagcagaccctacacaggagggaccagcgtgagtctgaggcttgggttttgccatctgtgtcaaggacagggctggtccatctactcctcctgtcagttctgcatttgccacaatgtaataatcttcggggatttcttgtttgattttcttgatgatgacatcattgctgcattcgtcaaccatctgcgtctgggag

SEQ ID NO: 370463 - DNA, 366 bp, Homo Sapiens; identical to SEQ ID NO: 264624

SEQ ID NO: 370464 - DNA, 442 bp, Homo Sapiens; identical to SEQ ID NO: 264626

SEQ ID NO: 370465 - DNA, 282 bp, Homo Sapiens; identical to SEQ ID NO: 264627

SEQ ID NO: 370466 - DNA, 524 bp, Homo Sapiens
  misc_feature (497)..(497): n is a, c, g, or t
cgtgttcagcatcaggctcacctggacagtttggcggttgtacaccttcaccacatggaaccggaagctgtagacaccccggacaggggctaccaaggagccagaggcccggtcaaagccaccgccctcgttcaccaggacctggtcgaagtagatggccccactggtgccattgccggtttcccctgctggctcatggtggtggcttcggaccgcagcaaatgccactcgcccagggggtgcctctcccagggctgctcccccgggcccccctgcagcagctcggccaggctcacagaccaccaggcactccccctccagcaggacgggctatgacccctcctgggcccacccggcccccagggccagaagcaccagaaccaagggcagcccgggactgtgtaggggacctggtagccagtgtggcttggctcccaacatggctgaggggctctgcaacccacaagtgccccggtcttctgcccctcttctgtttncgctcctctccctggattctcaccgac

SEQ ID NO: 370467 - DNA, 815 bp, Homo Sapiens; identical to SEQ ID NO: 264629

SEQ ID NO: 370468 - DNA, 1234 bp, Homo Sapiens
cacgatggcacccagccctggttcatcagtaagcctcgctcagtgacagcctccccgggccagagtgtcctcatctcctgcgccatagctggtgacccctttcctaccgtgcactggctcagagatggcaaagccctctgcaaagacactggccacttcgaggtgcttcagaatgaggacgtgttcaccctggttctaaagaaggtgcagccctggcatgccggccagtatgagatcctgctcaagaaccgggttggcgaatgcagttgccaggtgtcactgatgctacagaacagctctgccagagcccttccacgggggagggagcctgccagctgcgaggacctctgtggtggaggagttggtgctgatggtggtggtagtgaccgctatgggtccctgaggcctggctggccagcaagagggcagggttggctagaggaggaagacggcgaggacgtgcgaggggtgctgaagaggcgcgtggagacgaggcagcacactgaggaggcgatccgccagcaggaggtggagcagctggacttccgagacctcctggggaagaaggtgagtacaaagaccctatcggaagacgacctgaaggagatcccagccgagcagatggatttccgtgccaacctgcagcggcaagtgaagccaaagactgtgtctgaggaagagaggaaggtgcacagcccccagcaggtcgattttcgctctgtcctggccaagaaggggacttccaagacccccgtgcctgagaaggtgccaccgccaaaacctgccaccccggattttcgctcagtgctgggtggcaagaagaaattaccagcagagaatggcagcagcagtgccgagaccctgaatgccaaggcagtggagagttccaagcccctgagcaatgcacagccttcagggcccttgaaacccgtgggcaacgccaagcctgctgagaccctgaagccaatgggcaacgccaagcctgccgagaccctgaagcccatgggcaatgccaagcctgatgagaacctgaaatccgctagcaaagaagaacctcaagaaagacgttaagaatgatgtgaactgcaagagaggccatgcagggaccacagatactgacacagagatcagagagccaggggacagacccagacttcaagcagaagctgcaagatgtacatgtggcagagggcaagaagctgctggtccagtgccaggtgtcttctgacccccc

SEQ ID NO: 370469 - DNA, 410 bp, Homo Sapiens; identical to SEQ ID NO: 264631

SEQ ID NO: 370470 - DNA, 501 bp, Homo Sapiens; identical to SEQ ID NO: 264632

SEQ ID NO: 370471 - DNA, 735 bp, Homo Sapiens; identical to SEQ ID NO: 264633

SEQ ID NO: 370472 - DNA, 941 bp, Homo Sapiens
cagcactctgggggacgcagatggcagggcggccctggcttcgtgtgtccggtggtcctgagcagcagaagtgtgggaactcgccactgacacccacctatggtctctggtagctgctttctgtggctgaaatggagtctggctgttgtagttttttaactccttatttccgcctcgaaacagaagcactcttgcacagctgtcctggttgtagagggcgcagatgtgcaaggccgtgttccccgaggcattctgggcactcatgtctgccccgtagaacagcaggtgctccaggtgctgcacgtgcccgtacctgcaggcctggtggatctcgtgccagccgttctcatctttgcagcacacagtggcgtgttcgtgcaggagaagctcgcagcagtagggatcacctccgacgatggctgtgtgatacagcggggtgaggccgtaactgtctttataatctggggatgcaccaagctctaaaagggtcttcagggcaacttggttcctcgctcgggcagctttgtgtagggcggtcatcccatctttggcacggaagtccaggtgagctccaccatttttgagagctttgatgacctccacagagtcgtccagctgagcggctaaggtcaggggggtctctccggtctccgggtcgtggaaattgggatccaggcctcggtccagcatcttggtgatcttctccaccaagcgatgctgaatgtgatccatgcatttcttcagattggtcttcgtgtggagcttggccaactgtttctcatcgagactggcttgtttatacacccgcttcttgtatcgaaactccagggaaggaacgccctcacccacgggctgtgggtactcgcgcaggagccgctcctcatccaggaacttgccgtcacgcccattgctggccggctggaacaggccgtagttcagga

SEQ ID NO: 370473 - DNA, 763 bp, Homo Sapiens; identical to SEQ ID NO: 264636

SEQ ID NO: 370474 - DNA, 811 bp, Homo Sapiens
agcggacttccgcgtccgccccgcggcgtccggcggccgcgccgagggtctggcgggccgcagagggagaccaagacatcattgttttgaagtttctgaaagtgttgggaggcaaaaattcaggtgcctgggggagaaatggaaggccacaaggcagaagaagaggtgctagatgttctccgactgaacgtgggtggctgtatttacacagcccggcgggagtccttgtgccgcttcaaggactccatgttggcatctatgttcagtggtcgctttcctctaaaaacagatgagtcaggggcttgtgttattgaccgtgatggacgtctatttaaataccttttggattaccttcatggagaagttcagattcccacagatgagcaaacccgcatcgccctacaggaagaggctgattactttggcatcccttatccatacagcctgtctgaccatttggccaatgaaatggagacatattctttaaggtcaaatatagaacttaaaaaggctttaacagacttctgtgattcatatggcttagtctgcaataaaccaacagtttgggttctccactatcttaacacatctggtgcaagctgtgagagtagaattattggtgtatatgccacaaaaactgatggaacagacgctattgaaaagcagctgggaggaagaattcacagcaaaggcatttttaaaagagaggcgggaaataatgttcagtacatttggagctattattcagtagcagagttgaagaaaatgatggatgcctttgatgcttgggaaggaaaaggtgttagctact

SEQ ID NO: 370475 - DNA, 859 bp, Homo Sapiens
agcggacttccgcgtccgccccgcggcgtccggcggccgcgccgagggtctggcgggccgcaggtcagtctgggaagctgccgacccgccccacccccccggtgcggaagagccgggcgcgggatgggccgcgggcccggaaggcggcggggcgccctgaggaagggcacgggccgcgctggtaacgcgcgcgccccgggctgcaggctcgggcttcgggccgatttggggtctccaggccgcggaagaccgtggcggggctttctggctccccagctcctcccggctcttcccgcttcggaagaggagtgtgagccccttgagcgatgtttttcaaagtggggttcgcgggcagatcccgacccctcctcagactttctgaggaactgtgtgctgtggccggagtgtcttcgttttcccaagcgtccctgatggttttggatgcagagggagaccaagacatcattgttttgaagtttctgaaagtgatgggaggcaaaaattcaggtgcctgggggagaaatggaaggccacaaggcagaagaagaggtgctagatgttctccgactgaacgtgggtggctgtatttacacagcccggcgggagtccttgtgcccgcttcaaggactccatgttggcatctatgtgcagtggtcgctttcctctaaaaacagatgagtcaggggcttgtgttattgaccgtgatggacgtctatttaaataccttttggatttaccttcatggaggaagttcagattcccacagatgagccaacccgattgcctacaggaagaggctgattactttgggcatccttatcctcagctgtctgacaattgggcatgaaatgggggaccc

SEQ ID NO: 370476 - DNA, 782 bp, Homo Sapiens; identical to SEQ ID NO: 264639

SEQ ID NO: 370477 - DNA, 453 bp, Homo Sapiens; identical to SEQ ID NO: 264641

SEQ ID NO: 370478 - DNA, 660 bp, Homo Sapiens; identical to SEQ ID NO: 264643

SEQ ID NO: 370479 - DNA, 740 bp, Homo Sapiens; identical to SEQ ID NO: 264644

SEQ ID NO: 370480 - DNA, 612 bp, Homo Sapiens; identical to SEQ ID NO: 264645

SEQ ID NO: 370481 - DNA, 285 bp, Homo Sapiens
  misc_feature (236)..(236): n is a, c, g, or t
gggatcgggcatgaactggggtcaccttgccacctgcccccacctctagcccagggtcgtgggccagcgcacctgtatgagcagagaatcttcagctggtcggggcggaggccggggccttgggtcaccttgagcagtcgcagcccacggtgggacacggctaacagctgcacgtcgctgccactctcgccctacaggaaggtggttgggtctcggggcagtctactggggtcctngctactgcccaagatgccctgggagcttgcccagggccagttgcttggg

SEQ ID NO: 370482 - DNA, 699 bp, Homo Sapiens; identical to SEQ ID NO: 264646

SEQ ID NO: 370483 - DNA, 283 bp, Homo Sapiens; identical to SEQ ID NO: 264649

SEQ ID NO: 370484 - DNA, 488 bp, Homo Sapiens; identical to SEQ ID NO: 264650

SEQ ID NO: 370485 - DNA, 666 bp, Homo Sapiens; identical to SEQ ID NO: 264653

SEQ ID NO: 370486 - DNA, 663 bp, Homo Sapiens; identical to SEQ ID NO: 264654

SEQ ID NO: 370487 - DNA, 758 bp, Homo Sapiens; identical to SEQ ID NO: 264656

SEQ ID NO: 370488 - DNA, 795 bp, Homo Sapiens; identical to SEQ ID NO: 264657

SEQ ID NO: 370489 - DNA, 337 bp, Homo Sapiens; identical to SEQ ID NO: 264659

SEQ ID NO: 370490 - DNA, 902 bp, Homo Sapiens; identical to SEQ ID NO: 264660

SEQ ID NO: 370491 - DNA, 580 bp, Homo Sapiens; identical to SEQ ID NO: 264661

SEQ ID NO: 370492 - DNA, 275 bp, Homo Sapiens; identical to SEQ ID NO: 264662

SEQ ID NO: 370493 - DNA, 813 bp, Homo Sapiens; identical to SEQ ID NO: 264668

SEQ ID NO: 370494 - DNA, 618 bp, Homo Sapiens; identical to SEQ ID NO: 264669

SEQ ID NO: 370495 - DNA, 764 bp, Homo Sapiens
tgttagaacaccaaggaaatgaaagttcagccgatttcactgtccccaaattcttgcaggcagaagaaacaataaatgaaaatgcagcagattttcaggattttgaagcagaagaaactaacgaaggcagacacttaccagacaacttatgtccttataggaacaaaagagatgatgtgctgtgtacgtaatatgaaggaaggaagattggaattagcatctatgtttgatacgatacatgcaaaggatgatagtgaggagacagatagaaccattacagaactgcattctatccagaaaagtctacttgcagcgtgaactataggaatttcaaaaactgtgacagaaaaaaatttaatgttaaattacatagtagtttgtatcactcattttttttacattcttcaatttataaaatgtccttttcctaaacttgatcttgttttaagcaaaagctcaagacataatgcatggatactttgtatctttcaactttttcatcagtgtttatcaatccattattgggatataagatacaaacaagatgtggggcatttgataaagctgacctcaaatactgtaaaacttttgctgactcagcaacaaaagggtcagttattctcagagaaacttttagcttgtttttatttactcaaaatggtagctgacaatttaaatggtgtatacattcttcaacctgaagttatttcagcatcagctgatggaagtaaaataacagctcaagactcattggtggtacctat

SEQ ID NO: 370496 - DNA, 820 bp, Homo Sapiens; identical to SEQ ID NO: 264671

SEQ ID NO: 370497 - DNA, 829 bp, Homo Sapiens
atgcaacacctggcttttgagaagctttgtgactgacgtcaggaagaacactcctccggtgcgtaaaggagatgttagctaaagcatttttatttttcaggtaccaaccttcgccttttctatgacgtttgcaaactctcctacccacaggaagcagcagtggggagagagcaggaggaagcagtccccactgttgagcgccgaagctcgaggttccaccagcctggtctgcacatgtcttcttcctgaacacgaggcagacagtcaccgtctttccagacagaacggggataggacgcaccccatatcggaagcatccctgctgcggacgctttcacttctaaagagtcttgtctgctaataagagtgcccatggcccagggtggcagcagggggatttagaaagggcatgatgatggcactagcggctgctttcctggtttgtgctttcccaaatgtcacccacttctcaggaccattatcagtgtcaatgtgcgtgggttaatgaaggctcccccttccagggagatgagcacacaggctccttttccctccttcactcttctcccggggcctttctctcccatggccacctcctgcacccaattacatctgtggcccaggcaagggaagccacgccttcaggaagggtcggctcttcccctggggagtttccactatgaaccctaggggcctctcaacaggaaggacggagccaccaccttctgtggctttcaacaccttctcctaaatatttattgattttgagctttccacaattaaacagatcatgtagtctctgggttaggactcaggacagagattggtt

SEQ ID NO: 370498 - DNA, 357 bp, Homo Sapiens
cccacgagcatctccaccgtccagcaggggaacaaagcggcatcattccactattccaggggaggtgctaaatacaagggtgaggctgtcaagcggtccctggtggagtcctacattcacccaaacagcaacgagacagagcggaggggaacatcgatactgtcatgaactggttcacctaggaagactttgactttgtgactctgtgctacagagagccagataacgtgggacatcgattcgggccagaggcagagaaaaggaagttgatgattcagcaaatcgacaggaccatcgggtatctggtgggagccactgagaacacagcctgcagacacctcagctgtcggctatcgt

SEQ ID NO: 370499 - DNA, 612 bp, Homo Sapiens; identical to SEQ ID NO: 264673

SEQ ID NO: 370500 - DNA, 603 bp, Homo Sapiens; identical to SEQ ID NO: 264674

SEQ ID NO: 370501 - DNA, 1060 bp, Homo Sapiens
ctttgcatgccacccttcgtctctgtctgaggctcacccgggaccacaaatatgacatgatgtttgcagaactgaagagtacccgcatgatcttgaatatgacccagagctcaggcttcaatgggttgactcccctggtcacccttctcctaagacacatcattgaggacccctgtacccttcgtcataccatggaaaaggttgttcgctcagcagctacaagtggagctggtagcactacctctggtgttgtgtctggcagcctcggctctcgggagatcaactacatccttcgtgtccttgggccagccgcatgccgcaatccagacatattcacagaagtggccaactgctgtatccgcatcgcccttcctgcccctcgaggctcaggaactgcttcagatgatgaatttgagaatcttagaattaaaggccctaatgctgtacagctggtgaagaccacccctttgaagccctcacctctgcctgtcatccctgatactatcaaggaagtgatctatgatatgctgaatgctctggctgcataccatgctccagaggaagcagataaatctgatcctaaacctggggttatgacccaagaggttggccagctcctgcaagacatgggtgatgatgtataccagcagtaccggtcacttacgcgtcagagcagtgactttgatacgcagtcaggtttttccattaatagtcaggtctttgctgcagatggtgcctccactgagacttccgcatctgggacctcccaaggagaggcttcaactccagaggagtctcgagatgggaagaaagataaagaaggggaccgggcctctgaggaaggcaaacagaaaggcaagggcagcaaacctttaatgcctacctccactatccttcgtcttctggcagagttggtgaggtcctatgttggtattgctaccctgattgccaactacagctacactgtgggccagtctgaactgatcaaagaggactgcagtgtgctagctttttctggaccacctgctcccacatacgcccagtaagcggtaccagctca

SEQ ID NO: 370502 - DNA, 426 bp, Homo Sapiens; identical to SEQ ID NO: 264678

SEQ ID NO: 370503 - DNA, 368 bp, Homo Sapiens; identical to SEQ ID NO: 264679

SEQ ID NO: 370504 - DNA, 845 bp, Homo Sapiens; identical to SEQ ID NO: 264680

SEQ ID NO: 370505 - DNA, 659 bp, Homo Sapiens; identical to SEQ ID NO: 264683

SEQ ID NO: 370506 - DNA, 1021 bp, Homo Sapiens
atatcttcctcttcattctcctgtgccagattctccagatatctctccctcatctgctcctcttttgacttctttatctctttgaagtactcgtacagttctgggggcagcttctccccagggttgcggggaggcagcagcagggtgttgtaggaatcatagcccttcagcttccgcaagatcttttcttctatgagatactgctgatcaaattctaaggaataaaactcaatggggaagttgcagggattcttcactatcacctcggcctcgtctccaggtgcacaaagtagcagtggccccagatccaggactgaaggactaaattccaggcgtggctctagaccttgcccacgtgccaggagggtaagcttttgagcactctgggcaatctgaaacaccagggtttggctgtagaatttctcttcttttggcatgaatttcacttgcacgttggacttctcaccaggatccaagactccagaaatgggctggatttcgaagatccgtgtctttggctttaattcagcgcgtagtttctgtcttaagtacttcggcatgtgtttctccagcttgtcaacaggcttttggctctggacgaaccattcacaagggacttggagatgattggaaagctgaatagtttccaccaggcactgtccacactgaattgtggcaaagtccacttttccacgagagagagtcatggttggaatggtcaccttggcttggagacagatgtgaactgttggccctccaaccaccttgatgggcagaatgacttctttgcttccaacaggaagattggccccctgtgggtcaaatctcacttcaaatatttccgtttcacaatgaggcagattctttacacgatctagctcagtactgaatcctgtctcatgaaggacacgcttcgtctgcatgaaatgacagctggaaagtgactctggtggtgatgatcttgatgaagtgggttcggacttcgccaaggatgatgtagccaaagtccccaggatgtact

SEQ ID NO: 370507 - DNA, 381 bp, Homo Sapiens; identical to SEQ ID NO: 264685

SEQ ID NO: 370508 - DNA, 1050 bp, Homo Sapiens; identical to SEQ ID NO: 264686
  misc_feature (857)..(913): n is a, c, g, or t

SEQ ID NO: 370509 - DNA, 627 bp, Homo Sapiens; identical to SEQ ID NO: 264689

SEQ ID NO: 370510 - DNA, 407 bp, Homo Sapiens
ttcgattccatcttgccccctcgatgaataaaccaaaaatgtaaactccagtgtgagaggaagctgagcccttaaacgctctcctgactatgttgagtttctttggcataaatacggagaacttctcatccttgtcagtggtgttggaaatcacatggtgggtgaaggtgagggcatccacagcgattcctcgggacctcccatagtcttgaagcacagcagcaagaaaggcttgtggaaagaagaaagctgggagccagtatcttgaaggaaacccttcaaagaaattgttctctgaatcctcagggtgtttgcatttttggctagttgatggaatagactgcttccaaactgtgacaaatctcatataccgacgctgtattgcagtataagccactttggcccaa

SEQ ID NO: 370511 - DNA, 577 bp, Homo Sapiens; identical to SEQ ID NO: 264691

SEQ ID NO: 370512 - DNA, 583 bp, Homo Sapiens; identical to SEQ ID NO: 264692

SEQ ID NO: 370513 - DNA, 467 bp, Homo Sapiens; identical to SEQ ID NO: 264693

SEQ ID NO: 370514 - DNA, 409 bp, Homo Sapiens; identical to SEQ ID NO: 264694

SEQ ID NO: 370515 - DNA, 706 bp, Homo Sapiens
ccgtaggtcagcttcctgaaaaagaatttccaaatggaagcttcccagtttccttgctctggatacacgtggtacgaccggatgaaagtcgggctcacggtgctgatgacaacatcgtattcctccacttcggctcggaggcagtcaaagaagcccagggctgcgtgcttggaggcagcgtaagtcgtacggaacgggattccaaacttcccttggatattattcactaacacgatttggcctgttctccgggagatcatgttgggaagcagggctttcgtcaatgtgatggggccaaagtaattggcatccatgatctttttgtcgagctccagagaaatcttatgggcaggccccttcaccttcacactggcattgttgatgaggatgtccacacagccatagcaatccaggacttcttttgccacatctgggacacagctgatgtctgagaggtccaacaggaccagctttggggtgaatgtcttgctggggtcagccacgctgatcaaggcatcatataggttctctagcctctcccagttctttccacacagcaccagccttgccccacctgtgtggaacacccgagcacactccttgcccagtcctgagatggcatcggtgatcaacaccactttgttctgcacagctgactttgaccacagcctggacacctcttggtaaatgatgaggaggccgctga

SEQ ID NO: 370516 - DNA, 438 bp, Homo Sapiens; identical to SEQ ID NO: 264698

SEQ ID NO: 370517 - DNA, 658 bp, Homo Sapiens; identical to SEQ ID NO: 264699

SEQ ID NO: 370518 - DNA, 542 bp, Homo Sapiens; identical to SEQ ID NO: 264700

SEQ ID NO: 370519 - DNA, 312 bp, Homo Sapiens; identical to SEQ ID NO: 264701

SEQ ID NO: 370520 - DNA, 305 bp, Homo Sapiens; identical to SEQ ID NO: 264702

SEQ ID NO: 370521 - DNA, 856 bp, Homo Sapiens; identical to SEQ ID NO: 264703

SEQ ID NO: 370522 - DNA, 280 bp, Homo Sapiens; identical to SEQ ID NO: 264704

SEQ ID NO: 370523 - DNA, 701 bp, Homo Sapiens; identical to SEQ ID NO: 264705

SEQ ID NO: 370524 - DNA, 496 bp, Homo Sapiens; identical to SEQ ID NO: 264707

SEQ ID NO: 370525 - DNA, 506 bp, Homo Sapiens
tgcagcagccgcagaggcatcagcaatggcaaaggcggcaaccatgaccccagctgctatttcccagcaaaatcctccaaagaaccgagaggccacagtgaacggggaagagaatggagcacatgaaatcaataatcactcaaagccaatggaaatagatggggatgttgagattccacccaacaaagccacagtccttcggggccacgagtctgaggtgttcatttgtgcctggaaccctgtcagtgatttgctagcctctggatctggagactcaactgcaaggatatggaacctgaatgagaatagcaacgggggctccacccagctcgtgttgagacattgtatacgacaaggggggcacgacgtcccaagtaataaagatgtcacctcactggactggaacagtgatggaacactattggctatgggttcatatgatggtttcgcaagaatatggacagaaaatggtaacctggccagcacctcaggccaacataaaggcc

SEQ ID NO: 370526 - DNA, 782 bp, Homo Sapiens
ggcagctgggggccatcccaccccccggggcctcctgatctcgcctctttggatcctgtgagttcaactggagaatcactggagaattctctctgagtccccccgtgaggatgtgtgggactcctgctgcgaaacactgagccctgcctggtgtcaggtgtgacccgggacactaagaagagatgtccgtgaaccctgcggtgtggatgggcagtgccgatttctaggtttcttgctgtggcccaagttaagaaaagaagtagagctggtgtctgtggaaaagcggaggtgagagtctggcctgccccgtgcgggcctgactgagggtctgaaccttttctagtggtctcgcgactctagcgtcctcaaaaccaacaggggtggcatgaggagcctgtgctaagaatgtcatggggggtgaagccggtgctgcccgcccgctccccgagcccacgcctgcaccctcgcccacgcccgcccctgcctgcccacgtaccagcctgcggatctcccgctcgcactccttcttgatgcgggtgatctcctcctggtgcaggtggtacacgctgcggatctctgcggccttgatcttgtccgcttggatcaccagcgtcagcgcctcctccacctgccttttggcgcccttgagctcggagatctcctgctgcatcttgaccttctgcacctcgaaacccttcttggcctcctccttggcctagaacagcagaacggtcatgaccttatcggggcccccatcacgcagggcactgagcagtgcctgc

SEQ ID NO: 370527 - DNA, 537 bp, Homo Sapiens; identical to SEQ ID NO: 264710
  misc_feature (170)..(170): n is a, c, g, or t

SEQ ID NO: 370528 - DNA, 618 bp, Homo Sapiens; identical to SEQ ID NO: 264711

SEQ ID NO: 370529 - DNA, 516 bp, Homo Sapiens; identical to SEQ ID NO: 264712

SEQ ID NO: 370530 - DNA, 913 bp, Homo Sapiens
aaaatagtaatagtggcagaaagaaaacatcagtgcgtagcaagtaagaagttcagtgtagaaacacaactgcagaaagagccaatgattatcttcaccaacacaattgttaatccatggacagtgatgatccattctcctcacacagtggccgcagcggctacagtgatgggaacgctttggtctcatcaaattacacttgttacataattcccagaactccctttctccatgtgggatcttggggttctcagggagtcttcctggatcagttatggaggccctcactaaggcaaccagacagaatatggaaatgccatagaatattattattaatatgcctggaatatgtccttcttcatagtgaggaaagaggacaattttgggaattaaaacaatattgtatagccaaacaaagacaatcaaacccatgcagcaccatccatgtgggtcaacaacaaagtgaatccggagacccattttgcaatcttataactgcctgctaacccacaaggaaggatgatccacttgcaaattcactgagatgtgctgtaatttttctggaatctgcatttagagattttcttttgattcattttttttaattatatcccaccaaatggatctctcttcaataacagttctccatgagaacacagttgctgtcacgcttaaatgagaaattgactggcaaagcagcgcctccaaaatggctaactgcttgctgaagctgaaaatcctgcagtaagtgaaaaagttcttcattcgtcgccgctggctcgcctctcgctgccgccgctctcccgaccaccagcagctctttcccctcctcctgccgcgccacctccgcctcctccggcgccgccgcccaggccgggccgctctccccttccgcttccgggacccccccgct

SEQ ID NO: 370531 - DNA, 903 bp, Homo Sapiens; identical to SEQ ID NO: 264715

SEQ ID NO: 370532 - DNA, 449 bp, Homo Sapiens; identical to SEQ ID NO: 264717

SEQ ID NO: 370533 - DNA, 360 bp, Homo Sapiens; identical to SEQ ID NO: 264719

SEQ ID NO: 370534 - DNA, 509 bp, Homo Sapiens; identical to SEQ ID NO: 264720

SEQ ID NO: 370535 - DNA, 393 bp, Homo Sapiens; identical to SEQ ID NO: 264721

SEQ ID NO: 370536 - DNA, 354 bp, Homo Sapiens; identical to SEQ ID NO: 264722

SEQ ID NO: 370537 - DNA, 409 bp, Homo Sapiens; identical to SEQ ID NO: 264723

SEQ ID NO: 370538 - DNA, 484 bp, Homo Sapiens; identical to SEQ ID NO: 264724

SEQ ID NO: 370539 - DNA, 290 bp, Homo Sapiens
gattttacgagactgagccttcctaatgggtgtgaatgtatgttgcgtgtgttatcagtgtcttttgcttgcttctctgttctcctcagcctggcatgggagggcaggattgtggtggggggatttgctggaggaaacattgcttctgaaccagccaaccttctgctcctgaagaatatctcaaactatgggcctgtacgtgtggtcaatacaaagcatatgaactttcccgtcttctccaagagcctatcttctgtgcttccgtacgcccccaagggtccccctgccta

SEQ ID NO: 370540 - DNA, 866 bp, Homo Sapiens; identical to SEQ ID NO: 264726

SEQ ID NO: 370541 - DNA, 333 bp, Homo Sapiens; identical to SEQ ID NO: 264727

SEQ ID NO: 370542 - DNA, 556 bp, Homo Sapiens; identical to SEQ ID NO: 264730

SEQ ID NO: 370543 - DNA, 792 bp, Homo Sapiens; identical to SEQ ID NO: 264732

SEQ ID NO: 370544 - DNA, 567 bp, Homo Sapiens; identical to SEQ ID NO: 264733

SEQ ID NO: 370545 - DNA, 286 bp, Homo Sapiens; identical to SEQ ID NO: 264734

SEQ ID NO: 370546 - DNA, 255 bp, Homo Sapiens; identical to SEQ ID NO: 264735

SEQ ID NO: 370547 - DNA, 605 bp, Homo Sapiens; identical to SEQ ID NO: 264739

SEQ ID NO: 370548 - DNA, 342 bp, Homo Sapiens; identical to SEQ ID NO: 264740

SEQ ID NO: 370549 - DNA, 657 bp, Homo Sapiens; identical to SEQ ID NO: 264742

SEQ ID NO: 370550 - DNA, 536 bp, Homo Sapiens
tcggtacccagttcgacggagactctccatgaccacagcttgatacgtcagtcaaggagcagcagaaaggcagtattgtgtgtggtcatggagagcatccgaaccacacgacagtgctcactgtctgtgcatgctggaattcgaggggaagcaatgcggtttcactttatggatgaacagaatcccaagggaagggacaaagctattgttttcccagcacatacaaccatagctttcagtgtttttgaactcttcatatacctggatggtgcctttgacctttgtgtcacttcagtgtcaaaaggaggatttgaaagggaagaaacggcaacatttgcactgctgtacaggttgagaaatatcctatttgaaagaaatagaagagtgatggatgtcatttctcgttcacagctttacttggatgatcttttttctgactactatgacaaacctctcagcatgactgatatttcactcaaagaagggacccatatccgagttaacttacttaatcacaacattcccaaagggccttg

SEQ ID NO: 370551 - DNA, 618 bp, Homo Sapiens; identical to SEQ ID NO: 264745
  misc_feature (493)..(553): n is a, c, g, or t

SEQ ID NO: 370552 - DNA, 717 bp, Homo Sapiens; identical to SEQ ID NO: 264746

SEQ ID NO: 370553 - DNA, 459 bp, Homo Sapiens
gggtctgccgaacaggtccagctttgcacccacctccagcttgtgggggtccagctgcatctcctttatcttctgctggtgacggtagatctgccaggcgatctgcactgcacggcacaccacctccccggcttcttgaccaccgcccggtacgggtcagacaccttaggctgaaaagcgccctgcagggacccgaaggggccggggtgtgggagcagggtgggcagtcccgggatggcaggagggaaggacgggaagaaactcacgctggaatgtcgcaagtaggggctgtccagcttgggcgcatacatgtcaaactggcactcccggggtcggcaggccaaggccggggtggccaatcaccacgtgcgggcccaggggtgcaggtaagagaggagcctgtgaccaagtaccaatcagaattccagaatgaggctggcaatacatgattggctggct

SEQ ID NO: 370554 - DNA, 689 bp, Homo Sapiens; identical to SEQ ID NO: 264750

SEQ ID NO: 370555 - DNA, 764 bp, Homo Sapiens
acacagagaaccggctggtataatcatcctgactgatccgcctcaggaagaatatgaagaaattcgcctcttgtgctatcgattgttttgcttggccaatctttctcagtatactctctttgtccatttcacgaacagcactcagcatattgaataatcgtccctgaatcatgaccttgcgtgctacttgttgaaaccgtttttgtgccctggacctgctgagccaagtgttattaatgagtggatcaaaagtaggatgaaattccttgattttctcttcttgattgcgaacgacccgtttatggctaacttctgttttaagtcgctgaaattcctcatccaaaataggatctcctctgtctagcttatatttggcacatgctttttgccactcttcagtaagctcttttttaagtttaaaagacataggatctttaccaaggtgcacctgccacttaagatgattttccatctcttcgtgaatgtcctgtctgactttctgttcaaagagtgcctccttcatctgtctcgtttttgaaatttcagtgccctggtccaaaacttctcttaattctttaatcttcaattttcctggttcttggtttaaaacagttgccacagcaaatggattcgataaatctactggaaatctgaggttctggtactcaatttccttcaccttctgaggcttcggcttcgctggcggtcggtgaaaatttatatgcatcattgctttttctggaggaacgtttactttcttagaa

SEQ ID NO: 370556 - DNA, 839 bp, Homo Sapiens
ggaaccattgatcgaatagcccagcggatcatcaaagaagaaatagactacctggaggagaggagagaatacgggcctgcgtactcctcatggagcgccttggagggtgagctggccgaacccctggagggtgtgtcagcttgcattgggaactgctctacagccttagaagagctgacagatgacatgacagaagacttcctacctgtgctcagggaatatattttatactctgactccatgaagagtgtattgaagaagagggaccaagttcaagcagagtatgaagccaaactggaagctgtggctctgcggaaggaagaccgccccaaggtaccggcggacgtcgagaaatgtcaggatcggatggagtgtttcaatgctgacctgaaagctgacatgaaaaggtggcagaacaacaagaggcaggacttccggcagctactcatggggatggctgacaagaacatccagtattatgagaagtgcctcatggcgtgggagtcgattattccactactgcaggagaaacaagaggccaagtaaagtcctttcttgggacggagactcttctacctacacagggcctggcaccctataccggaatgtccctgcagtgccagagacgcagtgctgggaaaacaaccacagaaacatctctcctttgtgtatttttccctcccccacctttcaccccacagtggttttcaattagtatttattccatggtggagtctgtgaggctagaatatctctcagcaagagcagcatacctccatgttatgaaggcatctgttcagtgaagcactacgaaaatttgaaaccaagggacaagacaa

SEQ ID NO: 370557 - DNA, 496 bp, Homo Sapiens; identical to SEQ ID NO: 264754

SEQ ID NO: 370558 - DNA, 824 bp, Homo Sapiens; identical to SEQ ID NO: 264755

SEQ ID NO: 370559 - DNA, 732 bp, Homo Sapiens; identical to SEQ ID NO: 264758

SEQ ID NO: 370560 - DNA, 154 bp, Homo Sapiens; identical to SEQ ID NO: 264763

SEQ ID NO: 370561 - DNA, 500 bp, Homo Sapiens
taagaaactcaaagggcagctggtggagagacacaagattggcaatctacacaatcttcgatctgaagatgatgtcttggaaaacgggacagacatgcatgtaatggacctacaaagggatgccaacagacagatcagcgacctcaaatttaaacttgcaaaatctgagcaagagataactgcattagaacaaaatgtaataaggttagagagtcaagtatcacgttacaaatcagcggctgaaaatgcagaaaaaatagaagatgaacttaaggcagaaaaacggaaactccaaagagagctccgctctgcattggataaaacagaagagctcgaggtgagcaacggccacttagtgaagcgtctggaaaaaatgaaagcaaatcggagtgcactcttgtcccagtagtaaattccagctctgatcaggcaactggttggtgactggacgagcattatttccataggctattctatatcctgtctcgggaataaggccg

SEQ ID NO: 370562 - DNA, 384 bp, Homo Sapiens
cgcctcagcagtgccatcactcttttctgaagtgctgctcttcctgttgacatcatattgctgacagaggcaaactccatgaatgtgttatagttgggcaagaggttatgcactgacacttcatccaccccacaccggatatctgcttcctcacagaggtggcggaaacaggacatggcaaccagaacagcttcagtgtcagggttccacagaaacatgtacagggccacttctagtttggtctgggcttgtcggcaaatcgggggggttccgctgcatcctgctgcactatccatagaggagttccctcttcccttccggagagagccccaggagtacaagtaattcttcatgatgtctaataggatagatcctctagagcag

SEQ ID NO: 370563 - DNA, 511 bp, Homo Sapiens; identical to SEQ ID NO: 264767

SEQ ID NO: 370564 - DNA, 746 bp, Homo Sapiens; identical to SEQ ID NO: 264768

SEQ ID NO: 370565 - DNA, 571 bp, Homo Sapiens; identical to SEQ ID NO: 264769

SEQ ID NO: 370566 - DNA, 223 bp, Homo Sapiens; identical to SEQ ID NO: 264770

SEQ ID NO: 370567 - DNA, 342 bp, Homo Sapiens; identical to SEQ ID NO: 264771

SEQ ID NO: 370568 - DNA, 495 bp, Homo Sapiens; identical to SEQ ID NO: 262989

SEQ ID NO: 370569 - DNA, 609 bp, Homo Sapiens; identical to SEQ ID NO: 264773

SEQ ID NO: 370570 - DNA, 778 bp, Homo Sapiens; identical to SEQ ID NO: 264774

SEQ ID NO: 370571 - DNA, 501 bp, Homo Sapiens; identical to SEQ ID NO: 264775

SEQ ID NO: 370572 - DNA, 893 bp, Homo Sapiens; identical to SEQ ID NO: 250729

SEQ ID NO: 370573 - DNA, 613 bp, Homo Sapiens; identical to SEQ ID NO: 264777

SEQ ID NO: 370574 - DNA, 513 bp, Homo Sapiens
  misc_feature (35)..(35): n is a, c, g, or t
cccaggcaaggtggcttcaaacttgtaaaccccanacacttttgccctccccaaaaatgctgggaattaaattcatgaaccacccatgcccaccctatttatttctgattctttaagggtgactggacgtgttgatcagcgctcgctgggatttggctgacgtggccccagccccgcctccctccccaccccacaatggcagaagaaactggacagagtaaattagctgcagccaagaaaaagttcaaagaatattggcagagaaaccgccctggtgttccagcagcagcgaagaggaacacgaaagcaaatggcagtagccctgagacggccgcttctggtggttgccactcatctgaagctgtgagtcttgcctggacaggcttttggggacagggggcccaaggagcagtagagggcaatcgttaagattgtggatggactgttgggtactggtgaaggattctggatttggccgggcacagtgcccattctgtaaatgcgctcgtagaa

SEQ ID NO: 370575 - DNA, 452 bp, Homo Sapiens; identical to SEQ ID NO: 264780

SEQ ID NO: 370576 - DNA, 568 bp, Homo Sapiens
aaatccgcctttggtgaacccagcagaggcccctgcactactccccccgtactccccatcaacacggctggggctcacttgtcggctcctcgtccactcgacccacggcatccccctttgatgcgggcagccagctcatctgcaaacgatgtaggtctgcttcttttaggtctagtattttcttcaatgtcctcaatatcttcctcctccttctcagagtcagcgaaaaggtgctcatacccatcccccgcgttccatcttctgtaaccacagccaaaataatctcttaaaaatacaaatctgatcctgtcacctgctccttgcttagaacctctaagaatcaaaatcaaaatcttcagcatgcccaagagcactgcatggtcaggcctacttcccaactttatcttgccctgtgcgtgcccttccctctcatgtcctgaacattttttcctccccaattcttatacttaatcctgcttatcctgtagttctcagttctatggtcacttggagagcctttgctgaccttcatgactaggtcagactgacctgtggaaaagtagtaccg

SEQ ID NO: 370577 - DNA, 730 bp, Homo Sapiens
cctgttggaccgcttcgatggaatactggcagatgctggacagacagtggagaatatgtcatggatgctcgtatgtgataggccagaaagagagcaactgaaaatgcttctcttggctgtgttgaacttcacagccttgctcattgagtacagcttttcccggcatctgtacagttccatagagcatttgacaactttattggcttcctctgatatgcaagtggtgctggcagtcctcaatctcctatatgtatttagcaaaagatcaaactacatcactcgtctgggatctgacaagaggaccccgctgctaactcggctacaacatttggcagagagctggggtggaaaggagaatggctttggacttgcagaatgttgcagagacttgcatatgatgaaatatccacccagtgcaactacactacactttgaattctatgcagatcctggggccgaggtcaaaattgagaaaaggacaactagtaacacactacattatattcacatagagcaacttgacaagatttcagaaagcccttctgaaatcatggaatctcttaccaaaatgtacagcactcctaaggataagcagatgctgttatttacacacatacgactggcccatggcttttctaatcacaggaagcgattgcaggcagttcaggccaaactgcatgcaatatctatattagtgtattccaatgcctcagcaggctgcattcaggat

SEQ ID NO: 370578 - DNA, 535 bp, Homo Sapiens
accacctcctctgcttgcttgcagacccctgccttataccccgagaactccagactgagggtggagatgcccagggcacatgcgccagacagcttggtgaagaagacgtaggaggagtagaagatggtctccaggcctggcccgtgacggtgctgcagctgaaagtcatccaccacgtctggcagcatggaccagggtagcagcaaggacacagcaatgctcacgccagatacaaaggccacgacatatgccacaggtgctgagggcacagcagccagcaagatcgcaaagggcaccatcgcaaagatcccaaaggctgaagtcttcttcccaaagcgctggaaaacccactcccacagcggggtgctcagcacggctgagaccaggacagttagtaccaggacctggacggggacctgtagctgggaggcatgtgtgcagaagaggaccaagtagctctgctccacctgaacagcagcagagatgaacaggaaggagatcaccagcttcaggtagggtgggtgccgggtagtga

SEQ ID NO: 370579 - DNA, 441 bp, Homo Sapiens; identical to SEQ ID NO: 264789

SEQ ID NO: 370580 - DNA, 1079 bp, Homo Sapiens; identical to SEQ ID NO: 264790

SEQ ID NO: 370581 - DNA, 1136 bp, Homo Sapiens
  misc_feature (781)..(781): n is a, c, g, or t
ctggcgggagtaccgagacttgcgggggagagccaccgggctcatctcggcggagggtgaacagtggctcaagatgagaagcgtactgagacaaagaattctgaaaccgaaagatgtggccatttattctggagaagtcaaccaagttattgctgacttaattaaaagaatctacctcctcaggagccaggcagaagatggagaaaccgtgaccaatgtcaatgatcttttcttcaaatattcaatggaaggagtggccaccatcctttatgagagtcgtttgggctgcctggaaaacagcatcccacagctgactgtggaatacatcgaggccctggagctcatgtttagcatgttcaagacctccatgtatgcaggcgccatccccagatggcttcgccccttcatcccaaagccctggcgggaattctgcaggtcctgggatggactcttcaaattcagccaaattcatgttgacaacaagttgagggacatacagtaccaaatggaccgaggccggagggtgagcgggggacttctcacatacctcttccttagccaggctctgacgctgcaggagatctacgccaacgtgactgagatgctgctggccggcgtcgacacgacgtccttcaccttgtcttggactgtgtacctcctggcaaggcacccagaagtgcagcagacggtgtaccgggagattgtgaagaatttaggggaaaggcatgttccaactgcagctgatgtccccaaggtcccgctggtcagagctctccttaangaaaccctgagctgtttcagtgctgccagggaacggccgggtcacccagaagacctggttattggcgggtatctgattccgaaaggcacccagctggccctttggcactatgccacatcgtaccaggatgagaaactcccctcgggccaaaggagttcccggcctgaacgctgggctgccgaaaaggagaacttagaaagaggttgaccaatttttggatcccatccccctttgggggccatgggggtttccccacctgccttaggggccgggaaatttgcgcggaatgggaggatttcccccctccgccgggagatccagtttggccttccacaaattttttgaaaaaaccaaa

SEQ ID NO: 370582 - DNA, 326 bp, Homo Sapiens
tctgtccagcgggtcagggctgtggggatgctggacagggttcctgcttggctggtagctgtgctctgatcatggaaaaagtcatccagcagctcatcatcagaacgggcgatgatgtggacgtcatcgttgcctaccaggaggcgggcccgaccccggctttgtaggggaaggctgctgctcagctgaaggatgtcagcagcagctgagggaccaagcaacctctgcagtataagaggagggttgggctggcgaggcccagggtagtgaacatgaatggtgtggccagtattggccgtcagctgccttagggtcctctgactgcg

SEQ ID NO: 370583 - DNA, 654 bp, Homo Sapiens
caggaaacctcaaggcttgaaacaaatgcacctgaatcaatatgtattttagatcttgaagtatttctccttggagtagtatataccagccacttacaattaaaggagaaatgtaattctcaccacagctcctatcagccgttatgcctgccccttcctgtgtgtaaacagctttgtacagaaagacaaaaatcttggtgggatgcggtttgtactctgattcacagaaaagcagtacctggaaacgtagcaaaattgagacttctagttcatcatgaaataaacactctaagagcccaggaaaaacatggccttcaacctgctctgcttgtacattgggcaaaatgccttcagaaaatgggcagcggtcttaattctttttatgatcaacgagaatacatagggagaagtgttcattattggaagaaagttttgccattgttgaagataataaaaaagaagaacagtattcctgaacctattgatcctctgtttaaacattttcatagtgtagacattcaggcatcagaaattgttgaatatgaagaagacgcacacgtaacttttgctatattggatgcagtaaatggaaatatagaagatgctatgactgcttttgaatctataaaaagtgttgtttcttattggaatctt

SEQ ID NO: 370584 - DNA, 452 bp, Homo Sapiens
taagcgctgaactgtgtatttagaaagcaattttagtaaattgaactattttttagacctggaaacttggcaaaattgagacttctagttcagcatgaaataaacactctaagagcccaggaaaaacatggccttcaacctgctctgcttgtacattgggcaaaataccttcagaaaacggtgagttttaaagtataagcatttttaatgaacattaccttaattttttaaaatcatgaactttttattgaaagtttttttgttctgaaaacagcagcttgggtcatattatgacgagatgtgttttttaattgctgcaaaatagttaatggagttaaatattaagcacctagaggagcaatgcctggcacacagtgaatgttacatattagctgagctgttactgttattccttaataattaagttctgataattattcagcctgaaaatt

SEQ ID NO: 370585 - DNA, 338 bp, Homo Sapiens; identical to SEQ ID NO: 264796

SEQ ID NO: 370586 - DNA, 505 bp, Homo Sapiens
ttgttctcagagatattctgattggtaaaggatggggtgtttgactgagtgtgcttttggcaacaaaaatattggcctcttttactggagcgtgtccctgaaaaatggacaggagagctaatagacaaacaaaatccacatggaagtgtggtggctgcaaaacgaagttcacagaatttcaggcaaaaacatcatatatgtaatttaccaaacagtggaattagaagaataaaaaccacaagagttggtgaagttgaagaggaaactccatgtggagacacggcgccgtacttcagacctcccggtctactaatactgatggtgtggctggaacctggggtgtgtacagccctatccagaggatgctcctgtttcggctgattcctctacacctagtgtggggaaggtgggcaccagcggctccctagccgcagcagcctcaagtgcctccgcagccttttcagctaacgcattaaagtaaaaaaaagtgtgttcttctttgaac

SEQ ID NO: 370587 - DNA, 662 bp, Homo Sapiens; identical to SEQ ID NO: 264798

SEQ ID NO: 370588 - DNA, 499 bp, Homo Sapiens
aatgctattgccttgttgtgctcccgggctgcactgctgttcctcatccactcctgttcaagccgagaaacaagttcttctgaggagtgttctctcccaagagaccagaggtcttttggtgtcagtggcctcctgtatcccctccagaccaggccagaaacccaccagaacgtggctttggaggggaaggctgccccagtctctggacaggggttagactgctgggggtcttcagggaagaaggggggttgatccgccaggcaggacagcacaaactgtgccaccaccagagacaggcataggtaggtggacaggtggcggacagggtcgctctggaagcccgctccggaggcctgctgggcagcgttggtagctggcaagacaaagcagagaagccagtaaccaaacagcactccagatgactggactccctttttcctctcggtgtgaatcaggaacactgcgaagctcatcgtggtgagccacacagtaggatgaa

SEQ ID NO: 370589 - DNA, 596 bp, Homo Sapiens; identical to SEQ ID NO: 256525

SEQ ID NO: 370590 - DNA, 466 bp, Homo Sapiens; identical to SEQ ID NO: 264799

SEQ ID NO: 370591 - DNA, 346 bp, Homo Sapiens; identical to SEQ ID NO: 264801

SEQ ID NO: 370592 - DNA, 442 bp, Homo Sapiens; identical to SEQ ID NO: 264802

SEQ ID NO: 370593 - DNA, 713 bp, Homo Sapiens; identical to SEQ ID NO: 264803

SEQ ID NO: 370594 - DNA, 421 bp, Homo Sapiens; identical to SEQ ID NO: 264804

SEQ ID NO: 370595 - DNA, 755 bp, Homo Sapiens; identical to SEQ ID NO: 264805

SEQ ID NO: 370596 - DNA, 418 bp, Homo Sapiens
  misc_feature (13)..(13): n is a, c, g, or t
  misc_feature (42)..(42): n is a, c, g, or t
tacggccttcggnaaaaacctccagccagatgcccccagtgnaaacaagattcctgtagaaacctccagctgaagccgagttgatgaccccccgggtggatgccagatgacattgtagagaaaatattacaaagtcaagacttcagccctagattcccagtgcggaaggtgtgtaggtaactgttaagccatagattcctgcaatcccaggtttttgtaatctgtgtagtcagcagtaaagaggctcagaacatcataatactgactgttgcatatttgtatagtaaatttcatgcccataaaaatatcaagataactttatagctcatttattaatgagaatgagtattgagtttagaaaaagaacaaatgttagttaaaagtgatcaattttaaataaaacatttattgtgttttt

SEQ ID NO: 370597 - DNA, 687 bp, Homo Sapiens; identical to SEQ ID NO: 264807

SEQ ID NO: 370598 - DNA, 400 bp, Homo Sapiens; identical to SEQ ID NO: 261138

SEQ ID NO: 370599 - DNA, 601 bp, Homo Sapiens; identical to SEQ ID NO: 264808

SEQ ID NO: 370600 - DNA, 554 bp, Homo Sapiens; identical to SEQ ID NO: 264809

SEQ ID NO: 370601 - DNA, 888 bp, Homo Sapiens; identical to SEQ ID NO: 264813

SEQ ID NO: 370602 - DNA, 710 bp, Homo Sapiens; identical to SEQ ID NO: 264814

SEQ ID NO: 370603 - DNA, 710 bp, Homo Sapiens
  misc_feature (49)..(49): n is a, c, g, or t
  misc_feature (481)..(497): n is a, c, g, or t
  misc_feature (513)..(624): n is a, c, g, or t
taccaatcttacactttctcctgcacgcatttgccttttgttatggtcntgacctcagtggacaccaacccagtctttgacaaggtagccacctctctctctcttcgagatttaagtttttcccctgaaccattgtggaattagaaaagtaaccctctaacatgcaaggccctcccttgggtattcattgtggattaaagcaaattttctatctattttcgagaaatgtggctcaaggctcagtcatttacataccattgatttgtctttcctatatccaggagccaggtgaactttggattccttaacattttaaaacatatcaattcagtgcttaactccataaatgtatttataaaggaaactttaaaacactaccataaatttaagactagtatggtaaacaggcattaaaattactatgctaaaaacaaaactatgttattttttgcagaaggcactaaacctgaggttactctcnnnnnnnnnnnnnnnnnctgagatggagtctcnnnnnnnnnnnnnnnnnnnnnnnnnnnnnnnnnnnnnnnnnnnnnnnnnnnnnnnnnnnnnnnnnnnnnnnnnnnnnnnnnnnnnnnnnnnnnnnnnnnnnnnnnnnnnnnntacttcatttccccggagggctctggctttataattgacagcatcggaacaatttccacagcagcagtttttgattttgaaagtga

SEQ ID NO: 370604 - DNA, 228 bp, Homo Sapiens; identical to SEQ ID NO: 264815

SEQ ID NO: 370605 - DNA, 748 bp, Homo Sapiens; identical to SEQ ID NO: 264816

SEQ ID NO: 370606 - DNA, 378 bp, Homo Sapiens; identical to SEQ ID NO: 264817

SEQ ID NO: 370607 - DNA, 650 bp, Homo Sapiens; identical to SEQ ID NO: 264818

SEQ ID NO: 370608 - DNA, 356 bp, Homo Sapiens; identical to SEQ ID NO: 264819

SEQ ID NO: 370609 - DNA, 686 bp, Homo Sapiens
ttcctccgaagagtggcccctgcgagacgaggacacgccagctacgatccctcgggaagtagagatggaaatcattaggcgcattaacccagacctgaccgtggaaaatgtcatgcggcacaccgcgctcatgaagaaacggaagaagaaaaggcccagaggagtaaagccgggtcctctgcccatcacagcggaaggagtaaaaagagtaggactcatcggaagtcccatggaaagtctcggtctcacagcaagacacgggtgtctaaaggagacccttccgacggttcacatctggatatcccagctgaaagagagtatgacttctgtgatcctcttaccagggtgcccagggagggctgcttcatcattgaacacaaaggagataacttcatcatgcacagaacacaaacgtgctcgagtcccacttccccatgacaccagaatgggatgtgtctggtgaattggctaaaaggagaactgagatgccttttcctgaaccttctaggggaagctcccactcaaaagtgcaccgaagccacagccatacacaggaccggaggtccaggaatgagagatccaacaaagccaaggagagatccaggtcgatggataactccaaaggccctctggatgcttcttctctagggacgccggaagacttgctgaaggctgcagcaagacga

SEQ ID NO: 370610 - DNA, 225 bp, Homo Sapiens; identical to SEQ ID NO: 264820

SEQ ID NO: 370611 - DNA, 729 bp, Homo Sapiens; identical to SEQ ID NO: 264821

SEQ ID NO: 370612 - DNA, 252 bp, Homo Sapiens; identical to SEQ ID NO: 264822

SEQ ID NO: 370613 - DNA, 1031 bp, Homo Sapiens
caattccaatgcacttcttcacagaagagggccagtaatggtagcatttgataattccaccttctatctctctggatatcatggctgtaacattcgaattattttccaacaccaattgccaaaagtcatctctggtgctcatcagtggtccttgagtagcgattcaaaaatactcttctccacaattgactattctaatataactagcattgatgtagtccttgctttttccaagaggaacgcgtgttgaatcatcagaaagaatatctcggtatctgtttttttctctgttgcttggttgattcccagagttgaactcaccaggcagattcttaagttctaaagccataaattcctgcatgatatcatacagatactgttttttcctcaaggattttcaaacaatccttgatggctgtctgctcatgaaaaattgaatattaatggccgaatctgagccaactgatctagttctccttcagaaacaattttgcgcgtaccagaaagtagaggggagagagcctgtgatggccctgcagcctcctcatcctcactgctccacctgtctcttctgaaggggcctctggctgtccacatgctgggatcactgccactttctgaaggctcttcaaaaacatcctcataatcattatgtgggaaattccgaagagaaagttttaccttctctgaattaactttattttcaaaaacctttgatctaggtgtgttttcctgacttgatgaaggcaaagtctccctgaaattcaagtcttctgcttcagagtcatttccctcataatcgtttacaggctctgctctaaagtccctaggtgaagacatgttgttcccatcccctaaatgagactggtaaaaggcttcttcagaaaaggagccttagtgtcctgtgagtcaggccaaaggtctagttagtatcctgggggccagcaaacaatttttgttcacctgggcctgcggggccgccccaactgtcccgctgcaaccccagcagcctcgccagttgggaccccgct

SEQ ID NO: 370614 - DNA, 563 bp, Homo Sapiens; identical to SEQ ID NO: 264825

SEQ ID NO: 370615 - DNA, 608 bp, Homo Sapiens; identical to SEQ ID NO: 264826

SEQ ID NO: 370616 - DNA, 222 bp, Homo Sapiens
ggccgaactttgggactggggtgccgagggcaggggctggcttggtgttgacactggaggcctctgggatggaaaatcctgtatctggcagaggtcaagcagggtgcggacgcccacgagacaccagagctcgcccagtagggagacaaggatgcccagcaggtccagccagcgacccacagtcagcagcagcacgaagaggccgcccatgcgcaccagcac

SEQ ID NO: 370617 - DNA, 291 bp, Homo Sapiens; identical to SEQ ID NO: 264829
  misc_feature (66)..(96): n is a, c, g, or t

SEQ ID NO: 370618 - DNA, 750 bp, Homo Sapiens; identical to SEQ ID NO: 264830

SEQ ID NO: 370619 - DNA, 662 bp, Homo Sapiens; identical to SEQ ID NO: 264832

SEQ ID NO: 370620 - DNA, 790 bp, Homo Sapiens; identical to SEQ ID NO: 264834

SEQ ID NO: 370621 - DNA, 1328 bp, Homo Sapiens; identical to SEQ ID NO: 264835

SEQ ID NO: 370622 - DNA, 806 bp, Homo Sapiens; identical to SEQ ID NO: 264836

SEQ ID NO: 370623 - DNA, 700 bp, Homo Sapiens; identical to SEQ ID NO: 264837

SEQ ID NO: 370624 - DNA, 412 bp, Homo Sapiens; identical to SEQ ID NO: 264838

SEQ ID NO: 370625 - DNA, 328 bp, Homo Sapiens
tgtgtgtttagttttttttatttgaattttcaaactttgcactgtacctgtaatgaggtgatggagtgcctcttggcttcacaatgcaaagttatttttttatcttctgaaccaacagggaaaatgctgttgctgggttctttgataaatacagggccttgtaagagaagctcacctatatgggtgggagacatccaaaaaataataatcagtaaaaggcattgtaaaaagttacattccagtattgaagaaaacaaggaactaaaaattctagtactgctccatttgcatacaaagcaaaatgctctgtagacattgttttgttaaa

SEQ ID NO: 370626 - DNA, 482 bp, Homo Sapiens; identical to SEQ ID NO: 264839
  misc_feature (287)..(287): n is a, c, g, or t

SEQ ID NO: 370627 - DNA, 668 bp, Homo Sapiens; identical to SEQ ID NO: 264840

SEQ ID NO: 370628 - DNA, 513 bp, Homo Sapiens; identical to SEQ ID NO: 264841

SEQ ID NO: 370629 - DNA, 429 bp, Homo Sapiens; identical to SEQ ID NO: 264842

SEQ ID NO: 370630 - DNA, 594 bp, Homo Sapiens; identical to SEQ ID NO: 264844

SEQ ID NO: 370631 - DNA, 794 bp, Homo Sapiens; identical to SEQ ID NO: 264845

SEQ ID NO: 370632 - DNA, 656 bp, Homo Sapiens; identical to SEQ ID NO: 264846

SEQ ID NO: 370633 - DNA, 730 bp, Homo Sapiens; identical to SEQ ID NO: 264848

SEQ ID NO: 370634 - DNA, 275 bp, Homo Sapiens; identical to SEQ ID NO: 264849

SEQ ID NO: 370635 - DNA, 388 bp, Homo Sapiens
acctcctgcaaaacatccttccttgaagcctagcacccttttggaagatcctgctgtgaaaggagcagtacaaagaaagaatgtacagacattgagagcagaaaaagccttaccagtggcttcagaggaagagcaacaaaggcgtgaaagaagtgaaaagaagcaaccacaggtcaaagaaggaaataatacatacaaaagtgaaaaaatacaactatcagaaaatatatgtcatagtacatcttctgctgctgctgacagattaacccaacaaagaaagattgggaaaacataacctcagcaatttcccaagaaactgaaggaagagcatgatagatgcaccttaaaacaagaaaatgaagaaaaaacaaatgttaatatgctgtac

SEQ ID NO: 370636 - DNA, 642 bp, Homo Sapiens; identical to SEQ ID NO: 264851

SEQ ID NO: 370637 - DNA, 308 bp, Homo Sapiens; identical to SEQ ID NO: 264852

SEQ ID NO: 370638 - DNA, 854 bp, Homo Sapiens; identical to SEQ ID NO: 264853
  misc_feature (88)..(200): n is a, c, g, or t

SEQ ID NO: 370639 - DNA, 716 bp, Homo Sapiens; identical to SEQ ID NO: 264854

SEQ ID NO: 370640 - DNA, 537 bp, Homo Sapiens; identical to SEQ ID NO: 264855

SEQ ID NO: 370641 - DNA, 649 bp, Homo Sapiens; identical to SEQ ID NO: 264856

SEQ ID NO: 370642 - DNA, 481 bp, Homo Sapiens; identical to SEQ ID NO: 264857

SEQ ID NO: 370643 - DNA, 441 bp, Homo Sapiens; identical to SEQ ID NO: 264858

SEQ ID NO: 370644 - DNA, 1747 bp, Homo Sapiens
  misc_feature (1615)..(1615): n is a, c, g, or t
  misc_feature (1619)..(1619): n is a, c, g, or t
  misc_feature (1634)..(1634): n is a, c, g, or t
  misc_feature (1688)..(1688): n is a, c, g, or t
  misc_feature (1691)..(1691): n is a, c, g, or t
  misc_feature (1696)..(1696): n is a, c, g, or t
  misc_feature (1699)..(1700): n is a, c, g, or t
gacgcgaggcctggggtggggcgaattcggcacgaggggaacttcgggaagaatctgcggaatggcggcagtttcaggctgatctccagactgcagtagtcattgcaaatgacattaaatctgaagcccaagaggagattggtgatctaaagcgccggttacatgaggctcaagaaacacaaatgagaaactcacaaaagaattggaggaaataaagtcacgcaagcaacgaggaggagcgaggccgggtatacaattacatgaatgccgttgagagagatttggcagccttaaggcagggaatgggactgagtagaaggtcctcgacttcctcagagccaactcctacagtaaaaaccctcatcaagtcctttgacagtgcatctcaagtaccaaaccctgctgcagctgcaattcctcgaacgcccctgagcccaagtcctatgaaaacccctcctgcagcagctgtgtcccctatgcagagacattccataagtggaccaatctcaacatccaaacccctgacagccctgtcagataagagaaccaaactatggggaaatccctgttcaagagcatctgttaagaacatcttcagccagccggcctgcttccctgccaagagtgcctgcgatggaaagtgccaagaccctctcagtgtctcgacgaagtagtgaagaaatgaaacgggacatttctgcacaggagggagcgtcgccagcctctctgatggctatgggaaccacgtctccacagctttccctgtcctcttctccaacggcatctgtgactcccaccacccgaagccgaataagagaagaaaggaaagaccctctctcagcattggccagagaatatggaggatcaaagaggaacgccttgctgaagtggtgtcagaagaaaacagaaggctatcagaatattgacattacaaacttcagcagcagctggaatgatgggctggccttctgtgccctcctgcatacatatctccctgcccacattccatatcaagaactgaacagccaggataagagaaggaacttcatgctggctttccaggcagctgaaagtgtcggcatcaaatccacactggacattaatgaaatggtacggactgaacgacccgactggcagaacgtgatgctgtatgtgacggcgatctacaagtactttgagacctgagcatgccgggaggagccgccccaatagcgggggtacccctccacagcgaccgagcgaaaccgacgccattagctacgcaccccctgtaaagcttccagcaactctgggctgccccacagcgtgtgagcctaccagctcggggcttccgtattggaagaactcagccgtgtggcccacagctcccaccagggccctctcccacatgacccgtccattcaggtcatgtggcctcagcacacatcatgtcagcccggtggctgctggagttttccttctgaagagaatattgaactacactagtgctccagggcaccaaacaaaaagggctcatgcacagctgaatttgggaaaagggattcagttctgtgggaaactcactaggggttgatgaaggctcggccgcggcacttccctgactatgggctggggntggngttcccggtgctggntgagaacccagaaagagagtccagcgccctggccagttccccagcgccctgggnccntcaancgnnccctaggttttggagggagcatggttcccccacacggacggtggggc

SEQ ID NO: 370645 - DNA, 1261 bp, Homo Sapiens
  misc_feature (1236)..(1236): n is a, c, g, or t
ggcctgggtggcgaattcggcacgaggccggaatctggcccctgcaggcgtggggttccacgtgggaggaatccatcccctctgggagtaagaaatgaccagggtccgggaaccagttacattcaaggatgcctctgtggccttcaccgaggaggagtgaggtcacctggactctgctcccaggaagctgtgcggagctgtgatgctgggcaactacagaaacttggtcttggagacttgaatgaaaattctgtggagaatcttcagcagaaaacacttcaggatctgttacatgagctttcctcctggctagttttggaaggcatggccagtacaattactggaagtcaggattgtattgtgaatcatcgaggggaagtggatggggagcctgaactagatatttccccttgtcaacagtggggagaagcatcttctcctatttccagaaacagggacagtgtgatgactcttcaaagtggttgtttcgaaaacattgaaagtgaaacatatttgcctttgaaagtctcaagccaaatagacacacaagactcttcagtgaagttctgtaagaatgagcctcaggatcatcaggaaagcagacgtctctttgtaatggaagaaagcactgagagaaaagtgataaagggggaaagttgttcagagaaccttcaagttaaactggtgtctgatggacaagaactggcctcgccattgttaaatggtgaggcaacttgccagaatggccagttaaaagaatctttggatcccattgactgtaactgcaaagacattcatggatggaaatcacagggtggtcagttgtagtcagcagagagctcatacagaggagaaaccctgtgaccataataactgtggggaaaatacttaacacccagcccagatggtcatccatatgagaaaatccacactgcagagaaacaatacgaaggtagtcagtgtggtaagaacttcagtcaaagctcagagctactacttcatcagagagaccacacagaagaaaaaccctacaaatgtgagcaatgtggggaagggcttcacaaggagctcgagtctgcttatccatcagggcagtccacacagatgaggaagccttattaagtgtgacaagtgtggggaagggctttcaccaggagctccaagtcttgctccttccatcctggccgttcccttacagggcgaaaaaaccttattaatgttggacagttttggggnaggggttttagttccggggttccaa

SEQ ID NO: 370646 - DNA, 1021 bp, Homo Sapiens
ggcctgggtggcgatctcggcacgagggttggtgaatggcgttggtggcgggaaagttgagtctctcctgcgccgagccttcggggcgatgtgtagtgccttccatagggctgagtctgggaccgagctccttgcccgacttgaaggtagaagttccttgaaagaaatagaaccaaatctgtttgctgatgaagattcacctgtgcatggtgatattcttgaatttcatggcccagaaggaacaggaaaaacagaaatgctttatcacctaacagcacgatgtatacttcccaaatcagaaggtggcctggaagtagaagtcttatttattgatacagattaccactttgatatgctccggctagttacaattcttgagcacagactatcccaaagctctgaagaaataatcaaatactgcctgggaagattttttttggtgtactgcagtagtagcacccacttacttcttacactttactcactagaaagtatgttttgtagtcacccatctctctgccttttgattttggatagcctgtcagctttttactggatagaccgcgtcaatggaggagaaagtgtgaacttacaggagtctactctgaggaaatgttctcagtgcttagagaagcttgtaaatgactatcgcctggttctttttgcaacgacacaaactataatgcagaaagcctcgagctcatcagaagaaccttctcatgcctctcgacgactgtgtgatgtggacatagactacagaccttatctctgtaaagcatgccagcaactggtgaagcacaggatgtttttctccaaacaagatgattctcaaagcagcaaccaattttcattagtttcacgttggtttaaaaagtaacagttttaaaaaacatttttttattattggagcaaaatgggggttgaaatttttgttgatatacctcctaaaataagcctttttgcaggggactacgccaggcccttaaaatttttcccttagacggaagtcttggcctccggc

SEQ ID NO: 370647 - DNA, 794 bp, Homo Sapiens
gttcctgtaggggtgaagagagtctgtgtactcttcctgttacgaaaaccaacgttcctcatccagtcgacccctgcgtctgacacctgttggcaacaaaggtttgcactacttggcagctgcatggaagccatcagttgcaaaactgtaggtacttaagtcctgcccagttatcatcagaggaaacatcatcttatatgaacttgatcacactcctctaaatcattaagaaacaaatgagtatcagcaagattaaaaatcatttcttccatgcggagtccaagggttacagccatggggggatccttgccatacttctgtgcataagacccggtgagcagtgagtgaaaaacaatgatggtttcatccaaatcccagacaaacacacgctccaggtcactatcaggaggcggggagggattatttttccggcctcttcctctggactttgacccagaactcctacaggttctctcatcaagatctttgatgggtgtggagggactctgcatggtatcgaactctcctggttggttagtcagtcctgggagagattcctgcaactgataagtagaggttgaagagggtgtgccatcggctgtgttattcgatgtcatatacgctccatacgttgatgctgaataatactgtgcatactggttttggccaaaggctgtataggatggataatcctgttgtgaaccactgaaatttgttgaattggaaactgaattatttgcataaatagtagatgatggtgcaaaactagaacctggcatttggtaagaataagc

SEQ ID NO: 370648 - DNA, 1020 bp, Homo Sapiens
  misc_feature (729)..(729): n is a, c, g, or t
  misc_feature (895)..(895): n is a, c, g, or t
gagcgaggcctgggtggcgaattcggcacgagggcggggtggaaagctaaggcctttgaagacctgggaccccgtagtttcgggagagggtgaggggtgaatggtgctgaggtgcgaggagagggaaggacagtaaagagcaggtgggcaggagggtctccgactccagagacctgagcttttggggcgcgggtgggagcgcgggggaaccctcaagacggctttcttttggcgactgagggtttttctgccacaggaagctgggccgggctgctgtgcctgggaggagggaaggaggaatgagaaagcggtgacggtccctgccccccctcgccaggtgactgtcccacccatttagttgaatgtagcggccagagaggcactcgcggcagcccgtacgggtgggacctctcggtgtccttcgggaaacaggaggagcaagttcgactccagcgagggaaaacggaggtgggagactgaaccatctccacatctagttgcccttcgggaaacaggaggagcaagttcgactccagcgagggaaaacggaggtgggagactgaaccatctccacatctagttgccccagcaatgggaaatccagaaaacatagaagatgcatatgttgctgttattcgtccaaagaatactgccagtctcaattctcgggaatacagagctaagtcatatgaaattttgttgcatgaagttcccattgaaggacagaanaaaaagagaaagaaagttttattggaaacgaaacttcaaggcaacagtgaaataacacaaggcatattggattacgtagtagaaaccaccaaaaccaatttctcctgcaaaccaagggtatcaaaggaaaaacgagttgtactaaatgaaaaaattttcctctggnatgggagagaagaatggggccaaaaaaacctccatttatttattggttccatccagtgggtccaaaggattattacctaaaatacccccttattaccccccagggatggcccccaattttttttc

SEQ ID NO: 370649 - DNA, 714 bp, Homo Sapiens
  misc_feature (247)..(282): n is a, c, g, or t
  misc_feature (661)..(662): n is a, c, g, or t
  misc_feature (696)..(696): n is a, c, g, or t
gctccgcgcgtggcgagtctgtgtcctccctgtcccccagagcagagaaccctctctgtgtctggaccggggaggagcagacgctggacaggtttttggcagaatgctggcaattcccaggaagatatgtggagaacggaaaggttgctacacccaattagtggcgcaaaggctatgattatggaggattggacctgcaaactccagaacagagcaaccttgtaaaatgtgtgtgggcagcacagannnnnnnnnnnnnnnnnnnnnnnnnnnnnnnnnnnntactgatttatggaaagcacctggtgtatgttctgccctctgaggaccctgccctttcccaaaaggggtatcttaagaaggaaaatatggctgctctttgccggacagcagagtcccagaaccccatgcaggtgtttcagggctttacgtcattcaaggatgtggctgtgaacttcactaggaagaatggagagtactggaccttgctcagagagtcttgtacagggatgtaatgctggagaactataggaacctggtctccttagaatttccattttccaaacctggtatcatctcctagttggaagaagtggtaggcccacgaacgcaaatgcaggagggcagaggtgccaagaagcagctcagcctcccgagtagnnggggattacaggtgcctgccaacacacccagctnacgttttgtatttttagt

SEQ ID NO: 370650 - DNA, 916 bp, Homo Sapiens
gcgttccactgaccctggcccagggcccaggcctgtctggggtgggcgctgccgctcaccactcagggaggacctgggccccttggcttcctgccttggggtcagcagccaccagctggcctggttggctctggatttctggactttttaatgaagcgtggttacctctgacgctattcccttttccaagccttccccaacctccccctctgtgaggggagccacctgagggctgtggaacccagcaggcatgagatgaaccgcaattgcccattgggctgggcagatgagatcctactttctccccaggacctggaggcaggtagagatgggggagcagaggggatgggcaagggacccagctccagcctaggacatgaagggaagaccagacaaggatcttagcgtctaatagcaagagagacaggttgtaggatctctgcctgaagatagcttagtgatatgtcgaggtcttctgtctacagcccctgggtctctgctgaagaccttaaagagcaatgttacctaagagagggggaaggattgagaatgttgcttgggaattttgagcagcccatgaatcccttaaggccgcccaaccatgagccccaggtctggagacgggctaagccttcaatccgcaaagcccaacaccaggcacaacatccgggattggtccagaatatgtacaccttcagggattccgcggccgagtcaatcaattgtccacaaacacttgtgagttacgttcgcgaatatgttcacactcatcgtagaaccagggcccacggttcgcggtgtcgtatacccgcctggtagatgcttaagcaatttggggcaaggccaaatgcaggcggatatcacccttcgcgggtcacgcacattgccagaacccgcttgtgacgcgtctgccgaa

SEQ ID NO: 370651 - DNA, 1175 bp, Homo Sapiens
ccgcaaaaaacttgttgcctgtcgcccacggccctgatataacccttaagtagcgaggcctgggtggcgaattcggcacgaggctccgccccgcttgcctcccgttcttccccgcccgctccatccgggtcgctgacggctgtctctggactggacagcagtggcgtccgcttttctctaaggaacccgataagaactccattttctgttgatgtggagacatagggtacctccaactttccggggtttcacaagagaattttttattgaaactggaagaccaaaataattacaagcatgttgtgctggggaaatgcatcctttgggcagctaggtttgggtggaattgatgaagaaattgtactacagcccagaaaaagtgacttctttataaataaaagggtccgagatgtaggatgtggactcacacatactgtgtttgttctggatgatggaacagtgtacacatgtggatgtaatgatctaggacagctaggtcatgaaaaatccagaaagaaaccagagcaggttgttgccctggatgcccaaaatattgtagcctgctcccctgtggagaagctccctacgctatcgctaaatgaccaaggccaggcgtatgcttggggtctcgattctgatggaccgcttggcctggcaggatcccaggaatgcatcacagtcccccgaaatattaacagcttgtcagatctccacattgcacagggtgccttgtggaacacaacccttcccttgccctttttcaagtccactgaagcccttccgttggggaccgaactaaccctggcctcctggggtctttaggtactgaactgtaacaaagcagcagtttcaacccccacctgcgttaaagtcccttcccttgggcacccgcccctttctggcgaacctggccacctaggacggaaaccccacaagttttgtccaaaccccaccccttttccggcagcctttttctttgggaagaggggggcatccccacacgggccttttcgttccaccccctaagccttcccactgggattgccaaaaggtggccttggggctctggttttcccccactctcttacccccaaggggttcccctcaccccaatctcttgggaaaagaaagccgctttgtccgcatctccccgttcccctatacccccaaaataa

SEQ ID NO: 370652 - DNA, 1189 bp, Homo Sapiens
  misc_feature (82)..(98): n is a, c, g, or t
caaggtagcgaggcctgggtggcgaattcggcacgaggggtccgggttcgcttgcctcgtcagcgtccgcgtttttcccggnnnnnnnnnnnnnnnnnggacaggacccccttgagcttgtccctcagctgccaccatgagcgaccaagatcactccatggatgaaatgacagctgtggtgaaaattgaaaaaggagttggtggcaataatgggggcaatggtaatggtggtggtgccttttcacaggctcgaagtagcagcacaggcagtagcagcagcactggaggaggagggcaggagtcccagccatcccctttggctctgctggcagcaacttgcagcagaattgagtcacccaatgagaacagcaacaactcccagggcccgagtcagtcagggggaacaggtgagcttgacctcacagccacacaactttcacagggtgccaatggctggcagatcatctcttcctcctctggggctacccctacctcaaaggaacagagtggcagcagtaccaatggcagcaatggcagtgagtcttccaagaatcgcacagtctctggtgggcagtatgttgtggctgccgctcccaacttacagaaacagcaagttctgacaggactacctggaagtgatgcctaatattcagtatcaagtaatcccacagttccagaccgttgatgggcaacaacctgcagtttgctgccactgggggcccaatgccacaaggatgggttctgggtcaaattcccgatcataacccggtgccagccccaacaggattatccacaaattctaaggaaagggggaagcataagttcccttgcgctcctaatgccaaaacccttactccccacaagggctggtccccccttccaaaggccctggggcataaaaaaattgtacctacctcggggaaaaaaactcccgttattttggacccaacaggtaccccaccgggcgcctccggaaatatgggaaacacctctacccctataggcttcaccgtggaccacaccaagcgctatttcctcgccgacgcctaaccctattgaacttaccgcgagcctctttttcaggggatcgcctccccgagattgatcgcgtcgacttcgtggcggtgtaaccactggtatcaacgtgggctgtcccctacagccctggtgtgacctatcaagtatggaa

SEQ ID NO: 370653 - DNA, 974 bp, Homo Sapiens
  misc_feature (851)..(851): n is a, c, g, or t
taaggtagcgaggcctgggtggcgaattcggcacgaggcacatcagaaaaagcagtattaacttcacagaaaagtagtgaataccctataagccagaatccagaaggcctttctgctgacaagtttgaggtgtctgcagatagttctaccagtaaaaataaagaaccaggagtggaaaggtcatccccttctaaatgcccatcattagatgataggtggtacatgcacagttgctctgggagtcttcagaatagaaactacccatctcaagaggagctcattaaggttgttgatgtggaggagcaacagctggaagagtctgggccacacgatttgacggaaacatcttacttgccaaggcaagatctagagggaaccccttacctggaatctggaatcagcctcttctctgatgaccctgaatctgatccttctgaagacagagccccagagtcagctcgtgttggcaacataccatcttcaacctctgcattgaaagttccccaattgaaagttgcagaatctgcccagggtccagctgctgctcatactactgatactgctggttataatgcaatggaagaaagtgtgagcagggagaagccagaattgacagcttcaacagaaagggtcaacaaaagaatgtccatggtggtgtctggcctgaccccagaagaatttatgctcgtgtacaagtttgccagaaaacaccacatcactttaactaatctaattactgaagagactactcatgttgttatgaaaacagatgctgagtttgtgtgtgaacggacactgaaatattttctaggaattgcgggaggaaaatgggtagttagctatttctgggntgaccagtctattaaagaaagaaaatgctgaatgagcatgatttttgaagtcagaggagatgtgggtcaatggaaagaaaccaccagggtccaaagcgaggcaagagaaatccccaggaacat

SEQ ID NO: 370654 - DNA, 1068 bp, Homo Sapiens
ctaaggtagcgaggcctgggtggcgaattcggcacgaggcttaaaacacatcattgtagtgctggatccagtgctcttacagatggaaggtgggggccagctcctaggagcactgcagaccatggagtgccgctgtgtgattgaggcgcaggctgtgccttgcagtgtcacttggaggagaagggctgggccgtctgaggacagagaggactgggtggaggagccaacagtactggtgttgctccgggcagaggcatttgtgtccatgatcgacaatggaaagcagggaagcctggacagcactatgaaagggaaggaaacgcttcagggctttgtaactgacatcacagcaaagacagcagggaaagctctgtcactggtgattgtggatcaggagaaatgcttcagtgctcagaatcctccaagaagagggaaacagggagcaaataaacagaccaagaagcagcagcagagacaaccagaggccagcatagggtccatggtatccagggtagacgctgaagaggcattggtggatctgcagctacacacagaagcccaggctcaaattgtgcagagctggaaagagctggccgacttcacatgcgcattcacaaaggctgtggctgaggcgcccttcaagaagctccgagatgaaactaccttctccttctgtctggaaagtgactgggctggaggggtgaaggtggaccttgctggcggggactcgcactagtctggaggagacagattcagcagctgaaccgagtcagccctggaaatggccagtgcagttgtgaatgcctatccctccccacagctcctggtaaaggcttatcagcagtgttttttcggataaagaacgcccgaaattgcttcccaaacataccaggtgccccctgggggaaagtggtgaaatccactttttcgccgccttgggacccgaacttttcccgggcgtatcctacccttcagaatgaccacctttacaggccaccttctcctcctttaaaaaaggggctggaacggaatcccaaccccctcccggggaataagggttgaaaaagc

SEQ ID NO: 370655 - DNA, 1052 bp, Homo Sapiens
  misc_feature (931)..(931): n is a, c, g, or t
  misc_feature (933)..(933): n is a, c, g, or t
  misc_feature (937)..(937): n is a, c, g, or t
  misc_feature (978)..(978): n is a, c, g, or t
taaggtagcgaggcctgggtggcgaattcggcacgagggcgggaggtcagtctagagcacgaggagcagaaactggagctcaagcgccagctcacagagctacagctctccctgcaggagcgcgagtcacagttgacagccctgcaggctgcacgggcggccctggagagccagcttcgccaggcgaagacagagctggaagagaccacagcagaagctgaagaggagatccaggcactcacggcacatagagatgaaatccagcgcaaatttgatgctcttcgtaacagctgtactgtaatcacagacctggaggagcagctaaaccagctgaccgaggacaacgctgaactcaacaaccaaaacttctacttgtccaaacaactcgatgaggcttctggcgccaacgacgagattgtacaactgcgaagtgaagtggaccatctccgccgggagatcacggaacgagagatgcagcttaccagccagaagcaaacgatggaggctctgaagaccacgtgcaccatgctggaggaacaggtcatggatttggaggccctaaacgatgagctgctagaaaaagagcggcagtgggaggcctggaggagcgtcctgggtgatgagaaatcccagtttgagtgtcgggttcgagagctgcagagaatgctggacaccgagaaacagagcagggcgagagccgatcagcggatcaccgagtctcgccaggtggtggagctggcagtgaaggagcacaaggctgagattctcgctctgcagcaggctctcaaagagcagaagctgaaggccgagagcctctctgacaagctcaatgacctgggagaagaagcatgctatgcttgaaaatgaatgccccgaagcttacagcagaagctggagactggacgagagctcaaacagaggctcctggganancaanccaaattacagcagcagatgggactggcgaaaaatcacatntttcgcgctggactcaaggactgccagaaaactcttaaatccgggctggatctacctgggaggaccgaaaggat

SEQ ID NO: 370656 - DNA, 1028 bp, Homo Sapiens
taggtagcgaggcctgggtggcgaatccagcacgaggtggagccaaagagaaattgtgagcgtggccatggctcaagccctggaggaggtgcggaagcaaagggaagagttccagcaacaggcagctaacctgacagccataatagacgagaaggaacagaatctgcgggaaaaaaccgaagtgcttctccagaaagagcaggagattctccagctggagcgaggtcacaactctgccctgctgcagatacaccagctgcaggccgagctggaggccctgaggaccctcaaggcggaggaggctgcagtggtcgcggagcaggaggacctgctgaggctgcggggcccattgcaggccgaagcactctcagtcaatgagtcgcacgtgacctcgagggccatgcaggaccctgtgttccagcttccaactgcaggaagaacaccaaatggtgaggttggggccatggatctcacacagctacagaaggagaaacaggacttggagcagcaacttctggagaaaaataagaccataaagcagatgcagcagcggatgctggagctccggaagactctgcagaaggagctgaaaatcagacccgataatgagctcttcgaagtccgggagaaacctggacctgagatggcaaacatggcgccttccgtcacgaataacactgacctgacagatgcccgcgagatcaactttgagtaccttaaacatgtggttttaaaattcatgtcttgtcgcgaatccgaggcttttcatcttataaaagctgtgtcagtgttgctgaacttttcccaagaggaggaaaacatgctcaaggaaactctggaatataagatgtcatgggtttggggccaaacccagctcccaaggggcagcaatcgggccgtcctatctcaaaaccctccggaaaccatgggtccctagaaggggactacccccagggatggcaactccgcgggggttgaccctttttttcctgtggaaaaagaaccactggaaccccccaagtcctggc

SEQ ID NO: 370657 - DNA, 1190 bp, Homo Sapiens
  misc_feature (398)..(425): n is a, c, g, or t
  misc_feature (486)..(514): n is a, c, g, or t
  misc_feature (794)..(803): n is a, c, g, or t
  misc_feature (889)..(903): n is a, c, g, or t
gaccggcagtactatcacgttctaaggtagcgaggctgggtggcgaattcggcacgaggaagtttgcgccaagtgcgcggcagccgggacgcagacggcggcggcggcgagaggcggagcccggggaccaccccccatcaccctccccccagtcacctcacgtaccacaacctcacgtaacctctcaccccccctccgatacccccagccccgggatggcagcgcccgccagccttcccggccggaccggctgtcgccagtgccggctttagcctgtgggactaggccccgccgaggcctgacccccggagccgggacccactgtgcagccagcagccgggccgggactgaggggccgctcccccctcgcggcccgtcgggaggacgctgtcgtcccnnnnnnnnnnnnnnnnnnnnnnnnnnnnagccagggcgaggaagtcgggacccgtattgggaaaaaagcggggccggggtcaagagcgnnnnnnnnnnnnnnnnnnnnnnnnnnnnnggggttgggggggccggaccagacagcacccaggccaggagggggatgaatgtgggaaaccctcgcccactcgacgaacgtgcactactcgggatcatcaggggggctgacggagcaaaacgagactccgcgggttctcccccagactcgagaccctcaagaaagaacatcgtaaaacccggccacgcatgcaacgggctagcccccgagtccctccccccttacgagagctgggaatgggtacccgggaacggtgaacgcgcatctgcccctgttaagnnnnnnnnnnggtatgcatgcccgcacaccagtgggatgccccccccacctcccgacctgtaccataggaacgcggtctgcgggttgccctcgaannnnnnnnnnnnnnnggctgaaccccacaccacttgtaggcagaacgcacccaaagagcaaacccgcagccacgcagaccagccacatgtacacagtgggccgggtgggtcgcgacaccgcaaccgacgacctctaagcttgcccgcggcatttcaccacactctcgctccgcgcgggcacccacgcagtacactgcccgcccgcgggttccccgcccgcgcactacgacgccgcataaaacgaggccatatatgcacgctcacgacacgacatacccgcagaaacatagcgccgcccatgt

SEQ ID NO: 370658 - DNA, 819 bp, Homo Sapiens
tagcgagtatttattatacacgtggtgtaataagaaatgttttagttttaaaaaatcccacctctttggagcccaatgagagacacagcttctggcaggcactgatgaaatggaagtcacacctgccccccggaggcaaagcctttcactagttgggcctcctgcagatgttcctcagttctgtgctggtctccccagagctgcaggacagctggctgcacccagccctgggcatccttaggcttcctggctcctggcagattgctcctgtacggactgccacagagctctgatgttgccctgaccaaagccagtggccccctgcctctgaatcagctccaggaagaaagtgtcctcagtaaaaagggacttggtgaagacctgaagcagaaacttgcctttatcaccatctagcaggatcccctgtcgagcaagcagatgaggctcgtgccctgcagctcggatctgcctctcctttcctggctgctggtagtatgccccagggggagccaggaactggcctccagcagttgccaccccctcagtggcctccacaatgttaggcgtatacagccccacgtgctgcaggcctggccccttgtgccgggccaggaactgctccacctggtcctgtcgtgtcgtcgcccccggaagggactcagccagaacaagagtggggacaatgctgcccggctgggcctgcagggctgtaagcctcagtcccccaagcccaaaccctgctgtcatttcgaggcccagctcgggatcctcacctgggctcagcggcaagtggcaaaagcccaggcagtcgtggaacca

SEQ ID NO: 370659 - DNA, 983 bp, Homo Sapiens
cacaggcacgcaccatcattcctagctaaaatgtcttaaccacgtacatgcactatgtttcatatttaaactagatgacaagaaagtctaccaagagaaaaaagtatggatgcatgggaaatttatttttaaccctcttacattttcctatagattctatcctcaagaggaaccaaaaagctcttgcttttctctccctgcctccagcttgacaaccctacactgtgaataggcagctcctctctcagatatacaacatgccagctttggcacagggtggtgccccttttcattcttatctccatcacccttgattgccaagccttcccttggcagctggaccctgggctgaacgccaagatgaaggactctattgggcatcgaccccttaatcaaccccaggaggacacaggacacattgaatgccacctctcctcttagctttcagcccagtcctttagcagggcacccttgaggactgaataggtccatgagggaggcaggagctaaggtgctggaaaggaggtgttctgcggacggttgaggacagggatggaaggccaacaggatgaggggaatgtagagtctgtgaccaatggcttcgcacttttctcagtgcccggctgtctgagtcagcatgccacttgccatgtgctcttgcgctgtgggaccacgaactgtagccttccactgggggggtttagagctttatgctctacctgttgctgaacgtttctgaccgtctggtcagaggtcttacctgactgattggctgacacctgccattgcttctggcatgtccccatggattccagagaccccgtgcttcgaccttgacttgagctttgagacgggccttcaagacctctggttgagccaagatgccccggtgacatgcccgggctcccggggaccgccaggagtcctcgtgatcacgggtacctttcaaattctctgtgtccggttccggtgcccaggtggcc

SEQ ID NO: 370660 - DNA, 508 bp, Homo Sapiens
gtaaacattacaactctactatgttcattggtactggttgtgggggtgggaggagcaggagggaaccaggcgccgaggaacgaggagacgaagtggcaagagcaacaaaaaaaggagacaaaacacgtttacgacaaaaacatttttgctacaatagacaatttgagaaaacgctctaccacatgtagtactgtacacggtttttaaaaacattgaaaaaatgtcatcactagatgtatttacacaaaatccaaatacacttttccttatttgaaataaaatagatggacagccagaaaaagaattcatttctcatttgtccataatacacagtagctacctgtagtgcaaccgctgcagaaagggaaaataacgtggagggtgggaaccatggaaggaaggtgggtagcgatctttatattaaataaaacaatgatattgtacagattttgctgtatgaaaactgtattttttcttttaatataaaactattgtcactgccacaaaa

SEQ ID NO: 370661 - DNA, 967 bp, Homo Sapiens
ggcctgggtggcgattcaaacacgaggcaaacacctcagtgaattgacgcacaggcaagctcctgagctgtggtttggaggagccgtgtgttggaagaagatggcagatccaggaatgatgagtctttttggcgaggatgggaatattttcagtgaaggtcttgaaggcctcggagaatgtggttacccggaaaatccagtaaatcctatgggtcagcaaatgccaatagaccaaggctttgctcctttacagccatcccttcatcatccttcaactaatcaaaatcaaacaaagctgacacattttgatcactataatcagtatgaacaacaaaagatgcatctgatggatcagccgaacagaatgatgagcaacacccctgggaacggactcgcgtctccgcactcgcagtatcacacccctcccgttcctcaggtgccccatggtggcagtggtggcggtcagatgggtgtctaccctggcatgcagaatgagaggcatgggcaatcctttgtggacagcagctccatgtggggccccagggctgttcaggtaccagaccagatacgagccccctaccagcagcagcagccacagccgcagccaccgcagccggctccgtcggggccccctgcacagggccaccctcagcacatgcagcagatgggcagctatatggcacgtggggatttttccatgcagcagcatggtcagccacagcagaggatgagccagttttcccaaggccaagagggcctcaatcaggaaaatcctcttatgccacctcaggacctggccacttgtcccacgttgccccagcagagtcccagcatggcacccttccttgcgtcactcggtgcagcaggtccatcaccacccctctactgctctccatggaggaaatcgttgcccacagttcccagaatcttcccggaatccctcccccaacaaggggggctggttagg

SEQ ID NO: 370662 - DNA, 1021 bp, Homo Sapiens
gcctgggtggcgaattcggcacgagggaaaagttagacagcaagctggccaacatcgattacctccgaaagaaatgtcacttgaggacaaagaggacaacctctgccctgtgctgaagcccaagatgacagctggctcccacgaatgcctgccagggaacccagtccgacccacgggtgggcagcaggagcccccgccggcttctgagagccgagcttttgtcagcagcacccatgcagctcagatgagtgccgtctcttttgttcccctcaaggccttaacaggccgggtggacagtggaacggagaagcctggcttggttgctcctgagtcccctgttaggaagagcccctccgagtataagctggaaggtaggtctgtctcatgcctgaagccgatcgagggcactctggacattgctctcctgtccggacctcaggcctccaagacagaactgccttccccagagtctgcacagagccccagcccaagtggtgacgtgagggcctctgtgccaccagttctccccagcagcagtgggaaaaagaacgataccaccagtgcaagagagctttctccttccagcttaaagatgaataaatcctacctgctggagccttggttcctgccccccagccgaggtctccagaattcaccagcagttttccctgcctgacccagagttcaagagggacaggaaaaggtccccatcctactgccagggagccctggaacagtcatggaaagcaatccccaacagagagagggcagctcccctaaacaccaagaccacaccactgaccccaagcctctgacctgcctggggcagaacctccacagccctgacctggccaggccacgctgcccgctcccacctgagcttccccctccagggagaagccaggccttgagggaatcgtctgaaaagagggcctcccccgccagaagcggagcgctcttgctccaagggcttgacccatgcagaagaaccctccatggaactgggctttccggaaaattg

SEQ ID NO: 370663 - DNA, 1039 bp, Homo Sapiens
  misc_feature (968)..(968): n is a, c, g, or t
gtagcgaggcctgggtggcgatttcggcacgaggagaaattagaaatggagttagcagcagtgcggactgcaagtgaggaccatcggagacacatcgagatcctggaccaggctttgagcaacgcccaggccagggtcatcaagctggaagaggagttacgagagaagcaagcatatgttgagaaagttgagaagctgcagcaggccctgacccagctgcagtctgcatgtgagaagcgagaacagatggagcggagactgcggacttggctggagagagagctggatgcactgagaacccagcagaaacatggaaatggccagccagccaacatgccggaatacaatgccccagccctcctggaacttgtgcgggagaaggaggagcggatcctggccctggaggccgacatgacaaagtgggagcagaagtacctggaggagagcaccatccgacactttgccatgaatgccgcagccactgcagcagctgagagggacaccacgatcatcaaccactcacggaatggcagctacggagagagctcgctggaggcccacatctggcaagaggaggaggaggtggtgcaggccaacagaaggtgtcaggacatggaatacactattaaaaatctccatgccaaaatcatagagaaagatgctatgattaaggtcctgcagcagcgatctcgtaaagatgccgggaagacagactcctccagcctacgtcctgcccgctccgttccatccatagcagcagctactgggacacactctcgccagacctctcttaccagcagccagctggctgaggaaaagaaggaagagaagacctggaaggggagcataggattgctgctggggaaagagcaccatgagcatgcctctggccccactggctgcacccccacccactttaggactgtcctccatagccctcactacggcaagccagcagtgccccacgnccaggacggggcagcaagggacggccagcacacggaactggacaaaaatgcccgaagctcctttctgggcc

SEQ ID NO: 370664 - DNA, 980 bp, Homo Sapiens
  misc_feature (386)..(415): n is a, c, g, or t
  misc_feature (777)..(777): n is a, c, g, or t
  misc_feature (837)..(891): n is a, c, g, or t
aggcctgagtggcgaattcggcacgagggccaacagaaggtgtcaggacatggaatacactattaaaaatctccatgccaaaatcatagagaaagatgctatgattaaggtcctgcagcagcgatctcgtaaagatgccgggaagacagactcctccagcctacgtcctgcccgctccgttccatccatagcagcagctactgggacacactctcgccagacctctcttaccagcagccagctggctgaggaaaagaaggaagagaagacctggaaggggagcataggtgagccccacacctctgtcagaccatgattggaaaagcaagaccagacagcttctctgccactcatgggacacggaaatgtccctgaatagttcctgnnnnnnnnnnnnnnnnnnnnnnnnnnnnnngggaaactcagtcatacttcagttatagatatgtggaagcattgtgtaaattctaaagactgcaccactggagtagctcttagccatgggttgactcagatcagaattatctattactcgtggtaacgttgaggtgacccttataacacaaaaggctctcatagaaaagcctagagacatcacgcctctgaacttggctctgctctagaccagttgtatgacggctccacctctgcttccacgtctggacaagggaggacagtgtctgcctgctttaccccatggggagtgggagggaataatgggataatggggggggaaggaaagtgtcctgcctgcttttaccccatgggggcgtgggnagggaaaaaatgggataatgggggggaaggaaaagtggcctgccctggctttaccccctnnnnnnnnnnnnnnnnnnnnnnnnnnnnnnnnnnnnnnnnnnnnnnnnnnnnnnntcttgcgcttgcttcacccccatggggacccgggccaaagcaaacaaacggcgcctcctcggggcaggacgccctttcgggaccccccc

SEQ ID NO: 370665 - DNA, 1017 bp, Homo Sapiens
  misc_feature (864)..(864): n is a, c, g, or t
  misc_feature (920)..(921): n is a, c, g, or t
  misc_feature (927)..(927): n is a, c, g, or t
  misc_feature (932)..(933): n is a, c, g, or t
  misc_feature (952)..(952): n is a, c, g, or t
  misc_feature (957)..(957): n is a, c, g, or t
  misc_feature (982)..(982): n is a, c, g, or t
ggcctgggtggcgaattcggcacgaggcttctcccagaatttgactctacagcaagctttcctaccctgctggccaagagcatagctcgaaaagggagggaagcatttcctgggctcaccgttggcttccagcactgatgacagtgcctccctagcttgcagtgggcattcagggcaagcatggaattaatgagtttagctgagctgaggcaaggccctgcctctgagcatggctgtgccccactatttggagagcaccatggctgtgcccctgacccgtagcaaaggtcatctgagcctctgttttgtctggtgaagatggtcggtagaccagcagcagtagcctgggccctgggccaggaaaaagcaaatgtgaagagggaggggctggaagaccagtactcccagaggtcaggaagggcagctcctcctgtgactctctgagcctcagttccctctttggctcttctggcaatgaaatctctagaattaaatatggttgtagggcatggtgggaacttgttgatcctaccctggcctctgcttctagagtggtaccttaggacttgccaaggaaagagacctcatgtgaactctaaatcaatttcctattttcaaagacaaaaacagatgcttttgctacagaggaggagactgcagaattaaccccctgtctgccactgtgcctggatccctgactgttaactgccatttccctctagccctggtattttttctctttgagaatgtgccagctctcctcagttgctcttagccttggcttagagttcccaggagggaagcatagctcatagttctgtaggctgaagctgtccacaccgagcccctggggggagccatttngtttgtacatttttaaaatcttccattcattctttttttgagcacttactttgtgnnctgggnattgnngtttcggcaccatgaattncaggngcacctgtgggagggaatttacatntgaggatggaatccattggggtcttctttccctcc

SEQ ID NO: 370666 - DNA, 714 bp, Homo Sapiens
  misc_feature (29)..(29): n is a, c, g, or t
  misc_feature (31)..(31): n is a, c, g, or t
  misc_feature (45)..(45): n is a, c, g, or t
  misc_feature (48)..(48): n is a, c, g, or t
  misc_feature (102)..(102): n is a, c, g, or t
  misc_feature (105)..(105): n is a, c, g, or t
  misc_feature (577)..(641): n is a, c, g, or t
atctctgccacgggaaaggtgggcggacngnctggcagcctgggngtngcttcaggctcctccctctaaggggcgccatgggaacaggctccggaggacgtnccngttctgaaaggcccccgggacctgctgcagtgccagaggggcctctggagcaggcctggcttttaaatggggggctgaattccagctcacacacacctcaagtccaaccttactttcttcagccagaatacatttcttgtaaaacctgggcttgttgcttggctttaaagatggtgtatgtttgtaaaaatattcttctgggctcaaaagctagcttgagggggcagatgccacaggtgtcccagctccacagccccgggcagatcccagaccccttggtgggcaggtcccagagcctaggtggtagggagcttgatcttgtttttctgcccttaacccttcagtagttggggctgcgaagtagttagacaggatgcccagttaagtttgaatttcagatagaaaataattttagaataaatatgttctatctaatacatgggacagatgttatttttagagataggatctnnnnnnnnnnnnnnnnnnnnnnnnnnnnnnnnnnnnnnnnnnnnnnnnnnnnnnnnnnnnnnnnngctcaggcgatcctcccgccttgactgcctgagtagctgggactacaggcatgcaccaccacgcccagctaat

SEQ ID NO: 370667 - DNA, 855 bp, Homo Sapiens
gcagcgatgaccagcagcctgtgacctctggagcccgggatgtgtccggacatatcacgtcagcccaggtggcgctgagtgctgggaacccagctatgggacagacacctgcagaacctgaggaccaggaggtgaccctgagctgcctggggtgatggaagcttccctcggcatcaggggaagctggcccagaggacagccgggctccatggtttcaggctggacctagtgtggcagttccgagagaggaagcgggggaagggatgcatcttcaggaagggccccctcccctcactcactagagaaggtgcaccccctggccaggatgacgctctgcgggaccttcctggcattaaggcaggcgcccatctgcggggaagctttcagaaggaaacaagaaaaccctcacccccagctggtcaccggagaaggtggtgccaattacagatgcagaaagtttagaccaaacattacttgaaacgacgtttccatgaagcaaatgaactgacacttggcaatgtctgtgtgcagattttgcacaagtaattacactttatttgaaatgatcttaccagctaagcgatcattaagcctgctcccccaatcacacaaagcgctttctcagcgagtgcggctgcggcgtaagtcggttaagcaaatctcacggtttcctccccgtgtggagctctgaggaaccgccagtcagcacaggacgcttatttcctggttggatcttttcccaaacatattattcacaacaagtcaccatgtgactttcccacaggactcttatggcacactaaaaccccataaggaacagggtgcaacatggctcagtaatggaacgagcaaata

SEQ ID NO: 370668 - DNA, 1330 bp, Homo Sapiens
gcttaaattaagcttaaatatacattctcaagataaattatagcatgcatttatgcactgcatttttgaaaaccagcttgagaattttacttccttattagttagcagtagaccaaaagagaatgttgcttctgctctaacaaagagagtaaactaggtaggctacaaagtcataatttattttgagcttgttagaactgaagttacaaggtgagcaggtaaactgaatataagcactattgggaggccagaggcatggagtggataccagaagagatcaaggagatcatgggacacaatcacatggacactaagaatagcgaaagaaacaaacacacgatacatactcctaagctaaagacaaataacaaaaaaaagtcaagcaacatgggcttgatggatagaggccaagagaaaagacccctgaaaagatacccacaaacaattacaccatccgtgagaaaggaacattgacaacagcacaccgaataacacagtgcgactgggtggaaagcgcacaccagcaggaaaggcacgcagaaaagacgatagacacaagaaaggaaagacgggcgagaaacactgcccgcggagcccaacaagtgcgcaaagcgttaaacacaaagagaggaagttgtaagaggaggtgggacccgaatggaatagaggtgcaggagcaaatcttccacacaaaaaaaattcagcagaaacacagagacgagacgagaaagaaggaaagcaacaagagcaagcgactgctaggtcgcaacgaggagataaaataggagtaaatgctcaactaaagagaagaggagtgggagatgaaaaaagacagaagagagagtgcaggcctgtggaaataaaaggccagaaacagacaagcgcgggtaagaaactgcgaaagtgttaaggtaagaaatcacaactaatatcaatagaaaacagcacaatgcaaaatagaaaaggatcacagaaccgacgcacgccgcatgaagccaagagatagagctatgtagagacgcagaaaaagaaaagaacgacgagcgcacgacagcagcaggaagaagacaagaaaagaagtaggagcacaagacgaccccgtggacagcaaataaaatccagccaagcaaaaaaggaaaatacgaatagagagagaaaggacacagagagcgcaccaaagatcacagacaccgacataaatcagacaaagaaaatgaaaatgaagggggaagacaaaaaagagcataggagaaaaaaccacaggagagaacgaaaaagaaagaatgaatagagcggagatgggaaatgaccaatgaagaaggagagagaa

SEQ ID NO: 370669 - DNA, 918 bp, Homo Sapiens
  misc_feature (906)..(906): n is a, c, g, or t
ggcctgggtggcgaattcggcacgaggaggtgacgggggcaaccccgcgtggtcacacgagtgacttgaggtcactcttcctccactgcatgccttgcaggaggcggtgcagagggccatggtctgacgtgggttttcacaggatcctcttggatgctggaggagggtgcatggaaggggccaggcagggaggccagtgagcagcagctgcagtcagctttgcaaagtgtgatgggacttggaccacggtcaggtggacccatgagttggggtccttcagagaagcagaccaatagtgaggagttggctcacatgaggacggaggctgagaagtcctgccagctaccgcctgcaagccggagccccgggaaagctggtggtgtggctccagtgcaagcctgagggcagcacccgggagctgatggtggggacccagtcccagggcaggagaaggccagtgtcccagcccaagcaggcaggtgggaggaaagaggcaagttcctccttcctctgccttcttgtactcttcagcccttcaaggggttgcatgatcccatgcaacacagggaggcatctgctcgccacagtccaccactgcaaacgctggtctcagccagaggcacctcacagactcccccagaaacagcgcatccccagctattgggcatcccgggctggccaggtggacacacagacctcaccagtgcagtcatgctcgttggtcctgaacagcctttggtggggaaggttccagaagtggcgcctgctctgtgccccccacatcagccccagggtctcctggtatcctaaacctacatccctgctcctggccccggctgtcgggaatgcagccaatgttcgttcctcagaatcaagataaaaacgaagggaaccctcctgctctgncaagcaggccgc

SEQ ID NO: 370670 - DNA, 1105 bp, Homo Sapiens
  misc_feature (862)..(862): n is a, c, g, or t
aagaagcgaggcctgggtggcgaattcggcacgaggcctcaagtctctttcctcacttctttctcttcacttaaaacaatttttttggaggggttttggggaggaagtgagcggacgctggggatgggtctcgtaagcggccggattgagaggagggaggaagcagggggcttccgagtgggtgacccagacgcgggctgtggggtggggcagttcgtggggtccggtcctggaaaggcgtcgactgccccccaactcttctggtttcctctacgatgagcggaaggtttgaatcctggaggtggggtctccggtgtggagttctggaaactgtgaggtgatttgcagctggtggaatggaacagtgaagaagcattggaatggtagataacgcagatcatctctggaaaggatattgatccgcctcatgtaaagtatgcttagttcctttccagtggttttgctggaaaccatgtctcattatacagatgaacccagatttaccatagagcagatagatctgcttcagcgacttcggcgtactggaatgactaaacatgaaattctccatgccttggaaactttggaccgtcttgatcaagagcatagtgacaagtttggaagaaggtccagctatggaggaagttcatatgggaatagtactaacaatgtcccagcatcttcctctacagctacagcttccacacagacgcagcattcgggaatgtccccgtcacctagcaacagttatgatacttccccacagccttgcactaccaatcaaaatgggagggaagaattatgagcgattatctacatccaatggaaagatgtcacccaactccctaccatggcaaacaancatggggtcagaaggtccttacagtttttgaaagccttccaaaaaaagaaccttaaatggtaaatgaataaaggtgggaaaaaatttattgaaggaggggaacgcccatggttgatttaaaggagggaaatccaaagccctttttcttggccaattcgggagggaatttccccaaaccagattggttgcccccagggtaaaacaaggtattcaattccgaaaacccggaatttctcctcattt

SEQ ID NO: 370671 - DNA, 620 bp, Homo Sapiens
gctctgctgagagatagcaggccatggcagcggctggtaagaatagttcagtggggctggctggagttgccttgggtcaagcagaatattaataggcaggggaatgcacctgtagctagtgggcgctactgccagcctgaagaggaagtggctcgactcttgaccatggctggggttcctgaggatgagctaaaccctttccatgtactgggggttgaggccacagcatcagatgttgaactgaagaaggcctatagacagctggcagtgatggttcatcctgacaaaaatcatcatccccgggctgaggaggccttcaaggtttttgcgagcagcttggggacattgtcagcaatgctgaaaagcgaaaggagtatgagatgaaacgaatggcagagaatgagctgagccggtcagtaaatgagtttctgtccaagctgcaagatgacctcaaggaggcaatgaatactatgatgtgtagccgatgccaaggaaagcataggaggtttgaaatggaccgggaacctaagagtgccagatactgtgctgagtgtaataggctgcatcctgctgaggaaggagacttttgggcagagtcaagcatgttgggcctcaagatc

SEQ ID NO: 370672 - DNA, 786 bp, Homo Sapiens
attgtgactgatgtaacttgtatagatattatataacatcgtaggcgtaatctgtgtgtagcgtgagttgtatgagagaaattagttggcgctactatacttgtaggtgtgagcctattctttgatcattaaatcaaagaatcaattgttgaaatccgcacataataacctgtcttgggtgtttgtgttcgttcttttggtaactgatatcgcaggatagagagggggggaggcacactcgagtgtgatctttggccgctgtccttccagtaaacaagtcaaggctgtgaggtcgctgggacaacaacagacatgcgccggctgggacgtgcgttcccagagacagataatttaccacgctccgagcaacgcattcagtgcctgcttcagttgcttgcctatcactacagcaagtagtcctgccaactaggttagcagcatgatccccactactttcatggcagtccgtcccagctggcacgccattcacaaggtgagtaacttgtatacatctatgtagcacaatcacccctttccaaggcaccctccctagatgaagttatcacaggcggtgactgtaccagctctgaagagcgagcaaccctttccaaggcatcctcccagatgaagttatcacaggatcttcaggcaaaggaagtgcggtgtcctcagacacaggagggcagggtacttccgctgccaagggagctttaaagtgatttgccagtttcatccgaatctgagcaggtgttctcattccaagtttcagggtcctgttctttcctg

SEQ ID NO: 370673 - DNA, 1271 bp, Homo Sapiens
  misc_feature (1146)..(1147): n is a, c, g, or t
  misc_feature (1172)..(1172): n is a, c, g, or t
  misc_feature (1202)..(1202): n is a, c, g, or t
ggcctgggtggcgaattcggcacgagggtggccttactcttaacttggatgagagcaaaaacctgggagaatgatgtgcttctgtagtcggtgacaaaggaagaggcattgctactttatttggtgcacttttggtttctaggaaggtctttgggtcattttaacttctcggcaactcccagactctcagagtgtggggctgggggctggcgggtgggctggtgcagggagggtgctggttagtctccagagcctcacagcagccgacgcccccgggcccaccgtgcatggtgtgggcgggacagccggaagcttccggggtggcctccacctcctggctggggcacttatgctcccagagcctggggggccaggcttgtagggatgggggttagcgcctatgcgtggaaggccaccagcctaaggacaggcagccctggcggcccgactcaaacgggccaccctctggacctccccctcctaggtccgcccaccccttgtcggccagcccaaggcaacccccttccacacgaggctgtggtatgcacaagtgggaaataggaaggagcaccgcgacaacaaacaaatccccccccgcaggggggcgcaggccgcacccggcgatcggagtgcccccggacacaccggtgggccccgccgcccaccgccccctatgctccccgcgcaacgcggaacgacctggagctccatcgggggcgagcggggccccctcgcttccccacatgggcctccccctaaagtagtccagggggagaatcggccgtcctttgagtacccccgccggccctcttatgcccgttcgggcggcctagggcgccggcggattttccctcagtgggccccccgcgagtgagagcgcgaggcgaatcagcggcctcccgaagcgccttacgcttctacgagcttaggtcggccacacgcgaccggcgaccccccggcgacgccgctgccgccgcgcgggacccaacgccacgtgatgcagcctcaagacgccctagccgcgcgtctgggcgtgcgcgcggcactagtgtccgccgcaagacacgcaggggcagcgcacgcgctgaggcgagacggtacacgcgcccatgaggaaagcccgccgggccatataatgggggctgnncaggacggggcgcgacgccggagangatagccaccgcccggacgccggggccacntgcatagctgtccgcgcccgctgtacagagatatgtgcctgtgaatattagaagcccacagaaagcgcc

SEQ ID NO: 370674 - DNA, 539 bp, Homo Sapiens
ggagagaaggcggggaggcaggcgctggtgtcttcctgcaggccggcagcctgctggcagtggaggaccaggccgtccacgaaaggaagggctgttagccgagcaagagctggacgagcttgctgatgaccgtatggcactggtgtcaggcatcagcttaatccagaagcagcgattggtgtgacaaaacggccacctcctaagtgggtggatggagtggatgaaattcagtatgatgttggccggattaacgcagaagatgaacagaattggccagccttcatgacaagcatttaaacagaccccacccttggattgacaggcaggcgaaaaggaaacttgcctttgaaatactctacccaaagaggatcactcaggcatgaagaactcgagaggaaagatcccagcattttttcgacacatcagtaccactaatggatgatggagacgataacactctttaccatcggcggttttacagaggaccagttagttctggtggagcagaaacacactgatggtggaagagcgggaacgaa

SEQ ID NO: 370675 - DNA, 418 bp, Homo Sapiens
ccaatttgctttaaaaatagttggatcctcaggctatttgtgaaacacgggtagaggtaagaaccgtctgaaagtttttaatcttttactttggaaactttgcagttgatcaggtctgcgtagcctcctgaagccctacagcagttctactcatggctatctccatttatccctaacttctgctgctttgtggtcctgtcaggcagaagcattcatgctgtgctcagacttctgtacttaatgtaaaaaattagcacaatgtatggctccagttctgtgtatactctaatatctttcttcaactacggcttctgaggacaaacaaataccactgatttttaggtcatctttcttattaaaaagaaagaaagaatttaaaaatcaaacacttgaatatagttgctgaaaattcttaacg

SEQ ID NO: 370676 - DNA, 1100 bp, Homo Sapiens
gctggcagctggttggtgcttacaccttggctgcagcggcaggtccttccacgtgctttcggcggcgacatggagctggaggagttggggatccgagaggaatgtggcgtgttcgggtgcatcgcctcaggagagtggcccacgcagctggatgtaccgcatgtgatcactctgggactcgtggggctgcagcaccggggtcaggagagtgctggtattgtgactagtgatgggagttcggtgccaacattcaaatcacacaagggaatgggtcttgtaaatcacgtctttactgaagacaatttgaaaaaattatatgtttcaaatcttggaattggacacaccaggtatgccaccacaggaaaatgtgaactagaaaattgtcagcccttcgttgttgaaacacttcatgggaagatagctgtggcacataatggcgaattggtaaatgctgctcgattaaggaaaaagcttctgcgtcatggtattggtctgtctacaagttctgatagtgaaatgattacccagttactggcgtatacccctcctcaggaacaagatgacaccccagactgggtagccaggattaaaaacttgatgaaggaagcacccacagcatactccctgcttataatgcacagagatgttatttatgcagtacgagatccttatggaaatcgtcccttatgcattggtcgtcttattccagtgtctgatataaatgacaaagagaaaaaaaccatcagaaaacagaaggatgggtggtgtcttcagaatcttgtaccttcttatctattggggcaagatattaccgtgaagtcttgcctggaagaattgtgggaatatccagacccaatgtcccaactcttgatattatatcaagggtctgaaggaaaacccgggggctttttggatctttgaatatggttaattttgcaagaccagaacgtatgttccaaacaccaaatgggtttatacagttaaaataccgtttgtggcccaccacctaccgatttgaaccccccgtgggaatgcaaaattgggttaacccctgtttccaaaactctgctaaaccctgccggcctcttggctaaaccagg

SEQ ID NO: 370677 - DNA, 1034 bp, Homo Sapiens
  misc_feature (830)..(957): n is a, c, g, or t
tcttaaggttcccaaacctatatatggctggcccaacaaggagaattcatttttagctttttaaggaaccccattccagggttggaaagtgggaaggaattgaaaaaggattttcccatggtacacagtaccccaagaaagagccagaggttggctgtacttagacaaaataaagtctaaaaaactgtcacgcgaaacaaaaaaaggccattatttgatgataaatgggtcaagccatcaagaggacataacaattataaatacatatgcactcaacatcagagcacctaaaggtataaaccaaattttaatagacatgaagggggaaaatagatagcaatataagaatagtaggggacctcaatatcccattttcaacaatggatacatcaactagacagaaaagtaataaggaaatactaggcttgaactacacttaggaccaaatgggcccaattttccatacaacagtagcagaatacacattcttctccattgcatatgtaacattctccagaatagatcagatgttaggccacaaaacaagtcttaacaaatttataactgaaatcataacaagtattatttccaaccacaatggtaaaaaaactagaaatcagtaacagagggaattcagggaaaaatcacaaagatgtggaaattaaacaacctgctcctgaacaaccaatagattggttgagaagaaatcaaaagagaaacgtatcttgagacaaaagagaatggaaatataacatactaaaacctaggggatgcaacgaaagcaaaagcagttctaagaagaatgttgatagcaataaattcttacattnnnnnnnnnnnnnnnnnnnnnnnnnnnnnnnnnnnnnnnnnnnnnnnnnnnnnnnnnnnnnnnnnnnnnnnnnnnnnnnnnnnnnnnnnnnnnnnnnnnnnnnnnnnnnnnnnnnnnnnnnnnnnnnntgacagagtcagacccagtctctaaaataataatcataataatagtatctcaaataaatagcctaacattattcctc

SEQ ID NO: 370678 - DNA, 1028 bp, Homo Sapiens
  misc_feature (848)..(848): n is a, c, g, or t
  misc_feature (926)..(926): n is a, c, g, or t
  misc_feature (941)..(941): n is a, c, g, or t
gagctcggtacccagatccccctttccatcccaagaagcccttggcaatctgccctcaccaagtgagcacaagcttccagaatgccacctgggttaaggagggaatatgaaggctcagggaagccagaatctgagccaaaagagctcaaaacagcaggcgagaaagagcctcagctctctgaagcctgtgggcctacagaagagggggccggagagagagagctggaggggccaggcctgctgtgtatggcaggacacacaggcccagaaggccccctgtctgacactccaacacctccgctggagactgtgcaggaaggaaaaggggacaacattccagaagaggcccttgcagtctccgctctctgatcaccctgatgtagcttgggacttgatggcatctggattcctcatcctgacgggaggggtggaccagagtgggcgagctctgctgaccattaaacccaccgtgccctcctgaggagcccacacaacctcccgagacacgcttgaaaacaaatcttcattacctcccacgtcactgctcaggccctgatctacagacacatggggctgtccgtcctgctggaccttcgtcaggcacctccactgcctccagcactcattcctgccttgagccaacttcaggactcaggagatcctccccttgttcagcggctgctgattctcattcatgatgaccttccaactgaactctgtggatttcagggtgctgaggtgctgtcagagaatgatctgaaaagagtggccaagccagaggagctgcagtgggagttaggaggtcacagggacccctctcccagtcactgggtagagatacaccaggnaagtggtaaggctatgtcgcctgtgccaaggggtgctgggctcggtacggcaggccatttgagagctggagggagcancaaagccaaaggaanaaggaggcagtgggaatgccccaagccactggagaaaggggctggcaagaatccccggctgaccggcactgcaaaagggaatggggt

SEQ ID NO: 370679 - DNA, 910 bp, Homo Sapiens
gggtccacgggcgggattcggcaggtttgctgcaaggactcagtgcggcgcgacccgttaccggagaggcgggccggaggcgcaccagctccgccgcgctggtggctttgcgctccctccctggcattccgtggaggagggccgcgcaggagcagcctgccctagcattcacgcgtgttgcgtttgagtcgagccaggcatcattcagggatgtggtctccgtgacctcgctttccttctgccgccagacccacctcccacaaacccctaggctttcttgaggagagtggaatttgttgggtgaggagtatgaatagagctgtcgtgtgcagacatcttcgggtttagtgaatgtttcacatgtgtacatttgagctcttcctaaggaatggaagcccagacctgcctgggaggcaggagacctcgtttccagctcccggccctgactgccgctgcaaatcctagactggctagagaccatgtcgctgcagcggagcgtcggaaaacgagacctcgcagttcaggaggcaggaaaaagacattgcccgcgccctcatcccaataggtgctcatagcgttgggccagcttgaggctccaattcgagccctatttacccaagggccccttccccgctggccttcgctattagctcctcgagtttacttatgctcctcttaatggtatctagctttgaaaagccttatcttcctggggaataggcagagcagtgtacaaactcaggcctggtctcccagtgcccccgaacccgacagtgctccgggcccagcttcacttcgtccatctcctttggctggcttcttggggcggtttcagctggggttctttcttggcaccctgtggctgcacatgagcacggtcgggctgggccctgccggctggtcccacacc

SEQ ID NO: 370680 - DNA, 1103 bp, Homo Sapiens
  misc_feature (1055)..(1055): n is a, c, g, or t
  misc_feature (1064)..(1064): n is a, c, g, or t
  misc_feature (1076)..(1076): n is a, c, g, or t
  misc_feature (1083)..(1083): n is a, c, g, or t
aagcgaggcctgggtggcgaattcggcacgagggagcagcgaggcactgcatgtcatcaccaatgtgatccacgcgaatggggacagaggcattactgtggcccagagcagccaacccacccgagtggccaacaacagcatctcctgcaaccggcaaagtggggtcaaggttgaggcccagtgcaaagtggagctccggggcaatggtatctatgacaacagaggccacggcattatcaccaagggcgacagcaccatcgtcattgaaaacgatatcattggcaaccggggcagcgggctgcagctgctgcccaggtccgacactaaagtaataaagaaccggatccactcgttccgggcctacggcatcgccgtgcggggcctgtgccaaggccctggtgcaggaaaacatcatcttccagggcaaaaccagtaagaccatctttcagcagatctcaaacaaccgagaatgcatcatgcaaaacaacaagttcctggtcttcaagaaaaagtctgatacgtggcgcctggtgaacccaccagcacggccccaccttgaaaattctctcagacgtccctcggcagcccacaattgggcagaaggtgacagccatggcaacgaggatcacagcccgggtggaaggtggttaccacagcaaccgcagtgtcttctgcaccatcctgtgaggacacagacctgcttcagggccaagcctggatgggtgctcagaggagctaaggtggaaatactgcctgaaaagactccgcccctccccctccccctcgaacaaatgggtcccgggcctccaaaacacggtacctccagaacacttcagctccacagcccatagcaagaagaaaagtgggcaatgtttttcagggagaagggatagaagctggtgggtttccagtcacttcgaagtctattaaagattgttgaaggagcggggggaaggttcaaatgctggaagcttttggttcagggttttcttttgagttcttaagggaactgtgtttttacacacaccaaacccaggatttttttcagggaaggngcagttttnatttttgttggncgggganttgtttttagttgaggttgg

SEQ ID NO: 370681 - DNA, 928 bp, Homo Sapiens
ggccccagctggctgagagcccagctgggactgtgccctgcacagagctggagtgcaccgatgcggggactgtgcccagaccttcaccaccctgagaaagctgctggaagcaccaagagtgcccacgtgtggtgggctcccacagctccctgggccggactggagtgccctccacccgctttacctgcccccactgctgccaaggtgtgcaatgacctgcagctgccctgagccgccacggggcatgatgtgcatgctgctgagctggccctggggtgcaccccaaaccctgtcattgcctattccaagggcatgcgctggcaccagtgcccggggatgtcaaggaggaagccccccaagagatgcaagtctcctcatccagcggtgaggcaggtggctgggagcactgctgctgaggaagcttccgagaccgcctcaactccaaggaccctatcatttcaggcgggtgaggagcccccagtagtggcaagcgggggcagctatgtatacccaacctgtgcaggaatttccactggcctttgacttgggcggcggccgggaaccttggcgcgtgccaggggacaaatctgggagtgacggggccagtggggggctgctgacgggggaccggatgcgaggccgatccgggggactggcacaacgtcacttctaacccgttgagccctaaccccgcgccgtctagtgggccccccaaggtcctctgccggcatacccttacatacttccagataaactttggggccggttcccccccgggttggtcttcagcacagtgggtacgtaacttgattgaggaaaggaggcaggagaggcccttcccgtttcgtaacaaggggttcttcgggagatacgcaccgggaatccttcggggaacaccccgatggtccagacaaaagaccgctcggcc

SEQ ID NO: 370682 - DNA, 1151 bp, Homo Sapiens
  misc_feature (732)..(767): n is a, c, g, or t
gtccagacaaagctgtggttctgacagagtccagtcgctgactccactctctcgaaacccaattcccctcgggtgagccaggcccgagcaggggagggcaggggggccgggaagcacgtgcggagctcctccatggccagcctgcgctcccccagcacaagcatcaagtctggttggaatgagggacagcaagtctgaggacacacggggctgtccttctttcaaatcagccttgagacagaaggaaagccggtcgctcgacggatcttggcaagacagccttgctctctaaaaaggctggtggagagctctgtgaagtctgtctgtaagaactagccggggacgacgaggcagagagaggccatccagacctccagcgttcccagtcgagccaaatgcaaatacaacgggaaacagagcagcttgtcaacaaggaccctgcttctgcctaaacattccctgcatgtaccgctcgcaaatccaagtcttcccaaatagactctggagttccctcgtctccggagtggcaggcagtctgcagagaaatcctcaaacaaagttatcttctagcatgcaaacctctgcacggccttctcaaagaacctcagtgatatttctgcaatcgaagtgttttatctgtaaagatgtttatttatttagaacccctgccctcccagctaaagctccctgtggctttggtttggtaactttttggagtcacgtgcccgacgnnnnnnnnnnnnnnnnnnnnnnnnnnnnnnnnnnnnctaattcaattgcaaattgttcaaagcgtcgccttattctgccattgaaccaaataacagccataggcaaaacattgacaccaagctaactggaataacttgtagacgatacccaggacggtccctttagcaattgtacatatttctttctagagaactctaatgactttctttggcatatgaggggtttgaaaccctgtgaaccagaaaagctaccaattagtgcgtagaagttggacaggagctgactcgtgtagcttctgagcaggacttgtccttactggggataggggggtggcaccagggaggctctaaaactgtgacctgttaccaagaaaaaaatcgagggaaacaccttgcgttctggccctctcgcccatctac

SEQ ID NO: 370683 - DNA, 925 bp, Homo Sapiens
tctaggagcgagcctgggtggcgaattccgcacgaggccgcctggcctctcggttccgcggcgcaccggagggcagcatgtcgcgacggcggcacagcgacgagaacgacggtgggcagcctcacaaaaggagaaagacctctgatgcaaatgaaactgaagatcatttggaatctttaatatgtaaagtaggagaaaagagtgcctgctctttggagagcaacctagaaggcttggctggtgttttggaagctgatcttcctaactacaagagcaagatcttaaggcttctttgtacagttgcacgcctattacctgagaagctgacaatttatacaacattagttggactactgaatgccaggaattacaatttatggtggagaatttgtagaagccatgattcgtcaacttaaagaatcattgaaagcaaacaattataatgaagccgtgtatttggtccgttttttatctgatcttgtgaattgtcactgtgattgccgccccatcaatggttgctatgtttgaaaattttggtaacgcgtaactcaggaaagaagatgtacctcaggtgcgacgagattggtatgtgtatgcactttctgtcatcttttgccctgggttggaaaggagttgtacgaaaagaaagatgcagagatggaccgcatctttgccaacactgaaagctatcttaaaagacgccaaaagactcatgtacccatgttacaggtatggactgctgataaaccacatccacaagaagagtatttagattgcctgtggggccagattcagaaattgaaaaggatcgctggcaggaacggcacatccctaagaccttatcttggcctttgacagcatcctggtgtgaaagcaactgccagcacaattctgcccttccttttaacaaccaccccccttaaaa

SEQ ID NO: 370684 - DNA, 992 bp, Homo Sapiens
  misc_feature (398)..(530): n is a, c, g, or t
  misc_feature (542)..(762): n is a, c, g, or t
  misc_feature (904)..(913): n is a, c, g, or t
gaggcctgggtggcgaattcggcacgagggtcccagctagttggggactgcaacctgccagtatctcccctggagcccagtgggagggtgggtgaggccacgcctgtcctgcccctgagccacaggccagcgttggtcaaacgcccatgggcggcagccagggggagagggggctgggctgtggggacccaggaaccttgccccctcctgctgtggggtcggagtgagggtctggcatggggagactgctgtgatcctgctcttccttggcccacggaggcagtgtcccaactaccgcctcccttcactcaaagaaacctggggttcctgggagctgactcctgtgcagaggcagcatggtggggtgaatggtgtcccccaaaaggtacgtccatatnnnnnnnnnnnnnnnnnnnnnnnnnnnnnnnnnnnnnnnnnnnnnnnnnnnnnnnnnnnnnnnnnnnnnnnnnnnnnnnnnnnnnnnnnnnnnnnnnnnnnnnnnnnnnnnnnnnnnnnnnnnnnnnnnnnnngataaaaggagnnnnnnnnnnnnnnnnnnnnnnnnnnnnnnnnnnnnnnnnnnnnnnnnnnnnnnnnnnnnnnnnnnnnnnnnnnnnnnnnnnnnnnnnnnnnnnnnnnnnnnnnnnnnnnnnnnnnnnnnnnnnnnnnnnnnnnnnnnnnnnnnnnnnnnnnnnnnnnnnnnnnnnnnnnnnnnnnnnnnnnnnnnnnnnnnnnnnnnnnnnnnnnnnnnnnnnnnnnnnncgcggagccacaaatgcccctagggcacttccacccctgggggggaccggtggtaaaactgcccttccctgtcctcccccgccttaatccataccccccgatctgtatatatagcgcgggctccgagggcttcttttgtttnnnnnnnnnnaacaaaagtggccattcgaattggggcctagcgccctatacccggctttctctgaccaccccctgtttctctcaccgaa

SEQ ID NO: 370685 - DNA, 736 bp, Homo Sapiens
  misc_feature (82)..(245): n is a, c, g, or t
gggatagatctacctttgtcacccaggcgggagtgagtggatgatctcggtcatacaacctccgaatcctgggtcaagcagnnnnnnnnnnnnnnnnnnnnnnnnnnnnnnnnnnnnnnnnnnnnnnnnnnnnnnnnnnnnnnnnnnnnnnnnnnnnnnnnnnnnnnnnnnnnnnnnnnnnnnnnnnnnnnnnnnnnnnnnnnnnnnnnnnnnnnnnnnnnnnnnnnnnnnnnnnnnnnnnnnnngcatgagtgacggtgcccagccattcgtgacatgtttatacaaatataactttagcaaatatttagcataactatcaaaattacaaatcatattaaatttgtataaatgtatgcaatttttggaacacgcatatcaacaacatacccataaatataactgagatgagatctaatgtcacctcacttgacagtgccctcccatgcagtatcgccacatttgacaatgcctgcccatttaatctaccaaataaatcgaatcacttaatacctctacaagatgagagatacattctttagactccccaagggatgctgttgaaaaaaatcccaaagtaacgttctaaagccaaaaagacttgatgcacggatttggacacctggagaaacccatcaagggatgtcagtttgaaaacatttgatcaaatacaagaatccacgggtcactatcacaagagtattattttaacccagagaatcccaagcataccgag

SEQ ID NO: 370686 - DNA, 851 bp, Homo Sapiens
  misc_feature (185)..(207): n is a, c, g, or t
  misc_feature (601)..(601): n is a, c, g, or t
  misc_feature (726)..(737): n is a, c, g, or t
ggcctgggtggcgaattcggcacgaggctggctgagatgtgttatttggtttcttccttcttgatcatttggtgtttaagtaaaatgaggcacaggcttgtttgccgagtggagtgggaaaggcattttgatttgctggcctaattaaaaaatgatacaaggattacaagaggtaagcaatgtcnnnnnnnnnnnnnnnnnnnnnnnatgtatatttatttcatttttttcttgacaatcaactgttaacaaaggggctgatccctttaacaaaccgttttaactgctctttgtcaaagcacactcatttgcggtcattgaggccaccttggcgcagatcacttaaagtgtatgtcttaatcagttcttctgtacagtcagtagcaccgtatttaagagagtgagcaattctctgacctaggaatatggtagaattgtttaaatgtatttttttctcaaaaggcaggtatttaactttttatataacactgtcttttctagagagaaatgctcttaaaagacatgcatatttcaaaaaagaaattgtagaagctgtttgggaaagaagataggagggaagtatgtgtgtgtgttggggcanttaatgggttggttttttccggtcccttacaaggaacaaaaaaacagattgccccaaacaattttgtaaaaagaaggtactggaaacccttaattttaaaaataagggaaaattttaccaacccnnnnnnnnnnnnggaaaacctagccctccaaaaatttttccagggggtcctggggcttttccaaaaatttggcaagaaaccttagggccccttggttttttaagggggtattgtttcttaaaaaga

SEQ ID NO: 370687 - DNA, 767 bp, Homo Sapiens
ctgggcagaattcccacagagttccacatcgcttgcaatatccatggtatttgtagggggtcagggaacagtggaatggagatacacacacgactgtggtgcgagagacccaggtgttaccaggtgccaaggacccccttagaacctcctcatgctcatgcctcgctgtccaaagatttctgtgccctacgttcataatcccttcgtccaggcaagccaggtcctctcaggcccaagagagctcaccgttcctccatgcccctgtccacataacagtgcataaatgcccgcttggcatacatcaggtcaaacttttggttgaggcgggcccaggcctcagtgatggctgtggtattgtttagcacgcagactgcccgctgcaccttggctacagcacccccgggcaccactgtgggggactggtagttgatgccaacctatgacagcaggctccaggtccacagacagcccaggacacatgcctgccaggctgggtctccctgaagaaggtgttgaaggagttatcactgctccccagggccttgtggctgggcatggtgccactgggctggatgtcgtgctccaggcagtacagctcccagcaggcattgcccatctgcactccggcctggcccacatggatggagatgcactcacacatggttgatccagtagttgaagttggagggtcgctgactgcagacaccatacgggtctccagcaacaccacgaatcccaacgcgcggttgctggcgggaccttataac

SEQ ID NO: 370688 - DNA, 213 bp, Homo Sapiens
gggtgacagagcaagactctgtctccaaaaaagaaaccatctcagtggtgagactgaatttcctccaccaggcagctgatatgctccttgcccctgaacttagaaaatcttcagtgagcccatgtggttaaaggacctggggacagataaggaggctctttcctcttgaagcagtgcttttcatcctcgtgccgaattcgccacccaggcctc

SEQ ID NO: 370689 - DNA, 1016 bp, Homo Sapiens
gtagcgaggcctgggtggcgaattcggcacgaggagggctagtgagcactctgggaaacctggacaggacgtttgggctcctagagcaaggcagaggtactaggcacaaatactgtgttccaggagatgctgggcacccctcaagtgccaggatgaagtgttttgacttttggcctagtgagaagaaaaagcattcccttcctttgtgcctaagacaagacctgggtgaattatagatgatggcagatttctcaggcaggcagtatagaatgaaggaggagacacctgactcctatccgaactgagggagggccccaaggggcctcaagctgccattctgatgatacagagcaggttgtgggtctccagaaggaagtgaggaaagaggctgggggtgagctctgctcccctggatgcaaggccttaaggctggggatttcctaagcctgtcccacatgctcacccttggggctgcggcttccctgagagctgggctctgggaggaggccagataggcaggaaactagagcccagattctttccactgccattcctgggctggggctgcactcaggtgcaggtgttgccaggaacacaggtgagtgcattggactttcacagcctgaggccctatcctcagtggccagacagggccaggatctagttgatgctctgacctctggcagaacgggagctccacaaatgttggctgcatgagagcaattgagtgcatgttttgggggccgggggaaggcagaagtttctcctggggcccctctagaaagtcagtgagaaaccttgtacttctcatggatcattgcttggaattaccagaataagcttcctctgaacatgccggagccagtggtaactaatgagggaggcccgtcctctcctgaacttgaatctgggttgttgggggtggctttgctggcaaccttcccggtgggccattggaagatccgggctcctccttcctttcggaaaagtaaaaggggaaaaaaacattcttaaat

SEQ ID NO: 370690 - DNA, 765 bp, Homo Sapiens
  misc_feature (344)..(378): n is a, c, g, or t
ggtgcctttagcttctgtggaagtatggggaattatgggcttttcttcaaataattattttaagaggcttccattccccctgattttgtggtgtctcacaagtaccctctaaggtctggtcaggactgaccaccaaatctctaccacagcctggacctccttgtgaaatatacctaacctgccctagagtcagtgtgtcaagtccttcctgtaaatccatgactttgaaatttgttgttttttccctttaaactgcagccagtgaatacaaatttacttgaaaatagagggtatggggttttgcctgttttgtaatcagtttgcttgttttagcactcagggcnnnnnnnnnnnnnnnnnnnnnnnnnnnnnnnnnnnagtcagaaagatctctgggttatctcatgtgctaaggaaaaactattttgctctttccaactttaatagttagtatttctaggggaggcaatcaagataagatatgccattaactgttagcattgtgaaatctgtaagactcaatctctgatctcaaccaaagctttctgagtcctggaactttgctttgggacaactttactttacccatttatatgctgtacttaacagtttgtagctaatttatggggtcatatcttttttttagctaattttacgggggtcatatcagtcatgaatagcctttttttaaaaatttataatccctgaatacccaaaaatggacatggaaaatttataatcataaccccctaatgggagtattaa

SEQ ID NO: 370691 - DNA, 1065 bp, Homo Sapiens
  misc_feature (713)..(713): n is a, c, g, or t
ggcctgggtggcgaattcggcacgagggagccacagaggacctgctgatgggagtggaagaggaggtcagacaacagagagctggttccctactccttgggacctaaggctaaggtggagctcaagtcttacctgcagatcctaacggcctgatgccacaagggtgtctctgactgttctaacaatcttagcagtgctgaccaaggtgaaaagcctccctttctacagtgagatttagccattgttttcttgccctctcatctcatccccacctttcactgcagtaatgggaggctgttctccttcttctgctacagagattagtggtagggccatttttcttttcaaacttggcaccctctatgaaacataggaaggccccattaaagtcccatcttctctgccccagatagctgatagcctatttaaggagagaaagcttcttacacttttgaaagggtaaaaaatgattcacggtgacacagtaagtacacaatagtggatgagagagtctgaatcaggcaagagaagagattaggaacgagctaaggctattgtcttcaaaagccaaatgcaactcccctctgcataaaaagctgatggggtttccatttctgacatagggcaatgctggtgcctacatagccacttcggcaccattagagtcctagttctgttaaagatgtccaaagacattcttggagggtactcanggtctcagacctctactgtggtcagtcttggaaagttgaaacttttccttgaaagaccttgctgaatgaatcagatcaccgcaaggttaatgctctcccagggagacaagccaagccttctctttttttcctccattatgagatttggaatacagccctaattaaataaccaggaaagggggctgggccccttggaaaactggaaggggaacagtgggctgccttataaaatcccttaagctttgaatagatccccatttcctaaaaattaaccttaccttttggatcttttttttaaacccccttcccaccctggggtatattggttccccattttgggtttgtggttttg

SEQ ID NO: 370692 - DNA, 436 bp, Homo Sapiens
tcgcaccgttggggagtacggaatcagatagcggcctaaaaaagggtggaaatgctaacctggtagttatgcttaaaagaaacagtgagcaggttgtccagagcgttgttcatctctacgagctcctcagcgctctgcaggtgcgtgccttcatcttccatccctgcgtttatttgtctagagaacagcagcttggggctgtaattgacttggatctttgaggtttgcaggatgtttaatggagaaatggggccctcagtctagggaagactggctctcgtggtgagaaagttacagaatgcatcgagccgtgccaggactagaattagtgaagagctggtgttgccgtaggcatggcttgataaccatgctacaaatcacatagcatgctaacatgcatctgggagattacttcactttagaaagcctgtaagac

SEQ ID NO: 370693 - DNA, 1041 bp, Homo Sapiens
gggggcagagagcagcttgcttcatgcaccccaagttgtttcttctcatttatgaacccaagcatgattcacaaaggggctggcaaaacaattgtctaattgaggaatctgatctgcattgattttgctagttccttttatgttaggatttatggtttactcaaaaatttcatcatcatggaaattggctttccccggggtcttttgcccaggagaagttttacctcagtggtccagtgttttcccacatggtacctgacgcccgctaactaagcagaggctctcctcaccacgcagaggcgcttcaggtcatgacagtgatgcccctatcttagaacactcagaagattccagaaatacagggtcctgtccttgcataagttcctgcaggacaggaagtgtcccaaggctcaaaacaacacagaccacatccacacaaaaggcgcatgccggcttcaggcgctaggctgagacgggtaccccccgaatggcctgtgcctccaaaagcctcacgctgcaactttgctgctcctgtctgttgcccagagaggcctcacacaggcctcagaaatgtttcttgtcacacaaagcttttggtagccgattccaagcgagggatttaatccttacatttttgcccatttgggctccaaggaaggcttattagaacctgtcttcagtcagtgtcagtaaaatttcttaaaaacacaatgactgcactgacttgacacagagaacgcaatggtgaagccctctcctgctgggggcgccatgggtgggacttggcccagtcctgcagccggagcaacatccagccagcacgccaagacctgtgggcaaggcccaaggctgcgtccgggacccctgaacctggcctcagaagctaaaagggatgcacaaccccgcgattcaattgggcacagaaatccacagacgctaccaaagccatcgccacgggagcaggttggcaacaaccggggcacaggcaacgggaagcgccgcacggggaacggacaacagcacacaaagagaagcctaatg

SEQ ID NO: 370694 - DNA, 1088 bp, Homo Sapiens
ggcctgggtggcgaattgggcacgagggctcggtgcactggggacctgcatggggaaggcgtgagagctcggtgcactggggacctgcatggggaaggcgggagagctcggtgcacctcggacctgcagagggaaggtgggagagcttggtgcaccgcagacctgcagggggaaggcgggagagcttggtgcactgcagacctgcggggggaaggtgggagagcttggtgcactgcagacctgcggggggttccatattggcagaacaagattgggtgggcatgccaagaggtgacagcagggagaagcgggggcagattcagggcctgctgctgcccatgggcagaggagagatggtcaggggtacccgacaggtctttggctgtggaggtggaatgaggggactcgaggcagggaagctgacaggcttgccaagaaaccagatgagtagggaactggtattgacccagagcctggggcaagcctggccctgtgagtggcagtaggggcctcgggtgagtgggaggttctgccgcccccctggtttccaccttacctgggcaggaagagtggccctgtgcagacatagacgttttggtagctgcgggtcaagctgcggctatatttctccaggttgttccaggcattctggttgaggtggggcacctggtaggagagatagggcttagcaggactgtggctgggacccttcctcctctatcagagggccgccccaggtcctgaggggatggaaaggctcagagatatccagtgagacaagccggggggaaactgagggctcaaggaatgaaagtcactccctgaaaccccggggctgaatagagtgcttagccaccacccctctggtccctccccacagccccgggggtccaaagtctttttctccgccttcccaaaaagttccaatgaaagggaagaaccctgttcttcccccttttcaaaaaagggattggagggcctggtccccaagcccccacccacggggtcttcctgggggagaaaccagccccctttcccaatttacccaacccgtttccctttttttcccaggtctgggaccccaccgg

SEQ ID NO: 370695 - DNA, 1022 bp, Homo Sapiens
  misc_feature (735)..(735): n is a, c, g, or t
  misc_feature (928)..(928): n is a, c, g, or t
gcctgggtggcgaattcggcacgaggccgccttctcagtctcctgcggctgccgtggaaattatcacgaggtggtgtcttcaaacaatagaaatgtactcagttccagagtccataacagccacactccctctgcaggctccaggggagaagcacagtcattccgtgctgctgccacagaacaccacacactgggtgatttatgaagaacaaattgatttcggcacagttctgggagctgggacattcaaggtcaccacgttgccacctgtgaaggccttctgctgcatcctcatgttggggaagatcagaagtgagaacacatgctggccagtcctttcacagcagcatcaatccgtgcatggggcagggccctcggcctgagcgcctcccccaggccctaactcccagcactgccctgctggggatggaatttccaacatgaatctgggggatgctttcggaccacagccggggagcctgccctggcttccagctgctggtggcccaggggctccctggcttgcctcgaggctgcctccctccagcctccagtccgtcctctgctctgtcctcaccagggcctcctgtctcgagtcttcctccgcctcacttgtgtcatgggatttaggcgtccacccagatattccagaattatttcatcccaaaatcctttatttaattatatctaccaaagatccttttccaaacaagatcccatttgcagggctctggngggttaggatgtggcttatcttctggggccaccactgagtccactgctgctacagacagcatctcaagtcttgtccacttctccaccctgaccgcccccaccacagtccgcctctcctgcaactcctggcgctggcctctcctggcgtccatttctgcacaacctgaagcgaattttccaaaaacgacaccangacccatggctcctgccccacagccggcccagcggcccttctggtcttccatggcaaaagcctgggacccctggcttggcgcctgggaaaattc

SEQ ID NO: 370696 - DNA, 924 bp, Homo Sapiens
gctgggagggctgcttctcacactgggtgtcttttgccacattgccctgaggttgactcttttggtgggatttgaggatgttcgcaaaatcataacgaagctttgtgataagattagtaacaaggacatctgtttacgtgaaagcaacaatcaggtcaagacacttaattatggcctaggggagagtgagaaaaatggcaacatcgttgagaccccaattcctggatgcgatattaatgggaagtatgaaaataattataatgctgtcttcaaccttttgccccacactgaaaaccatagcccagagcacaaattcctctgtgctctctgtgtttctgcactgtgcagacagctagaagcagccagtttacaggccatcccaactgagaggattgtgaactcctctcagcttaaagcagcagtgacacctgaattgtgtcctgacgtgactatttggggagtggcgatgctgagacacatgttacagcttcagtgtaacgctcaggcgatgaccaccatacaacacacaggacctaaagggagcatcgttaccgacagcaggcaggtgcgccttgccacaggcatcttccctgttatcagcctcctgaaccactcctgtagccccaacaccagcgtgtccttcattaacactggccccaccatccgggcgtcacagtgggattagaaaggggcaagaagatctccactgctatgggcctcacaaaaaccggatgggggttgccgaaagggaacagaagctgagggctcattatttctttgactgcgcccggtccagtttggcaaactgaaggccccccggatgggttgcaggggccccagggggaaaccattctggtggaacagttgcgggacggccccatgcagggagatgacccggctggccttgggggcaaccaaatcttg

SEQ ID NO: 370697 - DNA, 999 bp, Homo Sapiens
  misc_feature (49)..(51): n is a, c, g, or t
  misc_feature (53)..(72): n is a, c, g, or t
  misc_feature (150)..(150): n is a, c, g, or t
  misc_feature (172)..(197): n is a, c, g, or t
  misc_feature (200)..(203): n is a, c, g, or t
  misc_feature (205)..(207): n is a, c, g, or t
  misc_feature (218)..(219): n is a, c, g, or t
  misc_feature (221)..(222): n is a, c, g, or t
  misc_feature (226)..(230): n is a, c, g, or t
  misc_feature (245)..(263): n is a, c, g, or t
  misc_feature (761)..(806): n is a, c, g, or t
cggaggaaccaaccccgggcccaaaccagggggaaaacccccggtcccnnncnnnnnnnnnnnnnnnnnnnngccggggccaggaaggggccccaaccccaaaaaacccccagcaccctcgggaaggggcgagggcaggagaaagggccngaaacccgggaagggggaaggnnnnnnnnnnnnnnnnnnnnnnnnnnacnnnncnnnccacccgcggnngnncccnnnnnaagggactcgtctcnnnnnnnnnnnnnnnnnnngttttagaacaggaatgcaaggaaataaagtacacgtggaagagggccagtagggaccttgagagattcaagtgcatggtttgacctttgacttgtggttttatatgttggcagtctgcatgtacaatggcctgccagcacttgggaggggctgcatgtgagtgtgtttactgaagctatatgtgtgctcacttgaggtgttcttcccttatcagttgagtgttcctagaggaaggtcatgtaccagctaagctcaaccattttgcctcttcatgcacatgcttaagcccactcacccacctcctgagatcttactgggaagctgctgatcaccagtttctggcgtttctatctactgggagactgtctttccctggcatcggctgcaaccaatgattatttgagagagacagtttaacaactgcctgatcatctcctgatggggcggaggagcctctccttccctgctcagctctgactaactacctgctgcaacannnnnnnnnnnnnnnnnnnnnnnnnnnnnnnnnnnnnnnnnnnnnnatgaatattgaagccatgaagtgactcagaaactggggcacctctttcctaaagtcttccactccctacccattatcccacctctagaaagaaattgattttgcttcccttgcttgccttactgtgaacagagtgacatttttaaaagcctacctctcttcctcgtgccgaattcgccacccaggcctcgctc

SEQ ID NO: 370698 - DNA, 900 bp, Homo Sapiens
ggcctgggtggcgaattcggcacgaggagctgtcggactcaccgggggccctaagcagcgagacctgaggccagacggaactacaacatgtaccatccacgagaattgtacccgtccctgggggccggctaccgcctggggcccgcccaacctggggccgactccagcttcccacccgccctagcggagggctaccgctaccccgaactggacacccctaaactggattgcttcctctccgggatggaggctgctccccgcaccctggccgcgcacccacctctgccccttctgccccctgccatgggcactgagccggccccatcagctccagaggccctccattccctcccgggggtcagcctgagcctggagaaccgggagctatggaaggagttcagctctgtgggaacagaaatgatcatcaccaaagctgggaggcgcatgttccctgcctgccgagtgtcagtcactggcctggaccccgaggcccgctacttgtttcttctggatgtgattccggtggatggggctcgctaccgctggcagggccggcgctgggagcccagcggcaaggcagagccccgcctgcctgaccgtgtctacattcaccccgactctcctgccactggtgcacattgggatgcggcagcctgtgtctttccatcgtggcaagctcaccaaacagcacgcttggagcccccagagcacctggatcctgcactccatgcacaaggtaccaaaccccggattaccacctagttcggggcaggcccagctctgcaagccaggcactgggagggggcatggcctcctttccgctttcccccggagacacatattcatcttccgtgacaggcctaaccagaacccacaagatccacacgacatggaagattg

SEQ ID NO: 370699 - DNA, 1120 bp, Homo Sapiens
aaggtagcgaggcctgggtggcgaattcggcacgagggggttccgcgctgccggcagggcttgggggcgccttagagccgaaccccgttttttcaggaaagggcgctgcgaccacccccgtcccgggcctcagcccctctgctgcagaccctcgggatcgtcgctggaaagattctgaagcttggcggagaggggtgtgtgagtggacaccagtgaagtaacggtttttgtgttacgatgatttctgttttcctctgctgccctgtaatggcaggaactcggatagtctggtcttcagaccaggaggactcccaggagagaacggagagccagtgtgctgtgtgtcacggtccctggatgaacgtttgtggaactggattgaattaaacaagacgtgcaaagcaagtggttcacgagatatttacggagcatccccagctgctggatgctgggacccaccagtgggcaagagggccgtgcccaccccttcctggaagagacactcactcagtaaatgcagagattcagtgttggggtaaccccagcacacagccctgagggaggaagcccagtgatttgatcggatttgcttttctcttctgcctcggattctgtccaacccctggaaggacctctgaggtgtcccgtggctggttctaggccccattcaagcctcctcctccaggaagccttcccagtcctgggcatctgtagccagctcggtgtttctcacctggggcctgggacgtctcccattctgaactgcccgtggttttgggtttactggtctctggcttttggtcccagccggacgggggcctcttttgtgtcagggacaaggcaaggagcatccatgccaccccacagtacccaaggcttgggtctgtgccccgcccgggccccccggcaaagctttgaaatgatcccgggcctgggcttggttcccccggctgctctcccctgcgtggctgggcctccgcctggaatcccacatgggaggggcccattcgcggcccctcctgggacccccggtaattccccggcccctgggagagacccccccgggccaccgtggggaatagagactttcccccggggggggagaattaaatgggggcct

SEQ ID NO: 370700 - DNA, 871 bp, Homo Sapiens
ggctacatggggctgctacagttcggtcccacggacaacagtttcaggataaagatcaggtctttatcttcttgaagaagaatgcagtcatgttgacactaccatctgcgacccacattacaacctggcccgcagcagccggcccttcgagaggcgcctctatgtcctgaactcaatgcaggatgtggaaaactactggtttgacctgcagtgcgtctgcctcaacaccccactaggcgtggtgcgctgcccgcgcgtcaggaagaacagcagcacagaccagggcagcgacgaggagggcagcctgcagaaggagcacggagagcgccatggacaagcacaacctggagcgcaagtgcgccatgctggagtacaccactggaagccgtgaggtggtggatgaaggcttgatccctggagatgggctgggtgccgcagggctcgattccagcttctacggacacctcaagcgcaactggatctggaccagctacatcatcaaccaggccaaaaaggagcaacactgccgcagagacactggacctcacagtgaggctccagaacatttcatgtccaaggcgcacgaatgcccctcagttgccaagaggaaacagcagagttgactatacggcggggaaagccagagtcaggctcgcgaaacttccagtgactggactggggcaagaagcagattgggaagggagggaccggaagagccccatacggcgtggacccgtccaccgggcgaagcgaagagtgatgggcaaaacgacaaacaaaggggaacacgggcctgcagaagagaacccgggcacagcaagagccaagaaaaaagcagcaaaaggagcatatacaccaaggcaacacacca

SEQ ID NO: 370701 - DNA, 479 bp, Homo Sapiens
  misc_feature (84)..(84): n is a, c, g, or t
  misc_feature (100)..(100): n is a, c, g, or t
  misc_feature (115)..(115): n is a, c, g, or t
gctcgacaccgtcaagtgaaattggagccacccccccaagcagcccccaccacatcctaacctggcagactgggagctacaatnatagctgtttcctggnttcctcgctctatcnagaactagctgatgtccagtggtacgggcaggaaaaagccaagcccgggaccctcgtgtgagccagcccggcctaatctgaccgcctcaacgccattctgagatcacctcactgcctctcatttgccttaccaagacgcaccgtcaccctgcaccagctttggccctcagcactttttttctcctgtctccgcattccctcccccttgaaaacctgactgaggagacattctggaaggttccggtcccactgtgtgtcccctggcgctcttgcccatagagagccagacaccaatcctcaatggcaccttggtggcttccctctgccatgaacagcccctaggcccaggaaccatcaggggggc

SEQ ID NO: 370702 - DNA, 646 bp, Homo Sapiens
  misc_feature (29)..(29): n is a, c, g, or t
  misc_feature (44)..(44): n is a, c, g, or t
aaaaaattaaggggggcccaaaggggaanaacattcctttctgncaaggaaaatttccttttaaaattcctgaaactgcctactacacacaagtgaaagtcaacccctatgtaaactggtgtcctctctctagccctctcccttactggccccacttctctctctgtagagagcctgaaaaactgccccaatgcccacggtaaaggcgaggaagtcttggctggcgttgctgactcacagtcgccatccatctggacacaaagagagacctgtgggagtcgtagagggtactgttagccccggtccatgcagggggttcagccgagcccaagactcaaagctgctttcctttcaggatttgtagtaacgtaaggtgataatggccaaaagtggttctctctcattaaaccaaccagtaaaagcgtatcctatttttaaacacaaggtgtttcattttcgtttttatgggaaaccaagggaaaagcacattgcgatccattcagtggttaactgtcgtggctcatgttctgttcgttagcacttgtgtgacaaaagagctcagatccgacttctcctatgtgtcacttagtccaagaacccaactatgccctaaggtagaaagatttgactcgtgttctactaccaa

SEQ ID NO: 370703 - DNA, 489 bp, Homo Sapiens
  misc_feature (30)..(30): n is a, c, g, or t
  misc_feature (46)..(46): n is a, c, g, or t
  misc_feature (55)..(55): n is a, c, g, or t
  misc_feature (63)..(63): n is a, c, g, or t
  misc_feature (99)..(99): n is a, c, g, or t
  misc_feature (104)..(104): n is a, c, g, or t
cccctgccctagggctgtccatggccaaangggaaaaccccccaangtgccccantgaagaantggtgttctggcctcctcctatgggccaaaaaaccnccccnagggaaaacacaatgggacccggaaacccttcccaaaatgtcctccctcaatccaggttttccaagggggagggaatgcggagacaggagaaaaaaagtgctgaagggccaaagctggtgcagggtgacggtgcgtctgggtaaggcaaatgagaggcagtgaggtgatctcagaatggcgttgaggcggtcagattaggccgggctggctcacacgagggtcccgggcttggctttttcctgcccgtaccactggacatcagctagttctggatagagggaggaatccaggaaacagctatcattgtagctcccagtctgccaggttaggatgtggtgggggctgcttgggggggtggctccaatttcacttgacggtgtcgag

SEQ ID NO: 370704 - DNA, 877 bp, Homo Sapiens
  misc_feature (199)..(407): n is a, c, g, or t
aaggaaggaaggaaagacgggaggaaaccagacagaaaaaataacttacaaaggaacaaaaagtagactaacaggagacttcatgcatgcaaaaataaaggccagaagaaaatcaaataatatctatagattgaggagagaaaagtatttccagctaagctatcattcaagaggaagagtaaataaaaacactttcaannnnnnnnnnnnnnnnnnnnnnnnnnnnnnnnnnnnnnnnnnnnnnnnnnnnnnnnnnnnnnnnnnnnnnnnnnnnnnnnnnnnnnnnnnnnnnnnnnnnnnnnnnnnnnnnnnnnnnnnnnnnnnnnnnnnnnnnnnnnnnnnnnnnnnnnnnnnnnnnnnnnnnnnnnnnnnnnnnnnnnnnnnnnnnnnnnnnnnnnnnnnnnnnntttaagaacgtggacagcagaaccacaactggccgaagactcgatccatgtctaaataggcttacgtaagaacgagtgagtgatgaacactacgtagagtgagccagggagttagacctgtggtaggaaagagagcagcatagatgccggcgcggactaaaccgctgaagagcagaagagaggctcgtgttaagtgcggatggagttctagacgacgcgtacagttgaaaagagttgctcagcggatatacggcacgagaaggtcaggtgcgggatggaaatatcgtgcgcgagggtaagctggatagcgggtcacagggcgagctagacgcgcgggtgagctagcttggagctaggtagtctgatgcccgtctgatagtgagcgtagaagcgagggggacaaggcggccagaatgacgtggaggtacaaagaggaggtcgttggacgagccgtagagaggtcatcaagg

SEQ ID NO: 370705 - DNA, 1282 bp, Homo Sapiens
ttctcagagttggactgagaagaattctcatcatagtagggagccattggatgccccagagggtaagctgcaatggctctagtgtgtgacaacagcagttgcagcaagctccctccacaagaaggaagaggcattgctcacgaacagctgtacccagaaaagaaggatcctgctaacccctccccggtgatgcctggaatagccacctctgagaggggtgatgaacacagcctaggctgtagtccttcaaattcatcagctcagcccagccttcccctgtatagaacctgccaccccataatgcctgttgcttcttcatttgtgcttcactgtcctgatcctgtgcagaaaactaaccaatgcctccaaggccaaagcctcaaaacttcattgactttaaaagtggacagaggcagtgaggagacctataggccagagtttcccagcacaaaggggcttgtccgttctctggctgagcagttccagaggatgcagggtgtctccatgagggatagtacaggtttcaaggatagaagtttgtcaggtagtctaaggaagaactcttccccttctgattctaagcctcctttctcaaagggtcaagagaaaggccactggccatgggcaaagcaacaatcctctctggagggtggggatagaccactttcctgggaagagtccactgaacattcttctcttgccttaaactctgggctgcctaatggtgaaacttctagcggaggaccagcccagggttggcagaaccagacatataccaaggagaagctgtcccaagtgagagatgtaaggtctaaggatctgggcagcaagtactgcactttggggacttcccttgcctttggattcctgggtgaatatccacaaggttctgtgattcttcagcttaagcatggggccacctagggccaggaatgaagtcctcccctcatgattcccattacgtggtgtaacctatccagagagaaatcacatccttttgcatccacattggaaccaagacacagagcaggagacctcagaattggagtctctgtatcaggccagtcttcaggcttctcaagctggctgttctggatgggggcagcaggataccgactggcacccacttagccaaacaggctctgcagatggcatggggaggaggttgcactcagctccactgatccctggtctgtacaaagagttacaacagcacgaatatggatgcatggtggtccatgaagaccatgaacagtgcgtacttctccagtatgtgtgcgcg

SEQ ID NO: 370706 - DNA, 1149 bp, Homo Sapiens
  misc_feature (51)..(419): n is a, c, g, or t
  misc_feature (905)..(905): n is a, c, g, or t
aagtagcgaggcctgggtggcgaattcggcacgaggagagaatacatttcnnnnnnnnnnnnnnnnnnnnnnnnnnnnnnnnnnnnnnnnnnnnnnnnnnnnnnnnnnnnnnnnnnnnnnnnnnnnnnnnnnnnnnnnnnnnnnnnnnnnnnnnnnnnnnnnnnnnnnnnnnnnnnnnnnnnnnnnnnnnnnnnnnnnnnnnnnnnnnnnnnnnnnnnnnnnnnnnnnnnnnnnnnnnnnnnnnnnnnnnnnnnnnnnnnnnnnnnnnnnnnnnnnnnnnnnnnnnnnnnnnnnnnnnnnnnnnnnnnnnnnnnnnnnnnnnnnnnnnnnnnnnnnnnnnnnnnnnnnnnnnnnnnnnnnnnnnnnnnnnnnnnnnnnnnnnnnnnnnnnnnnnnnnnnnnnnnnnnnnnnnnnnnnnncccgattccattgcctcttggctgctacctgtggtcaagacatcacacatttctggtagcaaagggataggtccaaccctgatcccctcccttctaccatcttggaagtgtttgagagtgaggaacagtgctgtgtaggggaaagcgggtgatactgaaagcagggaggcttggcttctgatcattcccctgtctcaatccatggatttcctgagtcttgttctcctcatctgtaagatgggtgtgatggtgccaacgtgcatctcggggagttgtcggtgaagggaaatgcattcattgatgggaaaatttcctaaaatcagaaacaaataaagccatataaaatctgtgggccttggcctcactctgcccccgaggcagaaagcctggttttgcttgttggaatgaaaggaaccgtggaactttttgacctccatttggcctggaagaatttataactttgtttcctgaaatgttgggcttganaaatgctttcctctttggcctccaggggctgggccgcctattgaggtgggaattctgggcttagagggctggcctagcctccacccttacagaacttgtttggaaaatggcccggggggggaatgggaaggccattcttcagaacctaaggtctttaaaaatgggccaagttttttgaaaaaggcccccggaaaaacatttattaaagggggcaccctccaaaatcacaccagaacccttaaca

SEQ ID NO: 370707 - DNA, 1308 bp, Homo Sapiens
ctgccacaggcaaaatacagactatgtactatataataagtatatgtgtagatatggacaggggaatatcgaaagatgaatacacgtactgtatgcaaatggtttgggtgaagttccttcttttaaactttcttttaatggctgtatttctgtgtcctatccagattacttgctgctatgtctttacctcgctcttcgcctacctgtacatatgtgttgtcagatggctcaggggttgacagccacattcttgacctcaaggcttctctcacaccctgtgcttgcagagggctcaggggtggccttagacagaggcaaacgtcccaggaccctgtgagctgggagaaaaaggcaggataccaacctgctctcaggctccagtctgcagcagatggcggccagcgggaagaaggccgggggacaatctgtgggaacaaacttctcccagaaaagcttcacgttgaggccaaagtccagtgttcggggaaggcagtcaggatctgcatacacctgcccaatgatctcacagagaacgatcccaaaggagaagatatccaccgtctcatcatagctctttccgttcagcatctcaggggccatccagtaggggtttcccaccaccgtgtagcgcttcttgcggtcgttcttgcgcaaggtgcgtttcttggtggtggccttctccatgggggcccttttcctctcttccactatgagccgtgacagcccaaagtctgccaccaccacagtcttgtccaacttgatgaggcagttgtagcgagttcagatcccggtggatgatgcacatagagtgcaaataggccattccggaggcgattccatttggcaaacctgaccttctgctgccaggggatacggatccatactgcgcagaaagtccttcagtgtgcccccctcaatgtactctgtcaggaggttcagcttcttatccttgtacagcacaccaatgaacttgagcacattggggtggtccaggctgcgcatcactgtcacctcagtcagaaaagttttctgggtctcctcatcacatcgaattaactctttcatgaccatcactgtgcccgtggctttgtgtgtcaccttgatagccatgccacaaagaagcccttccccaggacctccccatggattaggtcacagggccggaagatctgctgtgaatagctgctggaacaacgaagggattctgagcggctgatgtcacggctgaacagcaggggctcctttggggagctggggccaggggacttggagatactgttactgcgcctttagggaacgtctcctcag

SEQ ID NO: 370708 - DNA, 1037 bp, Homo Sapiens
ggcctgggtggcgaattcggacgaggctcgtgccggaggggatgaagatggcgaggagttagaaaaggctcaactgcgtttcttcgaatacaagagaaggcagcctgtcaagctagtgaacttggagaaggacctggttcagcagaaagacatcctgaaaaaagaagtccaagaagaacaggagatcctagagtgtttaaaatgtgaacatgacaaagaatctagattgttggaaaaacatgatgagagtgtcacagatgtcacggaagtgcctcaagatttcgagaaaataaagccagtggagtacaggctgcaatataaagaacgccagctacagtacctcctgcagaatcacttgccaactctgttggaagaaaagcagagagcatttgaaattcttgacagaggccctctcagcttagacaacactctttatcaagtagaaaaggaaatggaagaaaaagaagaacagcttgcacagtaccaggccaatgcaaaccagctgcaaaagctccaagccacctttgaattcactgccaacattgcacgtcaggaggaaaaagtgaggaaaaaggaaaaggagattttggagtccagagagaagcagcagagagaggcgctggagcgggccctggccaggctggagaggagacattctgcgctgcagaggcactccaccctgggcatggagattgaagagcagaggcagaaacttgccagtctgaacagtggcagcagagagcagtcagggctccaggcctagcctggaagctggaccaggaagccctgggacaaggaccaggagaggttagaatatgaaatccagcagctggaaaccgaagatttatgagggtcgatggtggtcaaaaagattatcatggggaccctggaaaggaaagggggctccttccagcttgcccagccaggctgaaaaattccccctgggttcccctcctggatgccaggaatcatggcttacattggaaaaagaagttccaagaacgcctttcagggatttgcatccggggggaataagg

SEQ ID NO: 370709 - DNA, 948 bp, Homo Sapiens
  misc_feature (106)..(122): n is a, c, g, or t
gcctgggtggcgaattcggcacgagggcccactggccctgactactattcccagctgcttaccaagaataacctgagtaacccgccgacaccaccctcgtcgctgnnnnnnnnnnnnnnnnnatcggtgcagcagaagatggtgaatggcgtcaccccatctgaagagctgggggagcaccccaaggatgctgcctctgcccgggatagtgaaagggcactgagggatacttcagaggtgaagagtctagacctgctggctgccttgcctacaccccctcacaatcagactgaggatgtcaggatggagagtgatgaggatagcgattctcctgacagcattgtgccagcttcatcccctgagagcatcttgggggaggaggcccctcgtttccctcatctgggctcaggccggtgggagcaagaggaccgggccctctcccctgtcatccccctcattcctcgggccagcatcccagtcttcccagataccaaaccttatggggcccttggcctggaggtccctggaaagctgcctgtcacaacttgggaaaagggcaaaggaagtgaggtgtcagtcatgctcacagtctctgctgctgcagccaagaacctgaatggcgtgatggtggcagtggcggagctgctgagcatgaagatccccaactcctatgaggtgctgttcccagagagccccgcccgggcaggcactgagccaaagaagggggaagctgagggtcctggtgggaaggaaaagggtctggaaggcaagagcccagacactggccctgattggctgaagcagtttgatgcagtgttgcctggctataccctgaagagccaactagacatcttgagcctcctgaaacaggagagccccgccccagagccacccactcagcacagttatacctacaatgtctccaatctggatgtgcgacagttctcg

SEQ ID NO: 370710 - DNA, 1041 bp, Homo Sapiens
aagcgaggcctgggtggcgaattcggcacgagggcagaggtgggggagcttggaggctacagctgctgaaatgggttgcggattgaacaagttagagaaacgtgatgaaaaacggcctgggaatatttattcaactttgaagaggcctcaggtggaaaccaagatagatgtgtcctatgaataccgcttcctggagttcacgactctgagtgctgcggagctccctgggtcctcagcagtgaggctggcctccctgcgtgacctgcccgcccagctcctggagctgtaccagcagggcttctcgctggcggccctgcaccccttcgtgcagcccacccatgagcgggagaagacgcccctggagcacatctttagagccatcctgatcaagaaaaccgacagatctcagaaaactgatcttcacaatgaaggctacatcttggaattagattgctgttcctccttagaccacccgacagaccagaaactcatcccagagttcattaagaagatccaggaggctgcaagccagggcctgaaattcgttggtgttatacctcagtaccattcctctgtgaactcggcaggcagcagtgctccggtgtctactgccaacagcaccgaggatgccagagatgcaaaaaacgcacgtggggatcacgcgtcactggagaatgagaaaccggggactggggatgtgtgcagtgctccggctgggagaaaccaaagcccagagcccagctcaggccccagaggggaggtgcccctcgccaagcagcccagctcaccctccggagagggagatggtggagaactttcaccacaggggggtgagcaagacactgggatggaaccggaaagcaacccccttggaaggtgcatgaaagagccactctcagggaaaaatggaagatctttcacccttttttcaacaaaccgaaaagccctcccaaatgccgggcaaactaaccctgttcacatttcccctccaggcccccagaaatggcccagaacagggagccgggtttggacgcccaatgg

SEQ ID NO: 370711 - DNA, 1080 bp, Homo Sapiens
gtagcgaggcctgggtggcgaattcggcacgagggccttaagatggcgttaacgaggggagggatccgccagggagttgacaaattcatctgaataataaaacgcagcctgcttcataaacaacccttcactgcccccggaggtttggggagctggagctgtggtcacaactagggcctaggctcatgcattgaactgatctggctgaggcatcagacacggtgccagtcctgccctgcggggaagacaagagcacaaagtgacaagccagtgtggactcactctgtcctggacctgaccagagagggtggctgacaaggctcggaatcgtggcctccagaggtttgtctggcagcagaagtaagatggagatatgactttaagagctctgaaactccactgtaataacagcaaccaacagggcttccaaagaccaggcacttgaagtggatttgctcatcatttgacaagacacctcttgacaagacacctccagaaggattttgtttattgtaaaggatggaggaactggggtgaaaaagagccaacagcttgcccaagatcatatctgaagtccatgcttttggccacgtggctgtcctgggcttcggaaggctctggtgcagcctgtgttagagttttgtaatatattgttttataattattcactatagacattcactggtgggttgaagtgtgaggcagtgagctgtgggtattaataactgactcgtgtcagaagcttagcagtgaacaaagcactttctcggatacggttcttagagcttctcctgcttcttttcccggggaagaaacttgagctgctaacattttgtaaaccctcctaatttcctgtaaatcacatgttccctgctgaggtgggggctgaaaaatgtttccggggcaatggtttttcaccccttaaggtctgtttcacactgccccagcaagccagttagcttcctctcctgaagattttaatgggtggtaaatttggtcccttttttctggccccggggtgtgggaaaggcattggggggcttttccatgggctcccggggggggtttttttggaaggga

SEQ ID NO: 370712 - DNA, 623 bp, Homo Sapiens
  misc_feature (259)..(320): n is a, c, g, or t
agctggggcagtctagggaggtcgaactgctgagcactggccgtgcgttgcacagttgcagtctcgcccagaggccggtacctgcgctcgcgcctgccgggttgaaaggatgcaagccgcagcatggagcagccaccctatgattggctgtggcgcttgagaacccaaagtaaagatggcgggcgggcaggcagccgccgcactgcccacttggcagatggcggcgcgccgaagcctcagcgctcgcggccgggggacnnnnnnnnnnnnnnnnnnnnnnnnnnnnnnnnnnnnnnnnnnnnnnnnnnnnnnnnnnnnnngcggctgcgcagcggtgggcgagaatgaggagacggtgatcatcgggctgcgactggaggacacgaacgacgtgtcgttcatggaagggggggcgctgcgggtgagcgaacggacccgggtcaagctgcgggtgtacgggcagaacatcaataacgagacgtggtcccgcatcgccttcaccgagcacgagcggcggcgccacagcccgggggagcgcgggctggggggccccgcgccgccagagccggacagcggcccccagcgatgcggcatccgcacctcagacatcatcatcttgcccc

SEQ ID NO: 370713 - DNA, 1045 bp, Homo Sapiens
  misc_feature (776)..(776): n is a, c, g, or t
  misc_feature (917)..(918): n is a, c, g, or t
  misc_feature (921)..(923): n is a, c, g, or t
  misc_feature (940)..(943): n is a, c, g, or t
  misc_feature (946)..(950): n is a, c, g, or t
  misc_feature (981)..(985): n is a, c, g, or t
  misc_feature (997)..(997): n is a, c, g, or t
  misc_feature (1002)..(1003): n is a, c, g, or t
  misc_feature (1022)..(1022): n is a, c, g, or t
agggagcgaggcctgggtggcgaattcggcacgaggcctgaagagagtccctggtgcagggagctcaggctgtcgtctgtcctctgtggaggctaacaatccgctggtgacgcagttactacagggcaacctgcctttggaaaaagtgttgccacagcccagattgggagccaagcttgaaatcaacaggcttccattgcctcttcaaactacctcagtgggtaaaacagcaccagagagaaacgttgaaattccgcccagctctccaaatccagatggtaagggctacttggcagggactctggcaccactccaaatgagaaagcgagaaaaccaccccaaaaagagagtagctaggactgtaggagaacacactcaagttaaatgtgaaccaggaaaattgttggtggagccagatgttaaaggggtgccttgtgtcatcagttccggcatcagtcagctaggacacagccagccatttaagcaagaatggctaaacaagcactccatgcagaacagaattgttcacagccctgaggtcaaacagcaaaagcggctgctcccctcgtgtagcttccagcagaacctatttcatgttgacaagaatggcggcttccacactgacgctggtacctcacacagacagcagttttaccaaatgcctgtggctgccaggggccccattcctactgcagctctgttacaggcctcttccaagaccccagtgggggtgtaatgcatttgccttcaacaggcatcttgaacagaaaggattngggagaggttagtctttcctcagcacctcaccagctaaggttagccaacatgttatcccccaatatgcccatgaagaggtgatatttaaggttgggaagcactgcacacacaatgccaaacaagcactagtacatcgcggnnggnnnaaaggggtttccctttnnnnttnnnnnattttgggttttttgcccgggtttttccgcnnnnngggtttggtttntttcnncttttttccttttggggcngaagtccccttttggtttccaac

SEQ ID NO: 370714 - DNA, 2083 bp, Homo Sapiens
ggcctgggtggcgaattcggcacgaggcaagtactctcaagttcatcaggaattccaggtcctcctgcagcacctccattgccaggtgtagggccgcctccaccaccacccgcgccacctctacccggaggagctcctcttcctcctccaccacctcctttacctggaatgatggggataccaccaccacccccaccaccacttttatttgggggacctcctccaccaccaccccttggaggagttcctcctcccccaggaatatcacttaatctaccttatggaatgaagcagaaaaaaatgtataaacctgaagtgtccatgaagagaatcaattggtcaaagattgaacccacagaattatctgagaactgtttctggttaagagtcaaagaagacaagtttgagaatccagatctctttgccaaattggcattgaattttgctactcagataaaagttcaaaagaacgcagaagcattagaagaaaagaagactgggcctacaaagaagaaagtgaaagaactgagaattttggatcccaaaacagctcagaatctgtccatctttctgggatcatatcgcatgccatatgaagacataagaaacgttattctggaggttaatgaagacatgctgagtgaggctttaattcagaaccttgtgaaacatcttcctgagcagaagatactcaacgaattagcagagcttaagaatgaatatgatgacctctgtgagcctgaacaatttggagttgtgatgagctctgtgaaaatgttacagcctcgtctcagtagtatcctgttcaagctcacatttgaagaacacataaacaacatcaaaccaagcatcatagcagtaactcttgcctgtgaagaactgaagaaaagtgaaagctttaacagaccttttagagttagttcttccttggtggaaactacattgaactcaggctcaagaaatgcccagtctttgggatttaagatcaacttcctttgtaagatcagagatactaaatcagcggatcaaaaaacaacccttttgcattttattgccgacatttgtgaggaaaaatatcgagatatcctaaaatttcctgaagaactggaacacgtagaaagtgcaagcaaagtttcagctcaaattctcaagagcaaccttgcatcaatggaacaacaaattgttcatctggaacgtgacatcaagaaattcccccaagcagaaaatcaacacgataagtttgtggaaaagatgaccagctttacaaagactgcccgagaacagtatgaaaaactctccaccatgcacaacaacatgatgaagctctatgagaatcttggagaatacttcatttttgactcaaagacagtgagcatagaagagttctttggtgatctcaacaacttccgaactttgtttttggaagcagtgagagaaaacaataagagaagagaaatggaagagaagaccaggagggcaaaacttgcaaaagagaaagctgaacaagaaaagttagaacgccagaagaaaaagaaacaactcattgatataaacaaagagggtgatgagactggtgtgatggataatcttctagaagccctacaatcaggtgcagcattcagagaccgtcgaaagcggattccaaggaatccagataacagacgagtacctttggaaaggtcacgctctcgccacaatggagctatctcatctaagtgattcctgatgccaaagaatatgaaaatatttaagtaaaaacaaaatgatgcattttgagaaggaacaaagtgtgcactcagcggctggaaaggaaataagtgcatttctgcaaagatcaagataagctggatgaagtagtgtgcatttgtaatactattgcaagactcctcccacaattattctaatctgaacacagttatcaggattacaaaatgtgttccattttagtgtaaagatgtgtatcatttgtaattgtgtgtgacctgactgtgatgatggaagtgtaagaaattgaagagttctaaggctttcaaaaacactcagtcaaaaatttaaaatcttaaatgtgtaagtcacccccacc

SEQ ID NO: 370715 - DNA, 998 bp, Homo Sapiens
agcggggtaaaaaaagcctccgaggccaaggccgctgctactgccgccgctgcttcttagtgccgcgttcgccgcctgggttgtcaccggcgccgccgccgaggaagccactgcaaccaggaccggagtggaggcggcgcagcatgaagcggcgcaggcccgctccatagcgcacgtcgggacggtccgggcggggccggggggaaggaaaatgcaacatggcagcagcaatggaaacagaacagctgggtgttgagatatttgaaactgcggactgtgaggagaatattgaatcacaggatcggcctaaattggagcctttttatgttgagcggtattcctggagtcagcttaaaaagctgcttgccgataccagaaaatatcatggctacatgatggctaaggcaccacatgatttcatgtttgtgaagaggaatgatccagatggacctcattcagacagaatctattaccttgccatgtctggtgagaacagagaaaatacactgttttattctgaaattcccaaaactatcaatagagcagcagtcttaatgctctcttggaagcctcttttggatctttttcaggcaacactggactatggaatgtattctcgagaagaagaactattaagagaaagaaaacgcattggaacagtcggaattgcttcttacgattatcaccaaagacagtggaacatttctgtttcaagccggtagtggaatttatcacgttaaaagatggagggccacaaggatttaccgcaaccaacctttaagagcccaatctagtgggaaactagttgtcccaacatacggatggatccaaaattatgccctgctgatccagactgggattgcttttatacatagcaacgatattttggatatctaacatcgtaacccgaagaagaaaggagactcacttatgtgcacaatgagctagccaaccatggaaagagaatgcccgaatcagctgggagtgcctacctttgt

SEQ ID NO: 370716 - DNA, 1052 bp, Homo Sapiens
gctgggtggcgttccaagacgagggtcacgcgcccgccctacgctcctgtcgggacagggcgccgccccgtgtcggcccccgcctgtccgggcgccgccatggagcgcatcgagggggcgtccgtgggccgctgcgccgcctcaccctacctgcggccgctcacgctgcattaccgccagaatggtgcccagaagtcctgggacttcatgaagacgcatgacagcgtgaccgttctcttattcaactcttctcggaggagcctggtgttggtgaagcagttccggccagctgtgtatgcgggtgaggtggagcgccgcttcccagggtccctagcagctgtagaccaggacgggcctcgggagctacagccagccctgcccggctcagcgggggtgacagttgagctgtgtgccggcctcgtggaccagcctgggctctcgctggaggaagtggcttgcaaggaggcttgggaggagtgtggctaccacttggccccctctgatctgcgccgggtcgccacatactggtctggagtgggactgactggctccagacagaccatgttctacacagaggtgacagatgcccagcgtagcggtccaggtgggggcctggtggaggagggtgagctcattgagggggtgcacctgcccctggaaagcgccccagcctttgcagacgacccggacatccccaagaccctcggcgtcatctttgggggcctcatgggttcctcggccaggtggccccctaacctggagatctccagtgagaactccagggggttctaaaatagaaggcccaatgtttggggcggtttcgccccgaaaactcccgcgcgacccccaataagacggcttgtgaaagcttccccgggcctaatagggaaggcggagcacgaaaccggcaaggagcgtgtaatggggcccgatgccgggcccacaagagagccccaagggaaaacagacactaccgtggcagattattttctgttgtgcgaagcaactaactccatcccacacgagaccaaaaatgcgagagcgccgaccgc

SEQ ID NO: 370717 - DNA, 1130 bp, Homo Sapiens
cgacgccctggggtggcgatacacggcacgaggaaccgctcgtctcctacacgcggtccgcgagcgcggacggcccccggcggccccacgcggcagcggagcagcctcccgcagccacgattctctccacgtgctctcgccggaactcgcgctgcagaagggggctccctcccacgtgggcgcagcaatccctgactacctgcggggtgacccgcccctccagtaacagggaaaaagggactgggggagagagcgtgagcgcgtgccggagctcagggagggagggcgcccggcggagcgcgacctcggctccccgcccgcgcgcactcgccggctgtgcttagcggacgtggctcctggcgcccaggagtgtcccggctgcccaaactttttccgctcccaggcccggagtagggaggaagcgggtccccgcagggtcgaggaagagactgatggaggccagaccactttgccagagcccagcctgccgccccgcccgcgctgacttaccttctgcacttgggcatggttgagctccgtgaagaagtaggcaagcagatgcgaggcaatcatcctgccgcggcccgacggcgcagagttgggaaaccgaggccgacacgcgacagggggaggctggcggcacgggccgactgctttgggctggggctcggctgcccggccgggaactgggagtccgggacggcgccacaagaaagctaccggccaaggggggcccccggtatggcacgatgggccccggttcatccaggaggacgccaaatctccggaacccaaaaagaagaaaagggtcccctccccttcataaacctgggggggcattgatacccgagggataccccccctgggctgacccattttttcctcttacacctcgctaggaacttaaaagaattggcccctaaggcggaacggagcacctccggggcaaagatctggccccctatgggggcaccatgtaggagcctcccgtggaatatatccccctcttctcgggggattttgtcgtgggcggggatgaaaaaacatcccacctccccattttcatcccggagagccccagtaaaccccccttgtgtatcccaacgccgctcggcaaaacccgccgacaa

SEQ ID NO: 370718 - DNA, 1022 bp, Homo Sapiens
  misc_feature (909)..(909): n is a, c, g, or t
  misc_feature (921)..(921): n is a, c, g, or t
  misc_feature (945)..(945): n is a, c, g, or t
  misc_feature (963)..(963): n is a, c, g, or t
  misc_feature (968)..(968): n is a, c, g, or t
  misc_feature (973)..(973): n is a, c, g, or t
  misc_feature (983)..(983): n is a, c, g, or t
  misc_feature (993)..(993): n is a, c, g, or t
gcctgggtggcgaattcggcacgagggggagcccgagaccatggaaaccaaatcagtcatcgactctcgagtgtcttctatttctgccattcgcttccggattgaccccaacaataaagagaattctggtgttgtccctgctgccagctcctcagcaagcactcctcactgttctaacccaggttcatctggcccagatactgctcaggcaaggccttcccaaatcttacctctatctcaagacctggatgggattgcccccaaagaaccaaccatagagcatggagacagctccttctccctctccagtggtgaccctaacccagacagagcctgcctggccagcaacccaggactaaataatgtctctcaaggagacacactagagctccagttggagccccatgtccagttggaaatgggattggaatctttttgtacaaatcatatacaagaaactgcccccaaatacacagagcctttgttgtctcctagagatgagcctagaagtgatgaatgtggaataaatccaggagagaagatagcttctatccctacaaaggaagagccacaaggacaactatctctggaaagagacagagaagttacaaacaaaaatggcaccaacgtatttcaggaagagtctaggaaggattcaggtgactccccggggtgatgtgtcaaataatgtttcacagactcttgatattagctctccagctggtaaaatagtaacctccctttctttagatgctcctgtaacagggaaccgagcagatcccaccacatcccccctagaagaccctcaaggacagaagcagagaacccccaggggcaggctgccaggctcaagaacaaaaactaaattcgtagagttggattttagacccctgatttctttttctgggngaagcagacagntttcaccagccggtccccttccangagggggatcaagggcanaaggncaccntaaaccatgntgacaagggncaagaataatagccccctaggggaaaagg

SEQ ID NO: 370719 - DNA, 1067 bp, Homo Sapiens
  misc_feature (149)..(149): n is a, c, g, or t
  misc_feature (264)..(273): n is a, c, g, or t
  misc_feature (988)..(988): n is a, c, g, or t
ggcctgggtggcgaattcggcacgaggggagacaggggcctcgctctctccagagaggaacactggattttttcccccaaaaaaattacatggggaagggaggataaccctatcagatggtagtggagtggaggagaaagaaccctggngaaaaaatagtgcttttacatcagtgatgagaaaccctataaaattgttggtgggaagcacttataaggcagtagagaaaaactgttgggttagaaaccctataaatatgtaggnnnnnnnnnngccctttaagtctgtagcagaaaaaccctataaaccatagtggataaaagccctattaattgtaggaagaggtcccaatatgtctctgaacaaccctataaaattgtatcaaaatccttaggaaaatcctatagggtcggggaagtaccgcaatggcactgacccgggagtaacgaccctcagatgatgcagaaaacacctctccctcactgttccacaatgttctctcccagcagccctggacagttctcatggaggaagatgctcagctgggggagtggtgtgggaactgggtggaactgaaaaggaagaaaataggagaaaaataagtgaccaggggctctggagcccccagaggagataagacagagactaggaagaaaaggtcccactcgctgcactggggtccttggggtttgaggacaatgttagatgcattgtgtgttttagggaaagaggcctatgggaatcccttatcaaaaccccaaaatgggggaagaaaaaacaaattggcaagcctttttaaaagctgaaggttgggggtgcagaaaacatggttcagtataagaatactgagaaaccaccacaaaaattagggggaagcagggggcagtttctgttagattgctttgaggggagcaaaccaaggtggggaaactgctcacatggaacccagctaactccaggccccttcttgcttccggaagcttgcganactgcaagtagcaggcaggtcccagctctcagagtgcaagggttctccccacaccaggcaggaccaccctttctccctg

SEQ ID NO: 370720 - DNA, 1043 bp, Homo Sapiens
aggagcgaggcctgggtggcgaattccgcacgaggggacggagtaccgggtgtgggtgcgggcacacacagacgtgggccccggccccgagagcagcccggtgctggtgcgcaccgatgaggacgtgcccagcgggcctccgcggaaggtggaggtggagccactgaactccactgctgtgcatgtctactggaagctgcctgtccccagcaagcagcatggccagatccgcggctaccaggtcacctacgtgcggctggagaatggcgagccccgtggactccccatcatccaagacgtcatgctagccgaggcccaggaaaccactatcagcggcctgaccccggagaccacctactccgttactgttgctgcctataccaccaagggggatggtgcccgcagcaagcccaaaattgtcactacaacaggtgcagtcccaggccggcccaccatgatgatcagcaccacggccatgaacactgcgctgctccagtggcacccacccaaggaactgcctggcgagctgctgggctaccggctgcagtactgccgggccgacgaggcgcggcccaacaccatagatttcggcaaggatgaccagcacttcacagtcaccggcctgcacaaggggaccacctacatcttccggcttgctgccaagaaccgggctggcttgggtgaggagttcgagaaggagatcaggacccccgaagacctgcccagcggcttcccccaaaacctgcatgtgacaggactgaccacgtctaccacagaactggcctgggaacccgcccagtgcttggcgggagaggaacgggcgcatcatcagctacaccgtgggtgttccgagacatcaacaggccaacaggagctgcagaacatcacgacagacacccgctttacccttactgggcctcaaggccagacacccctttacgaacatcaagggtccgccccatgggaccagccaaagggctctgggcccaactcaacccccaccatccagtccccggaaccattgccgggggggaaccaatggt

SEQ ID NO: 370721 - DNA, 728 bp, Homo Sapiens
  misc_feature (657)..(657): n is a, c, g, or t
tagcgaggcctgggtggcgttttcggcacgaggaaagccctataaatgtaaaaaaatgtaaaggctttaatcactacagtttttgtcaaaaacatgaacagtcacatacttgagagaaactgtgaatgtaaggtgtaggaaagtacttaattttcccagatttcctcaaatacatgaaacgaatcaaactggagataaaccctatgactataagcaataaggtaaagcattcaatttttccatttctttttgaaaacttgaaaggactcactgaagaaaatccatatgaatgtttaaaatgtggtaaggcctgcagttgttccagtggtatttgatggtataacataactcattctagagaaaaactttatgaaggtatcgaatgtgagaatgccttcatttatcctataactcactcagagacacatggtaacacatactccagatggaccttataaataaaagaatgcccaccagattgaaatcctagaaatacagaaaattctgaattttaacaattactttaaaggtcatgtgaaaactcccactggaaataaatcctgtaaatgtaaatattatggaaaaccttatggaaaataattatagtacaattctcaagaaaattcactatgtgaatgagatgttttaggagctatnaaataattgaatatattggttgctcatttttgaaaaagagtctctagaatatagaattttcacttcttttg

SEQ ID NO: 370722 - DNA, 821 bp, Homo Sapiens
gcatgagccaccgcgcctggccaagttcatatagttttctacaatctttgttaacatttcagcaatgttcaaagcatattcactagagtagcctccctcaagaaacctctttgttcattcatgagccactcctcattcatttaaagttttattatgcaacttcagcaattcagtcacatctttagttgccgcttctaattatagttctcttgccgtttccattacatctacagtaacttcttccactgatgtcttcagccttcggaatcatctatgagggttggaatcagcttctttcaaactcctgttaacagtgatacttttcctcttcccatgaatcataaatgttcttaatggcatctacaatggtgaatcctttctacaaggttttcaatgtattttgcccaaatctgttaccaaaataactagtgcagctatagcccttatgaaatgcaatttcttaaataaaaagacttgaaaataaaaattattccttgacccatagggctgcaaaatggatgttctgttaccaggcatgaagagaaccctaaccaccttgttatatctggctcacaactcttggggtgatttaggggcttttgtccatgaaacagtaatatttttgaaaagccatcctggtttttcccagtagttaggtcctcaacagcggggcctaaaaaatttcagtaaaccccggctataaaaaagatgtgcctgccatcctaaaactttggtggccccccttttagggggcccccaaaagtaatctacttttttccctaaattccttaagccgcccctagaggattttttgggaatag

SEQ ID NO: 370723 - DNA, 1054 bp, Homo Sapiens
  misc_feature (873)..(873): n is a, c, g, or t
ggcctgggtggcgaattcggcacgagggagaagctggtgttttgcccggctctgcttggtcacagacagctccagcaagagcagttgttaaaagtgccaagcgtgtgtatcactgtgacaagccgtttgcttactgccctgttcccttgcagccaaaccagctgatgaagaactgctgccaggtgggtcctacagcaggtcacaaatgacctagtttcattttaagcagacagactctgtttggcctagaggtgtggagtgagagaactgtgtttgtgggtatgagtctgtgtggccaaccccatgacccccacccctccagcccaacatcttgtgagcacatgtgacctaggccccgggggacctgcctgctcctttggcttgggctcttcgtgtttcccacctgccctcggcacgagcccttggtggcatcacagttggccactcagctgtgctgagtagctgtgctacttgtgctggcagctgcaaggataggaatagctcagcgcccgatgagctccctgagcagatgtgaggctggcaactcccctgccctctgtttgcaggcacagggtcacagtcccaagaaagacaactggagtctgatctcccagccatctctggggttactaggaggcagctggatggcagatacgagaagcccaaatagccaagctgttgcaagacagagtggctacaattgaattgacaccctgggaagcacgaggtaacttggtaaggataatgatgctgtagatgtctgtgtcctcggaggctgagctctgcttggcaaaaagaaccttgctgtgtgaagtggaggccggttttgcagacatctcagcttcttttctgaggaaggagttggttctcatncttaggcttcctgcaagggcgagcatgggatgtcttcacccaccacccacatcttggaactgtgcttgggtccttggcttgggggcgccttaaggttgggacctgtatcaaaagacaattttgtggaaaaaaggggttggaagggtgccacggcaaggggttctctccctcagggggttca

SEQ ID NO: 370724 - DNA, 757 bp, Homo Sapiens
gagacagtcttgctttttgtcggaagtatgtagtcgactacatacttccgagaggatatctgaatatgcagctgacattttctatagtagatatggtaggaggtccaagactaactgtgaaagccctgtgtaaggaatgtgtagtagaacgttgtcgcatattgcgtctgaagaaccaactaaatgaagattataaaactgttaataatctgctgaaagcagcagtaaagggcagcgatggattttgggtggggaagtcctccttgcggagttggcgccagctagctcttgaacagctggatgagcaagatggtgatgcagaacaaagcaacggaaagatgaacggtagcaccttaaataaagatgaatcaaaggaagaaagaaaagaagaggaggaattaaattttaatgaagatattctgtgtccacatggtgagttatgcatatctgaaaatgaaagaaggcttgtttctaaagaggcttggagcaaactgcagcagtactttccaaaggctcctgagtttccaagttacaaagagtgctgttcacagtgcaagattttagaaagagaaggggaagaaaatgaagccttacataagatgattgcaaacgagcaaaagacttctctcccaaatttgttccaggataaaaacagaccgtgtctcagtaactggccagaggatacggatgtcctctacatcgtgtctcagttctttgtagaagagtggcggaaatttgttagaaagcctacaagatg

SEQ ID NO: 370725 - DNA, 1127 bp, Homo Sapiens
  misc_feature (413)..(486): n is a, c, g, or t
  misc_feature (536)..(656): n is a, c, g, or t
  misc_feature (838)..(839): n is a, c, g, or t
gcctgggtggcgaattcggcacgagggaataaacaggtaaatttgatatgaaaaagcacctcagtatgattctttaaagtataagcttgtaagtagctaggataatgttaaattgattgtttggaatatccaaaccaagcacaatgaagaaagtagaaatgatatttttaattgagcaaagattgtatagatggttcatttggtcacccattttgaataatatatggaaagttaaaaaatgcttctcagatacaaaggaataaagctaagatgaagcttaacgtgagggattacttactgtggaattgcatttcaaactgggctgaggtgggatggtggtggtagataagaggccagctagagtaaacataagctttgtagttttattattttaagagtcagagtcttgttcnnnnnnnnnnnnnnnnnnnnnnnnnnnnnnnnnnnnnnnnnnnnnnnnnnnnnnnnnnnnnnnnnnnnnnnnnncctgcctcagcctcctgagagctgggactacaggtgtgtgccaccttgtnnnnnnnnnnnnnnnnnnnnnnnnnnnnnnnnnnnnnnnnnnnnnnnnnnnnnnnnnnnnnnnnnnnnnnnnnnnnnnnnnnnnnnnnnnnnnnnnnnnnnnnnnnnnnnnnnnnnnnnnngtgtgagccactgtgcccagccttgtattttgatttttaaattaatttatatgaatatttccttttaccctataatgtatcagggcttaatatttttaaacttcattataaaaagttgattacagaaagtggtatcttctagttgggagccatctttgcacatctctctccaactctgcctnntagtgatatgtcaataacaaattggccatggcaggagtattttacaccatggaaagtgataaatgcagcaaatcaaggaattcccctcctgttgtcccctcagaaagccagcttcccagcacctcatcaatttcaaatataaaaaaagaatagtaaattttcatgtacacatcactcagcttcagtaattgtcgtctcatagccagtttttcctctcctatcctcaaggtataccaggtacactggaggtgtattctctagcctgatacccgtggcatcgaataaaca

SEQ ID NO: 370726 - DNA, 581 bp, Homo Sapiens
  misc_feature (465)..(503): n is a, c, g, or t
cagcggattggccgatgggtgcccggtactgcggaagaactggccgtcgtatacacccgcttctgaagcgtgggaggcggaagagactgcaggttgtagattttggtcttggccccaacgggttcccccagaccattagaacccgagagaggaagaggaggcaccgcggcggcggctgagaggccgaacccccaacctgtcctcgaggcgggaggggggcagggaggggagaagcaccgatcccagggctgaggagcctccgggaccgggtccgggagcatggggggctggaccgggtccccgagcatggggagctggagccgccaaggccgcccggccgggtcctacccgactgtcaggtcctcggtgctagcgctgcccgggcagccgcagcatctgtagcccggccccgcttgtggtcctcagccggaaagatagcagcatgagttccgccgctgcctagtnnnnnnnnnnnnnnnnnnnnnnnnnnnnnnnnnnnnnnncagaccacctccttctttcccgcccctgcgcttcttttcccttaccctctgtcctcctccctccccgcgggctttcgg

SEQ ID NO: 370727 - DNA, 1063 bp, Homo Sapiens
  misc_feature (545)..(545): n is a, c, g, or t
  misc_feature (652)..(652): n is a, c, g, or t
  misc_feature (762)..(762): n is a, c, g, or t
  misc_feature (765)..(765): n is a, c, g, or t
  misc_feature (934)..(934): n is a, c, g, or t
aaggagcgaggcctgggtggcgaattcggacgaggaagatttcagattgtgatggggcccacgcacctggctgcctagaagaaggtgcattcataaacctgcttgcccctttgttcaatgagaaggccacattattactggaatccaggccagaccttctgaaagtggtacgggaactgcttctgggacaactattcttgacagagcaggaagtttctggagaacaccttgatggtaaaactgagaagacacctaagcaaaaaggtgaacttgtacattttgtccaaaccaactcattttccaagccacatgatgaactgaagttgtcttgtgaggcccagctagtaaaggcaggcgaagtgcccaaggtaggactgaaagatgcctcagtgcagactgtggccacggagggcgacctgctgagattcaagcatgaagcaacaagagaggcttgggaagagaaaccgatcaacactgcactcagcgcagagcatcggccagagaacctgcacggggtgcctgggtggcaggctgccctcctttcncctccctggtattaccaacagagaggctaagaagtccccgcttgccaatcctaataaaaccatccccggtcattaggaaatatgtatcgtctcccctgccacccagngaggtggttgacgcagctgcaaagccagatcttggagctgcaggggggagctgaaaggagtttaaaacctgggaataagcaacttcaccaaaagttaattctggctgaancantgatggagggggaggccaacgcccggacaaacgttgctgaatgctcagccccctgtgggagcagcctaccagaacagcccaggagagcagaaagggaatttaaaaccacatcctttctgtctggagagacaagggaaatggaccagtgatcaagcaaagaaagctacgnagattgactctggagatttgccccaccctgaatgacctttgccaagcttttgcctcatggcaaagaaaaattccttgaaaatgtttcttgaacccccaactttccgtaagcctaacttaacctgaagtt

SEQ ID NO: 370728 - DNA, 1207 bp, Homo Sapiens
  misc_feature (1120)..(1120): n is a, c, g, or t
gagcgaggcctgggtggcgaattcggcacgaggctactatgtctccaagtccctgtacatctgcctcccggcactcctggagtgcccgccattccagacggagcgccgtgagagctggtcctcggcccccgaactgcccgaggagctgcgccgcgtggtgtctgtgtaccaggcagccctggacctcctgcggcagctgcaggtgcaccccgaggtggcctcgcagatgctcgcctacctcttcttcttctccgggacactgcttctcaaccagctcctcgacaggggcccctccctgagctgcttccactggcccagaggtgtccaggcctgcgcccgcctgcagcagctcctggagtggatgcggagcgccggcttcggggcggctggagagcacttcttccagaagctctcctgcaccctcaacctgctggccacacccagggcccagctcatccagatgagctggacagccctgcgggctgcgttccccgcactgagcccagcacagctgcaccggctgctgactcactaccagctggcctcggccatgggccccatgagcacctgggagccaggggcccaggacagccccgaggccttcaggtcagaggatgttctggagtcctacgaaaaccccccacccatcgtcctgcccagcgacggcttccaggtggacttggaagccaactgcctggacgacagcatctaccagcacctgctctacgtccgccactttctgtggggtctgcggagcagagccagccccggcagccctggcaggcctggcagtggggcctcccaaccagtgtgcccccgagggtatgccaccacgtggtccttgacgggcacctggaggccccgagctgccccctggctcccagggaccctggcccagcagcccgggaagtggccccggagcgtactcttcccttgaggggggctccctgggcacaggccccccctggaaggcacccgggccgtgggggctcccaggctggccccccgcacacggactcgtcctgcttgctcacgcctcccagcactccacttggccctgagcctggggaccccgactgggcagaatccggcgggcccctgtgggaaaaccgctcccagnagagggcagagggaatggacccagcgggccccccggggttggaacctcccggaaaggaaaactctggcagcccccttggccgggaga

SEQ ID NO: 370729 - DNA, 914 bp, Homo Sapiens
  misc_feature (195)..(493): n is a, c, g, or t
  misc_feature (514)..(546): n is a, c, g, or t
  misc_feature (678)..(715): n is a, c, g, or t
gatatattgatacagataggtagatatgatattgtactttcatgccataagactacacaataaagttcctgaaagttcctggctgggattacaggtgtaagccactgcaccctgcctattcttataatcatatatttatatttcaaatggattttaactggttatttaatagtttaattagataaagtaattcannnnnnnnnnnnnnnnnnnnnnnnnnnnnnnnnnnnnnnnnnnnnnnnnnnnnnnnnnnnnnnnnnnnnnnnnnnnnnnnnnnnnnnnnnnnnnnnnnnnnnnnnnnnnnnnnnnnnnnnnnnnnnnnnnnnnnnnnnnnnnnnnnnnnnnnnnnnnnnnnnnnnnnnnnnnnnnnnnnnnnnnnnnnnnnnnnnnnnnnnnnnnnnnnnnnnnnnnnnnnnnnnnnnnnnnnnnnnnnnnnnnnnnnnnnnnnnnnnnnnnnnnnnnnnnnnnnnnnnnnnnnnnnnnnnnnnnnnnncttttttacacatggggtatnnnnnnnnnnnnnnnnnnnnnnnnnnnnnnnnntattcctaggcacagtcatagcacactgcagccgaaaattgctgacctccagcaatcatcctgcctccagcctcctaagtaggctgggactacagggtgcatacccaccattacccagcttttaaattaatnnnnnnnnnnnnnnnnnnnnnnnnnnnnnnnnnnnnnnccgggaattccccaccaagggcgtttccccaaaaaaataaatttttgctttcggacttattggagaaattaatgggaaaagcggggggacatatggaaatttctaacttgccaaaaatatcccagggtctcaaaagggccccaacaagggaatttttcttaaaccccaatccttttttaaggggaaaaatttcaaaaaa

SEQ ID NO: 370730 - DNA, 1050 bp, Homo Sapiens
gctggggtggcgattccggcacgaggcgggggccccgggaagtcccctttcctctgcaggctcagaagtgcctgctccagatgcgtggcttctcccgactaccagtgacggagccggcactgagcaaagttttggtcaagtccgggcgctttgcaacccggccgggtgtgcgtacactcggggcagccctgccatgccagccccctgccgcctctgccccctccagactttgggtgccaacgagcacggggaggaaggctgaaaggggcctgcaggtcccccatggcacggatagccagggcattgcggtggacaaacctgtcaatggcagcaggtaggcagataggttcccgggtggaaaggggcggtcccggtgaagccccactttgaagacagggacgacctgaggcctggggcctgtcggttcccagtggagtccaccgcgggagtgagaacttttggtgttttttccagccccgccgatggccacccatggaccaatcagcacacacttcctcccttcaaaacccgtagaagtcccagactcagctagactcgcagagagatgtcaggatgacctgcctgcggataagagcttctcactccgggtctcctctcccctgagagctggacactcctcaggaccacgtgcctgcagaaaggaactacccacttcaggtctcctgagagctgttctgtcactcaatgaagctcctctctgccttgctcaccctccagttttccatatacctcattcttcctggacttgcgacaagaactcggaaccgctgaagggcgggactgaaagagctgtaacacaaacagggctgaaaaacgcccccaaacccactcaccatgtttgcaggtgactaggagagaacggctaacctttaaaggaagcccaaacctagggagctcccccgagccaggtctggggaacaccctcttttggggctctggaagttccctggtggctccaaactttctcggggccccccaccttggcccaggggcctgcaataaaaaacgcctttgggaaaaggaaaaccc

SEQ ID NO: 370731 - DNA, 1058 bp, Homo Sapiens
  misc_feature (296)..(377): n is a, c, g, or t
taggagcgaggcctgggtggcgaattcggcacgaggcgctggcgagctggaaccgttgctggtggcggccggaggcggcggtcgggcctacctgaggccgcgggaccgaggccggactcaggcctcccccgagaaactggagaaccgctcggaggcgcccgggagcggcgggagaggcggggcggcaggtggtgggggcggctggacgtcgcgggctccctctccgcaggccggccgctcactgcaggagggggcggagggcggccagggctgctccgaggcttgggcgacccttnnnnnnnnnnnnnnnnnnnnnnnnnnnnnnnnnnnnnnnnnnnnnnnnnnnnnnnnnnnnnnnnnnnnnnnnnnnnnnnnnnacgcttcagagactgacaacctctgggctgatggggaagatggagtatccttcatacaccccagcagcgagctcttcctgcagcctctggcagtcaccgagaaccacggagaggtagagatccgaaggcacctcaactgcagtcactgccctttgagagactgccaatggcaggcagagctccagctggctgaatgcctgtgcccagaaggcatggagctagctgtggataacgtcacctgcatggacctgcacaagcccccaggccctctggttctgatggtggctgtggtggcaacctcaacactgaacctccttatggggcgggggggcccgcattccggggaagcagaaaaagtggcagggcctggcaggagatgaagctggcccaaccctgagcttgaactgagcaaccttccaacctctggccttatgacagccccccatcccctattattgcccagggggggcttgggcccggccccagccctggtcccctgccaaacagggggcccccaagggtttcccccggcctatggtgagtaaggcctcccaaccccttggtccccgcggcgcctttgccggttcgcggatttaacactaatcggctgctccccggcaacaaaggggtgccctcgcaattgtacttgcccgccccgacatctatcgagcgtgggtgtaa

SEQ ID NO: 370732 - DNA, 1333 bp, Homo Sapiens
  misc_feature (1189)..(1189): n is a, c, g, or t
tcagagtcatgctgccagacgaggcactgcttcccggggccgagggcgagcatggaaggccctgagcctaatgacggatgccgtggctgccccagatagtgcccctgggaaccctggcctgaatgccaggaccccgagagccaagaagctcacatcaagacattgtcagcagcggcctccccagagggccagtgaccaggccaggcctggccctgagatcatgaggaccatccctgaggaagaactgattgacaactggagaaaaatgagctttgagatcctcaggggctctgacggggaagactcagcctcaggtgggaagactccagctccgggccctgaggcagcttctggagaatgggagctgctgaggctggattccagcaagaagaagctgcccagcccatgcccagacaaggagagtgacaaggaccttggtcctcggctccggctcccctcagcccccgtagccactggtctttctaccctggactccatctgtgactccctgagtgttgctttccggggcattagtcactgtcctcctagtgggctctatgcccacctctgccgcttcctggccttgtgtctgggccaccgggatccttatgccactgctttccttgtcaccgagtctgtctccatcacctgtcgccaccagctgctcacccacctccacagacagctcagcaaggcccagaagcaccgaggatcacttgaaatagcagaccagctgcaggggctgagccttcaggagatgcctggagatgtccccctggcccgcatccagcgcctcttttccttcagggctttggaatctggccacttcccccagcctgaaaaggagagtttccaggagcgcctggctctgatccccagtggggtgactgtgtgtgtgttggccctggccaccctccagcccggaaccgtggggcaacacccctcctgctgacccgggctggaaaaaggacagtccccccagtcagggtgccaaatcccactgggccagaaacagctttcttctggcggttcagtcctgaatgaagtttggatgccttccacaagggcaccgaaaagagaacaggcccgctggtactggaccaacccaaaaatggttggaacagggccggcctgggacttgggacccccgggatgggagggttctccatcggcttcccctaaaaaaagnttcggggcctggggcctggctgggaaaggggcctgtctgcttggccgtccccagggaaggaagccccggccctgtccccaggaagggccccccgcccctaatagagaactgggtctacggggcattgtgggccttggaaaaaat

SEQ ID NO: 370733 - DNA, 1125 bp, Homo Sapiens
  misc_feature (649)..(671): n is a, c, g, or t
  misc_feature (690)..(749): n is a, c, g, or t
  misc_feature (803)..(812): n is a, c, g, or t
agcgaggcctgggtggcgaattcggcacgaggctcaagctattctcctgctttggcctccaaagcgctgggattataggcgtgagccatcacacccagccaagaaggacattctgagtatcggggccagctaggacaaatgcaggattgcacagaagccgtgtggccagtgcagttactgagggagagaagatggtagatgagttccaagaaataacggaggggctggctcatggagagtctggaaggtcacggagagattttgccttactcttagttggaagcctgtggaggagcctttctcattggggctcacctgagccctggaaggcagaagtgactagagtgattatttgttcagttctcccagggatgggaggcacctcatcctgggagagcagctccttagttgcatacactggctgcctgagagcattagggcctcaggctctggaaccctgcttgagagaggctgcgaagtgttcagagcaggacagtgccaggtgctggctgatacttcacagagcatcgctgtggcggctgcagaggacagacaggcccaggcattggagcctgaggccagtcacacagcattgcaggcttggggtggttgaatgggatggtgagaggaggtcagattctgggtgtannnnnnnnnnnnnnnnnnnnnnngaggtggagtctcgctccnnnnnnnnnnnnnnnnnnnnnnnnnnnnnnnnnnnnnnnnnnnnnnnnnnnnnnnnnnnngttcaagcaatttctgccctcagccctcctgagtagctggggactataggccgnnnnnnnnnnatgcctgggctaattttttggattttttaaataaaaaattttggaatcctcaacctgggatttccccccatatttggggttaggcttgggtccgtggaccttcctgaacttttgtggatcccgccttggcctcaaggccttcccaaaagtggcctggggatataaagggggttgggagccatacaagggccccaagccaccttttttgggggggtttattttttaaggaggctaagacccccccgggaatttttgggggcaaggtattgggattggcggaaacaaagagggggccaaaattcccaaagggttt

SEQ ID NO: 370734 - DNA, 1000 bp, Homo Sapiens
gagcgaggcctgggtggcgaattcggcacgaggcccacctcagtttgcctgcctgaaacatcaggatagaaatgcccattgcctagagccacgggtggcggcccacatatgggcaccagcacctgtgaagcaaacgcttcttgcctccctcctcctcccctctgcaacatgaagggcccagcactcacgggatgcagagggaaggcctgagcaatgggaacgaccgcccatctctcccaggccggccctcgctagagccctttgcatatgaggccccattgtatcctcccagccaccctgtgcggaagctgctcttctcccgtgttacaggagaggaaactgggagatggaattgcatgcccaaggccactctgcgagggaggggaagactgagaattccagcccaggcagcgtaaccccatgcctgcaggcttaaccaaggtggatattataggaggggccgcctccaccctgattggaggttctgttaattccatagctcttcccaggtacctgtgcctccaggggtggcccttgtacctggctctgaggggagactgcaaaaggcaataaaaagcaagggttggagcaggcagaggcagccccgacccatccccagggctcccaggactgacttctgttctctccaccccgtctcccccaaccccaaccccagcatcagaacaattccaagagttcgcccagctccaagaccagttttaaccaccacataaactcaaaccatgtcagctcgaactccaccggaagcagctagtttcggctctggcctccaagtccacagtgggaaccagcccagaccccttctcccttagaaagtggaagtaatgggagcccccggctctggttgggggctgcccaggggaaaccccgggaacccgggggaaagaggccgtccatcccggtcgacggtaaaacctccaaggttcttcaagaaaatttcccacttcaggccttgttttccggagggggcccccggccc

SEQ ID NO: 370735 - DNA, 988 bp, Homo Sapiens
cctgggtggcgaattcggcacgaggctgtggattccctcttcctccctagcagaagggatagatctagagacctcaaaatacatcctggccaatgttggggaccagttctgccagctcgtaatgtctgagaaggaggccatgatgatggtggagccacaccagaaagtggcatggaagcgagctgtgcgtggtgtacgggagatgtgtgatgtgtgtgaaacaactctcttcaacatccactgggtttgtcgcaaatgtggatttggggtctgccttgactgttaccggctcaggaaaagccggccacgcagtgagacagaagagatgggtgatgaagaagttttctcctggttgaagtgtgcaaagggacagtcccacgaaccagagaatctcatgcccacacaaattattcctggcacagctctttacaatattggagacatggtacatgctgcccggggcaagtggggaattaaagcaaactgcccttgtatcagtcgacagaacaaatctgtattgagacctgccgtcaccaatgggatgtcacagcttcctagcataaaccctagtgcctcttctggaaacgaaactaccttctctggcggaggaaggaccggccaccagtaacaaactccagagccggaaccatgttccccaaagcccgacagcactggacatccggatcttgaaagccctctgaaaaaccgacggtttcgggcatccaaatagccaatagttgaaactgaaaagcccattagggcctccctttgccctgaaaacgggccccccacccttctttccggccttggaactggggttggccaaaatttttccccaccttccaaaaggggtttaaggaagaaaaccccaaggccggggggtccccttaagggccccggggccttcccttaaagggagtcctccatttccccccccttttggggcttgggaaattccgtttaaaaatttcaaattggccaaaagggg

SEQ ID NO: 370736 - DNA, 1116 bp, Homo Sapiens
  misc_feature (63)..(63): n is a, c, g, or t
  misc_feature (72)..(72): n is a, c, g, or t
cctgggtggcgaattcggcacgaggcggaagtagcagtccggtcctagggactagcaggtttntgctgattntgggaaaataaagactatggatcaactaggagtattgttcgtattattgggaaaatgcttccactggaaccttgtcgaagacctaattttgagttgatcccgctcttgaactctgtagactctgataattgtggatctatggttccatcttttgctgatattttgtatgtggcaaatgatgaagaagccagttatctcagatttcgaaatagtatatggaaaaatgaagaagagaaagtggaaatttttcatcctttgcgactagttcgggatccactgtcacctgctgtaagacagaaagaaactgtgaaaaatgacctgcctgtaaatgaagctgcaattagaaaaatagctgcccttgaaaatgagctgacttttcttcgctctcagattgcagcaattgtggaaatgcaggaactgaaaaatagtacaaattctagttcctttggcttgagtgacgagcgcattagtttgggtcagctgtcatcatcgcgggctgcccatctgagtgtggacccagatcagcttccaggttcagtgctttctcctcctcctcctccccacttcctcctcagttttcatctctccaggccccgtgtttttcctccccgtaccacccgggatctaaataataatttggggactcagaataatcccagccaactggaaatgagcaaaacagaaaacccggcttgcttattaaggacccatttatagagtcctccattcagaaaagccccgagaaaattaaggattattcccaaacagtgttgggaccggtcttaaagggatattgaaataaggggttaagccttccggggcaattggaaacgggtccaccggggcggggaggacccctttcctttaagaagggaaaaagaaccggaattttccctgttgggggaatccacagtttcctttaaataatccccatgcgccctttaaaaacaaaagatttttgcctttttcaagaaaaagagaggattttccttttgtggggcggggagcgattttgcttcctttggggtaaaattcttccccccc

SEQ ID NO: 370737 - DNA, 1040 bp, Homo Sapiens
  misc_feature (635)..(678): n is a, c, g, or t
agggtgccaattccccaaaggttcaaagccttggaaagttcctttccccttggaagccctcatgggtccccccccagaaagaacaggcctttccctttccacccccattcagaaaatagggaaaccccaaaaaccttcgaacaagaggaaaatggggccccagggacatggccttggcttggggtggcttaggacccagggcaagacgcctgaccccagagcagaccatgctgacactgggcaacacattccctgctctggacctcagttcctttggctactaaggaggcccaacgatcctcgccctgtgtgggacggggctacctgcagacatagagggcctttgagcacctcgtagcttgcttcccagccagcctgggtgtggaaatggccgtgctgacaggctctctgcgatagggcccagccatggccagtgggcctcccacaatctgcccctgggtgcagggccttgagcagggaggccatcgtgctgcctaagagaccaggacccagcaggggccatacccagattcagaggctcaggaccaccacggaactgaaaggaggttcaaggcctcaaacaagagtggcccctaaaacagttggtaaaggagtgttttcacctctgtttacannnnnnnnnnnnnnnnnnnnnnnnnnnnnnnnnnnnnnnnnnnnagtgagcagtggagaacgtgaggctggtcattaggagcaggtagccctgggtctccctctgccctcagcaacttcacacctgcccctccctgggccccagtctcatccctaaacaggagtgaccccacctcatttcatgtcatcatcactgccctgcaagggaaacaacagatgtgcaaggtctgagggtccatgtgtggaagcggaggccagagctgacaccacatgggcaaaggagtgggcgtgtggggctgggagctggggctcatgtgggaggctggtggctgccatggctgcagctcctggccctgcggacagccaggcctggggtctaccctcgtgccgaattcgccacccaggcc

SEQ ID NO: 370738 - DNA, 1046 bp, Homo Sapiens
gagcgggcctgggtggcgaattcggcacgagggcgccacgggggtcgctgtcatggcaacgcacccgctcccgcatggagggcgcgaagccgcattgtgagcgctggccctggagcccgcggccccgcggctgagagcgagcctcggtcccgctgaagctcccctgacttctgcctgctccctctcccgacgggacggaaagggccggggctcgggcatggggtcccctgcggtccgagcctgcccacggcgaagccggtgcagcctggccccgtgacccctctgaatccccgtccggccgtcgccgtgcagttgtcaagtttctgggaagattagtgggagcgcagccgcccgagcccgacggccggagggtcgcggccagtcccccttgccgggtcgccacgtcccacaaggtccttcccggccgctccgtgggaggcggggcgcaggttggagtaacagggacgggcttgagctggtacggaaccgggcaaggtgagagaagtgtcttccacgcgattcccaagcctcgctagggaatcgagggagaagaaaggttgctcagagtgataaagaacatgccgttgcaaacggaagagcaacgtgcccgaatctaggtgacaggaagggcttaggccttttcggcacgaatggagccttccagtcaacatgcttctacgtgatgcagctttatagcgcaaaaaaatgacaatgcaagggggtacaaacagccctgctagaacaacagccccaagccttcgaaggcttacatccgggggcctttcaagcccccaaccacatattgggaagggggggaaaaagtccccagggcggggttgggccaaacccgcctaagacgggggcctctcttcaggcgggttggggaaaaaaaccttccccgaataaggccccaaggagattcgcggcggccctggagggaatccaagggccctgggcaaagggaggcggggaagaaagcggggttgtggggattctgacgcgcgcccggaaagcgttttttcccgttcccccgcggacaacacgcg

SEQ ID NO: 370739 - DNA, 1114 bp, Homo Sapiens
  misc_feature (650)..(650): n is a, c, g, or t
  misc_feature (1051)..(1064): n is a, c, g, or t
ggcctgggtggcgaattcggcacgaggctcaagcagagattctaagcccccatgtcgcagtgtggtgccggggcctcccctgaagccagcgcccagaagaacagacatctctgagctacccaggataccaaagatcaggagagatgacggtggtggcagacgggatgcggccccggcccacgggcagagcattgagatccccagtgcctgcatcagccgactgactggcagggagggcaccgggcagccagggcgaggcacacgggcagagagcgaggccagcagcagggtgccccgggagcccggggtgcacacgggcagctcccggcccccagcccccagctcccatggcagtttggccccactgggaccatcaagagggaaaggggtcgggtcgacctttgagagcttccggatcaatattcctggaaacatggcacattccagccagctctccagccctggcttctgtaacacgttccggcctgtggacgataaggagcagaggaaggagaacccctcacccctcttctccatcaagaagacgaagcagctgcggagcgaggtctacgacccatccgaccccaccggctccgactccagcgcccctggcagcagccccgagaggtctggccccggccctcctgccnctctgagatcacacgaaaccatctccatcaacagcccgaaggcccaaacggtgccagctgtgcgctgcgtcacctcctacacgggggagagcatctttgggacagagcccggaaccccctctcgggaacgtcctccgcccatgtccaaacctcccgggggtgcaaatggcttgcccaagggggccctcctgacccgggaacgaaaaggacccccccgaaaagccaggggccctggcttgccccgggttgccgaagggcccatccccccccaaaaaccccgggggaattagggaagaattgggggggcgtctttggaaccccccttccctttgggcccctggaaggaacccggaccggggtgaccccgtggggggaactggtcccggggaaacccggagaannnnnnnnnnnnnnggcgccggggaaagagtggttggaaggggtttccaaccccccacacgaga

SEQ ID NO: 370740 - DNA, 1043 bp, Homo Sapiens
ggcctgggtggcgaattcggcacgagggatgactcggggcagaagtcgggaaccgggttcagatgaagatgcaggtgctagcacggggctatcggggaggagaagaatggcctgcgggcgccggggtgtgggacaggctgaggaaaaccggcgaaggcccctcctggcctcacaggaccctgcgaccgggcctgaggaggtgatgggcgcgcaggggggcgtcacgcgcttgcagacgacggagatacgcggcggataggggggaagatggaaggcaagctcaccttcttcacagctggctggaagtgaaagtcaccggcctccttcaggtccagccagatcatgggcatgcggggcacggcctccatggcggctggcacccgccggccacccggccactcccgtagctgctgcagctgctggctcagccacgagcccagccccgccccttcgtgccggaagtcactggtcacgggagggaatgaaaaatgccagcggcctgccgggagttgcagtgaacccagccacccgctcgcgtagtcttttgcgcaggcgctgtccctgttgcgcatgctcagtcttcttcgcgcggagggagtagggcggggaggagctcgccagcccgaggcgaaacggcttctgggatagtagtcttcatccactaaactgagaggcgcggagcgagcttattccccgctcccgggccaagcccagctgcgggtcccgcccgccgcgctcctccctcctaggaagagcatgagacctcacctatgaacttgcccctccacgtattgtcaagagccgtggaggactggtgctgtggtaaaaatgacctggcgggcgggccgctggaaagagatgacccgaaaacgggccttaaaaaaggtgccgaaggaaacacctggcctgaaggaatccggggctaaaaccttgggggtttccgtccaagtgctgccaaaggttttcaagctttggaaaaccaatcccttgaccggaaaatgggccctatttagccccaaccttggaagggcccggcactgccc

SEQ ID NO: 370741 - DNA, 1090 bp, Homo Sapiens
ctgcccaattattttcgcaggggggagttccctccctcccgaaaggtcccaggatttaggtttttttaccggcttcggccggggttatattttagaggttcttcatgattaccgccccggttttcggaggggtctggtttgtaccagccggcagtttccccctgggggcccccaagcctttcccggaattccgatgtccagcttcaagcctttttccgggttctcggtggagaagattttgcacccaggctgggggtgcttcgactcgatgggcggcggtgacacgggtttctcaggctcgggcggcttggcagcctcttcctccagctgttgctggttcttcttcagcttagagatctgctgctctaccatggtgatctctcggtccacgcggtccatgttctggatcagctcctccttggacagccgtggcggcaccagctccagctcagggtcagtgtgcggggggctggggggagacaccggttccagcttgcccgtcaggctacggtccttggtgaggtcttcagatcccgcaggctggcccgtggccagcaggggtgacggtcgcagcagggggtcaggcagcagctctagccgagggcgcttgctttcaatgaactccatctctgacttccccagctcgggcaggtatgagtgggactctggccgcaggtggagctcctgggaccgttcattcccgggctggaactcagacagcagggagggcctccgccgctggggctggatgatggagccgggcgacaggtgggaggcatagtcgcgggagtggtgctggtactccaggagcccgacgtccgtgtgcgtccgggcgatctgcactgggtaggaaaggctgtggggcgggtagcggggctcagtggccctccacgtctgtgccacaggctgtgtggatcccgacatggtggtgggggtcggcggggagctgctcccaggccccaataagctttctcttaatcaccaccaaggattaaaagccagtcctcgtcatcagctcacgggccaccccgtacactggcacccgagcacatgaccaacctcgctcacgtcagcccgaccccaacttgaa

SEQ ID NO: 370742 - DNA, 525 bp, Homo Sapiens
tttttatccattcctcagcaggtctgaattattgtggtaaccttcaacatgcagaaacatttgtctgtggcaataggatcctttaggaataggatcctttaggaataggatcctgtggcaataggatcctttaggaatatgtagacacgttgctttagtctgctaccagtcattagccacatatactatatcactccttttctctaatgtgctcttgtaatctcctatctttccttctttaaaatgtttttaaaattttgtaatgcatgggtttgcagtttcaggaattagtgacattcagggatgtggccatagacttctctcggcaggagtgggaatacctgggaccctaatcagagggacttatacagggatgtgatgttggagaactatagaaacctggtattcactggggaggacattccatttctaaaaccagttgtggttggatttactgggagcgaggaaaagagcccgggatgattttgagggaagaaacacagtttcacagagatgggggtcttt

SEQ ID NO: 370743 - DNA, 1190 bp, Homo Sapiens
  misc_feature (748)..(759): n is a, c, g, or t
ggggcgaggcctgggtggcgaattcggcacgaggctgacctgagaagccgctcgagcggcggccgcgggggacgtcgcagcagccaggagctgtcctcgcccggctccgactcggaggacgcgggcggcgcgcgcctggggcgcatgatctcgtccatctcggagacggagctggagctgagcagcgatggcggaagcagcagcagcggccgctcctcgcacctcaccaactccatcgaggaggcctcgtcgcccgcctcggagccggagcccccgcgcgaacccccgcgccgtcccgccttcctgcccgtgggccccgacgacaccaacagcgagtacgagtcggggtcggagtcggagccggacctcagcgaggacgcggactcgccctggctgctcagcaacctggtgagccgcatgatctccgagggctcctcgcccatccgctgccccggccagtgcctgtctcctgcgccgcgcccgcccggggagcccgtgtcgccggccggcggggccgcccaagactcccaggaccccaaggcggccggtgggcccagacggcgacgggctggcggacctgtaaaccctagggcccgctgtccggcgcggggggcaccggcgggaaacgccaacttgcggcgcggtcccaagcgaaggggcctgtcccacgttcagggatgaaagtgcggcgccgcggactccccctcaattggatgcggggggcatccgccccagcggggaggttggnnnnnnnnnnnngcctgcataaaagacgggacgtccgccccggagggccctaatgaccggaggccattgccttccgcgaggacctcgcgaaggccgaagagtgttgcgccctccccgcaagaccccacgtcccgggacgcagaacgccccgccgttgtttcgcccacatctttacgacccgaccccctggggcgcgttgacccgccggcggtgttgttgcccaccccgcgctctcgtgctcctgttatataaagcggggctcttcaagcacaacgcccgttcccgtgcgtaagatggcgcgccccgcgtgtacgagacgcaaaagtcgccctcgcgccgggcggaaggaacggcgagccggatactcgccgggacctcgccttctcgtctgtgagtccgacgcacatctccgccttgcctgttcggatgagattagtccgccc

SEQ ID NO: 370744 - DNA, 1052 bp, Homo Sapiens
  misc_feature (315)..(315): n is a, c, g, or t
  misc_feature (640)..(640): n is a, c, g, or t
  misc_feature (726)..(726): n is a, c, g, or t
  misc_feature (961)..(973): n is a, c, g, or t
atgcgaggcctgggtggcgaattcggcacgaggcttaagacatttgaaagaagaattttgttacgtgatttgtaattggttgtggatgatataaatccccttgaaggattagtccaaaacttctaagaggccaagcttggtttaacttttagatgttgaattgaatgtattgccctaatgagttttagttttaaggaaacaacaaagatataagagttagttggcagttttgtgtgcagtgtatgaaaattccccttcccttgaaatgagtagttgtgtttctatttgacaaatagactgaagggatttccccangatatcttaccttcaagttattgctgcagcagtaccctgtgaagtaccagtgggcagcatcggtccagtagcatttatttcaggagctggagtttcttccgtatatagtgttttatccattttcttgcatttctggttttgtgttttgttgggatgtttgggtatagatgttttgatgtctttcagcaacaaaagatatgaatctttctaacattcatactgttttagagagatccacttgtattatctatgctttgctgaagcatcattgtttcattcttattttacagcatcaaggtaatggtagctttctgtcttgaattangagagtgatattacttgtgagaagggttttggagaatagttttttctttaggctgtcctttatactatctcagttctaaacactanggaaaagttaattcttatctctaataaatatcctacacctagagaaagaaatatttacacatgcccatattcaacttctgtccatccatgaggattgaccactttttagatcaaacacaaacattgtccctaaattattgcctttaattataagcagtaaaaactttgtggataacatctcttttaacttagctaatgaaggaatcccttttgtaatcttcttttggctaaggannnnnnnnnnnnnggcataatattaaataacctttaccagaaagaaagggggagaaatcctcataaacctaaaacccgggaagagggggggc

SEQ ID NO: 370745 - DNA, 1027 bp, Homo Sapiens
  misc_feature (272)..(272): n is a, c, g, or t
  misc_feature (741)..(741): n is a, c, g, or t
  misc_feature (868)..(876): n is a, c, g, or t
aggtagcgaggcctgggtggcgaattcggcacgaggggctcaggcccctgggctccttcagcaagcaggctagtcaatgaggcatgaggatccggcacgggcatcccctggggcttcaagggcaatacccccgtgcttagggtttgccctgtgccctctgggtggggtggcctccccgcactcggcagcatggccaggctggccagggcgtgggcaggtggtgtcctgtggcacctccatcctcctgcccagccggctgtgtcacactcatnctttttaaggtcaggttggttccctggcaaaaatgtacctcccaggggcctcccaagcataggatttggaagacaggaacggcacaggcgtcccaggaaagcagctgcactcagacaatgccttctccattacttgaagcttctttctgttcagccattaaagaaacttgacaaaataggaacaggagatatttctcaattgtaaacctttgtgcagggacagttggcttccagaggctttcagctttcagttatttgagaagtttgttttagatccttaactaatatttatgaattctctcaccctgtgtaagtagcctggtgttcgtttgtccaagtgtacttacccttgagaacaagtcttgcagttgccaggtgtgtgcagacgcctctcctgtgagcggcatcgcgggcccagtcagctgccccggctctcatcctcgtcctcactgccttggctgagcactgntgacgtgaacagccactgcaacaggcagcccatcccactgtcccctctgccctggactccgcatggcctccaaaagcagcttgccctccgggtgctgcaggggcttgccaaggggggaaggctcctnnnnnnnnnctttgggtggctttcgtgacatcaccccgggctctgaagcaaggcttgctcccctcgtcattcctccctcggcaatcttccctcaatcgttcgggggggcaattttttccccaaatggcccggaacctttcctccttggcaccctaaaaaa

SEQ ID NO: 370746 - DNA, 717 bp, Homo Sapiens
tacttttttcttgcgtccacgaggcacagggatagatagacctgaatgattctgcaattcttttgtcttgccattttcagctgggctaatcaagtcccagatgaagcctttaatattttcatccccacggtagtgtagaagacagtacacgagaatggcccgacaaatggtctccacatctcgttcagtcatacgtcgcttgaagcgtccatgagataaaatatctcgccatcgtccccaaccatataccaggagatgcttttccacccgaaagcagtcagtgcgcccataggcatgatgacggtcatgtctgcgggagcgtggccgctcatcatcctcactttccaaatcagagaattccaccaggtcatcatctttcagagtgctaaagtggcgcgtttgttttcgtactctaggtgtgtcaattaccaaattattcttgctgttgagcagatccatgtctaggtcagcctttttggcccacttttgccaaaagttggggtcatccaaagaaatatctgtcctgttttcagaagcaacaaagcttgccttagcaaaggtggaaccttttccttcagattcaatggtgatggttgtagttcgtcttaacaagatctggtcaatgtcctcttcacaaaacttggagccttcatcatcttcctccatgatggctgcatatgctccttttcttacctcgtgccgaattcgccacccagg

SEQ ID NO: 370747 - DNA, 1095 bp, Homo Sapiens
  misc_feature (189)..(189): n is a, c, g, or t
  misc_feature (192)..(192): n is a, c, g, or t
  misc_feature (218)..(218): n is a, c, g, or t
  misc_feature (277)..(277): n is a, c, g, or t
  misc_feature (559)..(559): n is a, c, g, or t
gagcgaggcctgggtggcgaattcggcacgagggccgtctgaggtgttccctggctttgtctcgccgtcgttgccgccccgtccctgccttcgtgccccccgccttggcccctgcccagccgctctccctgtcctcctccccttaaccacccccacggtttctgccgtcggggcccgggggccgggcgngantgatgccgtcggagagcggagctgangcgcagggaccgggcggctgctcaggtggggacggctgcggccacggcggtggcaacgngcagccccggcaggcggcggccccgacccggaggccttatcggccttccccggacggcacctgagtgggctgagctggccacaggtgaagcgactggacgctcttctgagcgagccgattcccattcacgggcgcggcaacttccccaacgctgagcgtgcagccccggcagattcgtgcaggtggtccgcagcaccctggaagagcagggactacatgtgcacagtgtgcggctgcatggttcagctgccagccacgtgctgcaccctgagagtggcctgngctacaaggatctggacctggtgttccgggtggacctgcgcagtgaggcatccttccagctgaccaaagcagtggtgctggcctgcctactaaacttcctgcacgggcggcgtgacccgggaccaaattacgcccctgacactcaaggagggatacctgccaaaacctgggtgaaagggtgccccagacctcggaccggctggaggcctcttcggactggtccaaacgagagcggctcctacccgggagcctcccactttcgttggcctccgatgagaacgcccgtgtttgtactaactcaattaaaggcgggggccaaagggtgggtgggggtacggaggtgtgctggtgtagggcgagggcgtgggtgggcggcccgcgtgtcgtgcgggcgcatacgcgcgcgctggggaggcgggttccccctggacctagcataaaacaggctctctccttcggtgcgacgctccagagccaccccctcctggccaccgggtcgacaacgtcctagaagcgcgggcccgcgctggcaatcc

SEQ ID NO: 370748 - DNA, 1051 bp, Homo Sapiens
aggtagcgaggcctgggtggcgaattcggcacgagggagccaagacccagatgatcatggaggactgggatttcctgcagctgcagtgtgccctctacattaacagtgagctctcgggcattcccctcaacatggcacccaagaagtggaccagaggcttcgtccaacgcctgaagggaaaacagggtcgatttagaggaaatctctcaggaaagagagtggatttttctggcagaacagtcatctcgcccgaccccaacctccggattgatgaggtagctgtgccagttcatgtggccaaaattctaacttttcctgagaaggtaaacaaagcaaacatcaatttcttgaggaaactggttcaaaacggccctgaggttcacccaggagcaaacttcattcagcagagacatacgcagatgaaaaggtttttgaaatacggaaatcgagaaaagatggctcaagagctcaagtatggtgacatcgtagagagacacctcatcgatggagatgtggtgctgttcaatcggcagccctcgctgcacaaattgagcattatggctcatctggccagggtcaagccccaccggaccttcagatttaatgagtgtgtctgtacaccctataatgctgactttgatggtgatgaaatgaaccttcatcttcctcaaacagaagaagctaaagcagaggcccttgttctgatggggactaaagcaaatcttgtaacccccgaggaatggggaaccgctgattgctgctattcaggattttctaacaggtgcctatctcctcactctcaaggacactttctttgatcgagccaaggcttgccaaatcattgcttcaatactggttggcaaggatgagaaaagtaaagttcgcctcccaccggctaacaatcctaaagcctgtcaaccctgtgggacggggaaagcagaatcttcagtggtcatccctcagggcctagcgaatgaacaatcccagtgaagggccaaacctggcgaaacccaaggggcaaagcaagtacctgggggggccaaagggggga

SEQ ID NO: 370749 - DNA, 885 bp, Homo Sapiens
  misc_feature (568)..(568): n is a, c, g, or t
  misc_feature (570)..(570): n is a, c, g, or t
ctaggtagcgaggcctgggtggcgaattcggcacgaggacccgacggttcgcctgcggccgcctccaacaacggtggaaaccgcacacagggaccgcgggccctcggtgcagcaaatcggaaagtgctgcggtcggcggccctgggctctgagcgctcaagcgagcagaggggtggaggggctctccccacccacaggaggctctcggcggggcgcagccaattctgcgcgcccaaggctcccctctgccgtggatcgcgtgtgccgagtgttggcctcttccccgaaagggccagacggaccaagggggccttcccagccggctgcaagctctcagacgctaaaatgggaacaaagcttccagaaaggcagcgcctttgggcggccgcgccccgcccagccgcgggggccattgatacagaggcttgctgcgcttggtgtgcgcggcccggccgcgacatcgcgaaacgcccatgagaaatgagctcatgctggatgcgcgcgctccttgggccaaactgcccagcgcaaaacgggccccgaaagcaggtgaggggaaatgccgtcngncgatatcctgaagcctccgaggaaatgggggggtcagaggagcccgtggtagctttggatcttttggaactagggtgatctataaaagtgcagcttgagaagatttcatacataagaccaagcgtccattgttctaccatagaaccagttcctttggtctgctttagaacagtgaggtatggctacgtcaagataacagagaaagtaagaacagacagttgccatcctgatttgtaatccagtggtgcctgtaatttctacctgcagagtcatctcttttctgttaagatgctgtctccagaaagcacatgttta

SEQ ID NO: 370750 - DNA, 393 bp, Homo Sapiens
ggcctgggtggcgaattcggcacgaggttgctctcctgatttttaaaggggacaaaacagctcagagacatcaaatagatgatcagagagcacacagctaaggaggtaacagctcaaacttctagatccagagctacctcacagcaaaggacagcctcttacaccccaccaccgtctgcagagcccacagcaggcatccaggtgaagctcctcagtttatcaatgaaggaattgcacctgtgaatggaagtggcctgcccaaggctacacggcagtgagtgtaaccagattacctgataccccttccagggcccttggtgtgacttattgagatctcatgggccagtgggtgtcactgaaattcctggataaaagttgcttgtggagggctgt

SEQ ID NO: 370751 - DNA, 2320 bp, Homo Sapiens
  misc_feature (11)..(11): n is a, c, g, or t
  misc_feature (1631)..(1632): n is a, c, g, or t
  misc_feature (1634)..(1636): n is a, c, g, or t
  misc_feature (1638)..(1639): n is a, c, g, or t
  misc_feature (1642)..(1716): n is a, c, g, or t
  misc_feature (2134)..(2134): n is a, c, g, or t
  misc_feature (2140)..(2141): n is a, c, g, or t
  misc_feature (2143)..(2143): n is a, c, g, or t
  misc_feature (2147)..(2147): n is a, c, g, or t
ggagtgatacngaactcctgataggggaacgggacgcgtcaccgcggtggcgggcgcagtaagcttcggtatagtcgatacacttatgcgaagttatggatcaggccaaatcggacgaggtcgaattcgtcgagagcggggttggtgactgcggggcaggccgggggcagggtgtctgtctggctctttgtagacagtccccagtgcgaaaggctgccaggatgtcatcagtgagccccatccagatcgccagatcggctcccgctgctgctcacctcacgagggcgtcctggtgcccggctccaccatgcgcaccagcgtggactcggtccgcaacctgcagctggtgcggagccgcttctgaagggcgacgtcgctgcaaaggcaccatcctgggcgtcatccccaacactgccttgagcccgccagcgacgcgcaggacctgtcgccgcttgcactaagattggctacagctgcactggccgttcaggttgtgggcagtaactggcccaaagccccgactatactctgttgattacaggcctatgccgtttccagattgtaacaggtcttaaaagagaagccatatcccattgctgaagtggagcagttggaccgacttgaggagtttcccaacacctgtaaaatgagggaggagctaggagaactatcagagcagttttacaaatatgcagtacaattggttgaaatgttggatatgtctgtccctgcaggttgctaaattgagacgtcttttagatagtcttccaagggaagctttaccagacatcttgacatcaattatccgaacaagcaacaaagagaaactccagattttagatgctgtgagcctagaggagcggtgcaagatgactataccactgcttgtcagacaaattgaaggcctgaaattgcttcaaaaaaccagaaaacccaagcaagatgatgataagagggttatagcaatacgccctattaggagaattacacatatctcaggtactttagaagatgaagatgaagatgaagataatgatgacattgtcatgctagagaaaaaaatacgaacatctagtatgccagagcaggcccataaagtctgtgtcaaagagataaagagactcaaaaaaatgcctcagtcaatgccagaatatgctctgactagaaattatttggaacttatggtagaacttccttggaacaaaagtacaactgaccgcctggacattagggcagcccggattcttctggataatgaccattacgccatggaaaaattgaagaaaagagtactggaatacttggctgtcagacagctcaaaaataacctgaaggggccccaatcctatgctttgttggccctcctggagttggtaaaacaagtgtgggaagatcagtggccaagactctaggtcgagagttccacaggattgcacttggaggagtatgtgatcagtctgacattcgaggacacaggcgcacctatgttggcagcatgcctggtcgcatcatcaacggcttgaagactgtgggagtgaacaacccaacgttcccattagatgaggtcgacaaactgggaaaaacgccacagggcgcacacaaaaccccacctgtttgaaggcgtcgccccnngnnngnnggnnnnnnnnnnnnnnnnnnnnnnnnnnnnnnnnnnnnnnnnnnnnnnnnnnnnnnnnnnnnnnnnnnnnnnnnnnntgtttttgggttagatatatctccccgcctttccctccctactcacacacccaacctcccccgtccagcaccgactcccacatgccccccgctattgcctcgacccacggcctcagctcccgcgcacgcccgccgccgcctctccagcactccccgcagaagccgcctgtgctcttatagctccctccatgattcccccggttagccctactttttttaccaatccctaccctcaccaccaccctccaccccccatataatgcgccgccacgcacaacgtaagcccccactccgcgatcccacctacgttccggcagatgcgtgacgttccctcccgcagcgatcggcgccctgccccgaggacactaccggccaccacctacgtatcccactattcacctggcgcaaaagaccgggntcacgnnantgtnaccacctgcacggcacgccacacgtgaatcggatacgccggctatcaaccaagcagcccactctttgatcaccgccgtactagagcccgacgcactacgggctaacctaccgcgtggtatgtttctgtgacccacgcatccttctcgcaaccctacgagacctctcctagccc

SEQ ID NO: 370752 - DNA, 1377 bp, Homo Sapiens
  misc_feature (1197)..(1197): n is a, c, g, or t
gctgggtggcgaattcggcacgaggtgaggttggaatgggggggtggggagtgggcggctttgggaccatgctggaagagcgcgtgcagagcctcgaggagcgcctagcaacattggctggggagctaagccatgacagcgcctctccgggcaggtcagctcggccccttgtacagacagagctggctgtgctagagcaacggttggtctcactggagacttcgtgcaccccgagcaccacctcagccatcctggacagcctcgtggcagaggtgaaggcctggcagagccggagcgaggccctcctacgccaggtggccagccacgcagcactgctccagcagctcaatggcactgtggccgaggtccagggacagctggcagaagggacgggcagctcacttcaaggcgagatcactctgctcaaggtcaatctgaactcagtgagcaagtcgctcacaggcctcagtgactctgtcagccagtactctgatgccttcttggctgccaacacgtccctggatgagcgggaacgcaaggtggaagccgaagtccaggccatccaggagcaggtcagcagccaaggctccaggcttcaggctggccacaggcaggtcctgaacctgcgtggggagctggagcaactcaaggctggtgtggccaaagtggccagtgggctgagccgctgccaggacacagcccagaaacttcagcacacagtgggacactttgaccagcgggtggcacaagtggagggtgcgtgcaggaagctgggcctgctggccgcgggcctggacagcttgcccactgagccactgaggcccagagagggcctgtggagccatgtggaccagctgaatcgtacgctggcccagcacacgcaggacattgcccgcctccgggatgacctactggactgccaggcccagctggctgagcaggtgcggccagggcaagccaactagacaggctggccaggacccaacccctagatcccaccaactcggggaacatcaccccagagcccagccttatccagcagcgccttccagccttccctggctagcccaaatggcactaaggaggccactgagggaatcctccacgtggctgtcccagccaccaaaacccatgcacagtgctgcagaaactggacagttccggacagcggtcaaggcaaggatgtcatgcttgaangccaggggtagacttgagagagttcacattccactgtcagcaaaatcagtgtcctggacagcccaagctgccagggcccctgagcatgggctgggcagggggcaagctgcctggtggcaaaacctgggcccttggatcccatgctcccggaatggtaaaagcccccttgaaaaaggaacc

SEQ ID NO: 370753 - DNA, 1044 bp, Homo Sapiens
  misc_feature (777)..(801): n is a, c, g, or t
ggcctgggtggcgaattcggcacgaggatttcattaggaaggataccgagtggtttgggaatgcttcgaattttattttttctactcccaattaatcaggagttgatgatcccatgagcaggaccgcctccatgattggggagcatgcacttgtgactgcagggtaagagtgggaagataggtttgtggagtggcaccgacaggactgtgattgtgtgtgggcctgccccacatttctctgggggatgcttatgtgagagtgggcccagtgaaagagttaccaagccacccacacccctaacactgttctggatgagagatgagagcagaccggcttctccccatcagtgcattgtgcctgttgtacacccctggaggagccctggagccagcccaggtggggtacacaatctttttaaattccatatggttgccagcttatttctttcacttgtttactgtaatatctggcgtgtttttatttatctaattttgtattcagttataaccatggtaggggtagtgaatatactgacaggtgtaatccactggtgctgcacgtggaccttcttttcttttgggacaagataatactgtgagtttccatccttccttccctctaatttgttttccttttttccccagcctcttgcatccccttcttttctaccctgtcctacaactatcatatgcacagtcttctctctttgtgtgtgactgttacaaaatttcacttttcaaaatcgaaatcaggtgtttgctcaaatgaggggagannnnnnnnnnnnnnnnnnnnnnnnnaaatgctgaaaacctccaccaaagtacttttccttttttggtgtttccccccccaaaccccttcaatcttgggaaaacaatggggaagtggaaaattcctgttgccctggggatgactgggttttcctttggaaaatttataattaaaaaccttattgtaaaatggtcctccttccaattttggggcgttgaggggttttgcctttttctccccccctttgggctttttttataaaccccagg

SEQ ID NO: 370754 - DNA, 1856 bp, Homo Sapiens
  misc_feature (1056)..(1056): n is a, c, g, or t
  misc_feature (1103)..(1103): n is a, c, g, or t
  misc_feature (1245)..(1245): n is a, c, g, or t
  misc_feature (1260)..(1260): n is a, c, g, or t
  misc_feature (1382)..(1382): n is a, c, g, or t
  misc_feature (1570)..(1571): n is a, c, g, or t
acaacagaattccgtccccccctcaatcgcccgtcccttcccacgtagcgaggcctgggtggcgaattcggcacgaggcggagccctgcgcgggagaggagagggcctgaggggaggagaaaggaacagcactgagaggggccaggagcccaggaaggggagggaagggcagccgcgggccaggggtgagcctgcgggccacgcgcgacccccggagccttcgcagccctctcagtgtccccactcccagcccaggcgagtccacaggacccgggcccctgctcctccctcgccttctctgtgctccttcttttgctttgtggcctttctttcccttcccagagacacctgggagctgcccccaagctttggggcgccccgcggggccctgccaagggtgcgtgtgagagagggcggcggagccggcgccgggtgccaagggccgagggtgggaccgggagctcttggccctgcgccctgcagccgaggactggaaggggtgtgcgcttccttgataggccgccttccgcagcatcgcggtaaaggagtacctcatgcatcctgggtgctaccgtcccggattccctcctcgccgggatcacgtatcggctcctgtatctacggaactcttgccagctcccagcgcaatgccccgccttatagtcgcccggccaacctgtgttacgcctataggctccgaaggccgagcgggcccgccttgcggtacgcttgcgctgtatacggcgtggccggacgctatgtgtgcatgtataatcccttcagtccccttcacgtgatctgcgccgttacggcagacgtcacgatacaccataagctcttcctgccaagaacaccccccacgcctcactaatgtaccccctaaccgcgtattcgcctccttatagcccgcgctggagcattcttacgaccggatatcccgccatggtccgcacccggtacccttgtccacacggtttgaaccatccgcacgctcgttgcagcggccagcggtggcgatggcgctagtagttagtacttcctcaacaacacaacggnccgcacgtatttttatttcgccttccgagtattggcatgccagaggnttttattataaacctttatctcccatactttggtaactaactttgtccccccgtttctgcctctcccccaattctgacatactaactcgatccaccgggacgcgcaaagagcaaatttcttctataccgcaccttgtcaccnagcgaccggaggatntagttcgctgcaatttcgcgccgcgtataaattgacccctgccgcaccatcgtaggaagtgtttttcgggaccgccggtttaccggccgtccccatgaacgtgcaacgcttttaaacccctnattcgaatgccctccttgtaataggtgaagggaagcctcccgccccttgttcgcgccccggcgaatagttggttcccgatattgtaatccgagaatttggagcaaaaaatattattccatgacaacacttcccacattaacccaactaacaatgctccgcccccgggattttatctattccggtatannacgtggcagttcgtagcttacgattacggcccccctggtctccccaaccttcgcgacccaacctccccccccattcatttctttctttatagtcgccttttttccgcccgccccctgtttcacacctgttatcgctcgatcgcaggttttaatttgaccatattgcggggaattttagactgcccatatgtgtctccgcttacaaccactcacccaggagcacttctacagcagtggttaccagccacccgtgtctcggtccgcggtgctaagtctttgcagcgc

SEQ ID NO: 370755 - DNA, 1105 bp, Homo Sapiens
  misc_feature (379)..(404): n is a, c, g, or t
  misc_feature (564)..(564): n is a, c, g, or t
  misc_feature (984)..(992): n is a, c, g, or t
gtgcgaggcctgggtggcgaattcggcacgagggagaaacttctccctgtcagtgaacagcgtggctgtgctgaggctgatggggaaaggggctggcccccccctggctggcacctcccgaggcaggggcagcacgcggagccgaggccgcggccgtggtgacagctgcttttaccaaagaagcatcgaagaaggcgatggggcctttggacgaagcccccgggaaatccagcgcagccagagctgggatgacagaggcgagaggcggtttgagaagtcagcaaggcgggatggagcacgatgtggctttgaggagggaggggctggcccaaggaaggagcacgcccgctcagacagcgagaactggcgctccctacgnnnnnnnnnnnnnnnnnnnnnnnnnngcagctggaggctcggagcagggccccggcgagacggcgaccgctggcgctccgccagccctgatggtggtccccgctctgctggctggcgggaacatggggaacggcggcgcaagtttgaatttgatttgcgaggggatcgaggagggtgtggtgaagnaagaagggcgggggaggggggaggcagctctcacctgcggcggtgccgagcgcctgaaggctttgaggaggacaaggatggggctcccagagtggtgcctggacgatgaggatgaagaaatgggcacctttgatgcccctggggccttcctgcctctcaagaagggccccaaggagcccattccctgaggaacaggaactggactttcaaagggctggaaggaagggagcagtacccttcccaaagggcctacgggaggaaggggcccgaagctgggggggacaaacaccttcccctcatcgcccccccgcacgacgaaaatttagagtcctccaaactacacattgcccaaccctggctccctacatctgggcgacatcaggccgaacgaggcgcaccgctgcgattaccgcatgaatnnnnnnnnngcctggattcaccaccgctgcggcggacggaccctaattctttgcgagcccacggtaggcgaggcctcctgatgacagctgtcccgacgccccctccgtatgcctattttcca

SEQ ID NO: 370756 - DNA, 1077 bp, Homo Sapiens
  misc_feature (367)..(648): n is a, c, g, or t
  misc_feature (651)..(672): n is a, c, g, or t
ggcctgagtggcgaattcggcacgagggccatgctgtcttctctgattgttccatttgggtatatgtgctgccaaagtgagtactgcagaattatttcttgagagaggcacttacatgtgctgattggcactaaagcagtggaatgggaagaagagacttggaaggcagcccagacgatccaggcgtgtgctagatggcaactgaggagcacggtgctaccatctttactggtgtttccacctatgtgccaggggttctgtgagctacctgagaatactgaagtatataatgctctggcacatagttaggcactaatcagtggtatttatcaaggtgattaaaagcagatttaaaaagcagctcacnnnnnnnnnnnnnnnnnnnnnnnnnnnnnnnnnnnnnnnnnnnnnnnnnnnnnnnnnnnnnnnnnnnnnnnnnnnnnnnnnnnnnnnnnnnnnnnnnnnnnnnnnnnnnnnnnnnnnnnnnnnnnnnnnnnnnnnnnnnnnnnnnnnnnnnnnnnnnnnnnnnnnnnnnnnnnnnnnnnnnnnnnnnnnnnnnnnnnnnnnnnnnnnnnnnnnnnnnnnnnnnnnnnnnnnnnnnnnnnnnnnnnnnnnnnnnnnnnnnnnnnnnnnnnnnnnnnnnnnnnntgnnnnnnnnnnnnnnnnnnnnnngcagctcatactaggggaacttgggaaaagcaacctcatgcttgttgtaggttgaaagcctgggccggctatttctgcaagacagtccaaaaattgtttaacaggggcgggacaggcatattggctattggaaaaatacccttataagggggacctttgcccaaatttggggaaaactttgtttaaggcccccttgggaccggggaaaaaaccagggaaagaaattgggggaacatgcctgattacccccagaaggaaaagggctggtgaagaccctccactttgcacggggaagggcctaagtttacccccgaatgagtgtcttttctcggaaagagtttgagggggggcttcagcttgcgtccctcgcgcgccggaaagcgagaatagtcccttgaaacgtgg

SEQ ID NO: 370757 - DNA, 1028 bp, Homo Sapiens
gcctgggtggcgaattcggcacgagggtggccagtagaggaggaggtgaacaaggaggagggttctagtggcagcagtggcaggaacccccaagccagcctgtttgggaagaaggccaaggctcacaaggcagtcagccagccggcagacaggccgcgggagccactgtgggcctacttctgtgacttccgggacatcacccacgtggtgctgaaagagcactgtgtcagcatccaccggcaggacaacaagtgcctggagctgagcttgccttcccgggctgcggcgctgtccttcgtgtcgctggtggacggctatttccgcctgacggccgactccagccactacctgtgccacgaggtggctcccccacggctggtgatgagcatccgggatgggatccacggacccctgctggagccatttgtgcaggccaagctgcggcccgaggacggcctgtacctcattcactggagcaccagccacccctaccgcctgatcctcacagtggcccagcgtagccaggcaccagacggcatgcagagcttgcggctccgaaagttccccattgagcagcaggacggggccttcgtgctggagggctggggccggtccttccccagcgttcgggaacttggggctgccttgcagggctgcttgctgagggccggggatgactgcttctctctgcgtcgctgttgcctgccccaaccaggagaaacctccaatctcatcatcatgcggggggctcgggccagccccaggaacactcaacctcagccagctcagcttccaccgggttgaccagaaggagatccccccagcctgtccccacttggggccaagggcaccaagaaccaaccttggtattgaaggccccccctccgccaagtggaaagggcaaccgggggaacccctggaaggaggggccaaaaagggaattggaccaagggacacccccctctctgggccctgtggaagggggacccccggtgggggccaggggaagcctcttcacaaaaggggga

SEQ ID NO: 370758 - DNA, 1111 bp, Homo Sapiens
catccatttaactgttagaagaaccaaacccaagaagcggaagaagagtccagaaaagggtcgtgcagcaccgaagagacgaagaaaatcaaggcatttcgagagggatcccggaagtccttgcggatgaagaattctccctctgaagcacagaatttagatgagaatacaactgagggctgggaaaatcggataagactatggactgaccagtatgaagaagctttcactaatcagtacagtgcagatgtacagaacgcgcttgaacaacacctacattctagcaaggaatttgtgggcaaacctactattttagacactattaataagactgaattggcctgtaataacacagttattggttcccaaatgcagttacagctgggaagagtcactcgtgttcaaaagcaccggaagatcctgagggctgcaagagatttggctttggacactcttataatagagtatcgtgggaaagtcatgttacgacagcaatttgaggtcaatgggcatttcttcaaaaaaccatacccctttgtgctcttctactcaaaattcaatggtgtagagatgtgtgtggatgcccgtactttcggtaatgatgctcggttcatcagaagatcatgtacaccaaatgcagaggtgcgacacatgattgcagatgggatgattcacctgtgcatctatgctgtgtctgccatcaccaaggatgctgaggtcaccatagcatttgattatgagtatagtaactgtaattataaagtggactgtgcctgtcacaagggaaaccggaattgtcctatacaaaaaaggaatcctaatgctacagaactgccactcctaccacctcctccaagcctacccaccattggagcagagactagacgtagaaaagcaccgacgaaagagctagaggaggaagcaccaaaatgagggttccgaaggaagattaatggaccaccaatcacagaaaggtcccaaaaaaagtaactggtattccggtgatccttgagggaaagtaaaccattcccggaagaaaaaacccccaagaaacagaaaagaaaggggggtttataaatggcccggggaaaaacccctcgcctctttatac

SEQ ID NO: 370759 - DNA, 1009 bp, Homo Sapiens
  misc_feature (692)..(692): n is a, c, g, or t
  misc_feature (919)..(925): n is a, c, g, or t
  misc_feature (927)..(937): n is a, c, g, or t
ggcctgggtggcgaattcggcacgagggcattctgtgcgggatagcgaagggcagaaactgctcattggggttggacctgaaggaatctcaatttgtaaagatgactttagcccaattaataggatagcttatcctgtggtgcagatggccacccagtcaggaaagaatgtatatttgacggtcaccaaggaatctgggaacagcatcgtgctcttgtttaaaatgatcagcaccagggcggccagcgggctctaccgagcgataacagagacgcacgcattctacaggtgtgacacagtgaccagcgccgtgatgatgcagtatagccgtgacttgaagggccacttggcatctctgtttctgaatgaaaacattaaccttggcaagaaatatgtctttgatattaaaagaacatcaaaggaggtgtatgaccatgccaggagggctctgtacaatgctggcgttgtggacctcgtttcaagaagcaaccagagcccttcacactcgcctctgaagtcctcagaaagcagcatgaactgcagcagctgcgagggcctcagctgccagcagacccgggtgctgcaggagaagctacgcaagctgaaggaagccatgctgtgcatggtgtgctgcgaggaggagatcaactccaccttctgtccctgtggccacactgtgtgctgtgagagantgcgccgcccagctacagtcatgtcccgtctgcaggtcgcgtgtggagcatgtccagcacgtctatctgccaacgcacaccagtcttctcaatctgactgtaatctaatctgttgtgcttttgttggacttggcatgtttccatgaactgcactattataaactattaaaatgatagattgtggagaaaagtattattccaacacccatctgccatgcggatgtttnnnnnnnannnnnnnnnnncctcgaaggattctattttcgggtggcggagaaaagaagtaattgaaaatggcacctgggccataactgggt

SEQ ID NO: 370760 - DNA, 919 bp, Homo Sapiens
  misc_feature (264)..(264): n is a, c, g, or t
  misc_feature (268)..(271): n is a, c, g, or t
  misc_feature (273)..(285): n is a, c, g, or t
  misc_feature (287)..(289): n is a, c, g, or t
  misc_feature (291)..(294): n is a, c, g, or t
  misc_feature (296)..(298): n is a, c, g, or t
  misc_feature (301)..(304): n is a, c, g, or t
  misc_feature (308)..(308): n is a, c, g, or t
  misc_feature (313)..(316): n is a, c, g, or t
  misc_feature (320)..(415): n is a, c, g, or t
  misc_feature (433)..(443): n is a, c, g, or t
  misc_feature (497)..(510): n is a, c, g, or t
  misc_feature (519)..(571): n is a, c, g, or t
  misc_feature (618)..(632): n is a, c, g, or t
  misc_feature (652)..(716): n is a, c, g, or t
  misc_feature (751)..(765): n is a, c, g, or t
  misc_feature (788)..(811): n is a, c, g, or t
  misc_feature (877)..(877): n is a, c, g, or t
tgaaatgaaggcggaggttcatgaccgttaattcttgacttcggtgcatctgcaggcttaacaccacctagaacctgaaagccttggaacttgcaccctctgaagccatggcctgaggtgtaccttggccccttttacctatggcaggagcagctgggatgcagggccccaagttcctaggctgcacacagcagggggttctggacccacaaaaccatttttccttctaagcctcctggcctgcgatgggagggtctgctgtgnaaannnncnnnnnnnnnnnnnannncnnnncnnnccnnnncccnccccnnnncccnnnnnnnnnnnnnnnnnnnnnnnnnnnnnnnnnnnnnnnnnnnnnnnnnnnnnnnnnnnnnnnnnnnnnnnnnnnnnnnnnnnnnnnnnnnnnnnnaatttggacttggggggnnnnnnnnnnnttggggcccccccaataatttaaggaaaatttttaaaaaccccagttctccctnnnnnnnnnnnnnnttttttctnnnnnnnnnnnnnnnnnnnnnnnnnnnnnnnnnnnnnnnnnnnnnnnnnnnnnatagggccccgccggcttttcccccaaaaaaagtttttgtggggccnnnnnnnnnnnnnnnttttttttgtgggggagagnnnnnnnnnnnnnnnnnnnnnnnnnnnnnnnnnnnnnnnnnnnnnnnnnnnnnnnnnnnnnnnnnacaaaccttttgtggggggggaagtcccctttctnnnnnnnnnnnnnnntattactttttttgtttttgcgnnnnnnnnnnnnnnnnnnnnnnnnactaaaataaatataggggcccgcgccgttctcttttaaaaataaataggaggggggcgaaacacnccccccccgcccaaagacagagaaaggccttttattttatat

SEQ ID NO: 370761 - DNA, 1061 bp, Homo Sapiens
ggcctgggtggcgaattcggcacgaggcgggatcgcgctgatgtggccccaaccccgcctccctccccgccccgcgatgtcggaagaaacccgacagagcaaattggccgcagcgaagaaaaagttgagagaatatcagcagaggaatagccctggtgttcctacaggagcgaaaaagaagaagaaaataaaaaatggcagtaaccctgagacaaccacttctggtggttgccactcacctgaggatacacccaaggacaatgctgctactctacaaccatctgatgacaccgtgttacctggcggtgtcccttcccctggtgccagtctcactagcatggcggcatctcagaatcatgatgctgacaatgtccctaatctcatggatgaaaccaagactttctcatcaaccgagagcctgcgacaactctcccaacagctcaatggtcttgtttgtgagtctgcgacatgtgtcaatggggagggccctgcatcgtctgctaacctgaaggatctggagagccggtaccaacagctagcggtagccctggactccagctatgtaacaaacaaacaactcaatatcacgatagagaaattgaaacaacagaaccaagaaattacggatcagttgggaagaagaaaagaaagaatgccaccaaaagcagggagcccctaagggagcagttacaggtttcacaattcagaccatagggatcctcgtatcagagaaagctgagttacagacagccctggctcacactcagcatgctgccaggcagaaagaaggagagtctgaagatctgggcagccgcctgcagtattcccggcggcgtgtgggaaaatttgaagcgggctctctctgctgtctccacgcagcagaagaaggcagacaggtaccaccaggagttaaccaaagaaagagacgccctcaagcctggagttattacagaacaccccaagcaatgagggacctgaagcagaaaaatccgaattgggaagaaaaaaccttgggtccctaatgaactggaaaaagcttggcattgcacctttaacttggg

SEQ ID NO: 370762 - DNA, 814 bp, Homo Sapiens
agcggggtggccgggatcgcgctgatgtggccccaaccccgcctccctccccgccccgcgatgtcggaagaaacccgacagagcaaattggccgcagcgaagaaaaagttgagagaatatcagcagaggaatagccctggtgttcctacaggagcgaaaaagaagaagaaaataacacaaatggcagtaaccctgagacaaccacttctggtggttgccactcacctgaggatattcaggacattctgaaggtgctggtgtccgaccttaaccgttccaatggggtagcgctccccccattggacaagtggaagacacccaaggacaatgctgctactctacaaccatctgatgacaccgtgttacctggcggtgtcccttcccctggtgccagtctcactagcatggcggcatctcagaatcatgatgctgacaatgtccctaatctcatggatgaaaccaagactttctcatcaaccgagagcctgcgacaactctcccaacagctcaatggtcttgtttgtgagtctgcgacatgtgtcaatggggacgggccctgcatcgtctgctaaccctgaaggatctggagagaacaaacagaaccaagaaattacggatcagttggaagaagacacagaagaatgccaccaaagcagggagccctaaagggagcagttacagagtacacattcagaccatagggatcctcgtatcagaagaagctgagttaacgacagcctggttcacctcagcatgctgccagcacacagagagagtctgaatcgtgcagaccgctcggttcccggggtgtgga

SEQ ID NO: 370763 - DNA, 1325 bp, Homo Sapiens
  misc_feature (778)..(786): n is a, c, g, or t
cccgctcttgaggaaaagtattttttcctccctttacggatcgaaaggggccacccctcattgtagtggggggggtatagagggagtttgtctgtttgctattgagatgtgggtttgtgccctcactgtattttggggctagaatatgaagtgggtcttttgtaaagaggaggttgtttagtgggccaagggaatttttctggtagggcgggtcacacgttttcttgttgggcgacaattccaaaagccttgtctttggggacaagtccccaggggcctttttctattttctgggtttttgggagaggggaggagccctgtcaagtgagagttttttaaccctgggaggggtaaggtgttcagctatagaaaacttggtgggttgttcctggggccaggaaggccacaggttggggtccttttcaacaatttcttttttttgggttaggctggcccggaattaaatttttggtggaactttattcttcgttttagggcagggtacattagaggtccccattgatgttctcaagccaagatttgtggtaagttaggcctgggttcatcttcatcttcggtcttacaggagacccgggttcatttctggttccgggaacatgagtgtatccttgtcatattgtcatacacttcacatatctaattatattcttaccattcagttgatttattttacattttctagtaggtatttcataattttcctccagaggagcctattcttacaatgtaactcaattaaaatcaagtacatgtagannnnnnnnncatctgcaaagatcctgcgtaccaaaataaaccatatggtgccactgggcatcttgtgcaaacacaagactctgtgtagatcactgtgttccctgagtcttggaaaatgtatggttaaacctatggaatgattcatcaactgtgtttacttcagcctataacatggcgagcggagagttggtttgtaagacaaaggttctcactttcttcatttctaatatcagtcttcaaaattaaacattgacctactaagtatagtacactgactgcctccatgtacatggcagtgggggcttgttcctcaggccaattaacattttggacaaataatcctttagggagtcagcaatcatgtctgccactttcactggttaaaagtcgggtgagtgaaagcatgaggtatgtttttctcacagagtcgaatgtctccttctggaaaatccttcattaatgtcttcatagtactgcattttggacaactcaaggatctatagtaccataataaatgtaagctgaacgcaggcaaaaaggggatcctc

SEQ ID NO: 370764 - DNA, 1072 bp, Homo Sapiens
  misc_feature (174)..(174): n is a, c, g, or t
  misc_feature (351)..(362): n is a, c, g, or t
  misc_feature (962)..(1024): n is a, c, g, or t
ggcctgggtggcgaattcggcacgaggcagaattccagataaatggaagaatgtaaacatataactgtaaaacacgggagaatcttggtgtgagaaagccatgaaagtagaagtaaactatataaaaataaaatctctgtaacaaaaccaaagtcaaaagataagtgacaaacntgaaaaaatacatgtaatgtcctagacaaagaacaaatcccttaataactgcatataaagatctgcaaatcaccaggagaccagtcacccaatagaaaaagagaaatagataggaagagtttccagaaaggatatgtaaatgattcttgaacgtatgaagaactgaacctcataagnnnnnnnnnnnntggagtttcagctagattaggaaaaataaaaaaccgtggtaatctactgtgtgtgtgtgtatacacgtatgtgtagctttcccatgcagttgctatcaaaatttaaattggcattattttccacctggtagttccgctagtggtaattcatcctacagctatactcatgtggttgaaatgactaaagtgcaaggatattcattttagcattatttgtaaaagaaaaatatgaaaatattattattagggaaattgttgaataaattatgctacctccatgcagctgttaaaaggatgagctagcttttcatatactgatatggaatattttaaaataaatattccgtggaaaaatatgtagaagagtaaacacctgtgtttttttaaaagcatatgcatatacatatgtacaccccatatgtgggttgtgttgtaaaaggggatacccaaggaaattggataacatttgattttttccaagggaaaaggaactggggatggtagggggctccaaatttggtacctgaaatttgcttttggcttttatgcccttttcaaaaatttggggcccttggggaatgggatttaccctaagtaagnnnnnnnnnnnnnnnnnnnnnnnnnnnnnnnnnnnnnnnnnnnnnnnnnnnnnnnnnnnnnnnaaaactttcccgaaaagaagggaaataaaccccgaaaaggggaattgg

SEQ ID NO: 370765 - DNA, 1430 bp, Homo Sapiens
  misc_feature (182)..(182): n is a, c, g, or t
  misc_feature (186)..(186): n is a, c, g, or t
  misc_feature (189)..(189): n is a, c, g, or t
  misc_feature (197)..(197): n is a, c, g, or t
  misc_feature (302)..(302): n is a, c, g, or t
  misc_feature (502)..(502): n is a, c, g, or t
  misc_feature (521)..(521): n is a, c, g, or t
  misc_feature (544)..(544): n is a, c, g, or t
  misc_feature (634)..(634): n is a, c, g, or t
aaaagggggttgggaaaaaatttaaaaacccaattcccctttataaatttttgtgaacctgcccgggttttttaaaaccccgtttaccttggggaatttaggggggggaattgccccccaaaccaccccattgggggttcctaaaactgccccccggggggcttcattttaccaccaatttntttnttnttcccttntccctcccccatttggaggagatccccctccttggggcaaagaggcaaattctggaataaaatggaggcaggattgggttttatctaataattggtcctccttcngaaatgcctgtgtgccttctccacatggtggataatcagagcagcagcatcttccagtatttgtttgtcttcatacgcaagtgagaggtgtggcccaacaggtacaccagcattctcctccgtagcctgctcttgcctctcatcatagatactctcaatctcattgagtaagctcttagacctcaggaccttggtgtcanttctgtttaaaagttgatncccctggtggtccagagacttcnaagtagtatttctcattttgttctcgccatactttgttaaagccctctctgagcttctcgccattcttcctctttcatcttcaacccttntaagaacaattggaacagcaatggagggattctttctcagaccatcaatgatgtcagctgctttatcagcatatatcctctggagtgcttttctatggatgacttctgatgtgcccccaagggtgttgtccaagcgaaatttggcttgttcttcagcagacaagcgggaaagcttcttctgtattgcttccagaacccggattgttgccagattggtctctaaaactacatcaagctcaaagcgttcatcttcacaacgataaatatgttcttcatattgagtcttcttggaactcacaaaggtagagtcctcagaccacgaagggaaggaaacccaggtatcatttaaaacctctttacagagaggagtccgtcctgtacacttgggctgctggtaactctttggtaaggctcgatagctggagcccaatcgtttacaagaagcataatctatctccatagcaatgccctctgtggctcgctcctttggataagtttccagatgtacagactccttatagcccagaaagtttttaaaccaattaaacaactcagggaatttccccaggaaaggagagactagttgcacaagctcagcacgagagatcacctcctggttaaaaataacaagacagcgtaggaaattttcgtaggcttctgcactccgaagagcctttcggaccttatcaaaaaataacgattctgttccaccaccatgtttgctggcatctgccatagaagaatccttcagattgagccctcgtgccgaattcgccacccagccctcggagcgaaa

SEQ ID NO: 370766 - DNA, 1360 bp, Homo Sapiens
agcgagagaagcctggttgctgggaacagctcaaggggtcaccatgctcttcatagtcacggccttctctgctgtggactgtgcaatggggtattgatagaagagactgaaatagtcatgccaacccctaagcctgagctgtgggcagagaccaactttcctctggccccgtggaagaacttaaccctctggtgcaaagcccttctggctcaactaaggagtttgtgttgctgaaggatgggaccgggtggatcgccactcgcccggctcagagcaggtccgggctgccttcccccttggcgccctgacccagagccacaccgggagctaccactgccattcatgggaggagatggctgtatcggagcccagtgaggcacttgagctggtggggacagacatcctccccaaacctgtcatttctgcttcccccacaatccggggccaggaactacaactccggtgcaaaggatggctggcaggcatggggtttgctctgtataaggagggagagcaagaacctgtccagcaacttggtgctgttggaagagaagccttctttacaatccagagaatggcacgataaagaagaaggcaattacagctgccgcactcacactgaaaaacgccccttcaagtggtctgagcccagtgagccgctggagcttgtcataaaagaaatgtaccctaagcccttcttcaagacatgggccagccctgtggtcacccctggtgcccgagtgactttcaattgctccaccccccaccagcatatgagctttattctttacaaagatggaagtgaaatagcatccagtgacaggtcctgggcaagtccgggggccagtgcagctcactttctaatcatttcggtgggcattggtgatggagggaattacagctgccgatattatgacttttctatctggtctgagcccagcaaccctgtggagctcgtggtgacagaattctaccccaaacccactctcctggcacagccaggtcctgtgggtgtttcctgggaagagtgtgatcctgcgctgccaagggactttccagggcatggagttcgccctcttgcaggagtgagcccatgttcccttacagtttcggaatgtctcagggaactcagctgacttccttcctcacactggtggagcagaggactctgggaactatagctggatctactatgagacaaccatgtcaaaacgggggtcctatctcagtatgcccccttatgaatctgggtgaactgaacatttcccctaacccatggttgttttgctgaaccccagttcggtgggttcccctgggggccaaatggttactccccctgggggccccaggcccgggcccc

SEQ ID NO: 370767 - DNA, 969 bp, Homo Sapiens
  misc_feature (48)..(48): n is a, c, g, or t
  misc_feature (789)..(789): n is a, c, g, or t
  misc_feature (889)..(889): n is a, c, g, or t
gaagcgaggccctgggtgggcgaaattcggcacgaagggtgacatatntgctggacctagcaaccaggtgatgtgtctctcttgcctgaaccctgcccacagggagcattgtaacatatctctgggctcagcagccaagggatgttactatccttcccggtccctgtcctcaagtaatattgtacaaatctttggcccagcacctgggtgatgtgactcccctgcttattacctacctgcacgtggatttgttacacataatgttgttccagctcataggtgtgatgatgactctcatatattgaaccagccaatagttgatacagtctctcatagctaggcttagaaaaatggataagattctgggtcttctgtttttataaaggtcagaaaggagtatcacactctcacatatggtataaagtcttcaggttgtacacagtgtgtcattgcagagcccagtgcacaggtgagatttacttgtgtgtatgcacaccctactatccattaaaattgtaattctcacagacggacagaccctacttgtaatctcacatatggatgcagtccacatttggaattgtcatatgtgaacatccagccagatatgggatagtaaaacatttttaaatgcagctcatagaaaagtgaaggctctcctatctagacacagaaaattaggggagatgttgactcttatacctggggttaagaaacacagatatgattataggttcataccagccacaaatgtcttagaatagattgtgactctcatgcaaaacatanagccctagcatagtacagagagtgtcctaacagggccaagcacacagggtgagattacgacacttgtatgcacacacttttcacagtaaagattgtcctngcaccacataaaacaccccgcttgttgagttctgaacctcacacacaagccagctgaaatttggaaattggatcatgtgg

SEQ ID NO: 370768 - DNA, 1089 bp, Homo Sapiens
cctgggtggcgaattcggcacgaggagaagccaacagcaaaactggaaaagcccggcaggcccaggagagggcgctgacctgtggtcgtcatttatttggttgggttttattaccttttattgtctgttcttcttttcttctttcatttcagtggcatttggaagcaaagagtgctaggcacctgctgttctttcaggaaacagcttggctgtggtaatgctctactgggcccttcagaatgaagacagtctgccttagagcctgctattcttttagacatagggaggatgcattatcctgtattctcctccaacatcaccactagcgtaaaagcaaaaagcttttacaaaacacagccaaaaattctcaagatgcaggttcttggggaatgggatggggacagcatttgatttacactgattatgttactccccaaaaggtgacttaattaataaagggcatttgggcagacacactgtgttggaccaacaaagtaggctctttacaggggtgttctcaccaggtagaaatgcgatttgctcactgaggatgttggggaagggacgaagggtaaagaagaaactgcacgtatacacaggttcacatcactctgcagacagcaatgtgactcagcgtgtgacttgtagcagcagtacgagggctacactcctctgctgaggatgtctacattgaaagcctccactagtttcatcgtttgtcaaagttccgtaggatcagtgatggtcattcaccatgactgggtctgggagaaagtgaaagacaaaaatggaaagatcctggcctgtggtagtggtaacagttttctcaaataatggggggacaatcactaaatcctcacatgctgaagaaaaaccctctactctctctggccccttttactttttaatccgggaatggcattactggtaaacttgatcctttcccctgaaaaaacccagtttctattgcctttcccatttctaaaagggtgggacaaaggcttggatttgaaacccccttcctttttcttcccccttggggctacatttaaaattccagtttgaaaagaaaaagggcttttcaataaa

SEQ ID NO: 370769 - DNA, 1603 bp, Homo Sapiens
  misc_feature (192)..(251): n is a, c, g, or t
  misc_feature (453)..(480): n is a, c, g, or t
  misc_feature (1549)..(1549): n is a, c, g, or t
  misc_feature (1566)..(1566): n is a, c, g, or t
gggcgaggcctgggtggcgaattcggcacgaggggagcgcagtcggagcgcggcggcagcggcagaggcgccgcggcggggaccagcccagagagaccccccgagcccgcggcacaggcggcggcggcgctgagcgggctcgaccagccgagcgagcggcggccccggctcctcctcgtccggcgccagcannnnnnnnnnnnnnnnnnnnnnnnnnnnnnnnnnnnnnnnnnnnnnnnnnnnnnnnnnnntcgtgagggacgcgccgagccgggcggccgagagcggcggcggctgggagcgcgtcgggcccgggcggaaagtgcctgcggggggcgggcgagcgcgcggtgccggccgccccggggctcggcgcgggagccggcgcggagcgggacgccgggtcccgagcggcccgcggccggggctcgcccccgcccctccctcctctcnnnnnnnnnnnnnnnnnnnnnnnnnnnnagtgagctgcggagcctggaatatggtcggggaaatggaaacgaaggagaagccgaagcccaccccagattacctgatgcagctgatgaacgacaagaagctcatgagcagcctgcccaacttctgcgggatcttcaaccacctcgagcggctgctggacgaagaaattagcagagtacggaaagacatgtacaatgacacattaaatggcagtacagagaaaaggagtgcagaattgcctgatgctgtgggacctattgttcagttacaagagaaactttatgtgcctgtaaaagaatacccagattttaattttgttgggagaatccttggacctagaggacttacagccaaacaacttgaagcagaaaccggatgtaaaatcatggtccgaggcaaaggctcaatgagggataaaaaaaaggaggagcaaaatagaggcaagcccaattgggagcatctaaatgaagatttacatgtactaatcactgtggaagatgctcagaacagagcagaaatcaaattgaagagagcagttgaagaagtgaagaaattattggtacctgcagcagaaggagaagacagcctgaagaagatgcagctgatggagcttgcagattctgaatggcacctacagagatgccaacattaaatcaccagcccttgccttttctcttgcagcaacagcccaggctgctccaaggatcattactgggcctgcgccggttctcccaccagctgccctgcgtactcctacgccagctggccctaccataatgcctttgatcagacaaatacagaccgctgtcatgccaaacggaactcctcacccaactgctgcaatagttcctccagggcccgaagctggtttaatctatacaccctatgagtacccctacacattgggcaccagctacatcaatccttgagtatcctattgaacctagtgggtgtattagggtgcggtggctattaaagtttcgaagggcacgatatggcgtgttccattcctttaccaaagggtttgttgaaccgcaggaccgaggccggccaacgggaaacttaaacnttggaacttttggaacnttggaaattttttaacccatggatgggactgggaaca

SEQ ID NO: 370770 - DNA, 1193 bp, Homo Sapiens
  misc_feature (567)..(591): n is a, c, g, or t
  misc_feature (777)..(790): n is a, c, g, or t
  misc_feature (1071)..(1071): n is a, c, g, or t
gtgcgaggcctgggtggcgattcggacgagggaggaggctgaggagggcctcacaactgtgtgtaggatgggagggcagcctggggccccagtctagggacgcaccatatacaggggctgcacttggtgcagaggcggagagggggctggggcaggccccttgggcatggccaggtgagctcagggggtgcctgagggccagggctagatacagaggccctgggtaccaggtggcctgggtgtgtcaggaggtgtggaccagtgggggctgtgactaactcggctggagcaagtgacaggaggagctggggcttcatggggcacccccaggatcctgggctggtgaccccatcactgccaccagccagggtgacttttcctgctgggacccacagcccagactgcaggggaggctggccctaagtaggaaccccaccctgaaaccaggctggcggggaaggggtgcgacggcctccacctgggaggggtcctcagccgagagtccagcggggaccgctgtagacgctgaagcgaggctcaggcctccacatcagtctgtccctggannnnnnnnnnnnnnnnnnnnnnnnnagctcctaggtcgggttgtgccgggagcgttcagcctttgcctcgggtgagtctggccttgaccctgggtccggagtcctgcaggaggctgctcccgggcaaggttcagcatggattggcaactgggcccgggaggggccctagccctgcccactaaccggcgggaacgggccggagtctaccttnnnnnnnnnnnnnnaaaatgcctcgtaaatcccccccttaccccgggttaaggatggaagttaggggaataggtgccgtgcgtattcaaatacggaaggggggcctgacatccaagcgggaagattccctgccccgtggcaccacgcagctctcgggtcgcaccacaaagagaaggcttcccctgctcgggccagcaatatggcttagagccgagctctccaaggaccatcttttctccccgcggtggcggacagtaacgagagtgttaaactagaatcggggaacacgtggggncaccacggcgtgggttccctcgtaaacaccaaattttagcggctttgtaaaaatagggcgagaaatataccgcccgcggccgtcccctctctagatggcgcgcgccggtattaaaattatct

SEQ ID NO: 370771 - DNA, 1346 bp, Homo Sapiens
  misc_feature (1264)..(1264): n is a, c, g, or t
  misc_feature (1298)..(1298): n is a, c, g, or t
  misc_feature (1311)..(1311): n is a, c, g, or t
  misc_feature (1332)..(1332): n is a, c, g, or t
gcctgggtggcgaattcggcacgaggagtgagcactgccgttgccatctggctgtaattttctatgttatcaaggtaggagggagtgtttctcttctagctgttagatagaactgataaaagcaagtgtcctacagcatttcccaaatgaaggcattaggaaatagaaaagcacggtctttttggctccctggtctagtcacattggtactagggtgacctttcacccaagggacagctgctaaagggagtaattcagagacatggagcttctggttatgggtttgttttgggtttgtttttaactcctgcctccacacatgttcttgactgataactgactcatgtccctgaattaaaatgactgacctatgacagcatcaagcattctttgtaagcagagtgatatatctgagagggcgttgacctgttgtgtagaatacatatcctttcccccttcagaatcctgtctcgcctcgtaactgggagagaggctgtgcctgaaactaggggcgatgtcaaggaagctagaggcctcgatgcaattattactgactctggggaggaagacagagaataaggggacaccaactgcccagtccactggccatttttaagggtccccccaccccaagccaaagtttggtttgttgctgttaagacaatttttgttgtatgtatataaatattttagttagaggagcggggaatgggatgcgggctttcacagttctagggaatgggggcagggaggattttgcttttgcttttgctttgagggagaactttagctgactaaaaaaacagaagtttggggtcatgatcacaaaggggccattcccaaaagatggcaagccacgtattcagtggagactaggccaaattctaaatggttttatccatagcaggggagaataggagaatgagtttaagagtttttctcttcttttttcctagaaagaggtaaggataatgggaaaggtagagaaggcggctcccacagaccttttaagagaggcagaatcttgagcttgaggcaccttgagtgcatctcagttcagctggttctggctgaggcctccaaaggcaagctctgtgctttccagtggtttctggctggcatttccaggggatggtgtttaacaccgctttcctccagctccctttctaaggaaaggattaaatgggagttctgctttttatggaaagggtctttggtttttcagtgtcaacactgaggatttggggctcttgcaggctctggntttcaccgtattcaacctccccgtcaccttttgnactttgagattcntacggtcacttcaccggggcnggttgttcgaggag

SEQ ID NO: 370772 - DNA, 1181 bp, Homo Sapiens
  misc_feature (486)..(486): n is a, c, g, or t
  misc_feature (488)..(545): n is a, c, g, or t
  misc_feature (1054)..(1054): n is a, c, g, or t
acgcgaggcctgggtggcgaattcggcacgaggctcgggcgggctgcggcgacggcccgagcgcttctccttcgccgaggttgcgcgccccctcctcgccgtgccccgggcccgcgcgggatcgtgcgtcgtcccgccgcgtccctgaagggaaggaagcgaggcggcggcggcggcgcccgggagccggagccttcgcggcgtccacgtccctcccccgctgcaccccgccccggcgcgagaggagagcgcgagagccccagccgcgggcgggcgggcggcgaagatggcagaggcaccggcttccccggccccgctctctccgctcggaagtggagctggacccggagttcgagccccagagccgtccgcgatcctgtacgtggcccctgcaaaggccggagctccaagcgagccctgccaagccctcgggggagacggccgccgactccgtgatccccgaggaggaggacgatgaacacgacnannnnnnnnnnnnnnnnnnnnnnnnnnnnnnnnnnnnnnnnnnnnnnnnnnnnnnnnnnacgctgggctccgggctgctccttgaggactcggccccgggtgctggcacccggagggcaagaccccgggtctgggccagccccccgcgcggggcgggctgagcggggggtacacaggcgcttgctgcaacctcagcaaccgctggcaaccgccggaaccgggggtgggctggggggctcccgggcagcccaaggaaatggttcctccccggccgaaacctcgtggaggaaacccgggcctaagccggaacttggactcccggggcccaatccaggagcttccccgggaagaacggggccccctctgggccccgaaatcctaggaaagggaatggcgtccatatcgagtggccccatcatttagagacagtaaggggcgggtacgcgcaaaatcctcttgtccccaatggggataaaaaccttctcttgcgctgagtagggtgggtttaaatggcattagagcggagctcccggttatggatgtacgaagtaggtagcgacagattggngctgcacagtagcctagagatggattcgcgtccgggcgcacctcgtgcaggcgtgtgatagaagctgtgctacgacagcggtccggcggctggcggctcccgcgcgtcctagtggagcgcgtcgccg

SEQ ID NO: 370773 - DNA, 1141 bp, Homo Sapiens
cctgggtggcgaattccgcacgaggttcatgctcagcttcctccgagaccccttacgagagatcgaggagccatacttcttcctggatgagtttgtcaccttcctgttctccaaagagaacagtgtgtggaactcgcagctggatgcagtatgcccggacaccatgaacaacccttctttcccactactggatctcctcctcgcacaacacggacctgaccggggaccagttctccagtgagtcctccttggaagcctatgctcgctgcctgcggatgggctgtcgctgcattgagttggactgctgggacggcccggatgggatgccagttatttaccatgggcacacccttaccaccaagatcaagttctcagatgtcctgcacaccatcaaggagcatgcctttgtggcctcagagtacccagtcatcctgtccattgaggaccactgcagcattgcccagcagagaaacatggcccaatacttcaagaaggtgctgggggacacactcctcaccaagcccgtggagatctctgccgacgggctcccctcacccaaccagcttaagaggaagatcctcatcaagcacaagaagctggctgagggcagtgcctaccaggaggtgcctacatccatgatgtactctgagaacgacatcagcaactctatcaagaatgggattcctctacctgggaggacccctgtgaaaccaccaataggtatccccactaccttttgttctggaccagcagccaagatcctacttacttctgaggaaaacagccagtgaccaagggcaacccaggatgaaggagggagccccaagggagggccagcagccagcaccagaagctgccattccaatggagaaagtgggttcccatggggaaaactaagggggcagggccgtggaacgggccggtcccgttccctggagcgcccggacttaactgaagtactggccttcggagaacgcggaagcccctggagggggttcctttcccctccggccgagagacagtgggcacccttctcgggggggcgaacaaacccccttttcttttattggggcgagaaaaggggaaagaatctcaaccacgtggcctgtatctccccttccccggggaaaaaaattcctgg

SEQ ID NO: 370774 - DNA, 1136 bp, Homo Sapiens
ggcctgggtggcgattcgagacgagggaagaccagtgtttccttgaacactgacaatttgatgaggatttttacaatgggcatagaccttacaaaaccatttgaatacctttttgctactgggaatctgcgttctaaaacaggtcttggcctcctacaagattctggactttgtgttgtggctgacaagctgaacttcatacgctacctctcccatttccgctgcgtgcacagaggggctgattttgccaagatgaggaccaccacagtacgcaggctgctgccagagtcctggggcttcctttgtcccgtgcataccccagacggggagccctgtggcctgatgaaccacctaactgccgtatgtgaggttgtcacacagtttgtgtatacggcatctattccagctttactgtgcaacttgggggtcactcccattgatggagctccccaccgatcatacagtgagtgctaccctgtcctgctggacggtgtcatggttggctgggtggataaggatcttgctccaggcatcgcagattctcttcgtcattttaaggtgttgagagagaaaagaattcctccctggatggaagtggtccttatacccatgacaggaaaaccaagtctgtacccaggattgttcctttttaccactccttgtagactggtacggcctgtgcagaacttagcattgggcaaagaagagctaattggaactatggaacagatcttcatgaatgtcgctatctttgaggatgaagtttttgctggagttaccacacaccaggaactctttccacacagcctgctgagtgtgattgccaacttcatccctttctctgatcacaaccagagtccacggaacatgtaccaatgccagatgggtaagcaaactatgggctttccacttctcacttatcaagaccgatcggataacaaactgtatcgtcttcagactcctcagagtcccttggtgagaccctccatgtatgattattatgacatggataactatccaattgggaccaatgccatcgttgctgtgatttcttacactggctatgatatggaagatgccatgattgtgaataagggcctcttgggaacgaggctttgcccatggaagtgtctaca

SEQ ID NO: 370775 - DNA, 992 bp, Homo Sapiens
  misc_feature (119)..(147): n is a, c, g, or t
atagtggcgtgcgcctgaggccatccgcgtgggtgtaggcggaacgtagcgcctgtgacggggaaacgcgaaagagggaggtcggaagggggggagatggcgtgggaggtaccccggannnnnnnnnnnnnnnnnnnnnnnnnnnnnccggtggtcgagtccgaaggcccggggcgaggccggtaatcctacccgacgaggcggggtgggataaggctagtgcgcgggcggggcccaatagttggaggggaccatccagcccggcactgacatgctaggggcggccagaggcactaggactttcccaggcagcagctgggctgagccacccgggggcggggcctgcacgggagaaactgactgggctttggggggtggggcggagggtacagactgcaggatggggatgccaggagtgggtgcagtggcagccaggactttgccgttggtggaagtgcccggtgggagggtgaaacggatgctggtggtgggtgcagggccgctgggagccgctgccttggtcccaggggctggtgctggggcaggtgccacctgaagctgctggggcagcgtgggcaggatgtactgtacctgggtgattcccccagccttgcccagggcacctggttgcaggatgcccaggggtactggcccattggggccactcccagcacctgctcctgagcccgcaatggtcccaccaccaggggccccctgggcaatgaactggacagcagggggcgcaggggccccataccccggggtgcccaccagtaggttagtgacagtggcaggcgccttccccacagtgcccagcaggggtccagccaccaagtgtggggctggtgaggtggctgctgccgacttcttgtccgaatacactaagctgacacccagcggggagcccccaggcacccgagacccagtgcccatttcagtcctggcacctgctgtgtcatttggagcctcgtgccgaattcgccacccaggcc

SEQ ID NO: 370776 - DNA, 1225 bp, Homo Sapiens
  misc_feature (95)..(95): n is a, c, g, or t
  misc_feature (353)..(353): n is a, c, g, or t
  misc_feature (366)..(366): n is a, c, g, or t
  misc_feature (1020)..(1028): n is a, c, g, or t
atagctccccctccaggtaaattacgggatgggtttaaaaagattaatcccccctgggtccattaaaaaagaaaagaaattcacgcccaggccancattaggggcccatgggaggggttctgcccagcaagccttgccctcaatggggtgctcttcctaaggagtcaaaagtccctggttcctgactctagggtggtctcaaaatgtcaggtctacagccttcccaggaaaggtggccaactgagatgatgttccagcacaggcctgtaatccaaaaccggctggggtagctacctacgtatgtgctggaagcatctaagttactaaattgggaagaagcgaggtggggaggngagagaggaaagngaataaaagttggctccttggaaggtgctgaagacaaggatctgtgtcccagtgctagctgcacctggggtcagtctcgagcacaatgctatcaaggtgaagaggtcatggccggggagcccagggcaggggcaacacacgcggtcgtgttgactaggtgaacgccactgaaaactgctatccagtcaccagcactcctctagaactgccctggtttcctcttgcccttttcaactgtcctttaaaaaagtgttttaatatacaaatgccattcatacaacaggattttaaaactaagaaaactagcttgtggcttcaaggaaggacactaatgttacatacgcccaaagcacctatgtagcactctaaggtgggaatggcaccatttcctaacctcttaggtatgatcaaatttattttcagtgatgccacaggtgggtttgcctacaatcccacacatcctcctctggtggtctagtcaataaagaaaaagggccaaggaagtatcctttggaaaaacacaaaactcaaacttcatgctcctagaagtagccttcaggtctgagcaatgagggttctaagacaccatccaaatgcagccaaacgtgtcatttcatcacagttcaaagttcataacctgccaaagtataggcnnnnnnnnncccccgttcacctggagtaagacacgacttccatagatcactggatcaccagaatcaggctgtgcctgaagctagttcccaagcacccagagggctgtgtgccacaggaagccctcataggatcgtgcagcaggtggatcatgcaggccctcggaaactgccctcgtgccgaattcgccacccaggcctcgctcctt

SEQ ID NO: 370777 - DNA, 951 bp, Homo Sapiens
  misc_feature (852)..(852): n is a, c, g, or t
ggcctgggtggcgaattcggcacgagggttcgctggcaacagagacatccagatgatcagctgtggggctgacaagagcatctactttcgcagtgcccagcagggttcggatggactacactttgtccgtacccaccacgtagcagagaaaaccaccttgtatgacatggacattgacatcacccagaagtacgtggccgtggcctgccaggaccgcaatgtgagagtctacaacactgtgaacgggaagcagaagaagtgctacaagggctcccagggtgacgaagggtccttgctgaaggtccatgtggacccctcaggcaccttcctggccaccagctgctctgacaaaagcatctcagtgattgacttttactcgggcgagtgcattgccaagatgtttggccattcagaaattattaccagcatgaagttcacctatgactgtcatcacttgatcacagtatctggagacagctgcgtgttcatctggcacctgggcccggagatcaccaactgcatgaagcagcacttgctggagattgaccaccggcagcagcagcagcacacaaatgacaagaagcggagtggccaccccaggcaggatacgtatgtgtccacacctagtgagattcactccctgagccctggagagcaaacagaggatgatctggaggaagagtgtgagccagaagagatgctgaagacaccatccaaagatagcttggatccagatcctcgttgcctgctaaccaacggcaagctgccactgtgggcaaagcggctgctaggggacgatgatgtggcagatggctcggccctccacgccaagcgcagctaccgccccacggncgctggggcagagcggggcggccaaagaccccctccagaacatcctggatgcccaggacctggattgctactttacccccatggaagcccgagagtctg

SEQ ID NO: 370778 - DNA, 965 bp, Homo Sapiens
  misc_feature (785)..(803): n is a, c, g, or t
tgggtggcattccagcacgaggctcatctccaagatgggtaaacgtagccaccattcagaaagcccagaaattcttgttcccacatcttagacccctgagcaacacaaggagaaaatgcagctgcttacctattaatatctactgagggacaatcagcaaagcctcaaaggagtcgtctcaggtagggtacttggcctgtggcaggagagacagaggcacaaacccacccacccatcagcttccggtggctgatcggggcccagggagggaagcaggtgaaacagcagggtgggggtgacttggcagtcatgcatctcctccccgactctgaggcctggcaggaggaggccacaccagcctcacctgccctgacccccgccccccaccctgtgaccctgtggctatggccgctggtcgcccttgtccccaaaatcaccatgcctgtggccacgtccctcatcttctccaaaagcatcattaagaacaagtgattttggatgatggatttttgatttacaaacggcgcatttcccttggagtggaacagaaaggaaaccatttaatggcgcccttcttttcaagcatgaatacattttaatgaaactattttattgtatttgaggaaatggagagttgaacattccaaccaatcaatagccaattaattgctataaagctaaaaagaaaataaataaatcctgagtctattttaaaaactgcaaaaagttcagagcctcagaatctggccttccccctccataagggggcaccgagcactgtaaannnnnnnnnnnnnnnnnnnctttcaccctacttggcccacgactccctgacctccccctaccaccttcagaaatgaccttgaaaacttcacaaaacagcctgtggagcttctcccccacgggacaatttccttcgccccgggtgggcctttcgcacattggggggtcacacaaaaacgggc

SEQ ID NO: 370779 - DNA, 1231 bp, Homo Sapiens
  misc_feature (142)..(150): n is a, c, g, or t
ttcattcatcatttgggacatcttgatccctcggccctgattactgatggtgggtgttttctccctggtggcggatgtccctgtccctcgtgaaagaggatgggtgtggtaggcccggtgggctcacatgtgggcaggatgnnnnnnnnnaggtggctcaccatggccaggatcccattgtacacaagcaggtcgtccaccaggaggccaaactctttcacccctcgatggggtgttttcgcataattccacagtttgatcattgacacggtggtaggcagatcgaaaatcacataaacccggttcaccaggcccggcaggatgggagccagccacatgtgccggccatcactggtgtcgttcacttggtcgatgagcttgtctggggtgcggacgtccccgcccacaccctccagggagttcacgctgtcggggaaggccgcaatattgttttccgacaaggggattttttctcctcgctcgtcatacagctccaggccggtgaggccgatgtagtaggggtcgccccagctggtgagaagctgaaactggaaaatgaagccacagggcatcagcggtgcctcgtagtccatgcttgcacactccaggcttctcatgtccagcctcctggccggctggggcagcagctgagcccgtaggtagtccacgaagaggatttcttgagcaaaatcaaagtggcagttgcctggccccttccggatgagaaagccctctggcggggagacgcacaggccatccagggagacgtggacaatcttggccccgcgataggtgtcctcgggagatttattgtagttccagaagcgcaggcctgcgatgctttcggccctgtccaggcggatcgtgaccacatggtccagccccggcgagaaggggatcagccacatatgctcatcctccatggtgatgttggtgccatcaattaacttgtccagggtccgggagtcgtcagagtactcggggagctcatttaagtctctgggggaagcagagatctggtgcaggtggatgggcagcgcctggccctccttgcccaccacttccaggccagtgagccccaggtagtgcaagtctccccaggaggcagtgaaattcagctgaaggcagattccgtggtagatgcctggctctggcgtggtgacttgggggacaggggaactggatgggagctctagctccgggatccgttcccctgtcggggtagtcgggg

SEQ ID NO: 370780 - DNA, 951 bp, Homo Sapiens
  misc_feature (138)..(138): n is a, c, g, or t
gattggcccttcccccaaggctttcaccccagaaaggagggggggaggccaccattcagggtggggggaggaacttgctcggggcaagtttcgggggagtggtgaggcctgggctacaggggcgccccatcacggggncctggcgggcagtgggcgggggcccccgtgggcgagggccgggccgggccagggccacgggccccaggaactccacataggtgccagggaagtcacctcgctgccgtgtgcgctcgttgaggccgggcatccagcccacgctctgtgggcagcgctcgccaccctcggccacgcccagcgcatgcaaggccgcccggctcactaccagcacgtcgccgggcagcagctccaggtcctccggccgctcccggcggaacgggtacagagcgcggtactggaagccctcagggcccgccatggccgcgtgagtggggtggggtctggatggttaggtggctgcttggagccccactggccccattggttgaagcagggctgggagggtccgctgggttggcttggggtgctgggacctctatctccagcagtcacaggcgaccacaggggccgctcatgcctcgcttcaaattattccatgacccttacaagggccactcgtcactgggtccaccattcgtcagctggtgggagggagttggtggtgtggtgtcaggtcactgggccattgagtcctccatcagcaggtgaggctggggcaggccgctcacgccctcacacggagggccatgggcgcccaaggctggcggctctgctggctgcaccagacaagggagccaagggtgcaggctgccaccatgctcggccagctgaggacgccgacctggtcgcggccgccaccgccgccgcagccgccgtcacaccaagccaagcccgccccgtggctccaccgcggccaccgtcgccgcagccgcg

SEQ ID NO: 370781 - DNA, 943 bp, Homo Sapiens
  misc_feature (735)..(735): n is a, c, g, or t
  misc_feature (915)..(916): n is a, c, g, or t
aaggagcgaggcctgggtggcgaattcggcacgagggggaactaagatatttggggatatgccttttgcttctctaacataggatatgacagtcttctctctctatggggtctttattgggggtgacaatcatttgggtcatgttattccctgagcaggagagtaggaatagccacttgatccaccagctctgatatcaggctgacagtattgctgcctgcaaagtcatgagttagacctgagggtcagagaaggttctcatcccacagtccccagtgatcccactgcgaggcctttcttcatagatggtagctgggctctagtttctctgagacatctttgtttggaggagatgtcctgcagaacacagcctgtgagcttggtcactgccccctctccccagaagactttgacccagggttatgataagaagcatctctaggaaaggctgatggagctgaggccctgagtgagggctgagtttgtcatccaactctcttctcaggtggcatcttctcgttcactttgaactccaccagaggcatggagcctacctcccctactcctctgttcagatatatagaactgagctgcaacgcagtcatccgttctcccatctatttcctcaaacacaaatttttaaatttttaaattatatatttagataatttcaacttgtttttagattcagggggctacatgtgcacattttttgtatgggtatattgtgtgatngttgaggtttggggtacaattgaccctgtcacccaggtagtgagtgagtatagtactcagtagtttttcagtcctttccccgccctccccctcatcctccagtagttcccagtgtctgttactatctttttgtccctgaagtgttcagtgttaagccttccacttgtagtaagaacatgnngggaaattgggttttctggttcggcaa

SEQ ID NO: 370782 - DNA, 967 bp, Homo Sapiens
  misc_feature (273)..(273): n is a, c, g, or t
  misc_feature (311)..(311): n is a, c, g, or t
  misc_feature (491)..(513): n is a, c, g, or t
  misc_feature (938)..(938): n is a, c, g, or t
gcctgggtggcgaattcggcacgagggaaactggcagcgttttacagtagtacaccagcctggatgttttttcaaaaatgtttacctgggaaaacttggggttttgtttgtgaggagaaagagtacttgtggaaaacctctgcttgagtaccatgtggccaggcctatgtggatggctactccgtgctgtgcggcttcaccagcggttgggattgccccagcttggagtgcttgtgtggtccaacctcagtctgcccccatagtgacttttgnccccatgattctgctttcactgttggaatcctctttgnaagtcccccctctctttgctaaagcagtgaaggaagagaaccagagacaaactctttggactgtgaaagagaagggtagagaattcccaggcaacagtctgacccaagggtgtaaaccagtttattatatatatatttttcctttgaattaaaacctagagtgttgtatttttctttccnnnnnnnnnnnnnnnnnnnnnnnaccctttttctccttaggccaagtttagcttattcttatctttccacccaaacacctacacaacgtttaggcttcctgtaaggtttgaatgagacagatgtactctgaaggctggtggtaaatgtgtttgatgaccaaactcttcatacagtcggctttgggccactttaaaggacaaaaaccagagctcagctttatccctctcccagtgctgggaaccaaaaaactggtgacagttttttgggcacctcaagaaaactttgaaaagaacatgctttaactgaagcattggactcctgcagctttctggggaaggcccgggtactcccactgggcagggggaggaccaaaaatctgaaactcttatgaatctgacatattatatggaaattatatcttgtgaccgtcttcaagtgcatggactnaaaaattcatgagagactaaatgtgaggg

SEQ ID NO: 370783 - DNA, 1001 bp, Homo Sapiens
ggcctgggtggcgaattcggcacgaggaagcagctgtggagacatcgtttttggactatggtgaaaatctggtacaaaaatggcaggttctttcagaggtgctgagctgctcagagaagctggtctgccacctgggccgcctgggtagtgtgagtgaagccaaggccttttgcttggaggccctaaaacttacaacaaagctgcagataccacgccagtgtgccctgttcctggtgctgaagggcgagctggagctggcccgcaatgacattgatctctgtcagtcggacctgcagcaggttctgttcttgcttgagtcttgcacagagtttggtggggtgactcagcacctggactctgtgaagaaggtccacctgcagaaggggaagcagcaggcccaggtcccctgtcctccacagctcccagaggaggagctcttcctaagaggccctgctctagagctggtggccactgtggccaaggagcctggccccatagcaccttctacaaactcctccccagtcttgaaaaccaagccccagcccatacccaacttcctgtcccattcacccacctgtgactgctcgctctgcgccagccctgtcctcacagcagtctgtctgcgctgggtattggtcacgggcaggggtgaggctggccatgggccaccaagcccagggtctggatctgctgcaagtcgtgctgaagggctgtccctgaagccgctgagcgcctcacccaagctcttccagcctcccctgaatcataaaacaccccccctcccttggttcccaagccctcctgggatgagatcctgggctccaggcatacacactggttggcacctggaagggcctgaacccagccatccaaacgagaagccctgccaggaaggttctacagctcaaggggcttgaaatttggaaccaagcacgcgataacccccaccctaaaagccccttgggggagcccaagccctgcttccttgaatttgggggccc

SEQ ID NO: 370784 - DNA, 954 bp, Homo Sapiens
ggcctgggtggcgaattcggcacgagggtttcagtgacatagatcaagtaattttaaaccaatttggttattctatctaagatgagggacatggctattaaggtcaagccaaactatactaaaagtagtatagggcagcagttaaaattatcttttgaaaatcaagtattacctggtttcttctgtcacaacagaatagctggttacctagtcagtcacagttgcccttgccttcccttgttagtccctggaggtacttgagtggaacagaaggtagaattagcaacagctcaatcactttaggtagcatttctcctgaattctgctgccaaatcctcagggtctatggattggttgaaatagtaaaatcacacatagtgatttcttgcacagcgtagaggcgtttaattttagtgtatagtgaacaaagaaggaaaactgggtcatataaaatttaaccttaaaacacagattataaatatctttgaatgttaagccctaggcagacagacactctcattcttaactctggtatgcaagctggccttgctgacagtggcatagttacattaactgttttttaagttgcatgttgtgatgtgaatgttttttgtaaaagttgccaagttaatcgagtcctaaataagtagccaaatggtaactgagacccactgtagacattactcgctttatattatttgctttcaaatactaaaacctcagctgctaattcagcgctctaggtgtacagtgtctccttcccttggctcctagcaatgtagggaacttgaggttcttcagtatcttcagagattccttccaggccacatatttttatgctaatacttctatagttgcattcaatctacaaggagaaattgtacattgggtgcatgttttataaccccggaccccgatagctaaaaccataatttagtttttctatacccagag

SEQ ID NO: 370785 - DNA, 1137 bp, Homo Sapiens
  misc_feature (1059)..(1095): n is a, c, g, or t
tccggtattcttccctaatgacccatgccctttaaaattggcctttgtagccttttaaatgctagataatccccttcctcagtgttcctaactacctgggcttgctcatttcctgccccatgtgtgcagaaatcctttaaatcgttcattgtgtcttcttgatttccagaagtcattcttaaaggcccaggaggtaacaaaggagtttcatctgctactaatgtcggcggtgttggagctgctggtaatgaaactcccgaaggatcaacttttagtaatcgcattgaccttctacatccaatcccattttctctcttaggcttctttcttttggatttaggaggctgtctcttctctatcattgcacggagtcttgcagcagactcagacaactgaagagaagcaaaaaagtcttgcgtgttctgatatgttcttcagtctcttcctttcgtagggtgacaatcccgaaaaatccagggctggtgtggtatcttcatcactgtcgtccatcctgactactttccacatcaacactgagattcatcgcatctgccgttctcttgggttgtagcttgttactttcagtatgaacagctgaggatgaattttgcagcgtggattctgccttggaagatgtgtttttcatctttggaggtataatccttctgcaagttttctttattgttagtcgttcttacacgccacttcattgttagaattcttttctgatagggatttggggcacataagctggtctagctggtaattactgagtgaaaagggggcaagatagaccttagctgtttttattaaaactgtagtctgtgctggtctcagagacacataagcgatgttttgattttctttatattcatttaccttggaagcaccagtccgtttctcaccttcatctggggtcgctgtctggagtccgccttctcagccgccgcgcccgacctggacatctttcggcttcttagcgccggcgccttcccgccaagattgcggcgggaggccccgctctcgacgaatttcgagctcggccgatttggcctgatnnnnnnnnnnnnnnnnnnnnnnnnnnnnnnnnnnnnncgccccaccgcggaactccagtccccaatagcgaattccgtc

SEQ ID NO: 370786 - DNA, 1000 bp, Homo Sapiens
gagatttaccctggaagggggcactttgggcttaaaggttggttccaccccattggccccttgccattcttttattccggtgttacttgggttcgaccgaaggtaattgccatcaaaagagatctcccccctttgccccgattccatcaccagaaagaggctcagttgctgtttgcatttcctggaccagcataatgatattgggatgtttcactgggcgcagtattgacacttcattctcaatcaggtgttcgtttccacaacatttggctttgtctataatctttaaggcaaactcctttcccagtggacctgtctatacactctttgactactgcaaaattgccatcaccaatgacctttccaattgtgtatttctcaagaagagttgatgattcagagcatctgtttccattcacaccttcaggacttatgcaacggtcaagctcaggtccaccgtttacattggaagaagatctgccatgagcagaaatctgctttaatactctgaaacttcctggactagttggagaggaactggaggatttcgtagatttaggagtagaaagttggctgctgggagttccattaactgaagctggtgatttgctgcgtcgagagggcccagggcttttggatccagaatacttaacagctgaggatcgagaataagatgacttcaggacacaacatacactatgatccaggacaaagtcatcttgggcataacgaaatttttctggtccacatgcaataaaaacatcgtcatcaccaaaaaagtcttgcagacaagtaacctgctttccatccagggtgcagagcctcttgacgactcctgagtctagtttaatggcttcggtgatatctgttaagacttgttcaaaggaatgagcagtctttttattcagaaggatccgcacggcttttctaggcttcactccacttcgaatcagcggacactaacttgggtttgacctcgttttgaaaagccacccaggcc

SEQ ID NO: 370787 - DNA, 948 bp, Homo Sapiens
  misc_feature (129)..(184): n is a, c, g, or t
  misc_feature (842)..(842): n is a, c, g, or t
ggcctgggtggcgaattcggcacgagggtcacctggcgccacggacaccaacaacatccagtttgtctttgatgctgtgacggacgtcatcatcgccaaaaacctgcggggctgtggactctactgagnnnnnnnnnnnnnnnnnnnnnnnnnnnnnnnnnnnnnnnnnnnnnnnnnnnnnnnnggaaccaggctccaccactctcagaccactctttgcacttgaggaagaagacctcagaggctggcaccaagggagggaggagggagcatcctccacccgcaccccccaacagaacttgtggtaacgcaggggcggggcggggctgctgagtgcatgctgcaaggccaggagactccacgctcacagcctctgtgtcatctctgagtgcttgatcgggaagctggggggacagggcagggcccagatgggcacaccctgcacctgatgactcactggaagcctcggagtgtcctcctgtcatcttgggtggtgcaggggcgcagatggccctgcagcagggtgctggcagggtggggtcataggagccatccttcagctttgcctggggtctctggtggagggcagttccgtcaacaaaagccagggtgggatcaggccaacttggtgtgggttggaggactcaggccttggcgatggcctccgtctccctgctccctccccctgggtctcagcccttccttctctgggtcatcctcccttgcctttgctctcccagagaactcccatccctgactcctccgagttctggaaatgcttcttgagactgatttatggctcaaatagatggtggcgtggaccggggggagaaaaaatgganggtgcccggcaaaagggaagggccaaacttcctggtgcaccccggcgccccggtcttcctcgcccatttcccccccggcccaaggggttgacccctttccctcctc

SEQ ID NO: 370788 - DNA, 965 bp, Homo Sapiens
ccaagcgtggccctttccagaattcttcgcaaagggtgtccaaacccccttggacttccccaattttggggcgacttgaatggtggacccgggttcttctcctccttccagagggcccggccatttcttgtaccaagatgacctggaggaaagggggtaacccgttcctcccctacaccagggtagcgacctccttcaggctccttactgttcacagggaatccccagggggttgaccctggatgtttggctctcccggagctttgtagacgcggagctggatgcggtactcctgggaccgagggcgcttgccctggcacaagaagatgcgctcgtcttggggggtgacttgagtcagggccagagtagcccctctgtcctggaggctgagccgctgctcgtactccccaggttcgctctggccctggccctggcgcacacggaagatgagcgtccgcttctccttgtggacagaaaaccagtcgacatggctgaggttgccttgggactgggagaggccgcacttcagaagggctgtgctgcccacttccacctccaccagctcaggcgcaggctgctcagcctctccgggcacacctgtatggggagtgcagacgatgccttctgggctgtcccttcaaacgcaagctcctgcaagtctagcctttgaccagagaaaggaaggagggggctgaattcgcaggcccaaggtgttcacacttgtccagacctgggccttgagaatcatgtttcttccctcttcactctggagcctaccctggaactcagtttcccctcacctgcttgggtggggagctctgcagctccccttctcccaaaacgccggcttctccctgggtcttctggcctcttgaactaaggctctagggagggggaggtgctcttgcctcactctgaccccagcagccggcctcagaaaagcctcgtgccgaattcgccaccca

SEQ ID NO: 370789 - DNA, 584 bp, Homo Sapiens
acttggctctcgcccttccggccgggaagcatggggcttcccaggctggtctgcgccttcttgctcgccgcctgctgctgctgtcctcgcgtcgcgggtgtgcccggagaggctgagcagcctgcgcctgagctggtggaggtggaagtgggcagcacagcccttctgaagtgcggcctctcccagtcccaagacaacctcagccatgtcgactggttttctgtccacaaggagaagcggacgctcatcttccgtgtgcgccagggccagggccagagcgaacctggggagtacgagcagcggctcagcctccaggacagaagggctactctggccctgactcaagtcaccccccaagacgaacgcatcttcttgtgccagggcaagcgccctcggtcccaggaataccgcatccagctccgcgtctacaaagctccggaggagccaaacatccaggtcaaccccctgggcatccctgtgaacagtaaggagcctgaggaggtcgctacctgtgtagggaggaacgggtaccccattcctcaagtcatctggtacaagaatggccggcctctgaaggaggagaa

SEQ ID NO: 370790 - DNA, 977 bp, Homo Sapiens
  misc_feature (633)..(633): n is a, c, g, or t
agcgggtcggagccgtctccaggagcccttagagaccgagtcccggcggcgacggcggggcagcgcaccggcaggcggattcattccacttaaaacctgaaaacattggaccacacaaagtcttactgatttcaggtaaaaacaataattgaagatgtccagcaaaacagcaagcaccaacaatatagcccaggcaaggagaactgtgcagcagttaagattagaagcctccattgaaagaataaaggtttcgaaggcatcagcggacctcatgtcctactgtgaggaacatgccaggagtgaccctttgctgataggaataccaacttcagaaaaccctttcaaggataaaaaaacttgcatcatcttatagtggaatagagaaacagctcctcgcctcttcccaacaacgcaaattatgagcagctccttgaagagatttaccttcagcttatttggtaaccactgctaataactaaaatgttctcagcttggaataatggactctgaagtctctattttccaagttgtcctttctcttaaaataccctttactgatttaatacagaataacaatcttattttccacttggtaactatggctttatgttgggttactgtttaaggaaagtntgatctgggcctttttaaaacataattatatactttagaaatacaagggattccgatatgtcaggacctaaatggcctaagcacctgtcaaattaaaattccaaaattcattgaaatcctaaagccttgatattataattctttataaggccgtgtgccagcctgtatagtatataaagagagaggggcggttttgggtgaatatatatatgccctttgggtataccccttatcaaagctatttttcttatgaaaacgttcctcctcctccataccattcagttttcttcagtttccagaagattatacccttttaattttttagcctgggggtataaggtaac

SEQ ID NO: 370791 - DNA, 926 bp, Homo Sapiens
  misc_feature (44)..(46): n is a, c, g, or t
gtcccctccgtcccggccagggcacatcggtcgtcacacctccnnngtagcgaggcctgggtggcgaattcggcacgaggggagggcctaagtccgtgtgcggtgcccttcggccggcctgagccccagagtcagctcccctttctcgcccagcgcccccaggccgctcccggggctcacggaatagtaaagaaacacatcataaaacctcccaggacataaaggtgagcacagaccctgtttggatcaagtcagttcctggagcctgaatgatgactgctgaatcacgggaagccacgggtctgtccccacaggctgcacaggagaaggatggtatcgtaatagtgaaggtggaagaggaagatgaggaagaccacatgtgggggcaggattccaccctacaggacacgcctcctccagacccagagatattccgccaacgcttcaggcgcttctgttaccagaacactttggggcccccgagaggctctcagtcggctgaaggaacttggtcatcagtggggcttgcggccagaaataaacaccaaggaacagatccgggagcttctggggctaaaagcactttctttccatcctgcccaaaggagctcccaggtctggctgcaggaataccgccccgatagtggagaggaggccgtgacccttctagaagacttggagcttgatttatcaggacaacaggtcccaggtcaagttcatggacctgagatgctcgcaagggggatggtgcctctggatccagttcaggagtcctcgagctttgaccttcatcacgaggccacccagtcccacttcaaacattcgtctcggaaaccccgcctcttacagtcacgagctcttcctgctgcccacattcctgcaccccctcatgtagggtagtcccagagaccaggcgatgcatctga

SEQ ID NO: 370792 - DNA, 1150 bp, Homo Sapiens
ggcctgggtggcgaattcggcacgagggtccccttcacccccagggggtgcttgccctggggacaacacccagcttgcagggctggagggggaacggccagagcaggaagacatgggtctctgttctctggaacacctacccccaaggaccagaaattctgggatatgggagtctccagaactggacaggaatctggctgaagatgcttcaagcacagaggcagcaggaggttacaaagttgtgagaaaagcacataaggacatttctttctgcctggcacaaaccaactaccagtaccagtctctgttagtgctcctcactgatctcctgttcccagggaaaagagccactcttctcaggagcctcaggccgggaaagacagggcagctgaggtggcaggcagcaaggttgtccctgcactaccagagagtggccagtcagagcctgggccacctgaagtggaaggcggaacaaaggctacggggaactgcttttatgtcagcatgccatcaggacccccggactcaagcaccgaccactcagaggcacccatgagcccccctcagcctgacagcctccctgcagggcagacagagcctcagcctcagctgcagggaggcaacgatgatccaagacgccccagccgctctcctccaagcctggccctcagggacgtgggcatgatcttccataccattgagcagctcactctcaagctcaacaggctcaaggatatggagctggcccacagagagctgctcaagtcccttgggggagagtcatctggtggcaccacgcctgtgggcagtttccacacagaagcagctagatggacagatggctccctctcacctcccgctaaggagcccctagcttctgactccaggaacagccatgaactggggccctgccctgaggatggctctgacgcccccctggaagacagcacagcagacgcagccgctcaaccagggaccattaaccgtacaaaccaccaaatcctctggcgtccccactccttcctttcaggggactgggcctgaggaccggggcacagggttagggggggatcccaacattcctccctgttggaggagggcagtttaggggaaattagggttcccagccaaggcccggggggagacccgc

SEQ ID NO: 370793 - DNA, 955 bp, Homo Sapiens
  misc_feature (48)..(84): n is a, c, g, or t
  misc_feature (897)..(897): n is a, c, g, or t
ggaatgaacactactatgggcgacttggagcttacgcggtggcggcgnnnnnnnnnnnnnnnnnnnnnnnnnnnnnnnnnnnnnatcaggccaaatcggccgagctcgaattcgtcgagagcggggctagagaggtcggaggtaagtggctatagaagtcgggcggacccggaacccagaggacgcgacaccatgacttatgcttatctcttcaagtatatcatcatcggagacacaggtgtggggaagtcatgtctcctcctgcagtttacagataagcggttccagcctgtccacgacctcacaataggtgtggagtttggagctcgtatggtcaacattgatggaaaacaaatcaaactgcaaatctgggatacggctgggcaagaatccttccgttctatcacccgttcctactacaggggagcagctggagcactgctggtgtacgacattacaaggcgtgaaaccttcaaccacctgacctcatggttagaggatgcccggcagcactctagttccaacatggttatcatgctcattgggaataagagtgacctagagtcccgcagggatgtgaagagagaagaaggagaggcctttgctagggagcatggacttatattcatggaaacttcagccaaaacagcctgcaatgttgaagaggccttcattaacacagccaaagaaatatataggaagatccagcagggtttatttgatgtccacaatgaggcaaatggcatcaagattgggccccaacagtcaatttcaacatcagtgggacccagtgcctcccagcggaactctcgtgacatagggtccaactctggctgctgctgaacatctggcttgaacttttttttgtccttcctggaatagcttcagatcaatagngcttaatgacagagggtcttcttgcttttggttgagagccagctctttttaaagtgtg

SEQ ID NO: 370794 - DNA, 582 bp, Homo Sapiens
ccgactccagaggatacacttcctctcctcccacctcactgtggtggagaaggacctttccatgcagtgaaggcacttttcccctttccttcaccccttcctgttcccttctctgccgatttccttcttctcccccagaactcctctgtgaaatacctggcctccttccctgagcctccctgtctccctgccaccccatctccactccgtgctatgacatcaccccgtaatttgaagctcctttccctatctgaagggaggcagagacagagtgcacaggctcaactaggcaaggcagacccttgcatgcctgggtcagaggtcagggtctctggcacacattcctcccagagcaactgtaggaagcaagccagtacagaggtactctaagcgctagacaggacggggtgggagtcggtaacatcgtctcctctgggctggccctgcttctgcttagctctgggcataagactgactccagtacagtcacagttatgtctctgagctcacccagtcctgggttccaggttcccagctctgagcctggcgagacacacacaggctggtgctgtgggatgtctt

SEQ ID NO: 370795 - DNA, 1622 bp, Homo Sapiens
  misc_feature (111)..(111): n is a, c, g, or t
  misc_feature (168)..(168): n is a, c, g, or t
  misc_feature (512)..(520): n is a, c, g, or t
  misc_feature (655)..(666): n is a, c, g, or t
gggtctattatctgcgctcgagcgggcatggcgtgtgatcggtaagaaagtaatagggccgccctctccgttttgtcgcgacgcgccccaccacgcggatcccggcgtcgntgttgtttctgtgagggggccccgcgagagcggtattatatactgtagacgacgggntttttcccaggctcgagcctcgcgcggtgttacacgttgtcggacataagaaagataggcgaaccagcgggttttttgtgtcattaacgacagagattccgtggggggggagcggccccaccggcgggtcttacaggagacaaaataatctcaagaggggcactctctataaaatgtcgttaccttggggcaggtttacacgatattcctgcagggggcgttgggtggggcaacacccacgatgggagagcctcattcgggagtggaggtgaatatatggcgggctagaaatgcgcagtaaaatgtgtgcgtttttaaaaagcgcatcgatagcaaaggcgtcnnnnnnnnnccgccccccccaccaacgctgtcgggaggtcctcactcttgttttacataatcgggagagggggtagcttttgcggtgagggtaaatggcgcccctcgcgcaggaaactctagtgatgagcccaccggcggaacnnnnnnnnnnnnccttctcccagaagagtgctgtcggggtgcggcgatcggaggggattcgcaccccgttccgatacgtttacacgacgacgataatggctgtgcccgaaggataatagaatgcgggggaacttggcctgggactatttcgagttatgcgggaagtgcgggtgttgcaggcatgcaaaaggggccgtgtgcacccactcttcggaggattcttgtcagagccgactgtctgagggcctcactgggcccggggctgaatcatggctggagtccgattcaaagccttcagtcaggtcacggtcatcaccaactttgggtgggtggcggcgccggcggagacaggagaggcgagagaacttacggctctttctgccctcacccacttggggtgttacaggaggaggctcaggatctggctcctcctctttctccacaggttccttggactctggttcatctttccatagtgatgacctccccgattctcccacctgtgccatcactctggaatgccgggacgggattctcgccctcttccagctcagcctgcagccgtatgatgacatgattgacgaggtgggaaaagagggccagggtgaaggcaatggctgcactgtactgcttggatcctgctctctccaagctgtgcacacacataaggcagatgatgaccatttgaaagatgagaaggtccgggaggaaagcatatccactctcatactcctcctcatcctcactggccaggccgaggttgggtgaggagggcaggtagaagaggcagaggttgaagtcctccaggactgactggcaaagtgaggtcagctctgagtccacggagctgcttttgggctgtaggaggctttgcagatacataaagttcactagcaaccttttaatgtctttacatcgctttttgccaggagacagtttccgagtctcacactatctcagttggtgga

SEQ ID NO: 370796 - DNA, 1102 bp, Homo Sapiens
  misc_feature (94)..(94): n is a, c, g, or t
  misc_feature (216)..(216): n is a, c, g, or t
tgccccaatgggctgagaagtcccaacccgcggcccttattttagcagggcaagttcccagattcccccaaggcttcgggctccatcagaaccncagcagctgaagtcaggcattaacagaggtgcaacattgtccctccccagtgagagcagtggggcctcccagactgcatattcatgtgcagagtggaacctgccccccagacatggcagaantacgctccttgcagcgaccactcgaccactacagcacagatgaggccctgcccgctgcaccgggccctggcagggctgggaggcatcttgggcaggaagccagaccccctctccaggtacacccatcaagccaccagcctggccaaacgggcatctttctgtccagagctcatcaataggaactgggcaaccaggtggggagccgccaggggagcttggagagggcagagtaggagcctccatgaaccaagtcaggctggaaggggtcagccctcgtggtccgtcagcgtgcggcggagtccctgtgcctaagtagcagagcggtagtcattgaaacaggccgggatgccagcaagagggaggcgagcatgcagtgagcgataggtacaaagctagcacgtaagaggaagcacggcaaggtgggcaaccaaaacaccaggaaggacggaaggaagatctcctcggggaacacgtctggagaggcaagaagggaggtcttcaaacaggggcaaagctgtcgtatgggcatttcttctacacagcaaagagcgtatgctacctgggtggctgcagacgctaccaagtgctggcggattcttaaagattccgtgctcgggcaggcagggctggcgctggactagtcccgttggaagctggatgcactgggcaaggccccgtgcccgcagaggccagctggcggcagagcatctgcctctctcgcacagccctattagaggcagaagtcttcctgatttgggcgcgccgcgcatgccggagcggagacttgtaggttctccgcaactctgccatggaactcctgatagttgatgcgcaaggggctgtcaagaatgctctcggggtatttgcccacattcaacgctatacc

SEQ ID NO: 370797 - DNA, 937 bp, Homo Sapiens
  misc_feature (139)..(184): n is a, c, g, or t
  misc_feature (789)..(828): n is a, c, g, or t
ctccgccggagatccgggccgggcggcctccggggctgccagagcagcagggtgaggggctcggaggccgcggcgcctcggggctcgggctcccgctcccgctcccgctcccgcagtgcatgggcgggggaggctcgannnnnnnnnnnnnnnnnnnnnnnnnnnnnnnnnnnnnnnnnnnnnntccctgcagcgtggcgggacggccccgttccagtcacccccgcctcgctgcggtggcctcgggcctgggcgcccgccttcagctgcggcggagctggctctgtaaatgccggtgcccgcgagccctcctgaatgcttgtctgcgcccgacgagcgcggcctgtcccgaagctgtccactgccaccactcgggcagtgcttgctttagcctggccctttgcagctgaaaggcgtgacatggtgtcgggtggttcgtgggaagccggggtttcaggagtccgtgtacttccttgtttgtctttgtcgctggccgaccttgtcttcattccaggtggccagagcgagtggggccgggcgttgtcacgggtatcatgatattagctggcttgacatcaagccatttgggagtcatcagatcttctcctgaaaatgggagacacagtagggcccctcccacgagctcttggctgttgcctgatggcagaagccaagcttgtccaagggtcacttgtagccccctcagcgtacgcctcagcctggtgtcgtccctgaaccatggagggcgtcgtcggcccgaccaagaatggcctcccggaaggaccgaannnnnnnnnnnnnnnnnnnnnnnnnnnnnnnnnnnnnnnnaactggaagcccccggggccccctgggtgcccacctgaaccagacaaggacacagtccccgggcgcccccaggttaaacccatcctccccccgccagggccacaaaccc

SEQ ID NO: 370798 - DNA, 1121 bp, Homo Sapiens
  misc_feature (32)..(33): n is a, c, g, or t
  misc_feature (819)..(828): n is a, c, g, or t
ctctttatccccctttgtcaaggcccttactnnctaggagcgggcctgggtggcgaattcggcacgagggtttacagaagccttgggccccagcccccactccgctccgccaagtatgactccaagtggctccgagagccacactttgtccaggccttggagcatggagaccatgtctacttcttcttccgcgaggtctctgtggaggatgctcggctggggagggtgcagttctcccgcgtagcccgagtatgtaaacgtgacatgggcggctcgcctcgggccttggaccgccactggacatccttcctgaagcttcggctcaactgctctgtccctggggactctactttctattttgatgttttacaggccttgactgggcctgtgaacctgcatggccgctctgctctctttggggtcttcacccacccagaccaatagcatccctggctctgccgtctgcgccttctacctggatgagatttggagcgtgggtttgagggcaagttcaaggagcagaggagtcctggatggggcctggactcctggggctgaggacagagttccctcacccaggccaggatcctgtgcaggagaagggggagctgccctttgttccttccttcctttccccgaaaaccttcccctgatggtggccctggacctttccttcaggggttccaccccgcttggttggaacccccccgtttgtcccacctggtcccccccatcaggcttctactcacttcctcctctaaccaaggggccccttacctgaaccccaattagcctggtgggatgggcttggacttgggnnnnnnnnnnaggtataacacatcccagggccattggttccctatgggcctcccaaatgaagggggacccagtggccttgaaaggtggcttggcccccccacccggggggcgctactcccgggggggtaccctggaagcccacttcccctcctctgaaaaaacaccttggatatctcctctccaaaccctctgctcccggtggtccaacgcggcgcaaatccggcgacccagccaccacaaaaacctttaacatccccgcagtctctttatgtggcgccgggataacttgggcacacccccgg

SEQ ID NO: 370799 - DNA, 464 bp, Homo Sapiens
atcccccgccgttacagtgcggccaaggcccgaggcgagcgccatgtcacgtatacatactcagaactacgcgggagaactgcaccctcccccagccgagcatcctccacagagacctcgcggaagaagaagtagacatggtctccatgctccaaggcctggacaaagtgtggctctcggagccacttggagtcatacttggcggagcggagtgggggctggggcccaaggcttctgtaaactacagaatcactggcctggaaatccgcagctgtggctgagtacaggctgccctctgcaaagatggccacgttggactgggtggcatcaaaggggcatcgagcctgcccactcagttcctcaccctcctgctgcagcgaagttatcccatagctgcggcacacagggctgaatgagttcgttccacaggcaaggagcgtctgggagtcccaggcaacaagaac

SEQ ID NO: 370800 - DNA, 957 bp, Homo Sapiens
tgggtggcgaattcggcacgaggcagggacggacccctaccagctggattggctgcagcagcgacactaggcccagctgtggtccctcaccagtattatggagttactccctggggagtctaccctgccagtcttttccagcagcaagctgccgctgccgctgcagcaactaattcagctaatcaacagaccaccccacaggctcagcaaggacagcagcaggttctccgtggaggagccagccaacgtcctttgaccccaaaccagaaccagcagggacagcaaacggatccccttgtggcagctgcagcagtgaattctgcccttgcatttggacaaggtctggcagcaggcatgccaggttatccggtgttggctcctgctgcttactatgaccaaactggtgcccttgtagtgaatgcaggcgcgagaaatggtcttggagctcctgttcgacttgtagctcctgccccagtcatcattagttcctcagctgcacaagcagctgttgcagcagccgcagcttcagcaaatggagcagctggtggtcttgctggaacaacaaatggaccatttcgccctttaggaacacagcagcctcagccccagccccagcagcagcccaataacaacctggcatccagttctttctacggcaacaactctctgaacagcaattcacagagcagctccctcttctcccagggctctgcccagcctgccaacacatccttgggaattcggaagtagcaggtctctcggcgccaccctggggatccgcccttgggagggtttggaacagcagttgcaaactcaaacactggcagtggctcccgccgtgactccctgactggcagcagtgacctttataagaggacatcgagcagctgtgacccccattggacacaggtttttataacggccctaagcctttccctcctctcctggacccggggg

SEQ ID NO: 370801 - DNA, 965 bp, Homo Sapiens
  misc_feature (794)..(794): n is a, c, g, or t
  misc_feature (828)..(828): n is a, c, g, or t
gaggcctgggtggcgaattcggcacgagggttaaacgtctggggctgcttctgaggaatcagcttggctggccagcaagttcagctccggcaagtcatttgattcacccggtgatgaaatgggggtcaaccagtctgtgggctttccacctgtcacaggaccccacctcgtaggctgtggggatgtgatggagggtcagaatctccaggactttgtattcagccttctgcatggagctggcctcacgtggctttgtggttgctgtgccagagcacagggaccggtcagcggcaaccacctatttctgcaagcaggccccagaagagaaccagcccaccaatgaatcgctgcaggaggaatggatccctttccgtcgagttgaggaaggggagaaggaatttcatgttcggaatccccaggtgcatcagcgggtaagcgagtgtttacgggtgttgaagatcctgcaagaggtcactgctgggcagactgtcttcaacatcttgcctggtggcttggatctgatgactttgaagggcaacattgacatgagccgtgtggctgtgatgggacattcatttggaggggccacagctattctggctttggccaaggagacccaatttcggtgtgcggtggctctggatgcttggatgtttcctctggaacgtgacttttaccccaaggcccgaggacctgtgttctttatcaatactgagaaattccagacaatggagagtgtcaatttgatgaagaagatatgtgcccagcatgaacagtctaggatcataaccggntcttggttctgttcatcggagtcaaactgacttntgcttttgtgactggcaacttgattggtaaaatcttcctcactgaaacccgggggagctggaccctatgaagggcaggaaggtatgggcacgggcctggttggcctttcctgcaaaacccccttgaccctgaaaaat

SEQ ID NO: 370802 - DNA, 849 bp, Homo Sapiens
  misc_feature (116)..(116): n is a, c, g, or t
  misc_feature (148)..(148): n is a, c, g, or t
  misc_feature (434)..(434): n is a, c, g, or t
  misc_feature (436)..(436): n is a, c, g, or t
  misc_feature (614)..(731): n is a, c, g, or t
tacaagcctctttccaggatgacactttaaaaatggccccacttcctagaaatccatgccttgggtaggagtcttcccacggttgtagttgacttggttctgtgtgacccaacaanaatacagaaattggtatgacactttcagaggntagggttacaaaaaaacatcatggcttcttcccttgccctcccggtgttgcttgctctggggacaaataactgccatgttgtgagaggccctctgagggggaacatgtggcaacaaactgaggtctcctgccaacagctgtgagtcttgcgggaagcagatcttctagccccaatgacaccttcgaaagattgtagccctggttggtagcttgaccaaaaccacgagactatcacccagctaaaccactctcagatttctgaggctcagaaactggagataatatntntgttgttttaaactgctaaatttcgagatattgttttgtagcaatgaatacatattttaatccttgtggcataagacacaccgatcaagaattatcttctgcaaaatattgaaaataaccagaatgtgtggacatggttaaataatggcatagttggctgggcacggtggctcacacnnnnnnnnnnnnnnnnnnnnnnnnnnnnnnnnnnnnnnnnnnnnnnnnnnnnnnnnnnnnnnnnnnnnnnnnnnnnnnnnnnnnnnnnnnnnnnnnnnnnnnnnnnnnnnnnnnnnnncatggtggcacgcacctgtagttccagctactcaggaggctgagacatgaaaatcacttgaactgaaatgtaagaaatacattgaaagcataaaactcaggccggatgcggtggctca

SEQ ID NO: 370803 - DNA, 971 bp, Homo Sapiens
  misc_feature (141)..(156): n is a, c, g, or t
cccaaacccctcccccctgggggttggagcttggaggctctggccccggccacccttccatagaaggttggtcaagttttattttccctgcatgggccccggtctgcccattgtgggtcaaccaggttcttcagcctggtnnnnnnnnnnnnnnnntttcccaagctgctgtcttactccacccagagctcttgtcttttttgctgtctccccataatccaccccagccacaatcggctgggcaggggctcaggagctaccccagcacccccgtgagggggctgagcccgagcctctcccctgatgaccctgggtaggtcagggtgcagcaggtccctgacctgggcccaccagcttatggccagtccaggacacctgagatctaagcagggtcctagctaggcccgctccgccatcttagagtgcaacccctgaataccaccctgaaggcgggaggctcatgtgagccccatgagcccagccactccagcgccaaagccatgcctaatcctggcagaacagatgccacatgcttagggacagggctgcagtggggcatcttgtgtgtgcctttacttgcctctcccccacccatcattttaaagaaccttccagacttggctcaatgtactgtctcttaaggtatcttctctcttctggctgttggatgggtttgtggatggttggttactgaacactgactttattgtgcacagggaaagggaactcactttacttggtgcctggaatgtcactctaggtttttaacatgcttctgttggacttaagtactgataaagctgctgttcatagcagtccagaggtaaaaccaaggcctcagctggagaaagcatgcagaggcttagtcttggggagcaaacccactcccacaaggggtcctgggtgctggttaatgcacctgcatttttcctttattgcctcgtgccgaattcgccacccaggcctcgcgc

SEQ ID NO: 370804 - DNA, 998 bp, Homo Sapiens
  misc_feature (616)..(762): n is a, c, g, or t
ggggttgttgcgggatctcacaggctttaaaccgcggcgccgcggcgcccgggtgtggatccctagatgggagccggggatgggccgggtgcctggtgggtggcagtcggggctgacggcgtgcggcactttgccgcctcaggccctggacaccttcaccccgccgcctgcccaggcgggccggccctgcccgtccacctggccgccgagagtccccggccttgggtccccggggccgctgactggcctcggtcacctcccggggaaggctcccgcgcctccatctgcccccgcaggaaggaaccctcttctcgcccgcgaggcttctccgggtgggatcgtcctggcccccaggccctaagggatccgccccctccgagcatccgcgcgcccctcggcagaccacatccagctcggacggacccactccagcccccgctgcacgcggaagggctcatcctccccgcctgccccgttccctcccccttctcctgtgggacaaccagggaccgcaactcccccgcttcctagccgggggggcctccgacacccctcgcgtctgctcccccgtggggcgcgcgcacatcccgcctacgccctcacaaagaggagaacnnnnnnnnnnnnnnnnnnnnnnnnnnnnnnnnnnnnnnnnnnnnnnnnnnnnnnnnnnnnnnnnnnnnnnnnnnnnnnnnnnnnnnnnnnnnnnnnnnnnnnnnnnnnnnnnnnnnnnnnnnnnnnnnnnnnnnnnnnnnnnnnnnngtccagccacaaaacgggcggtcggacccatccttaacccgcgccgcaggctactgactaattaacacatggagcacgagccccttccccgctctccctcaggggtagctacgcgcccccacctcggagcgcacgggtacgcccgagcacatcgcgccgccggtgggccggtccgagggggacgcggcgttccaggtgtcggccgccgacttaccccctccacatttatcaggtgg

SEQ ID NO: 370805 - DNA, 995 bp, Homo Sapiens
aaggtatgaataggttgccctgataagacagtttccaaactggacactctccctactgaccagagctgatgctcacctgatctgcctgggctcacctgcacaggtgtctgagaggacgcccctgtcagtggtccactgctctcctctttcttccaaataagacaacgcattgggtttgcacagttgatcagccacagaggccaggttcctgtagttctccagcatcacatctctatacaggctcctctgagtagagtccagaaacacccattcttctggggtgaacaccacagccacatctgcaaaggtgactggttcctgtgaacaggcggttggcagcccaggagccatagcttcttcctccactttgtcctcctgaagccaggcagggtcacgtgcaggcacagcagaatccctggccacccatgggttgcggtggcccagtgtaggcactggtatcaccaccctctgaatctgcatagcggccttcagtcccgtgcatcccagagaccaaggcggctcctggagagctggccggtcctctcgagtcaatggtgtctccctctcttctatggagggcaccagctgcatcctcaggaacagccccggccccatttgcatgtccctggaggatgattcttccaaaagatcctgcatagaaggcaactcttcgggtttaagttgagattcccaggcaacacctgtggcacggagaatccctcgttctgttgcctttggctctgctctttgccccagctgggagacacaactgggtttgcatggtggagttcccctggaggccagggtcctgcactggtcaagcatcctgtatttgcacaggctcctccgtgcgctgtccagcaatgcccactcctggatgaactccacggccacatcctcaaaggtgacggattccatgacactggagccagggtttgaggtctcagtcggtgttctccctgcaagccagccggagacactcccaccgtgccgtg

SEQ ID NO: 370806 - DNA, 962 bp, Homo Sapiens
  misc_feature (75)..(75): n is a, c, g, or t
ctgggagggtttctgcttgctgagtgctaattcgaattttgggaattctgtaatcccaaggtgtaaccaggattntctgagcatttttgccctgagattggacctcttctttggacggaaatgtcaccacataatcccgccagttcttctgaagtatgcccaccacgcgacctgtaggcatgggctcacttggggactcgcccgaagccttgtcgtcacagtcattctcacagcagggctacggttcttcctttccagtcatttgtaggaagcagctccacaactaccacatctccatgaattgagcggtgttcgagccgtcatcccgtggattaggatgtcactgactaaatctgaatctttactgctggctccttgaagtcgaacaaaagcttctatttgggctctgtgtttgttgacattcagaattccctggatatagcgtccagatttaatcccagcttctaacacttccaggggaagatgttctgggtactccttcccatggctctcctgactctcattctctctctcccgtcgagactgaaggatagaatcacaaagctcgtgggcagcttttaaatcaggccagaaattgtccaggtaattcttgaaagtaatcacgaatactccttctgtttcacttccatactgctgaattgcctcttcatcttctgtcaccataacaattggcatcctgtcctggcagtgatgatagtaccaaacagctgcgttgtatatgctcctggtctgccacttctccatggactctcctctttcccgtggcagatagcagcattgctggaattcattagcaaagagaatgcaatcatgacgcgcatccttcagcaggtttcgcagtttgttatactgtctcctgcctctttgatgctgcacagcttgacaagctgtctgcatgaaaataattcccttcaactcaggaaactcaaggatctcaagat

SEQ ID NO: 370807 - DNA, 769 bp, Homo Sapiens
ccgagctagggcggccagctcgcggctcgccgtttgacagatgctcatcgccatggagttgccgcagcagcacctttgggggctcgggcgagcgacgggagccgggatctgagcgagcgccggggccagcggagccggagctgccgggacatggttgcagatctgatctcttctgaacacctcatcgtgtctccatccctgggaatctgaccctagcaactggaccactttgttcttggaattttgggtgtcctcttttctcacctttcccttttcccttttccccttccccctcctgagaactccggaagactgtagagattgtcatggagtccagggaaaccttaagcagctcccggcaaagagggggcgagtcagacttcctgccggtctcctcagccaagcccccagctgctcctggctgtgcaggagaacctttgctctccactccaggacctgggaaggggatcccggtgggcggagagcgcatggagccagaggaggaggatgaactaggctcagggcgggatgtggattccaactccaacgcggacagtgagaaatgggtggcaggagatggtttggaagagcaggaattttctatcaaggaggcaaacttcacagagggaagtctgaagctaaagattcagaccacaaagcgggctaagaaacctccaaagaatttggagaactatatatgtccacctgagatcaagatcacctcaagcagtctggggaccagaaggtgtccctgtgaaaagtaggtccg

SEQ ID NO: 370808 - DNA, 944 bp, Homo Sapiens
  misc_feature (826)..(826): n is a, c, g, or t
gcctgagtggcgaattcggcacgagggcgtgattctccctccctggcacagacggagacccgagtgaccccggggtccgggtgggcgtggggaatggacccatagacccgggacgagcggcgcggagcccgcagctggccagcttcagccaccttgggagacgcagtgcagctgccgctgctgacagacaagaccaaggctcggctgggccccaccccagatccggcctgagcgccttccgcgctgctcggcctcaaggcgtgagtcaccaagggcaagtcccgtgacttggtcctcagggtctccggcctcggcacattaatcttcagacccggctttttcgacgccgagctgccgcccagccccaatggcagggccttccagggagtcccagtcagactgctccccagctcccgcagctgctcggtccctgcaaagcccccgggagcgtttctactctcccctgagcccacgccatcccgtcactcctaggaaacttttcgcgcagaaactcctggagaacagccccggccgccaggtactcgcccgcccggaccgcaaagcccacagagcttcaattcgcaggaaggggagtggggagccctgagctggggtgttcctggaagaggtcggggagcggggggagaggcattccaggctggaggcctggaaacgtttggaagctttgctaaccttggagaccatgtcaggaaagaagcgtacccaggccgtctgctgtgtgcccaccccgatccccatcagtgccccacgcactcgagctcttcttcggcgtctgcagcctcttcatccgcgcggaaaaaggcgngaggcctccccgaaacagtggtccgactgtggcaccccagagcggcccatgcgagctcagccttttccccaaaggtctggagttttcttatccaggtgaggccgcccttccctggacc

SEQ ID NO: 370809 - DNA, 940 bp, Homo Sapiens
  misc_feature (26)..(26): n is a, c, g, or t
tggcgccctactgagatccctatccnctggtgtgcacccatcccatagttgctgtagaagctgtttggtaactctcagctgccctggccaataactgacatgtagaaggagggtacaaaagacgggctcccttgctttaaggaggcctaactgtggtgccatttgtgctcagagttccccatgagagcaagcggaagtaggtctccacgtgagaccacactctggctcagccttagcctttttctcgccctgtcttgcttccctcacccccttctcctgagagcatttccccaataattcacttgaacaagaatgctcagcttaggctctgcttctagggaacctgacccatgacacgctctgttagcttcctgagagactatcttgttagttcccctaggaacaaattcctgtcttgggactctgcttatgatcactcccttcattcccctgccaagaatgacagctcagtgagggaatatgttcttcacttccctagaactgttcctagaacacagtaggtgctcaatgatgcactgaatgcatgcatggggagagcccagagtctatctgacagctcagcggtcagcaccccttcttgtcctggggtggcctggcctggaggcattgtgagtcatagcaggtggacaagagctgagtgggtcagagatgggactagccctgtggacagcagctcagcaactccaccccatcttccaggtgaggaacaacatacagtgaggactaacggggaaacatcctccgagaagatacaatctcaagggtgggcctggatgtgggcttccagagaccatctccctgaaccagatcttggggatggtatgtaccatccagcctctgtccacctatatgtgagggataagtgtattatgaattaacgaaggcataacagagcctcgtgccgaattcgccacccagg

SEQ ID NO: 370810 - DNA, 1412 bp, Homo Sapiens
agcggaagggtgagtctggacgcgggcgcggaaggagcgcggccggaggtcctcaggaagaagccgcggggactggctgcgcttgacaggctgcacttggatgggagcacctggtgcctcgggactgctccgatgcccgggtctgtgctgaatgtgtaatatgcggaactatattgaaacattacaaccatcttttgatggcaacaccctgaggacctcccttttccagatggggaaactgaggcccagaattgctaagtggcttgcttgagttgacacagggagctccaggactcaccctcagctgagccacctgccgggagcatgcctctgcgccactgggggatggccaggggcagtaagcccgttggggatggagcccagcccatggctgccatgggaggcctgaaggtgcttctgcactgggctggtccaggcggcggggagccctgggtcactttcagtgagtcatcgctgacagctgaggaagtctgcatccacattgcacataaagttggtatcactcctccttgcttcaatctctttgccctcttcgatgctcaggtccaagtctggttgcccccaaaccacatcctagagatccccagagatgcaagcctgatgctatatttccgcataaggttttatttccggaactggcatggcatgaatcctcgggaaccggctgtgtaccgttgtgggcccccaggaaccgaggcatcctcagatcagacagcacaggggatgcaactcctggacccagcctcatttgagtacctctttgagcagggcaagcatgagtttgtgaatgacgtggcatcactgtgggagctgtcgaccgaggaggagatccaccactttaagaatgagagcctgggcatggcctttctgcacctctgtcacctcgctctccgccatggcatccccctggaggaggtggccaagaagaccagcttcaaggactgcatcccgcgctccttccgccggcatatccggcagcacagcgccctgacccggctgcgccttcggaacgtcttccgcaggttcctgcgggacttccagccgggccgactctcccagcagatggtcatggtcaaatacctagccacactcgagcggctggcaccccgcttcggcacagagcgtgtgcccgtgtgccacctgaggctgctggcccaggccgagggggagccctgctacatccgggacagtgggggtggcccctacagaccctggccctgagtctgctggtgggcccccaacccacgaggtgctggtgacaggcactggtggcatccaggtggtggccagtagagggaggagtggaaccaggaggagggttctagtgggcagcagtgggcaagaaccccccagcccagcctggtttgggaagaaagggccaagggctcaca

SEQ ID NO: 370811 - DNA, 390 bp, Homo Sapiens
tgtttatcgatgcaccttcatcatacctcgggtggtgaaggtggcaagagaatttatttccaggcttggaaatgtacccagcccttgggccagaaaccagcagtgcaattggctccatcctagctgcaagggaggctgggaaatgtagtcctcctgtgaggccacagcatgggcaacatacgcactgtcctctgcccaggggcaacgtgagactgaagctgcaggcccaagtctggttgcccccaaaccacatcctagagatccccagagatgcaagcctgatgctatatttccgcataaggttttatttccggaactggcatggcatgaatcctcgggaaccggctgtgtaccgttgtgggcccccaggaaccgtggcatcgataaaca

SEQ ID NO: 370812 - DNA, 1090 bp, Homo Sapiens
  misc_feature (46)..(82): n is a, c, g, or t
agacctcgtctatgggcgacctggagttcaccgcggtggcggccgnnnnnnnnnnnnnnnnnnnnnnnnnnnnnnnnnnnnnatcaggccaaatcggccgagctcgaattcgtcgagagcggggacgggaggaggaggcggtggtgtcccggctgcggggtaggagtccgcggcagcctccgggtaagccaagcgccgcgcagtgctgagttcccgcacgccgcagagccatggagatcggcaccgagatcagccgcaagatccggagtgccattaaggggaaattacaagaattaggagcttatgttgatgaagaacttcctgattacattatggtgatggtggccaacaagaaaagtcaggaccaaatgacagaggatctgtccctgtttctagggaacaacacaattcgattcaccgtatggcttcatggtgtattagataaacttcgctctgttacaactgaaccctctagtctgaagtcttctgataccaacatctttgatagtaacgtgccttcaaacaagagcaatttcagtcggggagatgagaggaggcatgaagctgcagtgccaccacttgccattcctagcgcgagacctgaaaaaagagattccagagtttctacaagttcgcaggagtcaaaaaccacaaatgtcagacagacttacgatgatggagctgcaacccgactaatgtcaacagtgaaacctttgagggagccagcaccctctgaagatgtgattgatattaagccagaaccagatgatctcattgacgaagacctcaactttgtgcaggagaatcccttatctcagaaaaaacctacagtgacacttacatatggttcttctcgcccttctattgaaatttatcgaccacctgcaagtagaaatgcagatagtggtgttcatttaaacaggttgcaatttcaacagcagcagaatagtattcatgctgccaagcagcttgatatgcagagtagttgggtatatgaaacaggacgttttgtgtgcaacagaagtgcttaacagcttagaagaaacgtatagtccgttctttagaaacaactccggaaaaaatgagtatg

SEQ ID NO: 370813 - DNA, 926 bp, Homo Sapiens
gccttgggtggggcgaattcggcacgagggaagaaaagaataagaccccatcaaatacctggtgaatttgagacaaaagctgtaggaatgaaaaatagagtgattaaaaatcaattgatgggatatagagcagatttttgagaggattactgaacaggattctgtttccttctgccccaagtagaatgtcctctccgttgagaagaggtgcgggcagcagggagattttagttctaaacccaagccagaggaaatagttgtcattttccttgctctcttttgcccttttctaacagccagctgctggggcagtgctggtcctgggagcaaacgtcaccatctccctccagtcgggctggccaagtctcccagggaaattgaagaccagtacacctgaagcatgtaagccccaggctgcctctcccattctccttcccgttcatcagcagcataaagaaagttggcctgggttttcgtgactcggcagggtccactcagtttaaaatgccagaggacatggtgtggcaagttgactgtatcgtgatgttagccgtcttgtggcagagactcagagacttgaagggtaaagctcagtaaggcccacatccagagcctggggggccaatgactacaaggaaaatgaccctgctttctagccagcaccccactctcccgaacgcctctctcttcttaatagtctgaggaggtttatctcctttctgcagatgaagcagggaatctttgagaatctgagacactagtctgagaacacatagctgagggcgtggaggaacgtgccgaccccaaacacatgctggtggctaccatgcgaagctggctttttgggatttagggccagccagcattttcaaattctggtcatggaacacctgtaccctgatggaggataactgggtattatagcc

SEQ ID NO: 370814 - DNA, 1258 bp, Homo Sapiens
  misc_feature (212)..(212): n is a, c, g, or t
  misc_feature (883)..(900): n is a, c, g, or t
accagggtctcccccatgctggcccagggtgggtcttgaactccctgcccttggtgatttgcccccccttggcctccccaaagtttgggatttacaagcgggagcccagggcgcccagccctcaattgtgttttctctgccctggggaagagctcatagccaaatggagccaggggagctgactcactgatggagcgaggtctgcattccancgggttttctgtgcagttatgggagcatgacaggggaggctccaaaatggaggttgagctgggtcttatagaataaataagtttgctgggaccagagacatgggtgtgcacagactcagaggcaagaaagttgtatgatgagggtgggggggtgtgcggatagaggttgaagcccaaaagccctgaaagttcagtgttgaggctcagggtggggaccctagagaggcaaaagatgcccagccagatggaattggtggtgtgaattgccaggactggaaagagcccagatgggggctgcagcatgggccttggttgaagcctctaatcctgtaagggctgctttggcccaagaggccttagaaacccggtgtaagcctcaatcggtagccggtctggcctctttctcacacttaaccgacacagctcttgctctgatctcatcccaagtcatctcgctggaggacaattaactcggcttcaaaatggccctcagcctggagccaagatttaggagcaagaccgtctagttgggagagaagatgtttttggagagttgaagacttcttgaaaaagttcgaaaagttcttgaaaaagcaaaggatgcttctttccgtctgggagagggaaaacctctcccagggcaaaaggaactaagaccaggggtgggtttnnnnnnnnnnnnnnnnnncctttcactcttgtagaataagccaggagccggcgtgtggtagacttctgggcctgtttcccgacagctggtttcgtttagatttttgtgtgattaactgacatcttcctgttcctttgccacatgtatctagcaagcctcttttaccttataagggaaatcctttgtagcgtgtggaaggctttgattgcaggaaggggtggaacccaaaatgactcggccgtgactagcagtttttcaaaaatacatatatatgtatgcatgtacagatatgcgtgtatctcccaactccagacagctgaaaatctgccaacagcgttgtttgccagatttagctcatcggccaggattactcact

SEQ ID NO: 370815 - DNA, 962 bp, Homo Sapiens
  misc_feature (700)..(700): n is a, c, g, or t
  misc_feature (702)..(702): n is a, c, g, or t
ccctcctgccggccttgaggcccctgaggagcagtggagaggccaggtgtcttctctgcccagcgctttctgtgacttctttgagtggctacaggttgagggttgactgtgcgggcgattgcagcgtggccctttcacctctttgcacactgccacatgctgccacaggatggcagtgcaggtctggctctgtttctctgtttggtgccctctatcgatcgtcgtgaggcttgggatgggcccagattgtgagcagcatgggtgccaaggccagggcaggagctggcatggggcctgtgtgggccattgtggtaggaagcctggcagtcgactggcccagaggatcccaggctgctttccttcttgaggctggtggcaggagggctgctgacggaaggctgtttctggtagtgatggtgaaatctggccaaggatgccgtctggaggcaggtagcagcttggctgtgagtggcagctgtcaggcatgtgcaagtctgcctgggcgaacagaggcaggcaaggacaggctgggcaattcatgcagctgaagccggaccaatgccgcttgatcacaatctggatggttggacccaggcggggccagccagccttcttgcgccgccgttatcactgcatctgccgctctggcccaagcccacatgggagggtcctgggaaggagagactcggaggaagaagangnagggaattccgggcaatggctctccttccagcgtggcccctcagaagcagaggcaagtcatcttcctgagccgttggggccgctcctccttaaagaaaatggtccgaattttcctttacataccctggaacctggtttttaccttttccggtttttgaaagaccaattttggtgtccttgaacggtggccccttggcaaaaatccccctaattgggtattataaatggccctgggggcgccctctaataagaaaaggcgt

SEQ ID NO: 370816 - DNA, 1488 bp, Homo Sapiens
  misc_feature (868)..(868): n is a, c, g, or t
  misc_feature (1062)..(1070): n is a, c, g, or t
gttttggatcctcatttggccaagcacttagcgcattttggaattgatatgcttcatatgcatgggacagagaatgggctccaggacaatgacatcaagctgagggtcagtgagtgggaagtgatccaggagtcgggcacgaaactgaagccaatgtatggtcctggctacacgggtctgaagaacctgggcaacagctgctatctcagctctgtcatgcaggccatcttcagcatcccagaattccagagagcgtatgtaggaaaccttcccagaatatttgactactcgcctttagatccaacacaagatttcaacacacagatgactaagttaggacatggccttctctcaggccagtattcaaagcctccggtgaaatctgaactcattgaacaggtgatgaaggaggagcacaagccacagcagaacgggatctctccgcgcatgtttaaggcctttgtaagcaagagccacccggaattctcctctaacaggcagcaagatgcccaggaattcttcttgcacctggtgaatctagtagagaggaaccgcatcggctcagaaaacccaagcgatgtttttcgttttttggtggaagaacgcattcagtgctgtcagacccggaaagtccgctacacggagaagggtggattacctgatgcagttacctgtgggccatggaggcggcaaccaacaagggatgaactgatcgcttattgaactaacgagaagggaagcagaagcaaacagaagaccccttcctgagttggtacgtgccaagataccatttagtgcctgccttcaggccttctctgaaccagaaaatgttgatgatttctggagcagtgccctacaagcaaagtcntgcgggtgtgaaaacatctcgctttgcttcattccctgaatacttggtagtgcagataaagaagttcacttttggtcttgactgggttcccaaaaaatttgatgtttctattgatatgccagacctacttgatatcaaccatctccgaaccagggggttacagcccaggaaaggaaaaaacttccacacatcannnnnnnnnatagtcctttcctgaagacctcaaaagatcgccctgaggaaccatttgatagacccatcaaacctcgatgactcctcagtgatgcccctggcccacatggcttcccccccggaatcctgtccaaggctgtcgaacttccctggacaactggccgccccagggggcctttacccggaccacttgctctcctgagctagcaagcattcggcttaccccctaccccttcaccggttctgcccggacaaccattccatcgtcttcccacgttccccgctagggtcgtgactgcatatccccgcctttctgcggcacccgccgttcacaccaccaccaagcatcaccctataccacctccccccgcttcgcgtagtcctgccaaacccgctcccccagttgcgcaaatataacagttatagca

SEQ ID NO: 370817 - DNA, 818 bp, Homo Sapiens
gttccaggaccctccccaggaggcattacagttaacctcccaaagggcttggaacccatccgacctgttgctggagggggggcgaccatgaagtgggaaccctgagggacattgtcaattccctaggtgctttccagctgcagggatgacagggtgccaaaattactacgctgcatctcaggaaccgtagactgaggcaacttgtcaaaggcttcctctgtataaaggcgataacattttcccgagcgactacgaccaccacgtcctgctcgctgattagctgatgcctgggagactggcaccaccaccaagcattcaatagctgtcctgggattgtaggctcggagtttcacaaagccacagtcgatcacatacacaatgccgctgattgtgatagaggtttctgccacattggtggccactatcacctttctgacactgcgtgacaccctttcaaacactttcatttgctcaaaggaaggcagtcctgcatacatggggagaactcggaggtgtctcttcatcccagtgcgagctagtgctcgagcctgctcgatgagcatcgacacaacagtttctacctcttcctggccagtaagaaatgctaaaacgtctccgtctccctctgtctggtgaattttcaccacagtttcgacagttgatttgatataatctggaacaggactttgtagataaaagatatccaccggaaatgttctcccttccactgtaaggatcacacatgtatcccttgctggatcactggtttcattttgattaaagaaatcccggaatttgtctgcatccagagtctcgtg

SEQ ID NO: 370818 - DNA, 922 bp, Homo Sapiens
cttggggaccgaaggactgtcattgacaaatgctctccacccctagagttcttggatgactctgactctcatttagaaatccaaaagcataaagatagggaggtggtgatggagcacccctcttctggaagtgactggtctgatgttgaggagatctccacagtcagattctctcaggaggaacctgtctccctgaaaccttcagccgttccggagccttcttccttcaccaccgactatgtcatgtaccctcctcatttgtacagtagtccttggtgtgactacgccagctattggaccagcagccccaagccttctagctacccctccacaggcagcagcagcaacgatgcagcccaggttgggaagagcagccggagccgcatgagtgattattcccccaactctacagggagtgtccaaaacacctccagagacatggaggcctcagaggaaggctggtcccagaattctcgttcatttcgcttctccagaagctcagaagaaagagaggtcgaaggagaaaagaacatgccaagaggagatgcctccgcctccttgtggaggacacgcatccagctccctgccaaagagccacctggagccaagcctagaggagggcttctattgacactcattgtcacctggacatgctctattccaagcatatctttctcaagggaccatttacaaagttcagaaaaatttacacgcacctccttccctaaaggaatctcaagggctgcatctctgactgctgtgatccccgcaccctgacagattgcctatgggaggacctgctgaaagaagatctggtctggggggcctttgggctgtcaccctcatttttgcacgtttactaccgggagaagtcaaggaaagaaaatcttttgccagaccttaaaggcaccctaagggctgg

SEQ ID NO: 370819 - DNA, 970 bp, Homo Sapiens
  misc_feature (72)..(115): n is a, c, g, or t
  misc_feature (245)..(255): n is a, c, g, or t
  misc_feature (288)..(288): n is a, c, g, or t
  misc_feature (322)..(402): n is a, c, g, or t
  misc_feature (453)..(501): n is a, c, g, or t
  misc_feature (599)..(609): n is a, c, g, or t
tatcctggctcccccgctcccgccggtttgttcctccccaggcaccaccaccagttcccgccgggaaagggnnnnnnnnnnnnnnnnnnnnnnnnnnnnnnnnnnnnnnnnnnnngggttgtcctcctgtttccctcccccccttttcccacttgttggctccctgttctcccccgagggtgggctagtttgccccatcgttcgttgggaccaaccctttttcctccctatttgttttgttgttnnnnnnnnnnntggggtggtcgccgcggtaggtccccttggtgntttgtgggtttttgggcctacccttcatccggcnnnnnnnnnnnnnnnnnnnnnnnnnnnnnnnnnnnnnnnnnnnnnnnnnnnnnnnnnnnnnnnnnnnnnnnnnnnnnnnnngttgcctcccgatggttctggacattcaggggagcgatccaccccctcccnnnnnnnnnnnnnnnnnnnnnnnnnnnnnnnnnnnnnnnnnnnnnnnnngtgttccgttgtgtggtgtcttgttgctgcctgccgctgtgttcccagcccgtgagcccaggaacccacccaagaggccatgccccaattgggtgcannnnnnnnnnnatcaggctgctgttccctcgccgcaaacagcccatctccacctgccagtcactgcccccagcccctggggcttgcaggtgactcgtggggagccagcccaggcagataacctctggcacaggacgaggggatgaggaaggcacctggcaggacaagggcctacctgaaaaatacaccaggaagctggcctgctgcacaggcccaggcagatctggggcccctgtgctggcaaatctcatcttagcctctgacagggaacggggcagcatcaggcctccacagccaggcaaaaggggaaggccacgagccccaccaagcacaagggttcagactgccttcaacccttaaggggcactttttc

SEQ ID NO: 370820 - DNA, 541 bp, Homo Sapiens
ggagagacccccttcagatgtgaggaacgctgtgctgccttccccatggcctcatctttttctgactgtaacatcattcagactacagagaagccatctgtgtgtaatcagtgtggaaaatctttcagctgttgtaagctcatacaccagagaacacacactggagaaaagcccttcgaatgtactcagtgtgggaaatcttctagccagagctatgaccttgtcatacatcagaggacacacactggagagaagccctatgagtgtgacctgtgtgggaaatccttcacccagagatccaaacttattacacatcagcgaattcacactggagaaaaaccgtatcagtgtattgaatgcagaaaatccttcaggtggaactctaacctcattgtacatcagagaattcatactggagagaaaccgtatgagtgcactcactgtggaaagtccttcagccaaagctatgagttagttacacataaaagaacgcacactggagaaaaacccttcaaatgtaccagtgtggagagaggggacc

SEQ ID NO: 370821 - DNA, 850 bp, Homo Sapiens
  misc_feature (35)..(35): n is a, c, g, or t
  misc_feature (651)..(693): n is a, c, g, or t
cgtggcaattcggacgaggaagattttatttttanaggagattgaagccatagaactcatattgacactcagctgttttacaaaagcttttcattatctgaagacaaaaccgaaaaagccaaaattaccattgcttcctccagcttgtcagaaacctgtggctgaatccgcagggatgtcaacgtcaatatcacaggaacacacattcggcacctagaaggcacgtgggcaaagtaatcatcgttcaggcccaacccttaggtttaaaaagtcaggttgtccatcccattgggttcactgagtgaaggcacataaagcaattgaggaggaggaggaacccctcgtccccctaggagcagacccaagcttgtggcaccaggcatctgatggtgccaggaaagccactggaattgtcacacggcgagcacagagggccggccaccagtcctcgatgcttctgaaccctgaagcccgatgacatcttacgaggtggacgttggactgttcatgcgcatcgggtgtcagtgactcatggagaagaaatggggtaaatttttagtgatgttgctaatcattgaattctgttctctattaaattaagaaaatgttccaaaagccataagcctgaagattggccctgtgcacgcacgnnnnnnnnnnnnnnnnnnnnnnnnnnnnnnnnnnnnnnnnnnngaaggagagagagagaaaactgatggggaaaacaagctgtgtcttcttaactgcccaagtgaaaagcaaccaagtccaggaaattacaatagctgttaaggaaaggaaataatggtacagatctttttctgtctatcaaaactatttgatccaagtg

SEQ ID NO: 370822 - DNA, 1049 bp, Homo Sapiens
tcccagctctgtgctcgcgcccccagcgcgccagtcccggggctgcagggagcgcagcgcgcgcggcccgggccccggccaccggacgccctaccggacacgaccctccctggagcttggacaactgcccacctcggacgctgcaccggacactgccccccacagggctggacactccaacggacactacttcccagctccggacattgctccctcctctcccggggccctggacgcttttccccctcccccctccgggggcccagacactgagcccccctcagcgtctggctagcgtccccttgcaccccagcccaggacactgcctcctccctgtcctcttctcccttctgctcctcccacctcatctttcccctgctcgggtcggagccccgccagttcctccgaccccctactgctcggccgcggctgcccgcgcccccatccgcagctcctcgcccggatgcctctccccgggggactatggtggcttctctgctgccgtcgaggcttcactcttctgcaccgggactacgggcacggcggaacttagccggggcacggggacgaggcacgaaggaacaggaaaacctttgagctgcggaccccccgagtccacccggccggcggcagggctcccctggaaagcgacggctggactcagccagtgagcgaacggggccttgtctccaaaagggctgcaacacccggcgaaggaaaatttggaagcccccttccccgggacaaaaggcctggccagagaggaatcaccccggaacaccccttgtgggaaaaggctggccctgttaataggcgaagttcaccgccgaaggacggggggcaccggttcactggggttgtccccttctctccccgcaagcctggaatcttgtaggccccaacccggggagaaatctcccgccgggatatccggtttgaggcccatccagacggcggaaataagggtgtaacgcggcgccggtcactcgcggagaagcacttcccagggagctcccccgagaaaacccttggggcgcctccgtagtacc

SEQ ID NO: 370823 - DNA, 629 bp, Homo Sapiens
  misc_feature (148)..(148): n is a, c, g, or t
tgaaaagggagaaaggtttcaattctttttactaatgggcaaaccaaagatccttccatgataagggccctgcctttttctttcaaggtccatgggcccaccatcttccgtccccatgctccatgctccagaagtactgagcagcctncagtcctctcacacaccccatggtatcccactcccccacattgggaatatgctgttcctttggcgtgaaataccttctttcctacctctactcacccttgaagagctaccacatttaactcctcaacggagcctttcctcactcctcagtgatcactccgacctcagaccttctgtacacttggtaaatactcaagctactctcacacacactgaaattaatgttgtacacgcttaagttccttacaagacaaagcccatgtctttctcatccacttatgtccagattctaaaacaatgtttggcaaatagtaagcatcaataaacgttactgagtgaaggaatgaacatacactttctagtccagctttgtgtctgtttcctgttcatagtcagctggtacaactgtacagtattttacagtttccaaacattttcactgtgtcattaaattcatgtgtttggccaggaaagcttgctca

SEQ ID NO: 370824 - DNA, 847 bp, Homo Sapiens
  misc_feature (783)..(792): n is a, c, g, or t
agaaaattccgtccacaggaccacatgaagcaaaatctctaagctaagaactcgtgagagcctgccatgcccatttcatggccttgcacacacacccacccacacaccattcagaacatgtacttttgccaacctttggtaatggttttttgattctatgcactaattttctttgtccaaaacatttactctaccatatgtctgggaatgtttatcctttctacagtaatggtgaaaggatcatatctagctaaaagcaagaacacccattctcctgaatgcagtgagtaattgggaatcacaaggaacattctggcacccaactgtgcccatcttagttttcatgagttttccccactctgaagctgtaacccagaaggcacatccattcacattttttaccgcactgtggattcatagtgtggggccctgttattccaataccctccttaaggacatgtgaagcatttggcccagttggctcccaacgaacattttaatttaatgtagcgaagaaagacaattctagatcagagctacaagttcactttctgtctctggaaatctccatttagggcagtagttcttataatgtggaagctccctccctaaggcctactcaatccagagcctgtgggggaactgggccaaagaaatatgcatttcttggcaaaaaaactccttcagcgcccaccttcctgaatcagcacccccaaagggccctaaaaaaccctcgttcaaaaaaacccctcggaataccctaaatggcgcaaatcctcaacnnnnnnnnnnccacacaaccttccccccaaaaaggtgggaaagggacttcaattctccacccttc

SEQ ID NO: 370825 - DNA, 872 bp, Homo Sapiens
  misc_feature (143)..(283): n is a, c, g, or t
  misc_feature (817)..(817): n is a, c, g, or t
gcccacagaccagcataacagtggtcttgggagaccaagaacgttcaattcagcaaccacccagaccttgctagcagggaaagaggacagtctttgggatcaggagacccgggttaaaatgtaagttctatacctactggttnnnnnnnnnnnnnnnnnnnnnnnnnnnnnnnnnnnnnnnnnnnnnnnnnnnnnnnnnnnnnnnnnnnnnnnnnnnnnnnnnnnnnnnnnnnnnnnnnnnnnnnnnnnnnnnnnnnnnnnnnnnnnnnnnnnnnnnnnnnnnaggaacagagcagccttgtttggagactagacatttcccattgaagtcaggctaccaagaggcatatttattttccagcaggaaggcagctggggatgggccggttacatccatttgatgtggctagagcatcccagctactcaccacaacccctcctccaatattcacttcataagaacctgtgggaatccctgcaacatttaccaccttctccaaccctggtgacccattcttagacaagcttggctaaataattcccttcctgccatcctcacaaccagtgaggtcaccttggtttgagctgggttcattttttggagttaatgtcatttttgaatcacatttattgaggaaagaaaggtgggggtagatgataccattggttggacttcagttgccatatttaaactttcatttccaaacctttcttttgattttacgtttatgtctatgcttattacgtagccttcacagggatccaattgctgggctgaaatttttgagctttgactgaaagaatttggcttttgggntgggcctttacctgtggttgggaaactcagccgtggcattgcagatgggccagtg

SEQ ID NO: 370826 - DNA, 295 bp, Homo Sapiens
  misc_feature (113)..(148): n is a, c, g, or t
agaacagaacaacaagaaaacaaaacaccaaaaaaatgtataatcactatagggcgctaggttgtgcagcgaacgacgagcgcagcgaagtcagtgagcgaggaagcggcagnnnnnnnnnnnnnnnnnnnnnnnnnnnnnnnnnnnnagtcgacggtaccggacatatgcccgggaattcggccattactggatctatcaacaggagtccaagcgagctcgatatcaaattacgccccgccctgaagatcggaatgaataacagagagataaacaaggacaagatctgtaaata

SEQ ID NO: 370827 - DNA, 918 bp, Homo Sapiens
  misc_feature (65)..(100): n is a, c, g, or t
  misc_feature (201)..(209): n is a, c, g, or t
ggatatatatggcgctacgcttgagcgaagacgagcgcaggagtcagtgagcgaggaagcggcgnnnnnnnnnnnnnnnnnnnnnnnnnnnnnnnnnnnnagtcgaggtaccggacatatgcccgggaattcggcattatggccgggtgtctcaggcaggaagtcagtctatatctctctcaagttcttattgtaggtcannnnnnnnncagcacagctctaatttttaaatatttggtataacagcttctggcatgtgacctagttaatgttgaaaattaactgatgaaaaccctgtgtagatctgctaaacttctctataaatggctagaaatatacagagcaatgagatatagaaaacaccttagctgtgtgggttattaatagagctctaattttaactgtgaaatcatggagtttctttaaatgttttcctagagtgtcggttatcatgaacattagaaatagcattattccttttcttctaccacatgtcttgaacattcacatgggttaaagaagatggaaactgatactatgacaatcaagctgctttctgactttcataattttctttatatggtggatagcatttgaaggtgaccgtgattctgtaggaagagctgtaatcaatatttttcaaactctaagagtacagaggttagtaagatttctttcttttttcacttttgtgttacgtcaagtagcttattaacgaccaacgattcatgacttcaattcttactctcagttgatacccaggttatatcatgtgcttaaatttggattcattccgtccttgaggttaagactggacctgggttaacttcatcactgagtttgcaagtcggataggtgcacttcaagacccaaagctatggactttctcaatccacttgtttggtgaacaacaacata

SEQ ID NO: 370828 - DNA, 156 bp, Homo Sapiens
gtaaagagcagtcaggtgcacctgtgaggaagtcaggtgccgtgactcagactcgagtaaacacgaagtatgagttcaacccagaaaactgctctctcttgggttttgcaaacttgtcagaaataaatcactaactttagaaagctttggtgcaag

SEQ ID NO: 370829 - DNA, 784 bp, Homo Sapiens
  misc_feature (79)..(114): n is a, c, g, or t
  misc_feature (152)..(249): n is a, c, g, or t
tggactcatagggcgctaagctttcggcctgttaagccgaacgacgagcgcagcgagtagtgagcgaggaagcggccgnnnnnnnnnnnnnnnnnnnnnnnnnnnnnnnnnnnnagtcgacggtaccggacatatgcccgggaattcggccnnnnnnnnnnnnnnnnnnnnnnnnnnnnnnnnnnnnnnnnnnnnnnnnnnnnnnnnnnnnnnnnnnnnnnnnnnnnnnnnnnnnnnnnnnnnnnnnnntgctgctgattgtgtatcagccaatctaggtagtggtcaagtgcggctcagacatgcgtctcatcaaaatattccacacaccttccaactccaagtttccacccacgccatgccaccgttcctgccttgtacaagtgaagcaagcaatctctccgtggtttcgaccctaggaggtggaaggtccctggccctggctccatgtggcacgtgctctggtccttctccagcagcaggcttgtcagaccctcccagtccttcagctgagtccctgcacagtcccacaggttgtctactaagtaagcagcgtggtcgtggagctggggaaggaggtgcatggggatttagtgatggcatgttaaaaataccctaggaagtggttactgattaaatatcgctctccttcctacagtgtacacccccatccttctccatttgtctttttcaatcgggaagcaacagggtctccataagtgtggcccaacgttggtctcaaaaccctggggcacaaagggatcctccaacctaaggccccaag

SEQ ID NO: 370830 - DNA, 915 bp, Homo Sapiens
  misc_feature (50)..(219): n is a, c, g, or t
agtcgacggtaccggacatatgcccgggaattcggccattacggccgggnnnnnnnnnnnnnnnnnnnnnnnnnnnnnnnnnnnnnnnnnnnnnnnnnnnnnnnnnnnnnnnnnnnnnnnnnnnnnnnnnnnnnnnnnnnnnnnnnnnnnnnnnnnnnnnnnnnnnnnnnnnnnnnnnnnnnnnnnnnnnnnnnnnnnnnnnnnnnnnnnnnnnnnnnngcaagcatataataggttaatccagatggagttaggagggtttataagggcagacacatcctagtaaagaggaaataggcaaactaatgctgttttagtgtaataaggaatgcttataatgatgaactttagtcataaagaaaaggtgaaattatattcagtaacccatgttaggaaagcagaaaactatttaatatgcttggaaagattccaaccagagttaactgaataaaaaccttggacatttgaagagaaaagcatttagttctatctaatttcaatatgcacgtgaattagttcatgttactctaacaatgtattcttactgtccttttttatgaaataggaaagtaaaactgaaagaactatttctggtgtttttaaaaactaggccttttctaatatttgatatctaatttaaagttcgatcatatgttactatgccttttggaacaattaatctaacccgaaaaatatggtgtattaaatttccaggaatccttccttattttaacgggctgtcccttcacaatgtgttttttacctctgttgtcccatatggtgtgaattggcttcgggagaaaaaatttgcccccgaggcccaggagaattccgctcacaatccggcggggggtggaacaggggcccgggggaaaccacccccctttgtgtgagatgggccgtcatacacacaac

SEQ ID NO: 370831 - DNA, 365 bp, Homo Sapiens
  misc_feature (112)..(112): n is a, c, g, or t
tgatatcaatatgttcccctcacacccatttccatgacatcctgaacgtctcctcgatctgtattgatatccgaccactccgcagttcacacatatactctcatatcagctntcacggtgcacctgcccatttccctacggtcttttcagatacatttctcgtctccccatcctggtgattccccagattaattacactgccattgcattttcccccctctccatccaatttaacgctgcacatgtctatctctccatcagtcacatcttttatgcttattcgcagatctcatattcactctctatactgtcagggccggggcgtaattgccgaattcccgggcatatgtccggtaccgtcgact

SEQ ID NO: 370832 - DNA, 854 bp, Homo Sapiens
  misc_feature (827)..(827): n is a, c, g, or t
ttagaggcgaaaaacgggcgcatcatacagtaatcgagaagcggtcgcataacattcgatatagcttaccatagtactaagattatcagctcagaacggtacccggacagtatgtcccgggaattcgggcacttactggtccgggtaccgtgctgagctgatagatgaaagccactaaggtatagtctagatagattgtttatgcggacctgaaacctcggcatcacctggtcatcgactagtgcagccttgtgctcggggcccgctcgtagtgtatgacgacacattcatagtgctctagatatgatgtagttattaccgggccgtgcggtttaaaaagtgtattggcaaatatgaacaaccactgctttcagagtggttatatggtaatttttgaagcaggagagtaacatttgtatttgcacctgcgtatggatatgaattatggtatacttggcaaatgcttttcttttacctgtgaaaattctgaaaggctgggtccaagctacattgcataccaaattggtgctcttatatattattgggcatcgtgtcctttttaatcaaatagcatggtttagttttattatagtagctttggctggtaagaatgtcacattgcttatctttaatggtacttgaattcttaatcatgcttttaacattgtatttaacaaatcatttcgtattaggttccattaaaatggtcattccttttgaaaaggcaagggatttccactttcagaatttgaaaatgaaagtagcatgtttatctaaaggcagaaaatagttcggacttggtattatgaaaataagtaatggtttcnggagaggatttgtttagatttgcacag

SEQ ID NO: 370833 - DNA, 1002 bp, Homo Sapiens
ttatgccgaacgacgagcgcaggatgcagtgtgagctggaggaagcggccgcatagacttcgtatagcatacattatacagaaggttatcagtcgaacggattagcggacatatgcccggggaattcgcgtcgattacggccggagaaggattccactttccctatgattaccctaacctgcgttacagtccagctgcgtgtatgaccgagaggttccagtggacgcttggtagccatttctatataagactacgatccttatccatgtcatgggatcttcagggcaggaaggtgtccgacaacgcccatgtggtagtctggtgtccgtcgtctcctttgtatacaaccagctatctcttctttgcctgtatcctggatgagtagtctactggccatcttccttaataccttctgcggtacgccgaattcaaccaccgacaaacacgagcctcagctccattgacttgctgtggcttgaagaggtggtgcccatgatgggagtacaggtggggccgtgaggcctggaccaggactagagaagcttgagcacccccgagttgctgctcattgaattcctccactttcttatatagcctcagatgctgtgatgtctggaccttgtggatatttgccctgggaatttctactttactttctaccgtaattccttctccgtacccaggtcttctctgagagaagctataatttaatctgtgaggaactaaactgacagggagaattgcgtgctaaataccgggggacccacaggcttggtccaagttgaagcaaggtttcgactcctttctgagaaggtccgggtgtcctagaaatctcaacctttcttcccttgctaagcatgaagttggcatttggccactggggcctgttgactcgaacatggggctctgtacaacgccgaaaatctgagggggcccttttttctggcaaatacttcttggagcccccttcggccgattcgtctcccttagatcgcgtgtttt

SEQ ID NO: 370834 - DNA, 769 bp, Homo Sapiens
  misc_feature (50)..(164): n is a, c, g, or t
agtcgacggtaccggacatatgcccgggaattcggccattacggccgggnnnnnnnnnnnnnnnnnnnnnnnnnnnnnnnnnnnnnnnnnnnnnnnnnnnnnnnnnnnnnnnnnnnnnnnnnnnnnnnnnnnnnnnnnnnnnnnnnnnnnnnnnnnnnnnnnnntttttttcccagggaattttttaaacgtggatggttaaacacaggccattattaaatactaaatttacattaaacttaaatgattcagaaacaaagttactaatattaaaaactcgtaactttctaattaatttactaggttttatggtctatgctctggaggttacttatgtctatggtatgtgtatagaagaaatactatgtatcagggggcgggggtacatctctttcccaattctacatttcaaggacatcacattgggtagatggaaattggactgggtagcagtatggcagtgttggaaataagcaaacgctacaaatctgggcttgatttattgtggtggtttattgtccagacgtgagaaagtgatggacgaaaatgttaatgatgcagcttaaacttgagatgttttgactgtagctgtgacattgtgaatagcacaaataattgagcaaataatcttcccaagtattggaaaactattatcagattcagcaataaagtcattcatatggttgataaatgagtgaagttctcgcatacattctgttgttttactttcgtcttacttattaaagcaaataaaaatatcaaacaatga

SEQ ID NO: 370835 - DNA, 375 bp, Homo Sapiens
  misc_feature (22)..(22): n is a, c, g, or t
  misc_feature (35)..(35): n is a, c, g, or t
  misc_feature (49)..(49): n is a, c, g, or t
  misc_feature (60)..(60): n is a, c, g, or t
ccaaggaccaggttccaatttnataagcccccacnttgtgaacccccantgtgccttttncgggtgttttatgcaagttgacctactaatgactaatgagaacaataatgaatgcattgttgctgcacttagtgtaatgtggtgtggttttgcacttaaaagaggtattcatatgctctagttgtaaatgttcatgaaaatccacttctctactagtcgaactgcttttagtgtctcaccagtggttttacatctgcagagttttgagggctgtgctgacctttgagaggatttgaaattgcttcatattgtgatcctaaattttatattcactatattccctaaagtataccttaataaatattttatgatcag

SEQ ID NO: 370836 - DNA, 670 bp, Homo Sapiens
  misc_feature (1)..(1): n is a, c, g, or t
  misc_feature (489)..(574): n is a, c, g, or t
nctctgtctccaaaaaaaagtttctgaaggtaaaagatatactaaaggatatacatatactgcctcttctatgatgtttcatttgacctacaccatcagcatcttcaggaaacagtatgaaactaatttcacattaaatgctgcaaacgtctgcaattctccagtttttagtttgcacgtaaggattcgtaggattgatttcagattgacagatggctgtagtaacaaaaaaatgaattgccttggagaactcgagttattttaggcctgcctttgacacttttatgcacttaaatcactgccaatttagtctaactcctcaaccatctgtggtatggacttctcagtcctcctaattggtatgtcttttatctatcccagagtcagtagtcctttaaggatgtcaaactgtaaattcgataagaatgtggatttacttcatctctaggacagagtaaacaccttatttcaagcacgacacacacaccnnnnnnnnnnnnnnnnnnnnnnnnnnnnnnnnnnnnnnnnnnnnnnnnnnnnnnnnnnnnnnnnnnnnnnnnnnnnnnnnnnnnnngtcgggaccacagaacaaaaaatcggggggggcgcagaaaacggtccgaacagggagggggccacaaaggggaagacaaacggggggaaaggaccc

SEQ ID NO: 370837 - DNA, 153 bp, Homo Sapiens
  misc_feature (41)..(52): n is a, c, g, or t
ttgcactccatcctgagccacaagagcaaaactccgtctcnnnnnnnnnnnngaagaaggtggatctccaaccaggccagagaagattctcacagaaggtttggaacctctaagaaataaatgggttgggtaataaatggcttctggtcagat

SEQ ID NO: 370838 - DNA, 375 bp, Homo Sapiens
  misc_feature (48)..(90): n is a, c, g, or t
agtcgacggtaccggacatatgcccgggaattcggccattacgggcgnnnnnnnnnnnnnnnnnnnnnnnnnnnnnnnnnnnnnnnnnnntgagccacttagtatttgtaaccataagagaaagtatattttaacagcattacatttcatgccaattgacaagtttggccaattttaataagaaactaagctttatgtaatgtaacaccgtaatttatgaatttgttcattgtcactgcctttattcatgaaactgtcaaatagagtgtctttcaagggttgcaggatcttagagatagaaagtaccttggtgatcatctccagcctaaatttcatcatcccttctatggtatccccaacaaattatcatccaac

SEQ ID NO: 370839 - DNA, 752 bp, Homo Sapiens
gggtttgtactacagaaagtgccagttaatttccaaggaagatgttactcatgatacgaggcttttctgtttgatgctgccaccaagcactcatcttcaagtgcccattgggcaacatgtttacctcaagctacctattacaggtacagaaatagtaaagccatatacacctgtatctggttccttactctcagagttcaaggaaccagttcttcccaacaataaatacatctactttttgataaaaatctatcccactggactcttcacaccagagcttgatcgtcttcagactggagatattgtttctgtaagcagtcctgagggcaattttacaaatatccacagttccacagaattagaagatctcttttggtgggcagctggaacaggcttcacaccaatggttaaaatactgaattatgctttgactgatatacccagtctcaggaaagtgaagctgatgttcttcaataaaacagaagatgatataatttggagaagccaattggagaaattagcatttaaagataaaagactggatgttgaatttgttctctcagcacctatttctgaatggaatggcaaacagggacatatttcaccagctcttctttctgaattttggaaaaggaattttggacaaatccaaagttctcgtctgcatttggtggaccagtgccatttacagaacaaaggagtaaggtttgctgcatggatctcaaccttttcccaaaaatggaaatcccatt

SEQ ID NO: 370840 - DNA, 1154 bp, Homo Sapiens
  misc_feature (394)..(394): n is a, c, g, or t
ctttctgtaagcactgtgcacatgataagaattattgtctggcatagtttttgttattgttgagcaaataagcttcaggtgcttttagaatcttaactcagtattttaaaggtgacacatttattaccatactattaatagtactgtaatgtttctttttaggtgtagagttaggagacaatcttgaaaaattaggtaagaaggaaattatgatggaaaatttcaaacatatataaagtaggcccagtagaatgttctgcgtactcatccccaccttcaacattgggcaactcatagccaattttgtttcatttctacactctcacctcccctttcttatgttatcgtaaagccaacatgtatttaatttccttcttcttgttttttttaaccnttttgggatatgtagagaatacttttgaatattccttttaaaaatccaattataagtactaaaaaagataggtgggtagttgagactaaaggactgttatgtgaatgagttattctctgacaggaactagcaggtaaacaggatattttatttctcaagattttcatatgatggtgaccaactgcattgcaaaagaatggtcacattccagggttgtaactagttctggaggcttagttacgcaagtgccggctctgtcatcttctacagggatgtgaccttacggaaaagtaaggaatctgaagcgtggcagatcactttgaagcttgcccagtttttgcatgttatcatgtaatagtgctaaaactttttgtcctccagctaggcaacataggtatgtaatttagactttgggaatactgtagagctgtgataaaccctgctttaagctacattcctgggatcgtaacatgtaatttagaagtcaaaatccacttagaagaaaagaattttaacgccggtaaatcagaacattggtgattacttttatcgatctttaaacttttccataattatgtcggtctcctaagacaatccaatattctaaccttagatgttactcggtaatatttactacgcggttatatcccaagcacgtgggtttattacaggtggcatcgggaccatccatgatttcttgtgccctagggcggcaccagaaaccgtcaccctttaccgtggggcgaggttctcctgtgcc

SEQ ID NO: 370841 - DNA, 994 bp, Homo Sapiens
  misc_feature (71)..(106): n is a, c, g, or t
  misc_feature (156)..(250): n is a, c, g, or t
aggcacgacgatagataaggctaggtgagagcgaacgacgagcgcacgagtagtgagcgaggaagcggcgnnnnnnnnnnnnnnnnnnnnnnnnnnnnnnnnnnnnaagtcgacggtaccggacatatgcccgggaattcggccattacggccggnnnnnnnnnnnnnnnnnnnnnnnnnnnnnnnnnnnnnnnnnnnnnnnnnnnnnnnnnnnnnnnnnnnnnnnnnnnnnnnnnnnnnnnnnnnnnnngtgtgagccaccgacctggcagaagccactaactaaaataggcacacatgacacagcatgtggttaatagctgtgtcttgaattatcctctaaataaccaaatttagttgtatgtattgtaaaggatatggcttcagaagctatctttgtctctgtcgatataactcttaagggcattcctgacccaagaaagactccttgcgtttgtaactgtggtctaatacccaaatgtgccctgttcttatggatacagtctcttgaagcatacctcaaagtcatagagagaatatggcatttgaaagaaatcgtttgcctgggatcatatgagttattttgtgaaacaacagctgacttttcagaaaaggagcaactacttttatatgctaaaaagtatttcataactttctgggaaaccttatttaggtataaatggtcatctttattattttttccaaaaaggtatattttaataattggtacaatttattataccagtttggtgaccaagaattggtaaagtgggtggtgtcataatcaaggatcctttaaaattatgccactacaggagtgtctcatttcagtcaattgtgcacggtaaacagtagcaaagatgcaattagcatgaaaaggggctcattttaggtgtttactgaataacctgttgaaacatatatcctaggtttctctattcaattgtctgtaagggattggcgggacggaaggcgaattgggggaaaaggttga

SEQ ID NO: 370842 - DNA, 838 bp, Homo Sapiens
gggaagtactcgcatgcacccatcttagctctgagacgacacaacctgaacggaaaatcttgcggctcctggcgccagcaggcctgtgtttggctccttcctgttctaattacccacttgaaaacctgaagacttgggctccaatccacttggcaatcagaccatctccttggcccatctgcctgcaactgcacacctccctttctggggctgcatttctttctcctgtatccagtcctcgggaagatcttacgatttgtacctgtctcaattactcccctatcacagaaaagtccaacctttactggcactgcactatgaaactcggtattccgtcctagactcagcaagagaaaaaccacagtatttgcaagagtggtcgaagacctgagtgctttattactgataattctttaaatagaaaaagtgaggtcctccccttgggttctggcagaatcagaaatcctggcactgcaaagacggccttggggaatctcagtaccaccttccctattaatttttggaaggaccccggttctaaaagggcacagcctgggggaccatacttggtcacagtcaggttggggcttcatggccctgagacctgtgacccacccgctccaaggggcaccccccgtgggctggggtccttattcccacctttccccttttgggttgttgggcacttgttcttgcgctttgcatttgggactttgttcccccggggggcaaaacacacgcccagttttagaaccaaacgccagctgcgcggggaacccttttccagggggcctagccccggtatcaaagaaaaatctttttcttgccctcccgcggg

SEQ ID NO: 370843 - DNA, 1106 bp, Homo Sapiens
  misc_feature (13)..(13): n is a, c, g, or t
  misc_feature (86)..(86): n is a, c, g, or t
  misc_feature (119)..(119): n is a, c, g, or t
  misc_feature (453)..(479): n is a, c, g, or t
aaaatttgagaanaaggaacaccgtagtggcacaccaaggcaaaaaagccaccctgaggtgctgattgcagaagctctggactgcnaatgcaggcgccctcatcaccagcacagatatncttgggcactaacccagagtccctgacgcagccttcagatggtcagggtcttcctcttcttcctgaacccttgggaaactcaacctctggagagtgcctactgttagaagctgaagggatgtcaaagtcatactgcagtgggacggaacgggtgaacctgatggctgatgggaagatctttgtgggaagcggcagcagtggaggcactgaagggctggttatgaactcagatatactcggtgctaccacagaggttctgattgaagattcagactctgccggaccttagtggacaggaagacttggggcatgggacagctcagactttgtattnnnnnnnnnnnnnnnnnnnnnnnnnnntctaaagcatttaaaatctagtgaaataactgaagggcctgctctttccattgtggatcacagcacacacatacatacaccctccacctccccatcccctgttctccctctgttgctccccttataaaattgatgttgtctttaccagaaaggtagacaaaaaagaagcagcagcagctcttaaagtgagggttattctcatactcggttccagccatcagcagacttcctgctcatcggcagatccccctttccaacctgtaactctgatgtgctctggatcagcttttaacttttaatcatatattactgtcttctaaatccctttctcctcctctactgctgccctatggttctggctcctaccccctgcggcacacttatcttcaaataccatagaattctaatctctgaaatcatagctctcccagtggctttttaaagaaacctggtccttcagcactaacaaaaatccctaccatagcctagggcctttttttggaagccctttttagggaaaaatggtaggttcctggaaactaatatgcctcttggagatctttacaggggtggaaacttaaaaaatttttaaaaggttaaggaagcttgtttccaaaatcttaaatt

SEQ ID NO: 370844 - DNA, 672 bp, Homo Sapiens
  misc_feature (102)..(116): n is a, c, g, or t
gggtatacctatgcaaacagcacaagttacagtgatacctatgtaaatcagaatcctaaaatgagatacttaatattttcattataattattttctaggttnnnnnnnnnnnnnnntatttaaattttaaacaaaggcatattactgaggcagaattcagtgcagatacagaagctggtactacaactggcatagtcaagaagactagagacagtatagtgcacatttaatgatgaatggcaattgcaatttactgcagcagagcaaaatggaaaagctgtttgttctattcaaaagtgttaaagatacatagtagataatacttaagacaatatttaagacatgtaatttttagcaaccatttagtgagtgtaagtcaaaaaggaatacacaaaattactcatatgaactgcgagtgaaatttctaacaaaacaatttaaacaacttttaaaagggtctgagtttgtaaacctggcaagctataaaaatagcttcttacacatgcatctacaaagaaccttaaatggagagatgaagaaattatcactttatcgtattttagaaaattatggaggaaaaagaccttaaaaagacatttcctgaaaaaacttgaaaacgtccaatggaacccctttaaacaatttttgctccttgggatattacctggaacc

SEQ ID NO: 370845 - DNA, 766 bp, Homo Sapiens
  misc_feature (157)..(157): n is a, c, g, or t
  misc_feature (220)..(220): n is a, c, g, or t
actgttttctgtgcacattaaaggaagttgaaaaggaatccctttttgtggaggctgggattcttcccttgaagaggaaaggggaatgggcttaagggacattctgaaattttaattatcaaaacaaaccaaacccaacccaaattccctgtgccanaagtgccaaaagagtctccctccctctgcaaagcttggtacctgtgtgaaatgtcagtatttntagagagagatgttttagaggcaggaggcaactgaccaagtaaggatattttgtaacatttttcccctctggaaaagcagaaaagaatgaatatcagctaaccgtaatatttagaatttagcatctttccttgggcatttaataaatagaaaacctatctgtggcaaccaaaagtacggtattctaatcaatgcatttgaaaaagtccagcaaaagccccacattaattccctattacgccttgtttccttggttcaatcctcagcactttccagcggctcttgtgcggcgattctgtcttggacttatttctgtgtcttgaagatcgtttttatgtgatgcttcccaggcttcctcttcttctaaaagatctcttatgatgtctgaactggaactattgcatgaatctgattctgatgaagaaagaacttcttgaatatcaatacagctagaagaatcctcttctctgtcaggttccaattcctctggggagtccagctttgattgagaaaagtggtttgttactgaggtcatattatcttccag

SEQ ID NO: 370846 - DNA, 747 bp, Homo Sapiens
ggggtgaatattcttctgatctataatacaaagctatgtaatgttacctcttgactcgcttttgaaaggaagacaattgttaactagatatttgagttttttcccctcagaattatgtgaatttctgatatatggctttagatactgtgaatctgttttccatttagtcagttatctgcttaaattgttcagaactatatcctaacgagcaattagttctgatggttctcccagtcatgagtgtgcatgtgtgcaagcatgttttgatcctgatgctacctttgctaaaaatggccatagattaggaactagctatgtttttagaatcaaagatgaaccggtaagctgtctcatgtaccaaacgtgaaatttacagtgtttacaaatgtctggaattttgcactgccatagggaatgttaaggttacttggctggaatttatcagacttgtgagtaaacaagttgaagtttagcagatgagggggaatattgaggcccctaaggctaaacaaaataatcagtatctgagatagtggctaatgtggctccccaggcctaatttgggaacagtttttcctgattgctttgagaagtactttcttttgacagaaattttcattctgcttggcattgctatattctccctttataggagccattggatttctttccttttgtgggaaatgtccccatttagcatttttcagatctttttgatgtgcactaaatgcccatttattggtaaaa

SEQ ID NO: 370847 - DNA, 539 bp, Homo Sapiens
  misc_feature (354)..(467): n is a, c, g, or t
atcataaattttattaagggttactgtattgcttaccatatacaattgctacttaaattctctaatcttgctgcctgaattctttaaataaagttaacactgcttggtatagaccccagcacaacacaggataatgctcccagtactcccagtgacacaaacctgctagagaaaggaaaacgattatccatgatagtatgaggcaggaataaaattaggccatcttgccatagcaggcggtcttcttttggttctatgacacagaaggtggcttgatcacagcacaatttctttatcccaacttcctagcaatcaaagagtgtttctcttggtggagcacaggggctcacactnnnnnnnnnnnnnnnnnnnnnnnnnnnnnnnnnnnnnnnnnnnnnnnnnnnnnnnnnnnnnnnnnnnnnnnnnnnnnnnnnnnnnnnnnnnnnnnnnnnnnnnnnnnnnnnnnnctgagcacggtggtgcaaccctgtggtcccaagctacttgggaggctgagatgggaggatcacttaagccca

SEQ ID NO: 370848 - DNA, 922 bp, Homo Sapiens
  misc_feature (89)..(89): n is a, c, g, or t
  misc_feature (109)..(109): n is a, c, g, or t
  misc_feature (112)..(113): n is a, c, g, or t
  misc_feature (120)..(120): n is a, c, g, or t
  misc_feature (260)..(260): n is a, c, g, or t
  misc_feature (267)..(267): n is a, c, g, or t
  misc_feature (276)..(276): n is a, c, g, or t
  misc_feature (317)..(317): n is a, c, g, or t
  misc_feature (327)..(327): n is a, c, g, or t
  misc_feature (404)..(404): n is a, c, g, or t
acaggtcattggctgcttttttggttccctttttggtgaccatttacggcccggtaaaaatgcatgtttttcaacccccaaaaacccanactaaaacccaacccaaaangannccatgcntgggaattctgtgatgaatgtcccaaagtcagagcactctccggcacaatccctgtttgaaggggtctctccacttcccctttataaaaagccaccgaaataaaacaaagtattcttttcagtattttccacaggagcanccaaganaaaaggcanggagctctccattataggtcattaacgataataaggttttngctcaatacncagggttctttacagagaagttcccctaactgaggcactctggaataagtcactggcatttcctcaaagtttcaacnccagattattggggcctggagaccaatggaagtgggcagagggtcatgggagcagactgctgtttgtaaggtgcagtcaaaagattcagcagattggaagaaacaaacaaaatgccaccccctaccaggatccagtttcttctaaggccagttaatgccagggtcaaaactggcctaggtggccaaagaggggacccactctgcctctattgctttggaagtggcaagggtgcagttggcgtctctcttctcagtggctcacactttagacccctggtgcctgggctccattccctaactctgtagggcttcaggaagaggaaagcctgagactgggctacaggaagagggccagaaagggacagggatggacgaccaaaaggcggggcggggtggggggaagaggttgtgctatcagtatccttacagagggggagcagagtgcaaatttgcatcaatcatttataagctcttgccataggctgctgctactgagcatctcctcacacacttaaaaa

SEQ ID NO: 370849 - DNA, 681 bp, Homo Sapiens
  misc_feature (391)..(391): n is a, c, g, or t
atatgcaatctgaaaaaactagagacgctaagcctaaacaacaatcaccttagagagctgccgtctacctttgggcaactctctgccctcaagaccctgagcctctctgggaaccaactgggagcattacctccccaactttgtagcctacggcacctggatgtgatggatctctctaagaaccagattcgaagtatacctgactcagtgggagagctgcaagtcatcgaactcaacctcaaccagaatcagatatctcagatctcagtgaagatatcttgctgtccacgccttaaaattcttcgcctggaagagaattgtcttgagctcagcatgcttccccagagcatcctcagtgattcccagatctgtctgcttgctgtggaaggcnatctttttgaaataaagaaacttcgagaactggaaggctatgataagtacatggagaggttcacagccaccaagaagaagtttgcgtgaagttctccaggactatggaaaccttacaggatactgacttagaacctctgttggaatgtggctgagtcaaagcctcctgttgttgttaggggtatctacagtaaggagatgatacttcaggagattatatttcactcatgatcttttctcatttcagggctcttctcaaataagctaaaagaaaaagaatctgggcagaga

SEQ ID NO: 370850 - DNA, 344 bp, Homo Sapiens
ccttgttggaccctaattctgccaaggcctcttgattgtaaaccacacacctgctgcattgccaacagatcctgttccgtacctgtgtccaaaaacatttgtaaaaaccctttgagtttaatatttgtaatttttaatttccactcttttattactgatcttagcttaatacaatatttttatacaggattatttcttcagtatcctactgtgtgattttaaaaaaagatgcagcaaccttaatatatctccatatcttgtgctactgtgattgttcaagcaaaagtggagagaagaaaagctgctgcaaaagacaactgtgaaactgtgatattttataaaat

SEQ ID NO: 370851 - DNA, 2007 bp, Homo Sapiens
  misc_feature (621)..(621): n is a, c, g, or t
atagtggactcagtaaatctacccacacttcattcatctcagatccaaagccctaactctataggttttgtgcagaaaagagttaacatagcaggcctaaactgctatccttggagaggcctgattacagggttggccactggccggcatttgggaacttagattttggaggggctcccacaattaactgataagactggcttactgtgtctgaactgcttgtgcaaacaatatggcttatgctgaacacctgctttccttttgagagtcttgaattttgctatctgccagggaaagcctgcctagatgacctgtcctcagtaaaaactttgggcactgggtctgtagtgaccttgtccagtagacaactcattcacatgtcgtaacaaatcactgctaggggaattaagtgcatcctgtgtgattccattgggagaggactctggaaacttgtgcttgctttaccctagactttgtctcaggtgccttttccttttaccgatttttctttgtatcttttcactataataaatcaaaactataagtaagactatatgctgagtccactgagtcttcccagagaattacagaacctggcagtggtcttgggcacctctggcnacagtgggtataggaggttcagtaagtagccctccccctcactgccagtttcactctcaccctcctatgcccctctgtttaagcgacccaattccccgatctaatgttcagaatgtcaaaggcgtgtctcttcctgtaagcccctcactttatagtaaatggggtaaacttagataaattgctatgtggaaagcagaaataagtgtttattgaaagagttacttctcaaaggaacaagaaatagcactaatctttttcgagttcctttctaaactgcctgaacatcaaacctcccagggacaggaggacccagggtcaccacaaatgaaaacaaatgccagttgtactcacttcacagttctcacttattcccaactaccatggagtattctcactttctacaactgtgctactgtagaagttagtgttttaatactggtatatgctcggcttgaagactgaccaaatggatcaatacatttagccctttattgaaacctaagtttgttataagtgtaattatgtaacagtcatatttccaacctggttcccatggctgacttaacccaatccataatctggagcaagccttggctagtgtattttgagatgtccgttgtgtttcagctgccgttcctcactccgcctgcttctccaagcatggtacttcttgatgctcttcctccatgcaaagcgccagatgctaaacatgaaacaccaagacacagcatacatcgctactcccccagccttcacaaaccacttaggcgtgggggagaccatttcacagaaaaggaggcaagctcccacaccaatcctcactcctgtgaacagagccacaaagaggaagtccactacatctccagtgaaactgtgatagtgccctgtttcccggagaaaccagcgcatctgtagcaaggggttggtaagctcacttccaaagaggactgcattgacctctgtgccagactccccaagcacaagggccatgataatgcccaagatactcaatgtgtgatgagccagcatcaaggcaccctcagactgaaagtagacgcaccagcccaagtcgaagatgaagtagcccaaggtgagacacaggacatgaacttggagaggtgtattgggctgagcctgggtgggtaaaaggccaatgggccatcaatgaagccagagataagcggagaggcctatagagaggactccatgggtgaaggtgaccacggcggcagctccacgtcatagcttcggtgcttattcaggtggcagaaagaaatatagagcgagagccagccacacaggctgcacagcacctggcggagcgcaccgggaagcctcgggcgcccgggcgcccgcagctcccggcacggaacgcgccaacccgct

SEQ ID NO: 370852 - DNA, 462 bp, Homo Sapiens
ggcagggaaacatttctttatcttattaataagaaaatgaatattctctttgtccattctgaattttaaaaatctatttttttctatataatactgaaatatttaacaattcataaaaaacataagcatttacattaaaatacatccttaaatagagccctgtaatttttaccaggaaccttgtaaaatatgatgaatatacatgcatgaatattaaaaacaagaaagaccacttaacattcaaatagaaatgcagcattacataaaatataataaatatccaggatatcaaatccacaaattgatcactattctgatttagattctttgttccagttaagacttttactaatataatttattataataaccttatgagttaagcataactaatgtgaaaagagaattcaattaatcttactgctgaaataacacaaatttttgatattttgcaacatattt

SEQ ID NO: 370853 - DNA, 644 bp, Homo Sapiens
acttttcagataatctttacacggagttgttacaatgccacaaatcaaaaggattattccagtcccaccaacttaatctacgtgcaagataaaggacccagctggtacaggtgtaccagttttcttgagtttgctttacaaagcacaaagggacgaaggttttgcattggggtacaaaacagatttgcctcttgaggttaaattcagtattatgtgtataaagcatccctttggcaatagagtttgcagtatccccacaggactccacagtataggtttatgtagtaaaatctattaaacaaattctcttctacttgacacatctttgcagctacagttaatgagacacccttggaaacacctgcctccatgcctattgataatatagtatttggaagttagaagtcaacaaaaggcactttcatcattaaataaatgtcctctgtatgaagtaagattacatgacctagatctggttcaaatgctgtttgctcctcaatggacctgtaggtagtcaggggaactctgcagtttcgccttcagttcaaaatactcactcttcctttgttccacaacaattttactgtggttgccacctatcagtgacttcttacttttttggtctgctgtcgggctagtcgggg

SEQ ID NO: 370854 - DNA, 693 bp, Homo Sapiens
cagtggaatgcccacacatccaagacaggcaagttcatggagactaagggaacagtggtatcatgtctcccttctcccttgtgcttactacaagaatggcaggcagaattccctacttatttaaaatatcactgatgtctcactctttttctttatattcttatttattgatttgccacaaagtttaattcacctaagtgagacgtgcatatgatgtaactccactgtacagatacacagatctttacagaagaactatttttggcaacccctatgcccctgggtagggtccagaagtgaacaggcttggtgggggattgttttcacctcttggctactcagagtacctaaacctgtccttacttatggagagcatgtgtcacaccaagatggcagtaagctggcaactgcgaagacctgactgatgcccatttgggaagccaggcaagtgaaaatggaccgaagaaacagagatggctgtcttttatgcagggcttttccataaagaggttacactggggcaaccaagtatgtgtagaaagccagagctaaacttcagcttggcattcacagttttctcttcactgagctaataggcccagagtttcgggcagagctgtgaaatagcgcttctctaatagcaaccatattattgttacataattaaaagccagctcttttgttgtttgttcg

SEQ ID NO: 370855 - DNA, 466 bp, Homo Sapiens
ccagtgagtgctgtgagaatacagtagcacaagtcccttgttctctgaaagagtgggaaggagaggagtgagtgaaagtagcctgtcccctgcaggtcctctgcgatggcattgtctcggttcccgcagtgctgcagtgtggaagggagtgccccatcctcattacagatgacacactggagtgtggaggggtcgatgacttgtgcagggtcatatggtacctaaggggcagatctcagacttaaacacaattgatgtctaacccctagacagtctttttagtgccctctgctctcagtcttgttgccctagtatcaagcaatcttagacaaacatcctgaattcttacaaacttacctctaaactctgaggataaagttgccagtccttttaatggtcagcctaatcattctgtcagcctaatcgggtaattgctttttttaataaatacacataaaaaccaacc

SEQ ID NO: 370856 - DNA, 590 bp, Homo Sapiens
cgacgtgatcgtgaagaccccatgccccgtggtggatgatgtcaaggctcaagaaatagcagacaagatctacaatctcttcaatggctacactagtgggaaggagcagcagaccgcctacaacaccctcctggatctgggttcccccaccttacaccgggtcctctaccactataaccagcactatgagagttttggggaattcacctggcgatgtgaggatgagttaggtcccaggcttcccaacgtgttgggacagtccagaggagttgtaagatgaattggaggaaaggaagaagacggcagcccagggtatttccccttctccctgcctcagatggcatctccagcatctccttcatgacctctgtctcctccgtgtgaccttccatcccctcaaagcaggagctgcgccctgatgttgctaatctgataggttgctcctatttgtccttctataatcccaaagtcttcctaattggtttctcatcttgaacttcctctgtggaattacctaaaatgtattttgctttcctgactaggtcttgattaatatatacttcaaactaaaagttagtacatatcgtccg

SEQ ID NO: 370857 - DNA, 446 bp, Homo Sapiens
gggttctgaaaatgatggaactaaaattgctgcttccccaagctatttcagcaatgtgtgagaattcaggcagcaaagattttttcaataatcaggggattccacagttaattcagttgctaaaaagtgacaatgaagaggtacgggaagcagcagctctagccctggcaaacctaaccacttgcaaccctgctaatgcaaaagcctagattcctccctgtctgatggaatcttattctaaacattggttatactggattggaaaaatcatactgaatttggaaaacagagaatgaaaagctgaattttgcaatagaacaagtggattccctatccccatttcatgtcagtggatgcccacctgaccttgactaacagtttgaatttgattagctactgattttgtgaggccaagtgaatcccataaaatgttcaattagaaaatt

SEQ ID NO: 370858 - DNA, 209 bp, Homo Sapiens
ttaggcttttatatggattatgttttgctgacccacgcccgcattttcagattttgtatctaacagacagtgctcagtgcaaatcaacattccagcggtcaggactgaccccggggcagcactgggctcaggcttcagcgcgactgtacgcatggctccctcccgtcctggcaccaatttctgaataaagtcctttctaccaaaaaaaa

SEQ ID NO: 370859 - DNA, 453 bp, Homo Sapiens
ggtttaagcagttctgtaggcagggattttatttttcctcatttgttcactgctacatccacagatcctagagcagtgcctggcatatagtaagtgctcaataaatatttaactacattcaatgctgaatacaatgaatctccacatatatgacactgagatttagtgtttgcaaattgatcctaccctaagcgaacctaagacaattaccaaagaactgctccctccattagcttacagatacaaacaactgattcttttaaattgataatatttataatatttcccttggtctctgcctaaatcccttatcctatatagcgaaagccagaaaaggtttcagaacaaaatgacaaaatggcctctccatcacaaaccgggtatattagtttggtgccttcctttactccatagcagccatgtcctcctgcatctccattgtgtctacattcc

SEQ ID NO: 370860 - DNA, 745 bp, Homo Sapiens
atgaaagccaagaaatactgatagattataccatggcttactgttcaacaaggccttatgaaagggattttgctatccctgttcaagaatggtttcaatttggccattggaaagcctggttctaggatagattctattaggatggtttaatttgttctccgaatggaggaattaaaaacaatactgccaataatggtggtaaatctgcagctataccctactctacagtgggctagggcccaatagacccagtctaagcagcactacttgccaccagcctcctctctggctttgtctctatttctccccattacctgctgtcctgggtgtttatatgtttccctcttacaggttacaataataaaaagcggggattgttctcggaggctcagaccagagcccttcaaaggaaacagttaatgcacttttctggaagattaatttgaaccatctatcataagagaaattgttaacatgcatgttaccactgcatacacataatttgatattttttaaggcactcttaaatttccagtgttcatgtgttttgcatagctttggaattcatcttcaggcggggaatcctcccatacttgcgggttctacagcattgcttttgttttttatctttcttgtttagatcgaatccgttttttacgaccctcaataacctcaccaactgcaaacatgaatggtttccgataagggaaaatcaggcagcgataaagcgggattattatgattt

SEQ ID NO: 370861 - DNA, 1040 bp, Homo Sapiens
  misc_feature (51)..(87): n is a, c, g, or t
  misc_feature (531)..(540): n is a, c, g, or t
gaatgtatacactcactatagggcgactcggaggtcacgcggtggcggcgnnnnnnnnnnnnnnnnnnnnnnnnnnnnnnnnnnnnnatcaggccaaatcggccgagctcgaattcgtcgagagcggaccatgttcactaccctgaaatgttgtatatctcgtctttaatttccaagacttaaagcagtcttgttaagattgatcataaactggtaaagcttcaacattttcataagtacagtatctaatgtttgataaaggtatatcccagttaactacactgctctttaattgcaatcatgggcattttaatgtattttaaaagaaagtttcaaaattctgctaaattcttaatttagcatattgacaaagtaatctggatttataacttttaaaaaccattttgaccagttttcttcggttttaatgctttcttaaataaaacactgcatgatttccaagttgcatatttgcatactattttaatttgcaaaatgttttttaaatcaaatatcctgatatttagttgnnnnnnnnnncctccagcgtgtttaattaaatatgttactgtattagcaaaacattttcatttttaaaatctgctaattttaaacttggactgtgttaagtaaaagttaaatcatacactgcaaggtgtaggaagatttgttttaatgaatccagtgatacagatttgattactaagtttgaactgttaattgtttaacaattttagacttgtggctttctttctttggtttatttgtttttgcttttactcctatgctacactagtttgccatgtagcaattgcactgtgcaatattacaataaggactgggaaaattttatggatgtaatgtctattacggtttgcgatagtatttctctctagttctcagtgatttaaatgtgaccaagccttctgtactttgtcacaaaaagcgggttttccaggtgactattttggagagtgtcgaaaataagaattaatggtgtattactgtcgattcactttgaattaagatatatatattgc

SEQ ID NO: 370862 - DNA, 1176 bp, Homo Sapiens
  misc_feature (385)..(393): n is a, c, g, or t
  misc_feature (1112)..(1112): n is a, c, g, or t
  misc_feature (1121)..(1121): n is a, c, g, or t
  misc_feature (1133)..(1133): n is a, c, g, or t
agcgggtgcccgcccgcgccgccaggctcgcaagcaccgcgtaggccagctggccggatcccgccgtctgtcatggcggcccccatcctgaaagatgtagtggcctatgttgaagtgtggtcatccaatggaacagaaaattattcaaagacatttacaacacagcttgtggatatgggggcaaaggtttcaaaaacttttaacaaacaagtaactcacgttatcttcaaagatggctaccagagcacttgggacaaagctcagaagagaggcgtaaagctcgtttcggtgctctgggttgaaaaatgcaggacagctggagcacacattgatgaatcattgttccctgcagctaatatgaatgaacacttatcaagcctaattnnnnnnnnncgtaaatgtatgcagcccaaagattttaattttaaaacaccagaaaatgataagagatttcagaagaaatttgagaaaatggctaaagagctacaaaggcaaaaaacaaatctagatgatgatgtacctattctcttatttgaatctaatggttcattaatatatactcccacaattgaaacttaatagtagtcaccacagcgcaatggagaagagattacaagagatgaaggagacaagggaaaatctttcacccaactcttcccaaatgattccagcagtctcatgataatccaagtaactctctgtgtgaagcacctttgaacatttcacgtgatactttgtgttcagatgaatactttgctggtggcttacactcatcttttgatgatctttgtggaaactcaggatgtggaaatcaggaaaggaagttggaaggatccattaatgacattaaaagtgatgtgtgtatttcttcacttgtattgaaagcaaataatattcattcatcaccatctttcactcacctcgataaatcaagtcctcagaaatttctgagtaatctttcaaaggaaggaaataaacttgcaaaggaaatattgcagggtaaagtagttcacccctcacccaaaaggcagggctgcagggtatgtcttcagggaggacgtttggaggagaggtatccgtttgtcttcctacccttatctttccaaccaaangggccaccnttttggataccnttccagacccgggggggttccccccagttaagggggaaaagtt

SEQ ID NO: 370863 - DNA, 958 bp, Homo Sapiens
  misc_feature (46)..(82): n is a, c, g, or t
  misc_feature (197)..(205): n is a, c, g, or t
tgattcgatctatagggcccatggagttcaccgcggtggcggccgnnnnnnnnnnnnnnnnnnnnnnnnnnnnnnnnnnnnnatcaggccaaatcggccgagctcgaattcgtcgagagcggacttccggtcgctttcggtctctcagcggccggtttctgcgtccgctgccgcaggttccaccgcgctccaggtannnnnnnnnctgaaggaaagctgcttcctcatatgtttcaagaatggctctccctatcattgtaaaatggggtggacaggagtattcagtgaccacactttcagaagatgatactgtgctcgatctcaaacagtttctcaagacccttacaggagttcttccagaacgccaaaagttacttggactcaaagttaaaggcaaacctgcagaaaatgatgttaagcttggagctctcaaactgaaaccaaatactaaaatcatgatgatgggaactcgtgaggagagcttggaagatgtcttaggtccaccccctgacaatgatgatgttgttaatgactttgatattgaagatgaagtagttgaagtagaaaatagggaagaaaacctactgaaaatttctcgcagagtgaaagagtacaaagtggaaattttgaatcctcccagggaagggaaaaagcttttggtgctagatgttgattatacattatttgaccacaggtcttgtgcagagactggggtagaattaatgcggcatatcttcatgaatttctaacatctgcctatgaagattatgacattgttatttggtctgcaacaaatatgaacgtgggattggagctaaaatggaagaactggggagtgagccaaatgcgattataagattactttctgtgggtgtgcgtattaaaacacgcctcatccacgggaagtataaaagtaaagcctgggtaattgggacaatcggtttcgcgaaaacccttt

SEQ ID NO: 370864 - DNA, 1081 bp, Homo Sapiens
  misc_feature (996)..(1032): n is a, c, g, or t
cgatatatataagaatgaccaactcagattacatatattatctgtatcgtgaccgtgtgtaccatctagtggcttcgccctcgtcttcatgccgttataagtcactcacggttgtttaatacctcttcggttcaagcgctcattaacaggtccttaaaccgatttttgcgacccttgtcccccgagctacgccacaatctgttttgcgcattcccccgtgaaacggctttgaataatccttaccaacccactcaatcctctgtaacaggaaattcattgcacatcaccggtaccagggtcacttccccagcacccttctattctaagcctggatcgaagcctgccattcccccgactgtgagtattgcgggtaaaaaagcgtgtggttcctcccttacaagcgtgcaaatgggccagagacgcccatttcgccgttaccaagggcacactttcattgtgaaaagctgttcctcttgcacagaggatgcacacccggataaagaagttataaccggaaatgttttacaggtaacgaggtgtccagaaagaacagaaagctcgtttccttatcaagggaaaggcagtcactgcggcacccctcagcacacgccagtcagtcatccactgaaaatcaccctgtagcaggaccacaaagggctgtggacctcaaatctgattattagacagatgattcatcacctgaaggcggttaaatgacctggttcacctcgtccggcctgcgctgccgctccttcagcagttccgcttcgggcaaggaagaggcgccgccacgtactgtggctacacggcccgctcggcggcgggtccggacacctcagcgaacggcccgctgcgccctccgctgtacctagagtgtcgcagcggccaccggcctgtctttgagcaagggccgggaacacaggcctgggcctagaataccggcctagcctcaacccgctctcgacgaattcgagctcggccgattttggcctgatnnnnnnnnnnnnnnnnnnnnnnnnnnnnnnnnnnnnncggccgccaccgcgctgaactccaagtcgccctatagactaatcagtcc

SEQ ID NO: 370865 - DNA, 994 bp, Homo Sapiens
  misc_feature (65)..(101): n is a, c, g, or t
ggaaagttggattcccgatcatataggggcgcccctttgggatttttccaccgcggtggcggcgnnnnnnnnnnnnnnnnnnnnnnnnnnnnnnnnnnnnnatcaggccaaatcggccgagctcgaattcgtcgagagcgggctgctacccggcaccccctccccgcggccggcagcccgctaggtattatgattagcgctgggtgcggggtttcggcggccgggagggagttgtcggcgccgcggccgctgcggacggacgctcgcctgccggctgagatatccatgacgacattgaaaatgaattttttgtattcaccagatattcttatatgagaagatctattttaaacagtctaaatattttttcttctgttggaccagcatggcaggatttaagcgagggtatgatggaaagattgctggattatatgatctggataaaaccttgggtcgaggccattttgccgtggttaaacttgccaggcatgtctttacgggtgaaaaggtggcagtaaaagttattgacaagacaaaactggacactctagctactggtcatcttttccaggaagtgagatgcatgaaactagtgcagcatcctaacatcgtccgcctttatgaagttattgacacccagaccaaactatatcttattctagaacttggggatggaggagatatgtttgattatataatgaaacatgaggagggtctttaatgacagacttggccaagaaaggtatattgctcaagataagttcaatgcctagtaatcttaataggccataaactccatggtggcttccccagaagaccttaaacccgagaatggatcctctttgagaacaccacggccttgtaaagtgagaagacatttgggttccaacacattcacccccgggaaaaaccacacagcgggagatctggataacgggccaaaatcgcgggcgcgctcataccccggagatcggcaagggaccccacagcgggc

SEQ ID NO: 370866 - DNA, 1513 bp, Homo Sapiens
agaaaaccaaaaagggaggggaaaagaatgtaattgcggcgttatctgtagttcttaccacccccattacttttataggatttatcaccaacatggattctgtgatgaactgtaagatttgatcgccaactgaagctcttaccacatatctcacatttataaggtttctccccagtgtgaactcgctgatgagactgtagttgtgaagaccgactgaagactttaccacacacatcacatttgtatggtttctctcctgtgtcgacactctgatgaagttgaagacttgaggcctgactgaagtacttaccacactccccacatttatatggtttttctcctgtgtgcaccctctgatgcatgtcaaggttcaagctccacttgaagcccttcccacactcatcacatttgtatggcttatctccagtgtggactttttgatgggcttgaagatgtgcactccgaccgaaactcttcccacattcttcacatttgaatggtttttctccactgtggactctctgatgggccaaaagatttgaggcctgcctgaagaccttcccacactcctcacaattatatggtttctctcctgtgtggatcctacagtgaattttaagatctgctctacgactaaatcccttgaccacactcttcacatttgtatggtttctcacccgtatggatcagctggtgaatctgaagtcgtgagctctgattgaaaccctgcccacactcctcacacttaaaaggtttctctataactgggggccttctgatggatttgaagatacgaacttgactgaagcccttcccacatatctcacatttatagggtttctctcctgtggtggaccactagatgaacgtgataatgggaattcctcactgaaggctcttgcccacactcattgcatttgtatggcttctctccagtgtggactctctgatgggcttgaagatttgaactcagagtaaagcctttcccacatacagttacatatgtatgacttctctccagtgtgaactccctgatgggcctgaagacttgaaggccgactaaagcctgtaccacattcctcacatgtatagggtttttctcctgtgtggactctctgatgaatgtaaagatttgagctacaaatgaagcccttaccacactcctcacatttgtatggtttctctcctgtatgaactctttgatgggattgaagatgtgaattccgactgaagctcttaccacatgcatcacatttgaatggcttctccccagtgtggagtctctgatggtcctgaagatgagaggcctgactgaaggccctcccacactcctcacaattataaggtttctctgccgtgtggaccttgcaatgaacattaagtgctgatctacgactgaaacctttcccacattgcttacatttgtatggtttctctatcacgtggactttctgatgggtctgtagatgagcgccctgactgaattccttaccacactcatcacacttaagtt

SEQ ID NO: 370867 - DNA, 981 bp, Homo Sapiens
  misc_feature (59)..(96): n is a, c, g, or t
gaaacaacaggaagttgtatttcgtctatagggcgcctggagttcaccgcggtggcggnnnnnnnnnnnnnnnnnnnnnnnnnnnnnnnnnnnnnnatcaggccaaatcggccgagctcgaattcgtcgagagcggatacagagatggatgccacttacctcagatcttttaaagtggaaatccaaattgaattttcatttggactttcaggataattttctatgttggtcaacttttcgttttccctaactcacccagtttagtttgggatgatttgatttctgttgttgttgatcccatttctaacttggaattgtgagcctctatgttttctgttaggtgagtgtgttgggttttttccccccaccaggaagtggcagcatccctccttctcccctaaagggactctgcggaacctttcacacctctttctcagggacggggcaggttgttgctgttgtggtacacttgacgttgtccagcaagcagcacttggactgctctggagtagggttgtacaatttcaaggaatgtttggatttcctgcatcttgtggattactccttagataccgcatagattgcaatataatgctgcatgttcaagatgaacagtagctcctagtaataataaaatccactctttgcacagtttgatctttactgaaatatgttgccaaaatttattttggtgtgtagctcctggattggtccgtagggtattaagggaacgattgacataccctttacctctgtgacctactaaggaacctatttcttcatgagagaaaatttccatggtttggagacctaatacgggtattcgattgtgtgaggaacaagcctgggcccgaaggcggactgacggtgggtcagggcggttggacccagagtcaaaaggttgtgctgaaccttgataattgccggaaagcggaacatgccagtacggggaaggaaaatattagagagagaatttataag

SEQ ID NO: 370868 - DNA, 665 bp, Homo Sapiens
atcaggccaaatcggccgagctcgaattcgtcgagagcgtgtgggacatgtatatattatcttaataaagactgggatgccaaggtaagtggaggtatacttcgaatttttccagaaggcaaagcccagtttgctgacattgaacccaaatttgatagactgctgtttttctggtctgaccgtcgcaaccctcatgaagtacaaccagcatatgctacaaggtacgcaataactgtttggtattttgatgcagatgagagagcacgagctaaagtaaaatatctaacaggtgaaaaaggtgtgagggttgaactcaataaaccttcagattcggtcggtaaagacgtcttctagagcctttgatccagcaataccccacttcacctacaatattgttaactatttgttaacttgtgaatacgaataaactgggataaccgacaaacactagacaaccagttcgcattttaactaaggaaacagaaacaactttctcgtgttgcatcaaacagaagattttgactgctgtgactttgtactggcatgatcaacttcacatctgtgatttgctttacaggaggaagataagctaactaacttgaacatggtctttaccattctggcttatcgacattaagttcccctgtgttcaaattttttcattc

SEQ ID NO: 370869 - DNA, 933 bp, Homo Sapiens
ggcacccccccgccggggtctaggcgcgagaagtcccacactgtgggagggcaacaaaggggcagcaccccggcccccaagcacgaggccttttaggagtggaaacctccgtggcttccccatgggccaaagggagccacccggagacactgggaaaaaaaccgaaaagaagggggatctggcgcacgggaagcatgaccgggcaacacggagtaaaaggtcaagcgtgaatcagcacgcaattcttgtgtatgaagtctggcttggttatccatttgttagtgtctttattgtgtttggtttccctgatctagaagggaactgcttgctgcttaattattcatatgctacccaaaacctgtatgtcgctttatatatgatgaataattatgttatatataataatcaggacactagaaacttatatttatagcataggcagtgagattgaatagctttgtattattcagctgccaaagtaagattctttgcgcatctgttaatcgcaagaattttaacacaaggttcagtagacttttggtagtatctaccaagaatgaaaaggggagaattcagcttcatgactgagcacacatgtaattatttagaattgaggcagtcatggaactggccagaatgttagtagcttccaggctgtgtggaataacctcgtcccctgccacatgtacatattgttaagcccctaagcagtgagagatggcagcactgcttggatttccttggttctttggttctaacaaagtgtccgagagtccttccatcatgttgtggggaattgagataatgccataagacaataactcctggtatcaaggaagggataaaagttctcttggatctcattaaagtgacctgctaaacctgattcaaagccgctctcgacgaattcgagctcggccgatttggcctgat

SEQ ID NO: 370870 - DNA, 1144 bp, Homo Sapiens
  misc_feature (182)..(254): n is a, c, g, or t
ggttcgtatctagcaggatacccaaagactgaaagcaaagactaaaataagatgatcaaaaaagaacaactacacgactatccgagaactgcggaaaactaaaaaaggtgtactaaacacactaatgggtaataccagaagacagaaaggaatagaacaaaaatttgaagctctaatgactnnnnnnnnnnnnnnnnnnnnnnnnnnnnnnnnnnnnnnnnnnnnnnnnnnnnnnnnnnnnnnnnnnnnnnnnngagtgtgaattggctcacagccaatccaagactggtgtgattagactccttatgcaaataaatgtcctggaatgaaccaatcattggccagagtgcaggtctggcccatggccaatcagaggctgatgtggtttgataccttatgcaaatgaaggtcctggaatggaccaatcacaggccagtgttcagactcttcagtgccagggagtgtgtccaagtcatccttagatccctatctctgtaccctattctcctgcctcagtcttgtgtgagattttgcaccctttgaccatcatcatcatctccccattcccccaatctctccctcaactacttctaaccactattcattaatctcttgtattatttaggtgtaaggaagaacagaaggatccaagtgtgagaaagcccaccctgagtctctcagaggtgattatgactgtgtgagcatgggtgagacaaatcctctgttgttgtcgatggctacttgaagtgcttcctccattcttaccattgtagaatacttagggagggagagaatattagtgaccagttatgactgttgggggtgatctccttttccactgaaaaggttcagggaacaggcgaaatcgagtgtgcattttcctggtattgcccctgcatgcaagcgtaataacggtcctgtacagggaaacgacggagtttgcctatcacgcaggtatttggggaagcctccacaaccactgttatgagtgaataggcactcccgatgtagacttctggaacggtgcaggccaccgattacaagggtcgatgttccagggagaaagataaattcttgtaagatgacctagatcacaggtgagggggggtcaatctaactctgtgggccggacgatatcggcaga

SEQ ID NO: 370871 - DNA, 806 bp, Homo Sapiens
ctgggagagatggtcacacttcggacggacgagccgatatggtgaatgggtctcggaggagacatgcatttccgcctgggttgtgcaagatggatgacacatccacctgggacaaggagaaaagtttcacttactagccttaacagtgcaccgttctggtgtgtcatgatggacagaaaccttgctgtctctttctggtagccaggagttggtaagaattacctgaccagcctacttgaatacacagtgataaagatgttcacaagaggaagatgctctgtaagagaagttgctaccgaagttggctccaagaattggtttttactcgtatttaccaagagtagacgtcagtggctgagattctttgaattctgtgtgcaaaggactgcaagactattggataaagacgtagcatgaatcttgtgctctaatattacatcagtaagcctcacaagaaaggattgtaagtcaaagacgttgtacatagagggagacaatggactgggatatgaggacagactgatagtttctttcttgtcatatcacatgtatagagaaataattatatcagaaactcacagaacctagacatggaaaaacagattactgtctattgtcagcatcattgttcatctgtaagtcactactggaatatatttttcttttaaatttcccagtgactttagaatacacgcagtttttccgacttttcaaaaatttgattaaatggttttatagtataatattgggaccccataccgttagcccttgtatgtataccaacactgcccaaagtaaaacattag

SEQ ID NO: 370872 - DNA, 1146 bp, Homo Sapiens
  misc_feature (41)..(77): n is a, c, g, or t
tgtatgtcaatgggcacctgggttcaccgcggggcggccgnnnnnnnnnnnnnnnnnnnnnnnnnnnnnnnnnnnnnatcaggccaaatcggccgagctcgaattcgtcgagagcggggaagtgtggggagccgtgcccaggttttaccgctccagcaagtcgctggcggggcgacgtctcgggactccggctccgaaacgtaccctctctgtccggggctccaggtccccgacgggcgatcgtgccaggcgcggcccctggcgggcctcagtctccgcgcctgtgcaatggggtggtccctctgcgtctcgccgcgacggctggacgccccatcgccgccgcacagtcctccagtgcggcttccgggcacccgggctccgaactctggggtcgtgcggacccggccagaccgtagcgcggcaacgccagcccacggccgcggccgcacagccccggtgcccttaaaagagggaagatggcgtcgtgcccggtgccgccgggaccggctcccggaggcgctgcgcacctgaggaagggccgaggaaaggcttcgtaacgggacgcccagaaagtccggaacaggaacgtgcacacggagcggcgcgcagccgcccgccctcgcttgcccacgcgccctgcacaggtgcgccccagactgggcggggactagagccaggctggggcatgcgaccttgttgggtaaattggaggtgcgcccctgcgggtgacccgcgagggggccccccgcctgcgggggcgcggtcacgacaaggcttgtggggttcggagctggacgtcgtctgagctctggcctcctaaatgcgatcgctttcaagcccttcattgtcaattttgctagaatgagccactcgtggggtaggacgtggttgttgatgttactgttgtagctcttactattgtaacatttttgttgctgttttaacgcagtgtttactgtggtctgggagcccgagcttcccagggagcattggtgtcagcctcatgtccccgcattaggaggagcgcagtctggtgggcactagcgccgggaagttccttaacatctgtctgccctgggagcaggaggcctcatcttccaggtggagaaacagagatttcagtcccaggaggcacagaaatgccag

SEQ ID NO: 370873 - DNA, 1008 bp, Homo Sapiens
  misc_feature (42)..(78): n is a, c, g, or t
tgtagtctatgggcgactggatctcaccgcggtggcggccgnnnnnnnnnnnnnnnnnnnnnnnnnnnnnnnnnnnnnatcaggccaaatcggccgagctcgaattcgtcgagagcggtcgaggcggaccacgagaagggaggccccgatgcgctgcgcgtgaggagcggggacgtggtggagctggtgcaggagggcgacgagggcctctggtacgtcagggacccgaccactggcaaggagggctgggtgccggccagcagcctgtccgtccggctcggcccgtccggctcggcccagtgcctgagcagctcagagtcgagcccggggtcggccgtgctgagcaactcgtccagctgcagcgagggaggccaggcccccttctccgacctgcaggggtagcgcggcctccgcgccggagacccgcgcgctgtctggggctgcggtggcgtggggagggcgcggccccggacgccccgaggaaggggcacctcaccgccacgacccagagcgcctggccgtgcgggctgcagaggacccctccggggcagaggcaggttccacggaaaaccccggcccgctggggcttccccggagactccagagcccacagaggaggggccgcagggaacagccccgggcggcaggcgccgggcagcggcatctcgtcctggctccaccgtgctgcttctgcctccggacggtgctttcaggggacgcgcggaccgtggtggagctgcttccggagaagtggaggatcctctgggcccaagggcctgaggagagccgggcgcgggtctcctttgcttttaacgtttagggatttttgccaggcagggtcctcccccgggctttttggggacctgggccccatcttcccgggtccggttcctggagcgctgtctggtttgtcgaaccactttgtgcgcggtcctagcccggtttcccaaagtgggggcccgcgaggagccccgcctcggtacgtgcgtcgtggtgcccccccgctgt

SEQ ID NO: 370874 - DNA, 862 bp, Homo Sapiens
  misc_feature (51)..(87): n is a, c, g, or t
gatgtatacgactcactatagggcgaatggagtctcaccgcggggcggcgnnnnnnnnnnnnnnnnnnnnnnnnnnnnnnnnnnnnnatcaggccaaatcggccgagctcgaattcgtcgagagcgggtaccgtcgcggatttcggcggcggaaacatggcggtcgcggccgggccggtaacggagaaagtttacgccgacactggcctgtattagcgcgtatggcctcgggccctcggttccccaaggcgtgccgcctccctgttctcagtcgcaggctgaagccttgtctgctctcctcctttttggtttggttttggaactgactccgagggttgggagagcgcgttggtggcgacggccgagtcagatcactataaacaaaatttccacaagagaaaatgttgaaataggagttgcggatacattggatatactggatgaaatacaagcggttaatttttgtaacgtgagggaaaagcccacattgctggttacatgtgtaaatcactgcgttattgctttagtcattgtctctatttagcaatgacaagactggaagaagtaaatagagaagtgaacatgcattcttcagtgcggtatcttggctatttagccagaatcaatttattggttgctatatgcttaggtctatacgtaagatgggaaaaaacagcaaattccttaattttggtaatttttattcttggtcttttgttcttggaatcgccagcatactctattactatttttcaattggaagcagcaagtttaagtctctccaatctttggtttggattcttgctttggctcctatgttttcttgataattcatcctttaaaaatgatgtcacaggaagag

SEQ ID NO: 370875 - DNA, 1029 bp, Homo Sapiens
  misc_feature (860)..(860): n is a, c, g, or t
ctccggaagcaccggcatcaaaccaagaaatccaaccttcggtccctggctgacattgggaagacagtctccagtgcaagtaggatgtttaccaaccctgataatggtagcccagccatgacccataggaatctgacttcctccagtctgaatgacatttctgataaaccggagaaggaccagctgaagaataagttcatgaaaaaattgccacgtgatgcagaagcttccaacgtgcttgttggggaggttgactttttggatactcctttcattgcctttgttaggctacagcaggctgtcatgctgggtgccctgactgaagttcctgtgcccacaaggttcttgttcattctcttaggtcctaaggggaaagccaagtcctaccacgagattggcagagccattgccaccctgatgtctgatgaggtgttccatgacattgcttataaagcaaaagacaggcacgacctgattgctggtattgatgagttcctagatgaagtcatcgtccttccacctggggaatgggatccagcaattaggatagagcctcctaagagtcttccatcctctgacaaaagaaagaatatgtactcaggtggagagaatgttcagatgaatggggatacgccccatgatggaggtcacggaggaggaggacatggggattgtgaagaattgcagcgaactggacggttctgtggtggactaattaaagacataaagaggaaagcgccatttttttgccagtgatttttatgatgctttaaatattcaagctctttcggcaattctcttcatttatctggcaactgtaactaatgctatcacttttcggaggactgcttggggatgcncactgacaacatgcagggcgtgttggagagtttcctgggcactgctgtctctggagccatctttagccttttagctggtcaaccacatcactattctgagcagcaccggacctgtcatagtcaatgagaggctactatattaatttcagcaaggacataatttgactat

SEQ ID NO: 370876 - DNA, 619 bp, Homo Sapiens
  misc_feature (49)..(85): n is a, c, g, or t
ttatacgactcactatagggcgacctcggattcaccgcggtggcggcgnnnnnnnnnnnnnnnnnnnnnnnnnnnnnnnnnnnnnatcaggccaaatcggccgagctcgaattcgtcgagagcggtgtttaatcaggaaggagaattcatgttgaagtttggctcaaatggagaaggaaatgggcagtttaatgctccaacaggtgtagcagtggattcaaatggaaacatcattgtggccgactggggaaacagcaggatccaggtttttgatgggagtggatcatttttgtcctacattaacacatctgctgacccactctatggcccccaaggcctggccctaacttcagatggtcatgttgtggttgcagactctggaaatcactgtttcaaagtctatcgatacttacagtaatggtgggcaggtggatacccgcttccatggtcttgcactatgaaactggaatggatttctcaatggcgggaccagattatgactaggagtttttatgccagaaggaatcattggtgaactttccaagggtatttctcggatgtgtacaatatcctcttaaaatgtgacttatccaatttgctgtatttcacctttagggtt

SEQ ID NO: 370877 - DNA, 838 bp, Homo Sapiens
  misc_feature (52)..(88): n is a, c, g, or t
  misc_feature (747)..(747): n is a, c, g, or t
tgatgtatagactcactatagggcgacctggatttctccgcggtggcggcgnnnnnnnnnnnnnnnnnnnnnnnnnnnnnnnnnnnnnatcaggccaaatcggccgagctcgaattcgtcgagagcggagatctgccctgtagagccttgcggttccactgctggcctccggattcccgggagcccccagcccgacaggacaaccttccttccccgcttcctcctttccagacccggcggcaggagaggggatgaagatggcggacgcgaagcagaagcggaacgagcagctgaaacgctggatcggctccgagacggacctcgagcctccggtggtgaagcgccagaagaccaaggtgaagttcgacgatggcgccgtcttcctggctgcttgctccagcggcgacacggacgaggtcctcaagctgctgcaccgcggcgccgacatcaattacgccaatgtggacggactcactgccctgcaccaggcttgcattgatgacaatgttgatatgggtgaagtttctggtagaaaatggagcaaatattaatcaacctgataatgaaggctggataccactacatgcagcagcttcctgtggatatcttgatattgcagagtttttgattggtcaaggagcacatgtagggggctgtcaacagtgaaggagatacacctttagatattgcgggaggaggaggcaatggaagagctacttcaaaatgaagttaatcggcaagggggtngatatagaaagcagctcgaaaggaagaagaacggatcatgcttagagatgccaggcagtggctaaatagtggtcatataaatgatgtccgg

SEQ ID NO: 370878 - DNA, 913 bp, Homo Sapiens
  misc_feature (802)..(802): n is a, c, g, or t
actcgatgatgctggcgaccacgctactgagcattccgatacatccggccgcagacacggtgggcagtccccactgaaatgggtatggaactcttaaaccacggggctaccagaagcacgccttccctgccatctgtgcagagcatagaagccatactttgtgctgtcgggagggaagacatctgtcaccgtgaagatgaagcagagcagccaggataccaggatggccaggatgatagggaacattttgaacagctgtaacgtgtacgcagtccatcctttcttggatttataaatcgggagaggaaatttaacatttctggcgtattgagaaaacagtaatactaggaatattgtcagcatggcaatgccccagtgcttcccggctctctcccccgctgcctggaaaccagagaggccaattagggccaccgtgggtgtaatggtcaagggaccgatgtacttcagtagagccccaggcaggccgaggaggccgatgactacttctatcagtgatggacatgatgatgccccctggatctctcggatccggggataccagatgtgttctgtgtgcaacagctctgctgttccattggcaactgaaacatctgtggtgttacatttccatttatctaaagacaggatggctcgagcaggggccaaaaatgcaaaagcactggcctgaaacaggggttacctgcatccaaacgttgtctgtagcaaagtagtgattcccacacagaagaaaatggtcccaatgagctggctggtggcccactggtcgtaccccacacacatngcatcggccaacaggaagggcactgcgatcgtgccgctgaagcatgtcaggtagtctggacccccagcgatcagacatgatttataccatagaagatgttcctccctggta

SEQ ID NO: 370879 - DNA, 850 bp, Homo Sapiens
  misc_feature (60)..(96): n is a, c, g, or t
ccccacaccgcacccgctatgaatgtaatatatggggacgggagtcacgggtggcggcgnnnnnnnnnnnnnnnnnnnnnnnnnnnnnnnnnnnnnatcaggccaaatcggccgagctcgaattcgtcgagagcggggcgcggggtgggctggagaggtttcctgccgtctgggaagcgtaaacggaccgcccacctgtcgggcctcggccgcccgcacctgcttgtgagaagcctgcggctggggcaccgcccccggtccccgcccgggtccgcgcactgggagcacactggccctttaagagcgcggcggccgcggcgcgcggggaggagggctgggagcgcccggagccgcgctgaactcgccggggacgtcgggcgcccgctccttggctggctcgcttgctctctcgctcgctctctcgggtcggctccctgcgcctcctcccgggactgcttggggacccgggcccggtcgggcgcggcggcgagcagaatccccgtgcaggaggcgcgcgctccgggcagcgcccggccccgggcatggacaggggagctgggcgcgcagggagcgccgcgggaccgggcggccggagcgctgagccagacaaaggctccggagttgcgcttgctctcgggagccgggccccaggcgctgggcgccgaggctgcggaacctcgccgggggcagctccggtcgtgcccctttgccgccggctggttccgagctcccggacctgtcctgcccgccttctcctcgggcttgggaatctgccgaggcgactaggcggctccggcggggaccgggagcccgaggtccgcggcgcgcctgccgggccaggagccaggga

SEQ ID NO: 370880 - DNA, 968 bp, Homo Sapiens
  misc_feature (886)..(923): n is a, c, g, or t
gttcgtgtgaatgacccaggccagtcgtcagcaagtgcgaaccctgttcctcagggtggcctcttggtcgaggttggaatgggaatcctgattgtggtagatggtgtccttacccgagagcagggaaggatttcaacagagccactcacagagccaggcccttgaaagacagttcgaggttttcaccacctcgcagcgacataagagagtcatacgctccagtgttttggaagtaatgtctgtccatggccaccacctctccgggcaccacagggctcctgatggggcttatgggggactggagggccttcctcacatgctctggcaaaggttcccagtggaaatccagcttccagtccaacaccccacgctgcaggtcctttgaggggtaatactggaaagtcttccagtcaatcacatctatcaccggagataccactcggctcctgtcaccagctattctgctgaggaggggctccagccagcctgggtggcactcgcagtgggcatccatgaagacgagcacatccccggtggctctggtggcccccagcatccgggccctgatggcacccagcctcttgttgctcctgagtaacttcaccccctccagcctggccacatattcgctgagagcagacttgagttgtccttgctggctgaggtcgtccacgaggatgatctccttcaggaaggccctgggcactgtgtcgaggatgctgtgtacagtccgcaggagagtggaccaggcctcatcatggaaacagaggatgacgctggctgtgggcaggctgtcctgagggtgctgctgcagacacagtgggtgccgcacctcgggcagagccccgctctcgacgaattcgagctcggccgatttggcctgatnnnnnnnnnnnnnnnnnnnnnnnnnnnnnnnnnnnnnnccgccaccgcgtgaatccagtcgccctatagtgatctatacatcg

SEQ ID NO: 370881 - DNA, 955 bp, Homo Sapiens
  misc_feature (43)..(79): n is a, c, g, or t
  misc_feature (171)..(171): n is a, c, g, or t
  misc_feature (536)..(573): n is a, c, g, or t
tgtagatcactatgggcgaatggcgctcacgcggtggcggcgnnnnnnnnnnnnnnnnnnnnnnnnnnnnnnnnnnnnnatcaggccaaatcggccgagctcgaattcgtcgagagcgtgtggagccaatgtccgcgaactgcatcagctgcagaatgaaaaaatgccacnttgttggttgagcatgagactcagaaactgaaggagttagatgaggaacatagccaagaattaaaggagtggagagagaaattgagacctaggaaaaagacactggaagaagagtttgccaggaaactacaggaacaggaagtattctttaaaatgactggggagtctgaatgccttaacccatcaacacagagccggatttccaaattttatcctattcccagcttgcattccaccggatcataacaaagggaacgcattctgtgcgtgggtttggctctttcagtatgtcattctgttctcatcttctgccacagtctctcagatagctcatgaagacaatcacctgcctcaccttctaggtnnnnnnnnnnnnnnnnnnnnnnnnnnnnnnnnnnnnnnaagcaaagatgaagggaaaacgaactaagacagacgctaggccatgttggcaaagtagcatcttggtgactaaggtgactttgtatattcatcttaaaaattatgttctttagacactgctacctgaatgaaaactgttggagaaataatgtttaaagttatttaagaaaaactgttacatcactaagtattaataaattcttcttacctgacgtaacttctcaagtggctaaattctgtagttgaagctctggtgcagagaagtgggaataatttcctattggtgggatcagtctcattaaaaagttgatttgctcaatatgctggggactcacgtaactgaatatatttgtttaaatggaacaactctttaaaggaaaga

SEQ ID NO: 370882 - DNA, 883 bp, Homo Sapiens
  misc_feature (54)..(90): n is a, c, g, or t
  misc_feature (504)..(516): n is a, c, g, or t
agggaaaaaatgatagatcatataggggaatggaggttatcgcggtggcggcgnnnnnnnnnnnnnnnnnnnnnnnnnnnnnnnnnnnnnatcaggccaaatcggccgagctcgaattcgtcgagagcggactgagttctcctaggctcccagatatagaaagctctaagagttgctacaggagatagaattgaaactatacataggctgagccgggcactgcggaggattggctatgcgagggtattaatgtggtgcggctgtacctgcctgttttgtgaaagtcacttctctgagactgtgaaggtgagaagcccaggatccactagaagcttcactgcggctctttggtgggggaaagcattcccagtggtagctgtcctcatttgcagcgttattctcggaaaccaagtatgtgcagcagtgacagactatgccacagctcctctgcagtttggaagctggaacaaatggaaagagcttatagccaagagaggttgtgannnnnnnnnnnnnaccatccaagctttctctggcagtgcacaaatgaaggatgagcttggtggcaagcaaaatcagcagactgcctgacagggggtttggatcgaacggttggaagtaagcagccttgcccaaacatccagtgcaggggcctccagtaccgatggcagcatccacacagactctggggatggaacaccagaccctcagcgcacaaaggctgccatggcgtcaccgtgcagcagaagatccggaagctcacagaacaaatcaagatggcacaaaacagcccgggacgacaacgtggctgaatacttgaagctggccaacagtgcgaccaacaggcaggctgcccgcatcagcaagtctttgcgaaggcagg

SEQ ID NO: 370883 - DNA, 992 bp, Homo Sapiens
  misc_feature (49)..(85): n is a, c, g, or t
  misc_feature (890)..(932): n is a, c, g, or t
tgatgtatagatcactatagggacctggagttcaccgcggtggcggcgnnnnnnnnnnnnnnnnnnnnnnnnnnnnnnnnnnnnnatcaggccaaatcggccgagctcgaattcgtcgagagcgggccgaccccccggctggggtctggcaggggtgggggacttcatccaggctccagccctgtggggaagggaccagtcctcctggctgacaaggagggtgggccaccggcagtggacgaggtgttggatgaggctgtgcccgagtaccgggcgccggggaggaagagcctcttggagatccggcagctggacccggacgacaggagcctggccaagtacaagcgggtgctgctggggcccctgccaccggccgtggacccaagcctgcccaatgtgcaggtgaccaggctgacactcctgtcggaacaggctccggggcccgtcgtcatggatctcacaggggacctggctgttctgaaggaccaggtgtttgtcctgaaggaaggtgttgattacagagtgaagatctccttcaaggtccacagggagattgtcagcggcctcaagtgtctgcaccacacctaccgccggggcctgcgcgtggacaagaccgtctacatggtgggcagctatggcccgagcgcccaggagtatgagtttgtgactccggtggaggaagcgccgaggggtgcgctggtgcggggcccctatctggtggtgtccctcttcaccgacgatgacaggacgcaccacctgtcctgggagtggggtctctgcatctgccaggactggaaggactgaacccccagtccgtgtctcccctgacctccctcagttgttgcacagggacccccaagcatccccagcaccccccgtgagtgaccagnnnnnnnnnnnnnnnnnnnnnnnnnnnnnnnnnnnnnnnnnnntcccgggaccccctgggcctggcgctgtcccctgagctgtcccattaaacacggccctgt

SEQ ID NO: 370884 - DNA, 888 bp, Homo Sapiens
  misc_feature (44)..(80): n is a, c, g, or t
gatgatgatcatataggggaccggagtttaccgcggggcggcgnnnnnnnnnnnnnnnnnnnnnnnnnnnnnnnnnnnnnatcaggccaaatcggccgagctcgaattcgtcgagagcggagtcatcccgctggtctgacgattgtggagaggcggtggagaggcttcatccatcccacccggtcgtcgccgggggactggggtcccagcgaagacctccccgggagaagcagtgcccaggaagttttctgaagccggggaagctgtgcagccgaagccgccgccgcgccggaacccgggacaccggccaccctccgcgccacccaccctcgccggctccggcttcctctggcccaggcgccgcgcggacccggcagctgtctgcgcacgccgagctccacggtgaaaaaaaagtgaaggtgtaaaagcagcacaagtgcaataagagatatttcctcaaatttgcctcaagatggaaaccctttgcctcagggcatccttttggctggcactggttggatgtgtaatcagtgataatcctgagagatacagcacaaatctaagcaatcatgtggatgatttcaccacttttcgtggcacagagctcagcttcctggttaccactcatcaacccactaatttggtcctacccagcaatggctcaatgcacaactattgcccacagcagactaaaattacttcagctttcaaaatacattaacactgtgatatcttgtactattttcatcgtgggaatggtggggaatgcaactctgctcaggatcattcaccagaaccacatgtatgaggacatggcaccacgcgctgatagccagtcttgcccttgggagaccttatctatgtggtcatcggatctccctatcaatg

SEQ ID NO: 370885 - DNA, 1037 bp, Homo Sapiens
  misc_feature (1017)..(1017): n is a, c, g, or t
  misc_feature (1025)..(1025): n is a, c, g, or t
atcaggccaaatcggccgagctcgaattcgtcgagagcgacgcgggtcacgtgagggcgcggcgcggcagcagctccggcggccgagacgggggcggcggccgcgcgggtctggcgggaccggtttggaagactttgccggcctgcagatggccttaagagaaggacggagccacatactgctgacggcccagaactggcagagagaaggttgccatggctgctgttgacagtttctacctcttgtacagggaaatcgccaggtcttgcaattgctatatggaagctctagctttggttggagcctggtatacggccagaaaaagcatcactgtcatctgtgacttttacagcctgatcaggctgcattttatcccccgcctggggagcagagcagacttgatcaagcagtatggaagatgggccgttgtcagcggtgcaacagatgggattggaaaagcctacgctgaagagttagcaagccgaggtctcaatataatcctgattagtcggaacgaggagaagttgcaggttgttgctaaagacatagccgacacgtacaaagtggaaactgatattatagttgcggacttcagcagcggtcgtgagatctaccttccaattcgagaagccctgaaggacaaagacgttggcatcttggtaaataacgtgggtgtgttttatccctacccgcagtatttcactcagctgtccgaggacaagctctgggacatcataaatgtgaacattgccgccgctagtttgatggtccatgttgtgttaccgggaatggtggagagaaagaaaggtgccatcgtcacgatctcttctgggctcctgctggcaaacccactcctcagctggctgcattttctgcttctaaggcttatttagaccacttcagcagagccttgcaatatgaatatgcctctaaaggaatctttgtacagagtctaatcccttttctatgtaggccaccagcatgacagcacccagcaactttctgcacaggtgctcntggttggngccttcggccaa

SEQ ID NO: 370886 - DNA, 868 bp, Homo Sapiens
  misc_feature (56)..(92): n is a, c, g, or t
gacgaatgtgactgatagactatatagggcgcctggagtcaccgcggtggcggcgnnnnnnnnnnnnnnnnnnnnnnnnnnnnnnnnnnnnnatcaggccaaatcggccgagctcgaattcgtcgagagcggagtcctgcagccactcggtacggcgctaacgccgcgaggtagctcggtgcgtctcgcagtaccagtgcgaacctttgggctctccaggtccgagatcctagtctcctgtcggctctgaggaggatggatccttctgcggatacatgggacctctcctcacctttaatatcattatggataaacaggtttgacatttatctgggctttgctgttagcattagcctttggatttgtgtccagattgtcatcgagatgcacgggatttgcaagcagttcttgctgaagcagttacgtccctggatctgcctgtggccattattaatctaaaagaatatgatccagatgatcatctgatagaagaggtgactagtaaaaatgtctgtgtcttcctggttgcgacatacactgacggcctaccaaccgaaagtgcagagtggttctgcaaatggttagaggaagcatccattgattttcgatttggcaaaacttacctgaagggtatgagagatgcggtatttggcctgggaaaattctgcctatgctagccacttcaacaaggttggcaaaaatgttgacaagtggctctggatgcttggcgtgcatcgtgtgatgagtcgaggcggagggcgactgcgacgtggttaaaagcaagcacggcagcattgaggccaacttcagagcatggaagaccaagttcatctcccagctgcaggcacttcagaacacggggagagac

SEQ ID NO: 370887 - DNA, 849 bp, Homo Sapiens
  misc_feature (42)..(42): n is a, c, g, or t
  misc_feature (56)..(92): n is a, c, g, or t
  misc_feature (635)..(635): n is a, c, g, or t
gcgccaaatcgagtatagatcatatagggcgcccgggctcancgcggtggcggcgnnnnnnnnnnnnnnnnnnnnnnnnnnnnnnnnnnnnnatcaggccaaatcggccgagctcgaattcgtcgagagcggggggaaagacctgtttcctcctgctctttcctctccacggatactctcgccaccactaaaagggtttagtataatccttttgtaggccagaaagcagattttcacttgggaagagacgacccgtagtatgggatgtggtatgataccagcaactggtctattatatcatttaaaccacatgggctatctaaagaggtatttggctattataaataaaatagtgatgaacacgtgtacaggtgtttgtacggacataagttgtcatttctcttgagtaaatacctaaaaagtgggcttgctggagttttactacccttggatgctgctgttgacatggaaaagattgaggaacaatttgctaatctgcacattgttaaatgttccttaggaaccaaagagcccacttaccttcttggtatagacacatcaaagactgtccaaggcaggaaaggaaaacttggttgctgttttatgttctaatggatcaatcaggaatatatgantaaaggaaaggtttaaatgtactacgagaatttagtggatatcctggacttcttaatggagtcagatttgcaaattcctgtgacagtgtatattcagcatgtactgatggcactgtgaaatgctgggatgctcgagtagccagagaaaaacctgttcagctcttcaagggttacccttccaatatttttatcagtttgatattactcgtactta

SEQ ID NO: 370888 - DNA, 699 bp, Homo Sapiens
agcgggttccacttgaccgctctaagccgccgcgcagccggcgttttctccggtacaggttgaggctactaaggtattctggctattcataaataagaatagtgatgaacacgtgtacaggtgtttgtacggacataagttgtcatttctcttgagtaaatacctaaaagtgggctggccggagttttacaacccttggatgctgctgttgacatggaaaagattgaggaacaatttgctaatctgcacattgttaaatgttccttaggaaccaaagagcccacttaccttcttggtatagacacatcaaagactgtccaagcaggaaaggaaaacttggttgctgttttatgttctaatggatcaatcagaatatatgataaaggaaggttaaatgtactacgagaatttagtggatatcctggacttcttaatggagtcagatttgcaaattcctgtgacagtgtatattcagcatgtactgatggcactgtgaaatgctgggatgctcgagtagccagagaaaaacctgttcagctcttcaagggttacccttccaatatttttatcagttttgatattaattgtaatgatcatattatttgtgctggtacagaaaaagttgatgatgatgcattgtaggtgtaagggatgccaggatgaattctcagaatttatctacaactaaagactcacttg

SEQ ID NO: 370889 - DNA, 480 bp, Homo Sapiens
  misc_feature (390)..(390): n is a, c, g, or t
  misc_feature (422)..(422): n is a, c, g, or t
  misc_feature (428)..(428): n is a, c, g, or t
  misc_feature (451)..(451): n is a, c, g, or t
  misc_feature (460)..(460): n is a, c, g, or t
gtatgataccagcaactggtctattatatcatttaaaccacatggctatctaaagaggtatttggctattataaataaaatagtgatgaacacgtgtacaggtgtttgtacggacataagttgtcatttctcttgagtaaatacctaaaagtgggcttgctggagttttactacccttggatgtctgctgttgacatggaaaagattgaggaacaatttgctaatctgcacattgttaaatgttccttaggaaccaaagagcccacttaccttcttggtatagacacatcaaagactgtccaaggcaggaaagggaaaacttgggttgctgtttttatgttcttaatgggatccaatcaggaatatatggattaaaggaaagggtttaantgttactacggaggattttagtggggtatccncggggncttctttaatggggagttcaggntttgccaanttccccgtggaccgtgtttt

SEQ ID NO: 370890 - DNA, 684 bp, Homo Sapiens
atcaggccaaatcggccgagctcgaattcgtcgagagcggagtggtgcaggaagacgcctgtgctgcccacactgctgacctcccctgggccctaactagctgtggctctcagggtctctggaacactggctcagctcaccttttcttttccactgcagggacctgctggtgaacgaggcgagcagggtgctcctgggccatctgggttccagggacttcctggccctcctggtcccccaggtgaaggtggaaaaccaggtgaccagggtgttcccggtgaagctggagcccctggcctcgtgggtcccaggggtgaacgaggtttcccaggtgaacgtggctctcccggtgcccagggcctccagggtccccgtgggctccccggcactcctggcactgatggtcccaaaggtgcatctggcccagcaggccaccctggggctcaggaccctccaggtcttcagggaatgcctggcgagaggggagcagctggtatcgctgggcccaaaggtgacaggggtgacgtcggtgagaaaggccctgagggagcccctggaaacgctggtggacgagggcctgacaggtcccattggcccccctggaccagctggtgctaacgggagaagggagaagttggactcctggtcctgcaggaagtgctggtgctcgtgggcgctcgggtg

SEQ ID NO: 370891 - DNA, 1193 bp, Homo Sapiens
  misc_feature (418)..(418): n is a, c, g, or t
ttctagtttcgggaatccaaaatcccaggatccctcagacttgagcctaatcacgcctggccaccaatcacgtcccagcaccctgggttcagttctgtctcctcgaacagcagctctggaagaggaagcacacaggcattccttggcactcaggctggtctccaggaaattaacacaggctctggcaaggtgagggacaatgtactttttggcagcataaagtgtggccagcactgtgtcagcagccaagtcaatttcatcacaatagatatatttcagcatagcgagaaaagcagcaggttcgacatctggtatacggatttcatctttgtcctctgcaagttctccgtaaaacatcgcatggaacacagagctcccaacagctaaaacatatttgtgtcctggcaaccgttgagtncccacctggtggcccaaccacaaaatgtacatctgccatcaaatcattattgaacatcatcgcatttctctctctaatggtgggataaagaccctgccagtttggggccgggataaggttgttgttactgagattctgctggtggtactgctggacgctggtgctgctggagttggctggctttttacgggggaatatatcagcagccatcttcttctttttagtcttcaaggtaattatttcataacaaactggtggcaacttgctgctgttgctactgctgctgctggtatttgctttctttgagcttttcttggacctgttctttaccgtctctggaagcatcaagaagaaggtgagacatttcatgttcttttccttgtcatctaccatgagtacagtgtgtctctctttagagttagatatcccaaattggtttgaacatcaaggaaaagagattagcccgggctaagaggttaactgaaaccaacaaagctgatattttgctgcttttctcagccaggcaaggtgaccttttcactatgttgaatagaaactggctttaagttttatccagtactgggtctgttaaatatatccccatcatgattcctgtttctcttatttgctcataaaaataactgtttcctagatcacctgaaaatgctacactgcaaagatgacaggcacagagctgtagcacttcttttctgaattaggtcagcaagatgggctggagctgcgtgagtctgttcagccggctgaagttgtgtgt

SEQ ID NO: 370892 - DNA, 1074 bp, Homo Sapiens
  misc_feature (53)..(89): n is a, c, g, or t
  misc_feature (141)..(159): n is a, c, g, or t
ggatgtatagactcactatagggcgaatcggggcttatcgctggtggcggcgnnnnnnnnnnnnnnnnnnnnnnnnnnnnnnnnnnnnnatcaggccaaatcggccgagctcgaattcgtcgagagcgggctgttgggctnnnnnnnnnnnnnnnnnnntggttactatggcggagtcggccggagcctcctccttcttcccccttgttgtcctcctgctcgccggcagcggcgggtccgggccccggggggtccaggctctgctgtgtgcgtgcaccagctgcctccaggccaactacacgtgtgagacagatggggcctgcatggtttccattttcaatctggatgggatggagcaccatgtgcgcacctgcatccccaaagtggagctggtccctgccgggaagcccttctactgcctgagctcggaggacctgcgcaacacccactgctgctacactgactactgcaacaggatcgacttgagggtgcccagtggtcacctcaaggagcctgagcacccgtccatgtggggcccggtggagctggtaggcatcatcgccggcccggtgttcctcctgttcctcatcatcatcattgtattccttgtcattaactatcatcagcgtgtctatcacaaccgccagagactggacatggaagatccctcatgtgagatgtgtctctccaaagacaagacgctccaggatcttgtctacgatctctccacctcagggtctggctcagggttaccccctctttgtccagcgcacagtggcccgaaacatcgttttacaagagattattggcaagggtcggtttggggaagtatggcggggccgctggaggggtggtgatgtggctgtgaaaatattctcttctcggtgaagaacggtcttggttcagcgaaagcagagatataccagacggtcatgctgcgccatgaaaacatccttggatttattgctgctgacaataaagataatggcacctggacacagctgtggcttgtttctgactatcatgagcacgggtccctgtttgattatctgaaccggtacacagtgacaattg

SEQ ID NO: 370893 - DNA, 953 bp, Homo Sapiens
tttgtgcaggcgcataacttcgtttatctacattatacgaagttatggatcaggccaaatcggccgaagctcgcaattccgtcgatgagcgggctagtggctgtgagccctgggcgctgcaaagcgtgtccctgccgggtccccgacgcgtcccgcgccctcgccccgccatgctcctgctgctggggctgtgcctggggctgtccctgtgtgtggggtcgcaggaagaggcgcagagctggggccactcttcgtgaccaggatggactcagggtcccgaggcaagtcagactgttgcagaggctgaaaaccaaacctttgatgacagaattctcagtgaagtctaccatcatttcccgttatgccttcactacggtttcctgcagaatgctgaacagagcttctgaagaccaggacattgagttccagatgcagattccagctgcagctttcatcaccaacttcactatgcttattggagacaaggtgtatcaggccgaaattacagagagcagaaaagcaagagtggtgcatagggtaaacagagcacaacacggcaataaaaccacagaagaaaatggagagacagggcgactgaaatattcagagcttctgcagtgattcccagcaaagacaaagccgcctttttcctgagttatgaggagcttctgcagaggcgcctgggcaagtacgagcacagcatcagcgtgcggccccagcagctgtccgggaggctgagcgtggacgtgaatatcctggagagcgcgggcatcgcatccctggaggtgctgccgcttcacaacagcaggcagaggggcagtgggcgcggggcaagatgatctgggcctcccaaatctactgtcataaccaaacatgaacatttgccaacataattttaaacctactgtattacacaaggccaggattgcccagaacgggaacttccggacact

SEQ ID NO: 370894 - DNA, 796 bp, Homo Sapiens
  misc_feature (55)..(87): n is a, c, g, or t
cgatgtatacgactcactatagggcgacccggagttcacgcggtggcggcgcatnnnnnnnnnnnnnnnnnnnnnnnnnnnnnnnnnatcaggccaaatcggccgagctcgaattcgtcgagagcggatgttctaaagggatgtcatcatttacaaaatgtctttgttgagtctgaatggttcaaacaatagcaaaaaaggattatttctctcttggacatttcaaagtactatgacacaaaatatccaagacttgttatggtgaggagccaagtggaatggaaaggacagctcatcccggcggctgggagtgcatgcacacacatgccccctttttcttgcctactaacaggatctatagaaggcgtacataatgaagcaagagatggaccctgagggtacttgaagccaacaagtttcacttctggaaaaagacttcagaatatgagtttaaaatataaacaagggaatttgagccaagacacaagaacaaactttttttgacaattatatctttattattcctcttacagagctacatttactcttactaagtttcagagtcaggtagtaatttacagtaagactgaattaccatccataacgttagatgtccttattgaaacttcaacatcatttccaaatatcagcattagcattgtgcttgacattcatttaacgaagttactgaaaatctattaagtataagacatcagttattgttaactagaagtttctgaaaacatttcagcaaaatagcctgttgagaaaaatgtgtatgctgaaacacaaaatg

SEQ ID NO: 370895 - DNA, 1156 bp, Homo Sapiens
  misc_feature (926)..(1023): n is a, c, g, or t
agcggcgttgaggcagaagaaaagttaacagtatttaaagcagcatttctctcttaacgttcctgggagactccaacaaatggagaccagaaacaaggcaaccacgaccttgctaggttctctgaggaggggactttctatgttcacgtcccaccttcttcgaggacatgaccaagggacaggatcatacagatgaggtgaggggatggttagcagcgataaacattctcagacccttggagagaaaccgttgctagcttgctggtcccgaaagattgcaactttggctgctacagaaaggatagaacctttttggggggagggtggggagggagatatttatttgtgcccagaagcagttatgtatgcttcttgtcttggttactgtacaagatacaaatgactcgagttgtggattgcaagaaactcttttattaaacttggaacaaccatttaaatgaaggatttgtgagatagaattcaattaaagcgatttgaatgcacagtaagtggataatctgagtacaatgaaatttcttaagttttagaacatgagataaagttgtatactctactttcatgttaaacatgttaatcatgattactttaagcccacatccactgagtaaagagtcactttaaactttataaatcaaagagatattaggaacattcagaattattgtgtttgtttttgttttacattgttgctgcactggcaataagtatgtggcactgtttttatttgtttatgttatttaaatacacacccagacacacagcacacacagttttggctttttctggaaaatctttctttctcttctctctccatgaaaattaaaacacacaagtgaatgaagtaattacatagtccaagattagaaatacaagtaaaatatataggtataggtagatagagtgcnnnnnnnnnnnnnnnnnnnnnnnnnnnnnnnnnnnnnnnnnnnnnnnnnnnnnnnnnnnnnnnnnnnnnnnnnnnnnnnnnnnnnnnnnnnnnnnnnntgtttagtttttggaccggggagtaaaaggtcccttttaaagtgcggtttgcatccttttaaccccctggttaggggatagaagattgggccggtcaaaggtgcaacttgttctggaggttattttaagaccc

SEQ ID NO: 370896 - DNA, 814 bp, Homo Sapiens
ggttctctgcctctgtcaggcgctgctgcgtttcgggagttttcgcacttgatcctgtggtgccgtgggtctggcgcgcatatgactgcctatgatgtcagcctgtggtgatcgtgccctgctttggagtgctacatggagtggggtgttgcctgttgtcaggatgaaagaagtgtggcttggtgctcccgtataagatatacagtcgtcagacaggttgtcaagattccctgttctcacgctcgaatggagttgcttgctaagatctgttggcaatcacacgatcgtcgatcccggcagggcaagcgatggacgaacgtctaacatcgtgatacttggctctgatgaattccgctttattgggatgtactttatcctgtggattagctttacgtctaccactcataatagacgcagggtccagcaaagaatgctcccatatagagttagcaccgttattatacaaggtctcaaccatctgaatgcagtgttggaggccacggtgtgtgtttcagatgcctcacttgggagatatggcgccctagactccgatggacactgcagcactcatcacataaaaacgttcccctatttactgatgcccaggaaggatccggcccgctgcagtcagcgcacacctcgctgctccggagccgtttcgacatggctcccacctcccacctgcggggaactagaggccgggggacagcaaaggtggcggtggcggcggcgcttccgctctaacgggtcccagctgcggcggcgctgacggcggcgcctctcccctcagcgccttgcagccttagcacccgct

SEQ ID NO: 370897 - DNA, 692 bp, Homo Sapiens
  misc_feature (122)..(131): n is a, c, g, or t
gaggcgactcctgcgtttagcatacattatacgaagttattggatcaggccacaatcggccgaagctcgacatcgtcgatgagcggagtgctagtaagcgagagcgagagcacatgaacagnnnnnnnnnngccttaagaggaccgaaggggaggaaaggacaaacggatggacaaccacaaaacgcagcgatagcggaaattttccagcgccattggctgggcagcgtgagtccttcggtcggtgcgttgatttcagcaccgtggggaactggacagcacctcgcgggggacttctgggcaacccgcaaccacagcaagaactccaccagcagcctcgaacaacagaagccgcggaaaacccctgctatggtatcagagaggcaagggtcagattccgacgacacaagacatgacaacaggcagatgcagacctgatacatacgactgacaaacccatctgacattgatatctcgtaaacatgcactaggagtatcataagcaagcatagacagtaggtaaacatatatcgtgactgcgagtgacaagaatccagatacgaatgccgaatatctggtaaagggggatgtagctgaataaaattgaaatatgtaataataatgtgtacaccttactatggatgcatggtagagttaagaaaaagatgatgatgagaggcgaaagaaagaagg

SEQ ID NO: 370898 - DNA, 1082 bp, Homo Sapiens
  misc_feature (47)..(83): n is a, c, g, or t
  misc_feature (123)..(161): n is a, c, g, or t
atgtatacatcatatagggaatcggagtactccgcggtggcggccgnnnnnnnnnnnnnnnnnnnnnnnnnnnnnnnnnnnnnatcaggccaaatcggccgagctcgaattcgtcgagagcgnnnnnnnnnnnnnnnnnnnnnnnnnnnnnnnnnnnnnnnagggagtgagggtctctcaggcctccaggtctcccagcccctcctttctctgtctctatctctctgtgctgtctcctttccatctccttcccagagtgggagtgtgtcgttgcttcatgattcctctctccattactctccctgcccttctctgtgggggtgccttatcctgagccatctcctctccccgtgttgtctctgctcccctgaacctgggagacagatgaggagactggctcagccaaggcccctgagagggtcaagcgttgggctgttgcctcgctgttcccatcccccagccctggctcctagtgtcctcccaagtgggagggagtcctgccgtgctctcacttagagggttctgaacccgttccctacacagaaatcttggaaaccaaatgctgctgagtaaggatgaagctttgagcctcctgcccctgctttctgcccagggagggagaaggaagagggggagctggtcttctctggaggttcccccagaggccctcgctgtccgaaaacgaaaaggaacttgattctgagcccagggtcggaacccattgcttcagaagagttgtcattccctcggcttcaaggtcccaacccagggttgggttgagtgagtcccacaaagggcaagtgggggcccgaggaaagcctctctggggccagggtaacagagctaaaaggcctgggtctgacagatccaagaggccatgtctgcgctgcgtgtaaccctaccacacggagagggctgaggaacgggcagagcgcctcactgaacccatgcctgaagtgcaccaaggatggaacgggtgacccctgaagcagggcaaggcgaccaacacagatcaccaagaacgccccactgagaaaaggtagggacaagacgggcgccaataaagaagacgcacaaaagag

SEQ ID NO: 370899 - DNA, 1370 bp, Homo Sapiens
  misc_feature (1294)..(1330): n is a, c, g, or t
tagatatatttggataattaagacttttggaaatgactcttggtttgtaaagggaaataaatgttaagatcgatttcagttagttattttggaatgatggatatgaataatttctggaagcaccttaaatcaggagtttaaaggcatattgagacagtttggtcaagttaagttaccgaagttataaaggtagctacaggcaatctgttataaaacttctttttcgaaggcaaaatttctcaggaggacttgttgggggttgtgtttaaataaagaaaaacctgtgccatccaacttgaagaaaaatcagaaagtatttttctccatggaccattattctatttgaacctaacctgaattccctcatagtcaaaacctgccatgatgatgtgaattcatttccgcatagtcggaataatttttgctccaaattcttaaaggagacaatgaattagtagcttgtaaattttgcagatctgggccttcaataacttagtagaaggcaataaaatagagggaaaaatgggactgtggattacaactgttcaaatttcatcttaatttcttctatttttctcaaccatatttcttttatttttacaatcattattaaaatatttccctaaagaaatacaaatggtaaaggtattgaaagtcacatttcgtttatctgaacaagtattaagattgtccatcatttcaagacaaagttttcttaacagtgaaaatcacaggaagaaagtaatcagtattttcatagataccaatttatatggtagctgcctgttttttcacaatttcaaaataagtcagtataggataaacaaaagttaacagagaaattcgtcccttttgaagttttaatttttttcaagtattttatacccctttgactacttcatctgttagaatttaagacccctgaggtacataacagaaaagtccaaataagaaatgagaaccaaaattcaagggtatttaactcattgaagcatatctttccacagaggaacaaatcatgtttttttctgtataattttctattaacacaaacttatgtcatgaagataattaagtggtttgaatataatcttaatacataaaaataaaaaaccagaaagaatacaattttaagtttgggagattataaattctttaaatcttgttcaagatttgttcaaattattataaagtcaattagaaatacctacaatggaagaatgcccttactcttaaagaagatatttgacttaccgctctcgacgaattcgagctcggccgatttggcctgatnnnnnnnnnnnnnnnnnnnnnnnnnnnnnnnnnnnnncgccgccaccgcgttaatccaggcccctatatatctgtct

SEQ ID NO: 370900 - DNA, 1001 bp, Homo Sapiens
  misc_feature (914)..(950): n is a, c, g, or t
ggtatcaccattacttctcctaaagtcacgacataatatcacctacagcagaaatgaggacttcagtggaattgacatctccttccatcaagcgcatttgcagtccatctttagcaggacctctctctaatggctaaggctaggcagaagaatttgaagacagtctggtttccattttcctaatgcagcctggcccaagagccaggactcccataagactagtctactgtgggagtcagggtcttttccacgtgtggaggctagtgtttgatgctcgacggcctggagtaaagggcgaaggggagaaggtaaccaaccaggctggcctcgggattcgcagaggagggctggggctttgacttctgcagggaggtgagcagtgtggccaagggctactcaaggaacgcctctgcgagaattcagactgtggttgagcgcacaaagcaagagtgtgcgaagaaaagttaacgcctctcccagctgaccccaaaatctgctaatctgggcctgacggaaaaaattcggagaagaaccacctcgcccgagttacgtgaaaaggctgggtacgaactactctggctctacttggggcgccggtctcagagcgatgggcaggacgtccgcgaggaagaaatgagtgacgatgatttttcaaggagtctgaaccagctcacccatgcaataccctcctcccatcgagcacccagcgtacaatcatcgaaggtgccgagggtcctgccctcagtctcgatggcggccggggcgcgccccggccacggcgcacgcgccggcctcagcgctccctcctccatgccctcggcgcacggcgccgcccactcacccagacgcacctctccgtgcgtccccaagctcccgctctcgacgaattcgagctcggccgatttggcctgatnnnnnnnnnnnnnnnnnnnnnnnnnnnnnnnnnnnnncgccgccaccgcggtgagctccaagtcgcccatagtgagtcgtatacatcc

SEQ ID NO: 370901 - DNA, 877 bp, Homo Sapiens
  misc_feature (33)..(33): n is a, c, g, or t
  misc_feature (73)..(109): n is a, c, g, or t
gaaaattctactaacaactcaaataatgagggngcccacatgggggagtttaaccaggctgtggtggcggcgnnnnnnnnnnnnnnnnnnnnnnnnnnnnnnnnnnnnnatcaggccaaatcggccgagctcgaattcgtcgagagcggatgtgaccgcctggggagtcaggtgcggaagtcggggtctgacccgctccaggtccgggactgcggatagaagaggaccgccgccttgagggaggggtggaaactgggtgccggctcagcgcgcgacctccggccctgcgcgtgcgccgtggcgcggcccggctgacaggttctttaatggaggagccaatctctctgcacacctggtttcatctaataatatacagacaccagctctgaggccagttaatcatccccagtgtccaggcacagagtagtcggtccgcctcacaatgttggactttctagccgagaacaacctctgtggccaagcaatcctaaggattgtttcctgtggtaatgccatcattgctgaacttttgagactctctgagtttattcctgctgtgttcaggttaaaagacagagctgatcaacagaaatatggagatatcatatttgatttcagctattttaagggtccagaattatgggaaagcaaactggatgctaagccagagctacaggatttagatgaacgaatttcgtgaaaacaacatagaaattgtgaccagattttatttagcatttcaaagtgtacataaatatattgtagacttaaacagatatctagatgatctcaatgaaggggtttaaattcagcaaaccttagaaatgtgcttctcatgaagatggaacaacattctatgtgaagcctgtactatctg

SEQ ID NO: 370902 - DNA, 877 bp, Homo Sapiens
  misc_feature (43)..(80): n is a, c, g, or t
ggatgatagactatataggggctcggagttaccgcggggcggnnnnnnnnnnnnnnnnnnnnnnnnnnnnnnnnnnnnnnatcaggccaaatcggccgagctcgaattcgtcgagagcgggagcgtgccttggccgtcgcatccccgagggagtcgtgtcggcgccaccccggcccccgagcccgcagattgcccaccgaagctcgtgtgtgcacccccgatcccgccagccactcgcccctggcctcgcgggccgtgtctccggcatcatgtgtggtatatttgcttacttaaactaccatgttcctcgaacgagacgagaaatcctggagaccctaatcaaaggccttcagagactggagtacagaggatatgattctgctggtgtgggatttgatggaggcaatgataaagattgggaagccaatgcctgcaaaatccagcttattaagaagaaaggaaaagttaaggcactggatgaagaagttcacaagcaacaagatatggatttggatatagaatttgatgtacaccttggaataagctcatacccgttgggcaacacatggagaacccagtcctgtcaatagccacccccagcgctctgataaaacataatgaatttatcgttattcacaatggaatcatcaccaactacaaagacttgaaaaagtttcggaaagcaaaggctatgacttcgaatctgaaacagacacacagacaattgccaagctcggttaagtatatgtatgacaatcgggaaagtcaagataccagctttactaccttggtggagagagttatccaacaatgggaaggtgcttttgcacttgtgtttacaagtgttcattttcccgggcaagcaggtggcacaagg

SEQ ID NO: 370903 - DNA, 702 bp, Homo Sapiens
atcaggccaaatcggccgagctcgaattcgtcgagagcggcatacctgccccggctacctatacttccttccaagactcggacactgaagaaacaggtggagaacaaggagaacattgaaggggcacaagatgccacagaaaattctgcttccagtttagcaccaggttcatcagaggtgcacaggcctctagtggatccccagcactgcctcgaaagcaaagagacaagtcacccagcagcctcttggaagatgccaaagagacatgcttcaccagggataggaaggggggcttcttcagctccttcatgaagaagagaaatgctcctacaccccccaaacgcagcagctccttccgagaaatggagaatcagccccataagaaatacgaactcacgggtaacttctcatctgttgcttctctacagcatgctgatgggttctctttcactcctgcccagcaagaggcgaatctggtgccacccaagtgctatggggggagctttgcacagaggaacctctgtaatgacgaccgtggtggcgggtgggggcagtggcactgctgaggggtgggtggtctggcatcacaggcttctttacaccacgcttaatcaaaaagacactgggcttacgagcaggtaaacccacaaccagtgatgacacttccaagccttttccaaggtcaaactctacatcttccat

SEQ ID NO: 370904 - DNA, 904 bp, Homo Sapiens
  misc_feature (67)..(85): n is a, c, g, or t
atcaggccaaatcggccgagctcgaattcgtcgagagcgtggggttggagtctccggaagcctgaannnnnnnnnnnnnnnnnnngacgaagcggcaggttgcaggctgttcagagggtgattttaaaaagccgcacttcagagcattccctggcatgctgcctttccgcgctcctataaatgaccacaaagctcagcgcgtccacattcatcaagtcagaagtcctttattttgtctctgtgaccctgaaggctggtgctattaatgtgatttacgcatgggagtctgtggggagtgtacctgaagtggaagcactgcgagacgccaggcgtgaagaccctgtgtaatctgaagcactgcgagacgccaggagtgaagaccctgtgtaatctgaagaaacttctgaatcggcttcagaaagaccaccgggaggacgtctacctctacatctctggacacctgaaccccaacaagctctaccagcctccggagacgatcttacagcactggcccaatgcccaccggcccaagggggagcgcgcctctgaggtgggagagccgcccgcagggaaggtggcgaggatgaaggaggccctggcgcacttcaccatccaaacggccctggtccccagtgaggcccaggacaccccgctgttcaggtacctgaaaccccaggcctctctttcccacacttcagaggaggatttccttccagttggaggctgtcagagaggggaaggaagaaaagaaacggaggccctcctggacggggccctcctgggatggcgcaggaggggaagaactccggctgcccgactttgaaggtgctgtgctaccaggaaggccgggtccagaggcaccaggtaccggcaccactatgtcagtcctaactggcggagcaca

SEQ ID NO: 370905 - DNA, 850 bp, Homo Sapiens
atcaggccaaatcggccgagctcgaattcgtcgagagcgggggtcggggttaggcggcgctccgcgagaaccaaagtgcagccgctgacccggcaaaactcagcgggggctggatagcaatgcccaagtactgcagggcgccgaactgctccaacactgcgggccgcctgggtgcagacaaccgccctgtgagcttctacaagttcccactgaaggatggtccccggctgcaggcctggctgcagaacatgggctgtgagcactgggtgcccagctgccaccagcacttgtgcagcgagcacttcacaccctcctgcttccagtggcgctggggtgtgcgctacctgcggcctgatgcagtgccctccatcttctcccggggaccacctgccaagagtcagcggaggacccgaagcacccagaagccagtctcgccgccgcctttcccctacagaagaattacaccccttgccccagagccctgccatcccagtctctggcccagtgcgcctagtggtgctgggccccacatcggggagccccaagactgtggccaccatgctcctgacccccctggcccctgcgccaactcctgagcggtcacaacctgaagtccctgcccaacaggcccagaccgggctgggcccagtgctgggagcactgcaacgccgggtgcggaggctgcaacggtgccaggagcggaccaggcgcagctgcaggccctggaaacggctggcacagcagcttacacggggagagcctgctggcacgggcaacgccggggtctgcagcgcctgacaacagcccaaaccttggaccctgaggaatcccaaacttaccatcatctgtg

SEQ ID NO: 370906 - DNA, 1000 bp, Homo Sapiens
  misc_feature (52)..(88): n is a, c, g, or t
  misc_feature (779)..(779): n is a, c, g, or t
gaatgatacgactcactatagggcgactcggagctcacgcggtggcggccgnnnnnnnnnnnnnnnnnnnnnnnnnnnnnnnnnnnnnatcaggccaaatcggccgagctcgaattcgtcgagagcggagggtgggaggcgaggaggcagcctgagggaaggaacaggagggaagagagatgaagggcaagaccggggccagccatgcctgtcctaacagcagccacccagcagtggcccagcctgctgagaactagaaaatcagaagaaaaaggagaatccaccaggagacccaggttcgcatgagcaggggcctttatctgaagttaatggaagctgagccaggtcctgacaatgtgccttctgatggggagatgagactttcctctgaaagctaaggtaactctgaagcgtgagctgccagaattcaaggccacctgcttaacagaagacaactagaaacctcatccatgagcagagtgcagaccatgaattacgtggggcagttagccggccaggtgtttgtcaccgtgaaggagctctacaaggggctgaatcccgccacactctcagggtgcattgacatcattgtcatccgccagcccaatggaaacctccaatgctcccctttccacgtccgctttgggaagatggggggtcctgcgctcccgagagaaagtggttgacatagaaatcaatggggaatctgtggatttgcatatgaaattcgggagataatggagaagcattttttgttcaagaaacagataatgatcagngaagttatccctatgcacctggccacctcccccatcctgtcagaaggagcttcgagaatggaatgccagtgaaaagggggtctgtggacaggatgagaggcctggaccagcacgccagccaagtgatcgctccaggagaagccgtcaagcagctctgtagtaaaagacgagaaggaacacaggcgcgccaaacgtccgctgggccggcctggcaaacgctg

SEQ ID NO: 370907 - DNA, 1114 bp, Homo Sapiens
taatgaaattaatctccgccctcgccccgactgaagctgcggcttgcggttcagcgggttctagggcgccgggcgctcgggcctcggccatggctcacaggccgaaaaggacttttcggcagcgcgcggctgattccagcgacagcgatggcgccgaggagtcgcctgctgagcctggggcgccgagggaacttccggtcccgggttctgcggaggaagagccgccctctggaggaggccgcgcgcaggtggcgggactgccccaccgggttcggggccctcgtggccggggccgggtctgggcgagctcccggcgtgccaccaaagcggctccccgcgcggacgaaggctcagaatccagaacccttgatgtgtccacagatgaagaggataaaatacatcactcctcagaaagtaaggatgatcagggtttgtcttctgacagttctagctctcttggagaaaaagaactttcatcaacagttaagatcccagatgcagcttttattcaggcagcccgcagaaaacgtgaattggcccaggcccaagatgactatatttctttggatgtacaacatacctcctccatctctggtatgaagagagagagcgaagatgaccctgagagtgagcctgatgaccatgaaaagagaataccatttactctaagacctcaaacacttagacaaaggatggctgaggaatcaagtatggatttaccaatatatgaagattaggatattttttattagaatataatatgagagaatctccataaaaaatgtaatatgctgtctcacattttatagtgttgataatggtttttaacatcgatttggtccatgatattgtgacctctaaaagatgtatctgtatcaaaatgttattatcaaggagtatgtttaataatgtttattaatgcctgacctcccaccttgatgtttttggacaggttaaaaaaaatgtgcagtatcttactttcaaagcattgaaaacgatcgtttttacctgtataaatatattttttttaacatggaagcatctatagagattttagatgtcatgtattaaaatcttccctgctgtaataaaaaatttcctctaccaaaaaaaa

SEQ ID NO: 370908 - DNA, 702 bp, Homo Sapiens
tcggcgcaagcgtagggccgctcgcccgtgtgcgtgcgtcggtggcgcgccaggcacgagctgccgccaaaggcgcgtccgcagtccgggcacgcgtacggcttctcgcccgtgtgcacgcgcaggtgctgtgcgtagttggagctctgcgcgaagcggcggccgcagtgcgcgcatgcgtacggcttctcgcccgtgtgccgccgccggtgctgccgcaggttcgaggcggccgagaagcgtttgtcgcactcggggcactcgtagggccgctcgcccgtgtgcgtgcggccgtgtttggtcagcgccgacttctgtgagaagcgccgcccgcactcggtgcacccgaagggccgttcgcccgtgtgcgtgcgcgcgtgcttcgccagcgtggagcggcgcgcgaaggcgcggccgcagtccgggcacgcgtggggacgcgccgggtcggcggacggcgcgggcgcctcgcccgggacctccttgttgtccatggggatcttgagtttcaccacctcatacttctcctcaccctcatcctcctcacccttcaccagcagcaccatctcctcctgcatctcttcctcctcctcttcctctgcctgctgttcgccaggcatcttggtgtccagccgaaggttcggcactcgcggtgccccaggcctgggcgccgggcggctgggcactcagcgagaccccgct

SEQ ID NO: 370909 - DNA, 816 bp, Homo Sapiens
  misc_feature (46)..(82): n is a, c, g, or t
tttagactcactataggggaatcggagtcaatcgcggtggcggcgnnnnnnnnnnnnnnnnnnnnnnnnnnnnnnnnnnnnnatcaggccaaatcggccgagctcgaattcgtcgagagcggccttgtgagtaccaggttccatcagacaaactagaaaaggggatcccagacatgctgctgctgtttcactgtggagcatgacttagcagtattgaaacagatctgactttttgcttggcagcacaaaaatgatgttattttagaaactctgttggaaagtataggcatgaaactagtctgaggtgagaggcctgccttttcagaaaagttttaatgaaacacgaagtaattagcttttttgtatgtttagtggcacaatttttaatttcgttgaagtttgtaataattttaactgctttttaatatgtgtaccactcatttgtatgcaaccatggacaacttaaaaaaatacttttgtgttctttttctcccttttatttttagttaatacataataacacatttgtgggatacaaagtgatatttcagtacatgtatacaacgtgtaatgatcaaagcacagtaatcagcatatccatcacctcagatgtttatcatttctttgtgttgggaacattcagaattctctcttctagctttttgaaaatatacaatagattgtcgttaagtatatttaccttgaaatactacagagcactagaacttattgagctgcaattttgtatcaacctctccctctcctctcctcccactagccttcccagcttctaaataaaccacaattcaagtctcc

SEQ ID NO: 370910 - DNA, 1021 bp, Homo Sapiens
  misc_feature (71)..(107): n is a, c, g, or t
ccacaacaccaacaaccaccgccgacgcgcagtcgaccaatagggccacgtggttaccggggggcgagcgnnnnnnnnnnnnnnnnnnnnnnnnnnnnnnnnnnnnnatcaggccaaatcggccgagctcgaattcgtcgagagcggggcatccaatcaacactttaaatataaaacttctaccttttatactatttcagtgataaaactaaaactacctctcagaatagcattttatgtttgtattattaaactcagcttttagtattatacatgtagattgaggcatgtaacataagaaatatgtaaataacttacaacatgctttggaaggacgtttgtatgtgtgtctttggttgagagagtggagcaataaaaaaagtgtaaatatagcatgctgaagacctgcatggataaaagatttcgcttctgtccctgatcgtatctttattcaattcagttctccacattgtgctatattttttcaattttgctttatgtttttcttctgttcgtttttaaagttaaaaggaaccttggaggttctccagtctatttttgcataaacagcaagtagtgccagaatcacacatagaacttctacaagttgttagatatgcccaggcttccgttcagtaaatgtggcttggaacccaggtatctggttagtcatgttttttaactttagaagtgattccgatgagcagtctgttgaggactaatacctttattaaaaggtttaataaaatcaaaccttttcatagaacaaaaaccgaacaagacaccaccacaaccacatagataaagagctacactaccgaacggagatgagacccgacaataagagcgggacaaacaacaagggggggaggggcccgcacacacaaattatggcgacccccaaaggagggaggaacaaccacccaacgccgagcaaacacaacgggacgaaaactgacgctgtgagataacgtgttccgaccaaaacagacacagaggcaacgagaagaaagagagcgca

SEQ ID NO: 370911 - DNA, 1167 bp, Homo Sapiens
agcgggggggccagcgcgcccagcccagccaggctcggacagagggggcggggagagggtggagcgcggggagccaggcgaggggccgcgacgacgggactccattagccgctccggccacaggcagcgcttcgccagccgaggaaccggacgcagacaccgccgccccgcgagcctccagcccctcgcctgttgccgcgcgagtcccgggcccggagcgctaggagcgcgcggaaggagccatggctctggacgggataaggatgccagatggctgctacgcggacgggacgtgggaactgagtgcccatgtgacggacctgaaccgcgatgtcaccctgagagtgaccggcgaggtgcacattggaggcgtgatgcttaagctggtggagaaactcgatgtaaaaaaagattggtctgaccatgctctctggtgggaaaacgaagagaacttggcttctgaagacacattggaccttagataagtatggtattcaggcagatgctaagcttcagttcacccctcagcaacaaaactgctccgcctgcagctttcccaacatgaagtatgtgaacggtgaaagtgaatttctctgatagagtcttcaaagctgtttctgacatctgtaagacttttaatatcagacaccccgaagaactttctctcttaaagaaacccagagatccaacaaagaacacacaaagaagaagctagatgaaccagtctgaagattgacgcacttgaattagaaggggctcttatcactcctggaatcaaggcgctgctgttctttacattgggcctctgaaagggcagttattatctcacagacccggactgtgctgtcaaacaatggaccctcctatgatgctcatggaaggaagcccttggtccaacattggcgttgggttgggggaacgagaggtagggtggaagggaacaccggggttatatggtggtgaggaccaatataggttccggaaattgggagaagtttagcgcgcagccgtctttgtgttagcgagaataccagggatgcgtggttcctcggacgctgatgtgtaccatgtctgtaattgatgacgagtcataagatgtgatatactatacattgtcgttgatgagagagggaggtaggagacaataagtaataagtaataagtgtc

SEQ ID NO: 370912 - DNA, 935 bp, Homo Sapiens
gtggaggcgataccttggtgtatatacattatacgaacgttatggatcaggcaaatcggcgagctcgaattcgtcgagagcgggcacatgcgcggcagcgtcttttccttcttcctccacttcccctaccctccaccgtccgggagccgccgccaccgacgccgaggagtcaggaagttcaagatggccgccgcggagacccagtcgctacgggagcagccagagatggaagatgctaattctgaaaagagtataaatgaagaaaatggagaagtatcagaagaccagtctcaaaataagcacagtcgtcacaaaaaaaagaagcataaacacagaagtaaacataagaaacataaacattcctcagaagaagacaaggataaaaaacataaacataagcataaacataagaaacacaaaagaaaagagattattgatgcttctgataaagagggtatgtctccagcaaaaagaactaaacttgatgatttagctttgctagaagacttggaaaaacagagagccttgattaaggccgaacttgataatgagttaatggaaggaaaggtccagtctggtatggggctcattttgcaaggttatgagtctggctctgaagaagagggggaaattcatgaaaaggcaagaaatggaaataggtctagtactagatcttcaagtacaaaggggaaacttgaacttgtggacaataaaattactacaaagaaacgaagtaaaagcagatccaaagaacggactagacataggtctgataaaaagaaaagtaaggggggtattgaaatcgttaaagagaaaacaactaggaagcaagtcaaaggagaggaaaaaatctaaaagcccatccaaaagaagtaagtctcaagatcacgcaggaaatcaaaatccctacccttagaaggcgatctccagagaaa

SEQ ID NO: 370913 - DNA, 822 bp, Homo Sapiens
  misc_feature (50)..(86): n is a, c, g, or t
  misc_feature (743)..(743): n is a, c, g, or t
  misc_feature (748)..(750): n is a, c, g, or t
  misc_feature (755)..(755): n is a, c, g, or t
  misc_feature (779)..(781): n is a, c, g, or t
  misc_feature (796)..(796): n is a, c, g, or t
ggattgtatacaatcactatagggcactggggtaacgcgggggcggccgnnnnnnnnnnnnnnnnnnnnnnnnnnnnnnnnnnnnnatcaggccaaatcggccgagctcgaattcgtcgagagcgtggggtgtgatgcgagcgtcacggtggggatgctgctggctgcgcggcgctgagggccagcgagagcgagagcccgcccggggcggaggacggactcatccggatctggctgcagcgtgggctcggagctcccccttcctctcggtctccctctcggcccccctttatttccttcttgctttgcgtctttaacacctctcgaccctgtcctccccccgccactggaagtcttcccgtctctaaatggaattagtggagcccggagcctctggtgtaacgcacagacatgatccatgggcgcagcgtgcttcacattgtagcaagtttaatcatcctccatttgtctggggcaaccaagaaaggaacagaaaagcaaaccacctcagaaacacagaagtcagtgcagtgtggaacttggacaaaacatgcagagggaggtatctttacctctcccaactatcccagcaagtatccccctgaccgggaatgcatctacatcatagaaagccgctccaagacagtgcatttgaactttactttgatgaaaagtactctattgaaccgtcttgggagtgcaaatttgatcatattgaaagtcgagatggacctttttggctnttctnnncatanttgggacgtttctgtggaacacannnatcacctgtcactanatccagtgggaagatttctatggatt

SEQ ID NO: 370914 - DNA, 750 bp, Homo Sapiens
  misc_feature (50)..(86): n is a, c, g, or t
gagtatacgactcctatagggcgaatggggtctctcgcggtggcggccgnnnnnnnnnnnnnnnnnnnnnnnnnnnnnnnnnnnnnatcaggccaaatcggccgagctcgaattcgtcgagagcggtgcgtggcacagaaaatgaggattattaaaggtcagttgctcgcagtgctacagctagaatgaagcacatcaacctatcatttgcagcgtgtggatttctgggcatttaccacttgggggcagcatctgcactttgcagacatggcaaaaaacttgtgaaggatgtcaaagccttcgctggggcgtctgcgggatcgttggttgcttctgttctgctaacagcaccagaaaaaatagaggaatgtaaccaatttacctacaagtttgccgaagaaatcagaaggcagtctttcggggcagtaacgcccggttatgacttcatggcccaactaagaagtgggatggagtcgattcttcctcccagcgctcacgagctggcccagaaccgactgcacgtatccatcaccaacgccaaaaccagagaaaatcacttagtctcccactttttcctccagggaggacctcattaaggtcctcctagccagcagttttgtgcccatttatgcaggactgaagctagtggaatacaaagggcagaagtgggtggacggaggcctcacaaacgctcttcccatcctgcgcgtcggccggacagtaaccatctcccccttcagtggacgactg

SEQ ID NO: 370915 - DNA, 690 bp, Homo Sapiens
tgagccaccgcacctggccaaaaaaaggcattttgatttaggttgctgtgtttgcttgttgataaagaaaactcaatcgggacactagttttgtgctcagctttaggccgggtagctaatgggaggatgtccagcctgtcactgtgctcccagcgcaaggaaatgggtgcccacctggaatcaggagaagaggcttttccctcctgttctgcaaccagggtggagctatctttccagggaagccagctgagaggtttcagggcttcggttattttatgggggttttaaacctcctaacttttcaatgacaaatggctcccaggtgccatagtctctgttaaatcctcaaacattcacaagcacacactgccaggggtacgggttgtctttcacctgcatgtttctaaggctctttattcaatctcacggtgtcagtgtccagttgtcaaagttatgaatcttcctcctgcttctaaacagggctgacagttatactctcgtctagtctaggaacatgtatgctgctggggataccctggtaccaggatctgagggccaccgcgtggcatctctgagagctgaaaatccacagagtgcctgtgggaaagccaaggcccttgggctgtgtggcttttctatcccttggatttacaggtctgggaaatggctgcttcttagttttaccccagc

SEQ ID NO: 370916 - DNA, 647 bp, Homo Sapiens
cgggcctggtacgttcatggtagttgcacaaggacgatgtcagggttctggagcagccaagtagcagcgccgatggaattgtggttgacgatggaagagtgaacgtagcagccatagagacactgccaggagacaggctggggtggggggatgggctagtctgccctcccaactcttcctctccatgccctggaccttcagcttcatgtggtcctctcgggtggtcttcccatccttccgcttcttccagaggtaaccatccttccgatatttcaccttcttgcgattgtagaggatgatggagccattctgaggcctagtctttggggcacaagacagccactcatcatgcttctcaaaggtgatcagtgtaggatgcaatctcctcatcttgtattccaccgtagcctctctggaggcagcagcgggcagcgaggaagacactccagcagcttcttggggagaaagatcttcaggtggtggctgttttcagcaacctcggtggtgtccttggtattcatggtgagggctccagggggcaaggtcacccccggcctgaggggcacggggggagggggagtctgtgctcccggggtcccgcgggtgacggcggcagcggccattctaccccacaccgaccccccgct

SEQ ID NO: 370917 - DNA, 1175 bp, Homo Sapiens
ctacttctgcttcttgaaatccttaaaggcactgttccgtgaaggtctgctactactcctcctgttcctgcagctcctttttaaaacttctcctattgagccggatgtgagacctcagggtcaaccagaggctcgtctactctttgctttttccacaactcggggttcaaataccatgctccatacctcatcttcacccactttggcttataaggattctgtggtttctggagtttcctctcatagcctggtttctggaagaactctgtctcctgcagtttactgagccccacactacgctttagctccagaggaacctgatttagcttcatcgtgtggagcgcatcatggcttggtttggtctcaatagtcaaatgtcaaactggtttcaagatgaaactcgttcatcgaatgtccgaaattccaaaagtaagtaaccccacttgcagaagtcactaactgctttgcatacatgtttcatgaagaccaggacgaggaccattgttcatggagcaaatccatttaatgtggcttttcttcataaagccattggcctgcgtttgacacagacgtcttcttggaaggtcccaggtagacttgggtagaatgtttttttaaaagcttcgtgggttccttcattcctttcctggtgtcctgacaataagcccatgtgtcctccagcttccggtcaggatcaagcacttccagcacctttgataagagctctatgggcatagcttcttccagattcaggtagagcgctaagggatgtggggtcaggtgggcctccacgtcctccaggaatgccttccgagcctgctgggctggcgagagcttggaaagcacgtctgcttccttgagcagcttgatctgcctcttctttggggccagttggggagctctgtgataaatctggggcagaaagccctccacagggacctgagtcaccagaccagtgcaaggcgggcagcccttcctgaagtcgtccagcccctttcttggaaataccaactgccggctgtgcagagaggtggggaacttcagcccgttcttgtgctttgtgaaacatctggacctgcagttcacgccctcgcgcaccggggccaacgtccccggccggagccgccgcctgcggtccgccatggtggccctagcttcgcggccaccgtcccgct

SEQ ID NO: 370918 - DNA, 554 bp, Homo Sapiens
agcggcggggggcgggaggctgcggcttcgggcagatttgattttcccgcagtcccgggcgccccggagccgaagcccgagccgaggaggtggcgctcgcagccgcgtctcagccccgtcgccgccggcgccaagacccagggagaggcggcgcagcccgggcgctcgggctccgcgctgccggcgcccgggcagacgcgcgacgccagacgcagaatgaggacagacaatgcgggagatacgatacagtgcgctaccataggtaccactggtctgctagccatcacaccgtggtagccacgtcgggtgggcgggaacgaaagaaccgtgcagcagttagctcgctcgcttcctatgagggtaggacgaccgatcatacgcaaaagaacctacgagtgcatgtgtagcacgcgtccttaccgtggcggctcagtactactgtgcttgaggggttaacgtctaccagtaggtcagacaccttgagcaagatgaagccaaaagagtgtagcgacctacttcatggaggacgctgtgagagaggtacaggacatcgg

SEQ ID NO: 370919 - DNA, 1008 bp, Homo Sapiens
agcgggagagagggagcgtggagagctggagcagccgccaccgccgccgccgagggagccccgggacggcagcccctgggcgcagggtgcgctgttctcggagtccgacccagggcgactcacgcccactggtgcgacccggacagcctgggactgacccgccggcccaggcgaggctgcagccagagggctgggaagggatcgcgctcgcggcatccagaggcggccaggcggaggcgagggagcaggttagagggacaaagagctttgcagacgtccccggcgtcctgcgagcgccagcggccgggacgaggcggccgggagcccgggaagagcccgtggatgttctgcgcgcggcctgggagccgccgccgccgccgcctcagcgagaggaggaatgcaccggccgcgccgccgcgggacgcgcccgccgctcctggcgctgctagccgcgctgctgctggccgcacgcggggcttgctgcccaagaaacaaagctgtcactcaatgctgaattagtgcctacctccatcatggaacatctcaagtgaactcaacaaagattcttacctgaccctcgatgaaccaatgaataacatcaccacgtctctgggacacacagcagaactgcactgcaaagtctctggggaatccacctcccaacatccgctgggtcaaaaatgatgcctcctgtggtcccaggaagccccggggggctcttccttttcgcgtcccccatctatgggctcctcggggttgggggattaaaaaacctccgaccgccaccggacccagggcctactttccacgggcggtgggaaacccaaccggaaaggcagggggggtactccctccccctgggaggcctaggctttgttcaaaggtgtggggccccccgtccccgatgggaaagtcaccgggcaaaactcccagacggcaattaattagacacaaaacgcggattcgccggcgcggaaccttaatccgaaggggcattcggccctgttt

SEQ ID NO: 370920 - DNA, 721 bp, Homo Sapiens
agcgggggtgcctggcccgtctggcagcagccatgccggtggcgttcctggagccgcagctgaacgagtacaacgcctgctccgtgtacaccaccaagtctccgcgggagcgggccatcctggggctccccaacagtgtggaggagatgtgtcccgacatcccggtgctggagcggctcatggcagacattggggggctggccgagtcaggtgcccgctacacagagatgccgcatgtcatcgagatcacgctgcccatgctatgcagctacctgccccgatggtgggagcgcgggcccgaggcacccccttccgccctgcccgccggcgcccccccaccctgcacagctgttcacctctgaccacctcaacttccctgctggggaatatcctgagaatcatcgtcaacaacctgggcattgacgaggcctcctggatgaagcggctggctgtgttcgcacagcccattgtgagccgtgcacggccggagctcctgcagtcccacttcatcccaactatcgggcggctgcgcaagagggcagggaaggtggtgtccgaggaggagcaggtgcgcctggaggccaaggcggaggcccaggagggcgagctgctggtgcgggacgagttctctgtgctctgccgggacctctacgccctgtatccgctgactcatccgctacgtggacaagaacagggcgcagtggctgacggagccgaatcc

SEQ ID NO: 370921 - DNA, 580 bp, Homo Sapiens
  misc_feature (229)..(274): n is a, c, g, or t
agcggagtaggatgaggccccagaataggctgaagccaagttgtagcaaacgccaaggtgttcatcctgtgatcaaagaggagctgcttaaggtcggtgagctgagctgagggcattaagatggagagtgttggcgtgtacagattctgtgggtgtaaagcaaagtaacaaaatgaagtgtgattcaaggtgagaaatagccgcttcaggaagtccaggtcgtcctgcnnnnnnnnnnnnnnnnnnnnnnnnnnnnnnnnnnnnnnnnnnnnnntaggtgaacatggacatgaatgagcctgtcttggcccatctaaatgccagatgagccttgagatgacttaagctgcatgagttgaccccagaaacggctcccacatctgcatattcatctccagaccggagtcttggggacacaggaataaccgcctctgtagcaaacatccacatattgtagaacgacactgactccaacgatctcagaacaagcaagtcattactcgtggtggtggacgccgactatagagaacacatcagtggactaagactacaagctacacaaggagccggaatgcataca

SEQ ID NO: 370922 - DNA, 897 bp, Homo Sapiens
agcgggcgggcgccatggcgcgcggagagcggcggctgcgcctgcgccaacgccgtcagtccgcggggcccgatcccgacacctaactccacagagaagctctgctcctaagggaaagggaagacttcagccacagtttcgcagccaacctggcgacctcacctctctggcgacctcacttcccagccggctccgtttaagaaaaccccgcgcaggaccgcgcccgacccgcctcctcgcgcccgcccctcgggtaacaaacatggccccggcggggcggaaggcccgccccaaagaagatgcgcggagggggggcgggactaaacagggcgtacggtggatcgccgggggctgacgagtgcaccatggccaccgcggacacacctcacccgcgctcgaagcaggctggatcatagcgctgacccatgcagagctctaaacacgagacaccatagacgcggacggagatccagcgaggctagagaacgcgccagagttcgagagacacgaagagtccagacggcacaacagaaaaggagcgagcatagccggcagactgcgtgcaggagacctcggacaaccaggagaacctagaatccacagcgcacgcgccagaaccacgactcaggcgccgaaatcgcgaccggcttggcagcccggatgagcctgcataagcggcgaacgaccgtgcaaacggccacaaccgaccacaagcaagaggaggcccagcggtcacaggacaacggccagggacatcgcgccgtacaccctctgagacaccgcgcatacagaccatcacaggagacaacgcataccacgcccacacagagaacgacaccaccgcgagtcgcgctgacccatgacgaaccatacctccaacaaccaaacccgcagaag

SEQ ID NO: 370923 - DNA, 671 bp, Homo Sapiens
agcgggtaatccttcagctctggtggtaagggagatgcagtgagctcccggctgggagagagggttattttgcaaaactcccctggtaccgtgcccgcggaatattgcaggaggtctgtgaggtattaaaaagtgtcagcaaactgcattgaataacagacatcctaagaggggatattttccacctctataatgaagaaaagcaggagtgtgatgacggtgatggctgatgataatgttaaagattatttcgaatgtagcttgagtaaatcctacagttcttccagtaacacacttgggatcgacctctggagagggagaaggtgttgctcaggacaacttacagttaccaccactgtctcaaagacagagtgaaagggcaaggactcctgagggagatggtaattccaggccgaccacactgagcttgtgacaacgcttccaagcattgctattacaaactgtaagccaggagtgctttgatgtgaggaaaatggcccttacacccagagtcggagtccactggatccccaggccagatcttccgctgggctggtacttcacgccacctttcctgggcacagccagcgcagagagtcatttctctacagatcagacagcgactatgacttgtcaccaaaggcgaatgtcgagaaactcttctcttccaa

SEQ ID NO: 370924 - DNA, 775 bp, Homo Sapiens
  misc_feature (709)..(718): n is a, c, g, or t
  misc_feature (736)..(736): n is a, c, g, or t
  misc_feature (750)..(750): n is a, c, g, or t
agcgggttctttcctgtgctgagattactaagagactgggtctcactctgttgcccaagctggagaacagtggcaccatcatagctcactgcagccttcaacttctgggctcaagtgcttctcccacctcagcctcccaagtagctgggacaacaggtgaaattgaaggccagctttggaactcaaccttcaaaggaacttaaaatttccattatgtagagtccctgaggaaactggatccactagctacactggctgagaatgctctcaccccaggatttcatttttattttaccacatcattgttggtatcttaagatcaatgtactggagcagcggggtctcacaaagaggatacctggtgacacgcccaggctttcagaatgcactatagggctttagtgacttgtccaggttcagctgaaatgtgccatctgggacctactaatgcttgttgaactttactggatctcagaagctgggtctcagaagctcagatgttcctcagagctacgatatcaacaacctgtgatgacagagagaaggttgctccatgatggatttggaaacttactggctagctaaacctgactgaatggggaaggaatgtgggatagctttgggaactctagttttcactaggatggagctgggatttgtatttttgacaaattgcacgttatggattattgaagtaatggcaaccgannnnnnnnnncccctaaaacaaacattntggatccgtgtaantcaaatatttctctaaaagggtgca

SEQ ID NO: 370925 - DNA, 563 bp, Homo Sapiens
agcggaattaaatgagatagtatgtaagtttctcacattgtaggctcatgttatcttccttatattcagccctgcgtagtctgtttctcactatcacacatttgctctttaattacatatttgtgtatacgtttctgtaatttcaaagaagtgagtcaaatttaaccctatcatagacatgactatagtaatcattttggtatgttttataaggtgggtgagggaggttgttttgccctgaaaacatctacaaatgctagcatataaaattgagcaaaagatgtgggatagagattgaattcatattctttgtgaagactattaggatttgttcttgtgatgatcagattgtcagttcagtttactgtattccacacacagtagccccagttagggttccagaaatgcttataaatttgtctcctgtggtattatcttaatgtggtgttggattcttcatcgctgaagtcagctattcaggtaaaactttatttggtaagatcagatacctaagcaatatatagtcactaagtcacttcatatataaaacttggggccggata

SEQ ID NO: 370926 - DNA, 1381 bp, Homo Sapiens
  misc_feature (29)..(29): n is a, c, g, or t
  misc_feature (44)..(44): n is a, c, g, or t
  misc_feature (54)..(54): n is a, c, g, or t
  misc_feature (405)..(413): n is a, c, g, or t
aggtcctcatttaaacctaaatacctttntaatccataataaancgaaccatcnataaaatactagccttttaaaagtccatatttgggatgcaggaaaagcatccagtttccaacaacttgctcctgcctgtgttgctatagctccatgaacaccttggattttcctccctctcagtctctccccaaacctcccctaggttatttacaacattgtatttggggaaggtcacttatggcaacagcaaacgagtggtctgacctcaggttattaacaagaaataaatgtgtacaaaaatatcttgttcatcagaaagcggagtttgttttccttaagctattccatgcagaaaggatttggacaaagccatttgctacaaggaaagatgacttaactcaggcaacnnnnnnnnnaaatttcctttttcggatttacttagttatagatggagtttgcaggtcttaggccaatcttcaatacaaattctttggagcagatttaattgacagccctgtccctttctcagtcatattacaaaaagaagcatacacttaacaccaatgacccgtcaagatgcttaaactgttacaaccagtttccattaaaaaactgagaagtacataacacgcagaaaggaagcaagtacatatttggctctttgttgattttccccctctaaaaaaattgttacaaagtcttatggcttaaacagaggacataggaaaaatcagtgtacttcaccgtctccagttatttacagcaaaaattacagagacagcatacattgtattagaccttccacaagcatatattaaaagtaattacatttgaaaaaatatttttatttttcctctacatttctacaatacatactcagttttctgtgggtgtaatttttctttcttgtgtgtgtgttaatcagatgaagcagacggtactgtgcttggatgtgggatttgtagctttccagacatacctaatgtgtttctacgtatggttgtgacagaggcacgcgaatgcttgccaccaactactgccatgaagagtatagttgaatacaaggttcatgctgcccagctggggtgcagatgccccgtgctgccctgaacagggctcattcaattccggtaacccttgtgctttatttttggccatgagaacaatcactgagctgcttctctgatccactggaggccatgcttacagtcacgcaggaggcaaagattactatggcccattcacatcggaggaatttcagcagcttaggataaatgtgcacaaacagactacccccatctgctgcataggaatccatggtctgcacttccaaacaatggaggactacatgatcacgactatcgaataaattcttcacatacta

SEQ ID NO: 370927 - DNA, 1173 bp, Homo Sapiens
  misc_feature (1019)..(1019): n is a, c, g, or t
  misc_feature (1150)..(1150): n is a, c, g, or t
agcggacgcgcagcaccccatttaagtttctcgtctttgcagtggctttgcttagatccggtgccgccttgaaggcggggctgggtcccagccgtatccaatggagccccgggtgagggttgaggggtggaaggtgcctactagccggtgcaggtttcttctagcgcgtgtgctggggtacctggtcgtcatggaggcggtattgaccgaagagcttgatgaggaagagcagctgctgagaaggcatcgcaaagagaagaaggagttgcaagccaaaattcagggcatgaagaatgctgttcccaagaatgacaagaagaggaggaagcagctcaccgaagatgtggccaagttggaacaaagaaatggaacagaaacatagagaggaactggagcaattgaagctgactactaaggagaataagatagattctgttgctgttaacatttcaaacttggtgcttgagaatcagccacctcggatatcaaaagcacaaaaagagacgggaaaagaaagctgcattggaaaaggagcgagaagaacggatagctgaagctgaaattgaaaacttaacaggagccagacatatggaaagtgagaaacttgctcaaatattggcagctagacagttagaaattaaacagattccatctgatggccactgtatgtataaagccattgaagatcaactgaaaggaaaaggattgtgcttctgactgtggttgccttgagaagtcagaacgctgagtatatgcaaagccatgtggaagactttctgccatttttaacaaaccctaatacaggagatatgtatactccagaagaatttcagaagtactgtgaagatattgtaaacacagctgcatggggaggtcagcttgagctaagagctctgtctcacattttacaaacaccaatagagataatacaggcagattctcctcccattatagttggtgaagaatattcaaaaaaaccactaatacttgtatatatgagacatgcatatggcttaggngaacattataattcggttacacggttgggtaaacatagttactgaaaattgcaggctaatttattacaatgttgtacaattatgtttttaatacagtgtggctggaactgagtattttctacccagtgttnggggttgtttcttaaatgctact

SEQ ID NO: 370928 - DNA, 645 bp, Homo Sapiens
tgggggctggcttggaaactgtagcataagacaacctagaaacatatgaaaacactgtccgttcaatggcgacatcttcagacttcagtggtacgctcatcctcatctgttgtttagcacgcaggcgctgggcaggaaaataattaacaagccagtattttgctgcaaatgaatcaccaaattgctgcctatggaagtgtctcgggaaaggaagccttctttctggaacagtctcaaaacagatccaaaaggaaacctcccacccaatttactaaagtgcaaacgaagggaaaaccaggtccctgcactgaagtctagtggtctgacctggctaatagtcgccctggtgccagtgccatggtgcagtcactcagagagactctcttgatactggcccacattcacgttcacagtaacaacaaaggtgctgaatgagcagcctgtggttccacatccacctgtctcctccactgtggtcacgccccgcatgcctgtccctcttcctgcttgccactcagcgtggctcccgacaaaatcctgggcgcagcctcctggtgcggtcctctgagcagaggtcccaggtgactggctcagagcaatgagtccctctctctcctggacttaaaagtagtctcttcctccgct

SEQ ID NO: 370929 - DNA, 883 bp, Homo Sapiens
gactccccggtcgtgtgcatttgcgaatcgggtgttctgtttggagccccagtaatcggtcaacctggcgagtggaagttttgcctgcccagtattcggccaacccataccaatgtcgttctgtttgttttcaaggggtacgggaccgtaaaagttaggcatcaaacccttccaccgtggctcgcttgggctgaatggtgatggccccttctgcgatatcttcatgctggtccagtgggtttattttggatccccagctgtctgatcccacccaaagaaaatggccaacttggtcagctcttttggctgctgcaaggatctgctttatatcctcatcgttggcaaaaatcacgacggcccctggagttgggggtgtccaggagctgtttgataattctatcaaagtcaatggtcctgtctttgcgttcctgggggattctcacggactgggcaatgcagagtccacctgcctctttggaaatctgcgtgaaggactccacacctttctctccataacttccttccgatgcgagggtagacacgtaattccagcctagggcctttacaatgtctaccatggcctgggcttggaaggaatcgggtggcaccacgcgagagaagaagtcatagcgccggtcatcacttagctcgggtgccgttgatgcataactaatctgggggatctggaagagcctcaggatgttggctaccatgatggagaccgaactccccgaagccccaatcactccaactactttctccggcttgacgaaaaccggcggttcgccgttggtgcagcgcacgtcggaggtgtccttctggatgagcgcctggacgaaagtaagcgactgttcgagcgcgtaagtgtccctggaacaagttt

SEQ ID NO: 370930 - DNA, 969 bp, Homo Sapiens
agcggaggggccattttggaagcatgttgcgaggctccgcttcttctacaagtatggagaaggcaaaaggcaaggagtggacctccacagagaagtcgagggaagaggatcagcaggcttctaatcaaccaaattcaattgctttgccaggaacatcagcaaagagaaccaaagaaaaaatgtctgtcaaaggcagtaaagtgctctgccctaagaaaaaggcagagcacactgacaaccccagacctcagaagaagataccaatccctccattaccttctaaactgccacctgttaatctgattcaccgggacattctgcgggcctggtgccaacaattgaagctgagctccaaaggccagaaattggatgcatataagcgcctgtgtgcctttgcctacccaaatcaaaaggattttcctagcacagcaaaagaggccaaaatccggaaatcattgcaaaaaaaattaaaggtggaacaagggggaaacgtccctgcaaagttctgagacacatcctcctgaagtggctcttcctcctgtgggggagccccctgccctggaaaattccactgctctccctgagggagttaatacagttgtggtgacaacttctgccccagaggctttgctggcctcctgggcgagaatttcagccagggcgaggacaccagaggcagtggaatctccacaagaggcctctggtgtcagcgtggtgtgtggtccatggggaacaacgtctccccgccagacacagatggttgcggttcaccctgcagtttcatgcttgggtcaagcctggtgtttcccgaataagcaagaaaggggtaactgagttgcactccttctaggttacttgtcttccaatttttcaacccccggacctggtacaacacttatgtttgtggcctcaaatgttttctccggaacacagggtcttcattaaacagcttccatgtgactctcattt

SEQ ID NO: 370931 - DNA, 938 bp, Homo Sapiens
ggggtgcatagcaatacaaaccacatacagttctacagactgccgtattatagtccatgcaaggatctatttggtgactgtatttccggagagtagaaatgtcaccatcagtttaaattgtttacaaacatagtatagatctcctattgctaccggaagtttgcgacgctttgcagggattgggtgctaccaattggttccgaaccaaaaaagactgaccagtattatcggacacgggtgctttacccattctggggccttcattttcgttcaggttcaccctcggggtcatcccgcatgcccccaggtggggtcgcccctcctggtttagctgcgcaggggtccagctcggattgccgtttcatgggttcctgtgggtcatggcagctattgcccgtgcccatccacagcaggactccatggcagtgggcttgggtccattgttgggccctccggcctttctgggccccttctggggctctgcactggcccacgtccgtacactggcgcgcttgcgcccgcaagttctgggttgcatgctggtgggcttttcaggtagagggagcattggggggcatcaggacgccagggccatgctagggcccatgggccagcccccgggtccgggctgtggagatctggtcaggggagatctcgcagagcaccgggagcaggggagacggctgggatccggagcccgctacatcgggcacgtcgcgaccagcctgggcagcgggcccagggctcccggcggggctgggaggggcgggcatggcgggccggtggcggcttcacttggtccccccggcgggcggcggcgcagggcaggggcaagggctccgggctcctgcggctgcgttggctgctcaggccaccataatccagctcgcggctcgcagctcccgggcgggctggggaggcggaaagactcgtccgct

SEQ ID NO: 370932 - DNA, 792 bp, Homo Sapiens
agcggagtgaaattcctccaacagctttgtgggccctggattggagctggaaagaaagaccatggtgaatgccacttgtgatgggtccagctgacagtcggacttgggggcccttgggaaactgcctttgaagatcctcagaaatacttgggagggtggtgagtttatgaaggactcacagaggctaccatatggataggaataaaaccagttgtgttgttgcaagaccaattatgggatgaatgatgaaggaactgtggaaatacagaactaagtaaatcaccttctgctgtcatcagagaaggctcaatgcaggggcatcactggcactagctctggaaggttaagggacatggcacaggtgattaactgccacagcaatagatgcctttgaatgaatacactgacctccatgctcagttccgcctggctgatgtgcatgcagattgttcccctgtggcttgagtagcatcttctgctctaggagacaatgggaaacaggatctcattgacacaggccaactcctttcccaagagcccttcattttgatgacaaaggactcttaccttgcaatatgaacaaaggccaaatggcttgtcttcatccagcatcctcattcagaactagccaactgagatctgtcacatggggccatggtagtggggcctgcacacatcccacctccctataagctgtcacaccagctcttggcagtgtgagcctgggctgctggcactctgtaaatgtagctacatgaggaagaaaatagacattaagcgaaaagaggtaat

SEQ ID NO: 370933 - DNA, 897 bp, Homo Sapiens
agcgggggggcacagcagccaggctgccggagagctgatctcggggattcgggtgcggagcccttggcctggaggcgatatgggtggtccgtggcccggttcagtcgcttgcagcagcccggggaacaggcctgtctggccctgagggagtcccctttctgaagctgtggtgcttggacgacctgctctctacattgctgggcacctgtaggtgtccctcgagagctcagttttgaggttcaagtcagtgtggccatgaaggggctgcctattgggctgatgctgtgaccctggagtctgcctctcctgccagtccccctgcccggaacatgtggctgcggcttggcccgccctcgctgtccctgagccccaagcccacggttggcaggagcctgtgcctcaccctgtggttcctcagtttggcgctgagggccagtacccaggccccagcacccacagtcaacactcactttgggaagctaaggggtgcccgagtaccactgcccagtgagatcctggggcctgtggaccaatacctgggggtgccctacgcagctcccccgatcggcgagaaacgtttccctgcccctgaaccaccccatcctggtcgggcatccggaacgccacacactttcccccagtgtgcccccagaacatccacacagctgtgcccgaaagtcatgctgccggtctggttcactgccaacttgggatatcgtcgctacttacatccaggaggcccaacgaagactgtctcttacctgaacgtctatgtgccgacggaggatgggtcccggcgctaagaaacaggcgaggacttagcggataatgaccgggatgcacggattaagacatccggaacagtggtgcttaagcccgtcatggcctacctccacg

SEQ ID NO: 370934 - DNA, 736 bp, Homo Sapiens
cttagtgcaagattaccaaaaacttagtcaaattgaacaggatattcattttcttctccaactaccaaaacacagtcttcattataaggtgattggggtgcggttgaaaaaactgtggtgaaacgagaagtcagaatgttttcttcgtacaggaaccaaatgattgctcccaaaactgtcaaaatgtaccgtgctagcaatcaccaatgctgatattaaaatgtggttatctgataaatagtttccttgttgtatgggatagctgttttgcatagtgttccttccacagaagaaacttcacgatttcctttttgtccattcacctgtcttgatgtgcagaaaagcacaggtgtcaactaaatcctcatcatcatcttggtctgtccacttatcaaatgtcatatttgaattatcaaaccacttgaaactcgcatcatctgtgtcataaaacatgcctagtaggatatcatctgggcctttccattgctttttcaaagtatccagtataaaagcattttcttcttcattatgtatgcttatcatgtccgctccatggtcagtacactgatttctgacatcctctatgctttctactttgatggcttcttggagaaaaatgtaacaactgtcttggaactgaatccaagtagatgaaggacagtccgcgacggcagcagcggcgaggcccagcaacggcagcaggagcgcgggcagcgcggcccggagcagacccgct

SEQ ID NO: 370935 - DNA, 738 bp, Homo Sapiens
agcggggagctgctggtgggaggcagccgcttgagatcacaggcctcctgtaaacggcgggtgcagggcccggtcccagagtaagggaaagtcgttggaaaccccaggcaacaggacctttggcagctgaggctggaaacagcggaaccaaaggcagacggtcctcagttgcttgggcggacgtggacccaatctgtccgtccttacaagtttcccccagggcaggacctagacgcgcggcgcattcaggttctcctggaccgtagtggtagtcgctggcccgagttagaggccagctgagaagtcttcgtgcttcagatttgtttacctacaaaatgcttcggtatccatatttttgtagaatgtataaagaatgcctttcatgttggttggaatctggcatacctaatttaggtgtctggccaaacagaatacatactacagcagaaaaatatagagaatatgaagcccgggagcaaacagatcaaactcaagcccaggagttacacagatctcaagatagagattttgaaactatggctaaattacatattccagtaatggtggatgaaagtgttcattgtttgtcaccacaaaaaggacagatttttctagatatgacatttggttcgggagggcgcacaaaagccattctgcagaaggagtcagatattgttctctgtgccttggacagagacccaacagcttatgcattagctgaacatctttcagagttgt

SEQ ID NO: 370936 - DNA, 618 bp, Homo Sapiens
gttctggctgcaggcggttccgcctttgcaacccaggtaaaacctgccgcagaaataataccgcccgcgatcatgctgcccgataataagcgcgattcttaatcatctcattaaacctggagttactggcctgacttgaataatcctggtaataaacgaaaggttgccctgcgtggacgaagacagttaagacgccacatttgtcgcccggttttgaatttcagctcgatttatcgtcgtgcggcggtgatggtcaaagcgcatggtcatctccggccagttcacggtcagcaatcgtgatcgtgattgcgatgtgtgagttttgatcagcatttccagatcgataaccctttaccacgccaagatggccctaataaccatgtggtcagtagcttcgctcatggactcccatgactgatgtacgttagcctgggcattagaacggccaataagcggtaaacacgactgaaacagttgcgaactgtgccagttggctatatataatcactcaggactacacttcctccctgaggaggattaaaaaaggttcatacttctaagataaattccgagatttccacgggaaagggccgaccaaggcgaggttgaagtccccag

SEQ ID NO: 370937 - DNA, 608 bp, Homo Sapiens
  misc_feature (530)..(530): n is a, c, g, or t
  misc_feature (552)..(552): n is a, c, g, or t
agcggacctggacctgccccatggaggtgctgcgggatcacctcctcggcgtgagcgacagcggcaaaatagtgtttttagaagaagcatctcaacaggaaaaactggccaaagaatggtgcttcaagccgtgtgaaataagagaactgagccaccatgagttcttcatgcctgggctggttgatacacacatccatgcctctcagtattcctttgctggaagtagcatagacctgccactcttggagtggttgaccaagtacacatttcctgcagaacacagattccagaacatcgactttgcagaagaagtatataccagagttgtcaggagaacactaaagaatggaacaaccacagcttgttactttgcaacaattcacactgactcatctctgctccttgccgacattacagataaatttggacagcgggcatttgtgggcaaagtttgcatggatttgaatgacacttttccagaatacaaggagaccactgagggaatcgattcaagggaaacttgaggagantttgttgttcaggaaatggctnccaaaaggaactttttcctaggagttgagggcccttaggtggacaccacgtttttt

SEQ ID NO: 370938 - DNA, 855 bp, Homo Sapiens
gccatcccctgtcccatgccaggaaagcacagctcaattggtcctaaagttaacattacacaaatcacacccttcaagccttcgttgaaacatgtgtttgttcccccgagggtgacgggacggttacgctgattcatcctggccagggaccccaacatctcccctcctccggcccaggcgccgtcacccaggctccaccggtccgcgggacagagccgcggagagcgcctggaagcgtcgcgccctcaaagccaagcgattaagttggttcctcaaattgttcccgacaggaggggcaggaaataacaccgggctctggcgcggccgcagcaggagggggagaagagcgggccgtctcccgggcagtgctggcggcctctcatcgatctcgggtctaaggtccggccgggtcatcattcctgccatttccacagcattcgaggtaccacatcaccccctgcctcggtcgtcgctcagtcattccctccgcgccgagtcctggagcggcggagtccctggaggcctgggtttccttaaggggccccaatgcccgcagcccccgacccgcccaggtggaaggaaacaggctgcgggcctgggccaggcggggcctgacagaagtaaaggccgggagggggagcggaagacggccagaaggacccctgcgccctctcctccgcgccgcccgccaggctgccaacccagccaccctgggtgcgacgcggcgccttctccgccgctgggagtcgggcaacaggtgaagagggcgggcgtccgcggcgcctccgcggggcggtccctctcctgcctgctgcggaggggaaaaggggggaaaacaagaagcaggagccaagg

SEQ ID NO: 370939 - DNA, 976 bp, Homo Sapiens
  misc_feature (53)..(89): n is a, c, g, or t
ggatgatagactcatatagggcgaattggagctgctaccgcggtggcggccgnnnnnnnnnnnnnnnnnnnnnnnnnnnnnnnnnnnnnatcaggccaaatcggccgagctcgaattcgtcgagagcggggggtcttggggccgcgagtgggagcgggagcggttctgcggcctcctcgggcttcttggccctgggcggagtgggattgggtgtcccggctgttcgcagtggccgcgagtgcggccggacctggagtagtacctgagccgctctggccgagcaaggcgcggggccccggtctacaccgcgctggacccggctatgccgtgacggaattcccgaggccgtagcgccacgcgagacgcgcactggtggcctccgcggcgagtcctggggtctccgcaaggcctcagtgcccgagctggggacgtgctggggggaggcccggccccgtcgctgcccgaggccccgctgtcccggccggaccggcctggtccctggcgtcctgtcgggtccgcgctggaggagagtcccagacagcagagcccgcggtgcagctccagccccgggaagccccgcgctcaacaggttaatactacacagcggcgattctaatggtcacgcttttatttacagctcgcctcccttccgccaagattcacagaacacggcagagtggcctcgggatcacctgcccaagacacctgcacgaccggaagtgggagaagaaatttaaggccatgatgatgaacgcagcctttatcgttcatttccaatcccacaacaaaccggagtccaggaactcatgggtgattatcggactattaacctaagtcgtaaaaactgtggagcattgggtgtctaaagggaatctgagacagacccgcagggtgtcccccaatgcttaagtcacttgtgcaagcagaaaatcatttttaagtaatgttagtgaaattggttttaaaaagagaaggg

SEQ ID NO: 370940 - DNA, 539 bp, Homo Sapiens
gaccagtatctgcaccaggaatccctaaagccagccccagtactggtagagaagcctctgccagagtggccagtgcctcagttcatcaacctctttctaccagagtttcccattaggcccattagggggcagcagcagctgaagattttaggcctcgtggctaaaggctcctttggaactgtcctcaaggtgctagattgcacccagaaagctgtatttgcagtgaaggtggtgcccaaggtaaaggtcctacagagggataccgtgaggcagtgcaaagaggaggttagcatccagcgacagatcaaccatccctttgtacacagcttgggggacagctggcagggaaaacggcaccttttcattatgtgtagctactgcagcacagatctgtactccctttggtcggctgttggctgctttcctgaggcttccatccgtctctttgctgccgagttggtgctggtactgtgttatctccatgacttgggcatcatgcatcgagatgtgaagatggagaatattcttctagatgaacg

SEQ ID NO: 370941 - DNA, 762 bp, Homo Sapiens
tcttcatcgtggtgaagaggctggtgaatacgtggctaatggttcttggtccacctttttgtaaagagacgtcaaggcccagccgcgaggcctggtccagaaagctttgaagcccacggatatcatactcgctgtcgtagaacatgacgaacttctgccagcgcagctccgtcaccagcctgagcatgacatcattgaggcggacgggtggtctcgaagccagtgtgtaggcctcaccatcggggctggggcttcagctgccatgcggctgcgtggcgaccctcccgggttgcgctggacaaagaggtgtgggatgctgcatggcatccgtgagggactgcagggcatctggcagactgcacagccagtggacgtgatccaaggccaaaatcccctgggtcatgaggtcacaggcttcctgcacagcctggaatgggttgttggcctcgatgaccttgatggagtaggtgatcttctcgctctgcaggattgtcactcgttgacggctcatggtcggataccgccaactggaacaccctgtcgtacctctggccgcgattctcctcgaagatggcaccgatgtggatgatggagtcggcccgcaccgacacgcactggcatatccaggggagaagccacagcgtcagcgcttccatgtcccccgggcgcgcggctcatccacccgggcccggggcgaggccgagggcagcgcgaagcggggaggcgctggtcccggtgcagtcccgggccgccccccccgct

SEQ ID NO: 370942 - DNA, 529 bp, Homo Sapiens
  misc_feature (135)..(147): n is a, c, g, or t
agcgtggtagcaacactaaaaacacactaattccatttctacatagaataaactaaagagaaaagagaaaacaatttgtggagaaaagtgaagataattagataggttgggattgaggggaagggttaaaggttnnnnnnnnnnnnnttgtgcttctccattctggaaagtccccagctttttctttgttttgttttatgtccaaactgtgtacatattggattctttcctactccttagtctatcagtcaatcatcagttgagacttgagtacactacaccctaaagtcatgagttacttaatgggtagttggaattcagtacctttagtgtgttttattctctaactcacctacccgaataatttgattcaaaatagactaaaaagtcttatttttattggatgatatgagcaggcactaaatacagtacagtattaaactttgggctgacacagtaccagaaccagtcaagatagggctctagcctgttaggagattgcttttactcttccaagtcagcgttctca

SEQ ID NO: 370943 - DNA, 923 bp, Homo Sapiens
gagcgggttcccctttccgggcgggcaggcggcggaccccagtgtctttatccctcttttgcacagtcagcttctgcagctctccagggctagcatggcagcgtggaagagttggacggccctgctggctctgcgccacgagttgttgtacttgatatggtcgtctgtaaaggatttgtagaagatttagatgaatcgtttaaagaaaatcgaaatgatgacatttggcttgtagatttttatgcgccatggtgtggccattgtaaaaagctggaaccaatttggaatgaagctggtcttgagactgaaacagcatgtggcttctccagattaaggttggaacagatggactgctacgttcgctattctatgcacttgcttcaggagcttcggcagttcgacggttatccaagcaattacagctattaaacaggggacttggcatataattcatacgaggaccacgaacaaaagatgatatcatcgacgtattgctcacagagctatctggggctctaacttcggccacttccaagtcaacaaatgtttgaacatatgcagaagagacaccgtgtattttgcgtgtatgtaggtggagaatcacctcttgaaagagaactacatagatgctgcttcagaaattggattgtctactacatactctcttttcttgcctcagaagaacgtggctcctgaagtcatgtgacccctataaagacgatgccgactgtcgcttgtttttcaaccatggacccaccttcaccttgggtctactgaatgagctactgcaccgcctcgccctgatcctgccccctcctgtcatcccacagcccccccgcgcccacgacatcgccctcgctactcacggcctccctcctgtatgaccctccgcaccccccgcacactctcctcgctccctgtca

SEQ ID NO: 370944 - DNA, 893 bp, Homo Sapiens
agcggggccccgactggcagtttgacatcactgaccttgtgaccgagttcatgaaggtggaggagccgaaaatcgctcagttacaggacggcaggaccttggctggtcgggagccgggaataaccacggtgcaggtcctctcgccgttgtctgactccatcctggctgagaagacggtgattgtcctggatgaccgagtcaccatcgtggagctgggagtgcagctcgtagctggcatgtctctctccctgcagccacaccgagcagacaaaagggccatcgtctccacagctgctgccctggatgttcttcagtccccacagcaggaagcaatagtaagttcttggatttcgttcagtgatggttcggtgacacctttagacatttacgatcctaaggattattctgttactgtctcatcattggatgacacatggtggtgtctgtccaggcaaaccttgagtccaaatggccaattgtggttgcagagggtgaaggacaagggcctttgattaagttagaaatgatgataagtgaaccttgtcagaagaccaagaggaagagtgttcttgccgtgggtaaaggaaatgtcaaggtcaaattcgaaccaagtagtgatgaggcaccaaggaggcagcaatgatattgagggcataaatcgggaatataaagaccacctcagtaattccatagagcgcgaaggaaaccagggagagaggcagtccaggaatggttccaccgtggcacaacctgtcggcaagaggaaagtaccaacaaagcataaaccccccagtctcccatggaaggaagaatagttactcaaagttgtggtccagatgcctttcaagcttccccatcaaggaagttaccgaacccatatcttatgacctaag

SEQ ID NO: 370945 - DNA, 524 bp, Homo Sapiens
agcggaatttgaagaaattgatctcagtgggaataagctgaaagccatcccaacaacgatcatgaattgcaggcgcatgcacaccgtgattgctcactccaactgcatcgaggtctttcccgaagttatgcagctcccagagatcaagtgtgtggacctgagctgtaatgagctaagtgaagtcacattaccagaaaacctgcctcccaaactgcaggagctagacctgactggaaacccgcgccttgtccttgatcacaaaaccctggaactactgaataatatccgctgtttcaagattgatcagccttctacaggagacgcttccggagccccagctgtatggagtcatggttacactgaagcttcgggggtaaaaaacaagttgtgtgtcgcagccctgtcggtgaataacttctgtgacaaccgcgaagccctgtatggtgtgtttgacggagaccggaatgtggaggtgccctaccttctccagtgcactatgagtgacattttggctgaagagctgc

SEQ ID NO: 370946 - DNA, 825 bp, Homo Sapiens
  misc_feature (403)..(435): n is a, c, g, or t
cacaggagagggttccctgggagcagcagctgctgccctatagaaaaccttgtcaagagccatgccatcagcttgctcctatgcccatacatggctctcggcagcctgagacttcagcaaagccctttctcccttctgccccaggtgagtcctccaaaggttggaaattagggttggggtgtcacagtgggtttccgaattttccccttttggcttgggatgactgaagagtgaacaagaatgggatgattctgttaggaaatgagacactggcccggggattggtacaatggtgttcacccctgcagttccctgtacaatgatttcaaacaatgatactagggctcctcaaagtgtcccctatgctgtggctgtaagtcttcatcgtacataatggtgccgnnnnnnnnnnnnnnnnnnnnnnnnnnnnnnnnngagcttacgactgcgtagtgttcttgctcctcccatggccaaagctatccccaattttctaggggcaaggacttgcccaacccagtaagactagagtgaactgccagtttgccaacccagaagctatcaacatcaacactaagaaattttgctgcggaaacgacgaaatctgacaaaagctaaccagtgtgagttgcttatgcccatgcaagactgaagtcttatagggagttgttatttagtgttgcaaatatttgggtgttgaattacaaaatgaaaacccgggtctccaggggattctgttttaagagacagccaccagagacaaaactaattaacttgtataaaggagaatttcctacagtccaatgctccctgcatcctttcctg

SEQ ID NO: 370947 - DNA, 922 bp, Homo Sapiens
agcggaagtggcttcagagatgcagccctcagtgcttaacgtcctagttattgtcctggaaacccgagccatctcaccgctcgcccccaaccctgggctctggctgtttaaaagctggagaggaagtgaaagcgtcaagtacatcccgttaggtgcaaagcaagtctcgttgatcgccattgctagttttgcacacgtttgcgaatcagagctgcccggggtacaccgaccgcgcagggaaacatcgagagtgtaaataaatacatcgcctcttgttcggatttttgctactaccgaaaatatgtaaattgtgaactctgttggctctctttggatccaggttgatagaagtccagatcctgaggaaatctccagctaaatgctcaaaatataaaaactgagctgagatttgcgaagagcagcagcatggatggattttatgaccagcaagtgccttacatggtcaccaatagtcagcgtgggagaaattgtaacgagaaaccaacaaatgtcaggaaaagaaaattcattaacagagatctggctcatgattcagaagaactctttcaagatctaagtcaattacaggaaacatggcttgcagaagctcaggtacctgacaatgatgagcagtttgtaccagactatcaggctgaaagtttggcttttcatggcctgccactgaaaatcaagaaagaaccccacagtccatgttcagaaatcagctctgcctgcagtcaagaacagccctttaaatttcagctatggagcaaaagtgcctgtaccaaggtcagtgcctaatgatcagaagccacaagtgtgaatgaggcctccaaacacccaaacaatcaggagccaggttcccactggatcaggatctcccaattcaatcaatacaccggaacctgaccgggcttccaga

SEQ ID NO: 370948 - DNA, 495 bp, Homo Sapiens
agcggggcggccgcctggttccctgcaaagcggccttatttatctgggcacagcctcagcctccccggtgggaggcttggggcggccgatcctctcccaccggggagctcctttccgtgcgctgccgagggggcccggccaggacgggacgcggggcgcagggcgcggccgggccctgccggccatgtccagtcaccccggcggcaccccgcgacgccgaacgcccatgccgggactccccaatgacgggcaggtcagaccacggacggacagccgttggcatgagccaggagacccgggccgagagcgtgcccaggaagatgtcgagcccgggcatcgacggcgaccccaaggcctccatgcctagcctcgaacacggtctggtgaagcgtgccggggccagcccaacggcctgggtgcggccagcatcaccaagggcacgccagccaccaagaaccgcccctgggagaacagcaacaaaaaacaacaaaacac

SEQ ID NO: 370949 - DNA, 790 bp, Homo Sapiens
agcggaatgccgtcgcggaggcgtggggaggagaaatgggcgggaggctgtggggatagcgagacacccagcgacgacgaggttgtcatggtgccgcggggccgtgctcgcgcatgcgccacctgacccacaggccggtcgtggagctgcgaccccggccctagggcagtccagatgaaaagagtaccaatgaatctgcctccagctgaataaaccatggagaggaaaaacccatccagagagagccccagaagactctctgccaaagtaggcaaaggcacagagatgaagaaagtggctcgtcagcttgggatggctgctgctgagtcagacaaggactctggcttttcagatgggagctcggaatgtctgagctctgcagagcagatggagtccgaggacatgctgagcgccttaggctggagcagagaagacaggccgaggcagaactccaaaactgcaaagaatgccttccctaccctgtctcccatggtcgtcatgaagaatgtgcttgtcaaacagggcagcagctcatcccagctccagtcgtggactgtccagccctcctttgaagtgatctcagcacagccacagctcttattccttcatccacctgtaccatctcctgtcagtccatgtcacactggtgagaaaaagtccgactccaggaactacttgcccattctgaattcttacaccaaaatagccccacatccaggcaaaggggctttccattggccagaagaaaaaggaacaagtggagtgcagaggacaatctgtactgaaaaat

SEQ ID NO: 370950 - DNA, 771 bp, Homo Sapiens
gtaagtccagtaaagcgatagtctgtacccccattaatgccgacatctggggtccacagcaggatgctcttatggccagtcgggtgtttacaggtgcattttccgggacccacaccgagatctgggaaacagggaacctgcggggcgttgctcattgatgtctctgatggcgatcttcaccttcacaaacctgaagtattcctgaggcaggacaatgcacatccagcagcaaaagacaagagtcagaaggagaggaggagatggaaacgctgccgctccacgacagtccctccacccccttcaacacacagggcctccctgtcgatctcctgagctgaagtgtgcagctccccagagcggttgtctagggtcacgtactggccactcagtccccgggaggccaggctgaaggagagaggggggttccactcagcaccggtgcgctctggcagctgcgactgccggtccggcctccctgcagacctgggcagcagccgcaggtcctcggccaggctgccgatgagcacccccgcgggtagtccctctgtttaggctgtacagaagctcggtggcccggtctgtaactcccgaggcagctgaagggtcctcacgaagaggaaaaacagaaacagatgcggacaggttcctgtagcatggtgctgctcactgggacgatgtagacgccccatatccaggcgcgggtgccaggtcgccgggcaccagctcactcccagggcctgtgagctgcgcgcattccctcggccgcccgct

SEQ ID NO: 370951 - DNA, 454 bp, Homo Sapiens
gataggatgatactagtccataagtactccccaaaacaaacttagcaagacaccagcgggtcgagggccaggtcccaggtgggccggtaccttgctgtggtcatcgcagaacagtctctgagaaatccagaggggaggagaggaaatgtcttcaggccaggtcctggtgtcctgctgtgcttatacacactcagatgtctctgccctcaggtcaggcacccatagggagaaatgggagaaggtctctggcaccagggctccctgcagagctgggggaggctgggggcatgtcagagtcagcagggtactggatgcctacaattccttacacatacgtacgtaaagggttccaaaggaatccctccacttctcttccaatctttcaatttccaagtctaggattgttttcttagctgttgctgaacttgcaagttagtatttcaaaaagcagtat

SEQ ID NO: 370952 - DNA, 912 bp, Homo Sapiens
tcatgcctgctggattccagaccttgtcataggctttgggcgttgccccgtgcaccttctcgttctaagagcttgcgcttcgatggtcgatatagttgggaccagtacttgcttcttgaggaaggccggcctgcgtgaagcagggcccgcaccagagcgcaccacgtatgccagcagagtggtcaccagcacgaaggaccagcccagcgcctgggagatgcaacggaggtaacagcacggccacctctcgggccaaacagccagttcgccatcgtagatctcaggccagggccacccggccaagcaggcgggcgagctcgggggcaggaaggccgggtgcccaggctgccgttgcccagtgcgctcacgggcacggcagtgcagaaggcacagaggaagcatttgccgtcgagtagcgtgacggccacccagacgacaggcgcgatgagggcgcgctgggccatggagcagaacatgtagcgcaacacagcggggtccttggcccggcggcccggtggccgcttccactcttcggccagcatggacacgttgttgttcatgaccaggccaagcagaaagagcaccaggggtggcgccagcaggatgcccgcgctgtaggccgcattgtagcccggcaggcaggggcagttgaagtcgaaggccgagtacatctgggcactggccagggccatgatgccacagatgccattcatgaaggactcctggttggactgcaggaactggaagatcatccggaacttgtccatcatgcccgctgtggggcccggcctcctcttcccaactcactgctgcctccaagagggcccctgctgcccaccctgcccactgggtgcccacctcatgactcgggctctcctggctgggaccaacagagctcagagcagagccgct

SEQ ID NO: 370953 - DNA, 822 bp, Homo Sapiens
agcgggctgaggggcttcatgaccccacgccacgcggcgtcccaaccgtggaggtgcctcctgacccgacctgcagccaaaccacccgcgaccctttcgcccgtttccctcgaagaacccgtgtttccgccttccagaacctccaagagcacccaccttggtcccggggccctgtaagcctcactcaccggcggcctccggccgagtacccccgacacaccccgggcgggtcccgcacttggagcggaacctgagtgcgctgggcttggggaagtcggaaggattaaagagaaacccatgcgtcgaaccgctgctccaacgcccatcaggttccctaagatcacaggcactcttccactcagactgctgctgatcatgctctgctcggtatgcgggaccagtcattgtctgggcagtcgcctggacctaagtctcctgacgcggacgaccagttgcaaaacagagaccacactgagactgagcgacgtatcagcagcggtcgcagctctgcgcttgcgcctgagagccagctacagcagggctgtgctgggattcactttcgtggaaggttttgcaaagcccctcccctggtatgcgagaggctaagaggttggcgctagaggcaagaggaagggggtctgcgagaggtgccgaagaaccaccttaatacactgcaaagtatagcctagaaccggtggttcacagagttttaaatagcgtacacaaataaatcaccaagtgagctgttaaaatacagcttcacaagatttacactccgagattgactcgtttggctggaacattgcattttcaaggggaccc

SEQ ID NO: 370954 - DNA, 781 bp, Homo Sapiens
agcggggacatggctgcggaccccggaggaggggacgtgaagtgaggagggggttgggaggggagaggacgcgggcgaggaagaccagccccggggccccgatgttgtgactgtgacagactcactgtgggtttgtacatgctggggaggagccttcctttcaggggtgaccacattcatctgggcatgcctgcagatactcttggcccatggacctgaaggagaagcacctgggctgagcctccctcagccctgggcctgtccacgcggaaggccctcagcgtcatgaaggagcagctggaggcagtgcatggaaggacatctcagggagcggaagaacgtgtctgacgtggaaggaggtgtggagaagcatgcttcctccagccacagtaaccgctgctcctgcttccactggcctggtggtgcctcactcatgctactggccgtgctgctgctgctgggctgctgcgggggacagccagccgggagcctgtggggtgggcgctggtgaatgcctcggccttgttcctgttactgcttctcaaccttgtgctcatcgggcggcaagaccggctgaagcgtcgggaggtagagcggaggctgcgagggatcattgaccaaatccaagatgccctcagggactggcagggagatccagtggaccagtgccatgtatccagaacatccacaatgcctttttgcgccatcctggtccttgcactgggactacagagaccggacactggtcaacatgcagtcaagctgcggttgaaggagacct

SEQ ID NO: 370955 - DNA, 967 bp, Homo Sapiens
agcggcggtgggtctcggcggggctgcgggaccgcgagtgagtgtggtcgctcctggttctgccagctcccctgagagcctgaacccgggcttgagagcctcgccaccccgggtgacatccctgccgtgggcttgggggctctgggtgtgattccgccggtccgggtcccgcagcgaccacctacccagcgcagtcaggggtggggctgggacccagagcgggaccccggctgccgagtccaggtgtcccgcgggcctcgatttggggagcagaaaacgccaggtcttcaagggtgtctgccaccaccatgcctgacccatttggcagcagcctcgtgtgtggtggtctggtgtggacggtggaagcgtgattctgctgagtgtcagtgtgaccactcgtgctcagccgtatctcagcaggaggacaggtgccggagcagctcgtgcagctaagcagccaactgcagaaacgtcaggcctgttgcagtctccaaggcaccatgaatgccatcgtggctctctgccacttctgcgagctccacggcccccgcactctcttctgcacggaggtgctgcacgccccacttcctcaaggggatgggaatgaggacagtcctggccagggtgagcaggcggaagaagaggaaggtggcattcagatgaacagtcggatgcgtgcgcaacagccccgcagagggggccagcgtcgagtccaagcagcccggggcccaaaaagtcggacatgtgccaagggctgccggtcacttgctgcagggcacccgggatatatcagccatgataaagagacctccattaaatacgtcagccaccagcaccccagccacccccagctcttcagcattgtccgccaggcctgtgtccggagcctgagctgtgaggtgagccttgtggccacagagcctgtctctgtgggagcccacatgctcccaggtgctctgggtgggct

SEQ ID NO: 370956 - DNA, 797 bp, Homo Sapiens
agcgatgatcgcattacactcgatagtccagtcgataatggaactatctaggccttttctcaacgacactcgccagagttatgctcccaattcatggctaattttagagtcgtattactccatgactgggccggtccttttcccaactcttgcctcatgtgtacctccacctgtcttcgccagggaattcctctctataataggccttacattacaactcctggtggtacaactcgacagacacaacagcattctggctgggtatctcagtttaatcccatgaaccctcagcaagtttatcagccttcacagcctggtccctggactacttgtcctgcatctaatcctctgtcacatacctcatctcaacagccaaatcagcaaggccaccagacctctcatgtctacatgccaatcagttcacctactacttcacaaccaccaaccattcattcatctggtagctcacagtcttctgcccatagccaatataacattcagaatatttcaacaggacctcgaaaaaaccagattgaaatcaaacttgaacccccacaaagaaataattcttcaaaactgcgttcttctggacctcgaacctccagcacttcctcttcagtcaatagccagaccttaaacagaaatcagcccactgtttacatagctgccagccccccaaatacggatgagctgatgtcccgtagtcaacctaaggtctatatttcagcgaatgctgccacaggagatgaacaggtcatgcggaatcagcccacactcttcatatcacaaacgtctgt

SEQ ID NO: 370957 - DNA, 703 bp, Homo Sapiens
agcggactggtccattccacaggtaacaatgattggtccagaatagggcaaatactacattcagaacaagaagatcaaaagaaagctctcctgtagcttctgaaaaagaaaacttttcactgtttggaatgcgtaggatgagtttaggaggttgggactgctacagctaattggttacatgaagagaggcagcttgatgatgaaaccgacactcagaggaaagggccctgagacatggatctcagtgacctcatttgagccttcgcagcaactaaagccagacctactcatgttctttttaggtctatcaagcaacaaatttcgttttagttcaagccattttgaggtaggatttctgccaattacaagcaaaaggacccttaatgatgcaagtactgaactgggaataataaacaccaatagttgagtcaatgttcttgccattaaccaactgcacatgggagcaaatcacccctatagttgagaaagctgtctccaaaaaaggagaagtctttccttcctacttcaaaaatgtattcagagcctcagtagagaagatgtacacaaaaatgctttttaagtagtaaattgctgaacaatgataagagagtattattgaaacctcagggatgtagagtagaatgagcattattttttcccctcttactactaaaaaaactgagtcacaaaaattaggatggta

SEQ ID NO: 370958 - DNA, 838 bp, Homo Sapiens
tgcgattagaaggcagaatcgagacgccttttgcactagtagttctcacaagtcacagtcactgctctcagccaataatcctggtagaatcagcaagcattcgtcttcgtgactgggtctggccatcccaacgcacatccagaatggtgtctagagtcccctgcgtcaagctaaaatcgagctatggccacgaccaccagtcgtctcgtctgccagggggttctcaaaggactaagctaccggttcacctggctggagtgcggccatggggaggtccctgcgtaagggccctcctcagcagtcccacgcgcatgccgcgcagcccacgaccctcagcgatgacggttgtggccgtcaggcgtgtgccgatgccggcgcagcagccgtcgtacatcgcacgaggaagccccaggatagcagcagggcgtggcagtggcgctcggtgccctggcctccggcaggctcccactcggcgcggaaggccgtgggcagctggtagtgcggctgcactgcccaaggaggccgcaggcggatcccgctcgaagaagtgcgtcagcacgcggtgggcatggtgctcctcgtaggccagctcgggctggctccagatcgcgcggctcagggcccccagccgctcggccgcctcgtcgatgcactccgccgagcgcagcttcagtagctccagctcaggagcggccattgcacgcgcccccttccacgggccgctcccctccgggcctcatgctgccacaagcccgctgccctctgcgccctctcgctcctggctcggccgcaggtagcgaccgcccgcgcacgcgcccagaggcctccaggacccgct

SEQ ID NO: 370959 - DNA, 779 bp, Homo Sapiens
gagagttccctgaagttcaaccagccttgccgacttgctgtcctgacaccaagcagccttggtcctggagggaggggcatttcggcactgatggcatccacccttggagctagggagtcactggtgataatgggacttggccctggacgcctgcagccggtacttgaggtccttctctgtcagctgagtcacacccggaatcatcacagtccctgtccgcatgcaagccacactgaccagccaccactccgggagccgtgggagtaccagcatcattctgtccccaggctgcaggccgcatgcaccccccagcacattggctgccttcctggactgcttccccagctcctcaaagctccacttgatctctgctcctgtgccattgacccaccagaaggcaggatttggggggcggtgtccagcctcttccagccgactccacacatccagcacatcatgggcgaagttgaagtactcaggcaccagctgccttcccaggctgatggcttcccaggtggccacgatcttctgaggaacaggtagaggtgctggcttcccatgagacccacagaatgacctggagttcctcagtgcctggaggactaggtgtctcagccatggtctcatgcagtcgcctcctgtcttgctcttgaaccaaagtaatgcaaaaggtctctgttttctgcttcagctgagcagagcagggctgagtggctgtaaacactcagctccctcagaaaacagcctcccacagggaacttcagccccaaatgcccgct

SEQ ID NO: 370960 - DNA, 815 bp, Homo Sapiens
agcggagaggcgtgggggcggggaggagaggcggcggcggcagtgtccaagctacgccactcgggatggggcgttgggagcgggagtgcagagcgtggtcgtggcggcggcggagagaagagcgaggcggaggagggggtgccatggccgggcagcagttccagtacgatgacagtgggaacaccttcttctacttcctcacctccttcgtggggctcatcgtgatcccggcgacatactacctctggccccgagatcagaatgccgagcaaattcgattaaacgaactatcagaaaagtatatggaaggtgtatgtggtatcgtttacggttattaaaaccccagccaaatattattcctacagtaaagaaaatagttctgcttgcaggatgggcattgttcttattccttgcatataaagtttccaaaacagaccgagaataccaagaatacaatccttatgaagtattaaatttggatcctggagccacagtagcagaaattaaaaaacaatatcgtttgctgtcacttaaatatcatccagataaaggaggtgatgaggttatgttcatgaggatagcaaaagcttatgctgctttaacggatgaagagtcccgggaaaaattgggaagaatttggaaatccagatgggcctcaagccacaagctttggaattgcccttgccagcttggatagttgaccagaaaaattcaattctggtttcacttgtactatggattggcatttatggttatccttccagttgatgtgggcccttggagggaatcgctcaatacgctatagtggaagaccg

SEQ ID NO: 370961 - DNA, 783 bp, Homo Sapiens
agcggctggtggttgtacgattcgctatagattccttgtgttctcactatcgtagtcacgagccactctgaccatcaagatcagaaagaacttctcagctgcaagttagaagtggactggccgtcgaggacgatctcagcggatcgctcttcacaggagtcttgaacgcggtgtggaatcggcagcgaggaatcctggagcacagagaagctcccagctttgaaggtcttgcggtgaagcatcaagtgtacctgatttgtgaacctatcttgcttcagttggtttcctcctaaatattaggcagatgggattggctggtctgtgctctgctaggtgaaaaaattagacgatttcaagaattggagctgaatctgatgttaagtaatggcaacaggtgacttaaaaagaagcttacgggaacctaggaacaggtgctccgctttgcttaaattatcctgaagaggtggactgtgtaggttttgataaaagggagacccagcagcatctttgcccatcatcagctattcttttacctcatactcaccttatgtaacagaacttataaatggaatccaatgtagagctcatagcaaaaaaatgacttgcgctttatagatggctgtctactaagcttcttcgtgatcaattctaattataaaccaattttgacaaaaaagcagtttatccaatgtgggtttgcacgaatgcgaaatccaaattgtgggggaatttgaattgtgtgatgcaaaaagcacaaggaattaagcagtcttcagagagatc

SEQ ID NO: 370962 - DNA, 972 bp, Homo Sapiens
  misc_feature (398)..(398): n is a, c, g, or t
agcgggaggccacagacagggatggtggagaagctggagaaagctcggcagagcccccgccgagtgacatgggcacagtggggggccaggctagccacccccagacactcggcgctcgagctttggggtcccctcggaaacgtccagagcagcaggatgtcagctcaccagccaagactgtgggccgtttctcggtggtcagcactcaggacgagtggaccctggcctccccccacagcctgagatactctgccccacccgacgtctacctggacgaggccccctccagccccgacgtgaagctggcagtgcggcgggcgcagacggcctcctccatcgaggtcggcgtgggcgagcccgtgtccagcgactctggggacgagggccctcgggcaagnacccccggtgcagaagcaggcgtccctgcccgtgagtggcagcgtggctggcgacttcgtgaagaaggccaccgccttcctgcagaggccttctcgggccggctcgctgggccccgagacacccagcagggtgggcatgaaggtccccacgatcagcgtgacctccttccattcccagtccgtcctacatcagcagcgacaatgattcggagctcgaggatgctgacataaagaaggagctgcagagtctgcgggagaagcacctgaaggagatctcggagctgcagagccagcagaagcaggagatcgaagctctgtaccgccgcctgggcaagccactgccccccaacgtgggcttcttccacacggcaccccccactggccgccggagaaaaaccagcaagagcaagctgaaggcaggcaagctgctaaatcccctggtgcggcagctcaaggtcgtggcctccagcacaggctggacggcttaccacccaacgtctgagagagtgacctataagtctagtagcaaacctcgtgctcgattcctcagtggacccgtatctgtgtccatctg

SEQ ID NO: 370963 - DNA, 462 bp, Homo Sapiens
  misc_feature (29)..(29): n is a, c, g, or t
  misc_feature (438)..(438): n is a, c, g, or t
gattcccttgcggccgccgctccaggggnaccggctcatggggttccactttgatattaaataggtgacttcgatggggtgggggaggcatcctatgaaatgtatgaaaggtaatgaagacagggagggggtggggggagaaaaccaagggccaggaggtgataaaatacaaaagaacaaatacagacagatggacacagatacgggtccactgaggaatcgagcacgaggtttgctactagacttataggtcactctctcagacgttgggtggtaaaccgtccagccttggccacgcgctccgcctccatcactggctaagccggagcagatgtccgaagacagggaggcccggacggagcagggctgctgggtctgcactgccttcccgctcaggcccgtgctgtctgcagtgagccccacactggccttgggcanggggtccttagcggggagggcctc

SEQ ID NO: 370964 - DNA, 1254 bp, Homo Sapiens
  misc_feature (47)..(83): n is a, c, g, or t
taatgatcaatactatggggaaccgggtgttatcgcggtggcggcgnnnnnnnnnnnnnnnnnnnnnnnnnnnnnnnnnnnnnatcaggccaaatcggccgagctcgaattcgtcgagagcggaggcggcccggcgcggtgtttacccgcggtgcatggtggggcggtctccttcggcaaccccggccgaacggccacccagaggctgtgctgagctggcgcagcggcagcagcatgagccggaccctcgcatcggccgtgcccctgtcgagtcccgactactacgagaggctgggccaactccagcacgggctgcgggacagtgaaaagaagagattggacctggaaaagaaactttatgaatataatcagtctgatacatgcagagttaagctgaaatatgtaaaactaaagaattatctgaaggaaatatgtgaatctgaaaagaaggctcatactcgaaaccaagaatatttaaagcgatttgagcgtgtccaagctcatgttgtacacttcaccacaaatacagagaagcttcaaaaactgaagctcgaatatgagactcaaattaagaagatgctatgctcaaaagatagcctgggactaaaagaggaactgacagatgaagacagagaaaaggttgcagtgcacgaggggattaactcaggaacagccatgtcaagaggattgtatcaaccagcaacaatctttatgggccgccaaatgtcagccatcttaagcatgagagatttcagtacagagcacaaatctccccagcccacaaagaacttttgaattcctgacccacattcacaccgacagaacagccagagcagtaatgtgacagacagctgtgtagtacaaactagtaatgacacacagtgcttaaataagtctgacaacatagatggaaaggcatctcttcagattggtgagaaaacgccagtcacagccagtgtattgtctgaggaggaacaaactcattgcttggagataggaagtaacacacgtcatggcaagagtaatttatctgaaggcaaaaagtctgctgaactcaattccccgttacgggaaagattaagtccagagaacagaaccactgatttcaagtgtgacagttccagcgggatcagaggcgagaaatactgacacggggaacctatttgacgttgaggcccaaagaacccggccggcagtctttcccgataccagttccagaatcccgggaatctgcaataaggggccccagagaag

SEQ ID NO: 370965 - DNA, 809 bp, Homo Sapiens
  misc_feature (43)..(43): n is a, c, g, or t
aaatccaatacaatctaatatgtacattaacaaacttcacagnatatatattctatcaggccttaagaaatcctcacccacccaaccaaaagaaagtcagtttcacccactgtaagataaacgcatgacacttgtatctggatccagaaaaaaagaactgctaaactgccaatgtagtaggaaaaatagttacaaataagcacccaaaactgacctaaaagttttctactcaatgcccgcaggatgtctttttttgaagagaaataagcatcccttgcaacttgactggaaagattattacctgaccaattatttctaagcctatactagaaaccagtgcaagattgaatgccaaaatcaccaccaactcgacacgaccgttatttttgcaaagaaaggtagttatataaaattccattctcccaggcaatgagcaggggagaaaaacatgttactttttaaatggctacatttgtaggtttttgagtatcagcaccaaatgttcacttttaattattctgaacaaatttttaggaattaatgtttcctaacaaaatggactaacaaaacagtgaataaggaaataactttcaagcaatatttgcatgctgataagaaccattaagtaaaacagtgattggctcatttccaaagctactgtaggtgtgcaccgtttggaaatagtgtatctcactgctcagctaatataggaactctccaaaccatgggtgcacatcttattttgtgactaggcaagattaagtaaaacaagttgaaaagatttttttaaaaagcaagctaaatccgct

SEQ ID NO: 370966 - DNA, 1039 bp, Homo Sapiens
  misc_feature (736)..(736): n is a, c, g, or t
  misc_feature (775)..(784): n is a, c, g, or t
agcgggacaaatgagtaaatgagaaagtctcacaccatgaaagatgctagtccaatgagctgaatacagaggtaatataaatgtcttccagctgttgcttttctgttctcaagctgcccctcctggggtaggagcataatctacatcactgggcagtcacaggacactctatagcaagggtgtaacgtcctctccagatggggggagaaaagggaatggggcctaccaaaggtactctcttgtcagcgatttcgagattctatactcttatgggggcactatgaaactataagcgacaaataaatctgagataagtccccgtgtaggtcatccttcaacttcacgtgagcgctattttctgggctctattaaacctgtgttgtgtttaactgtgacctcttgggagggggatggggtctctaacttatatatacattcttcttttatacacaactttttatcccacaactccctgtgggtgttgggccaaacagcttgtagcccccaaactgtggcatactacacttctcccactttgtggagaggtgtgattgtggcagcacagcgatgtagaaatagagtgtagacccagagtgtgtcctctctgggatctctctcgagaatctccacggggtgtggtgtgatgtttgcccgttggaggagccttcgcgtatcaggggcaccctaatctgtttatcgccgtgcgtgttcttcccaacaagggtgttctccccgnttctaagttcccttggcgggtttccaggggccccacgcnnnnnnnnnntggtttcttgcggccacccggtggggagcttcccacaggcagtcttctgagcacgacctttaatttttcggtgagaaaccaccggtgtcttggaggaagttttggggggttatttccgcttacttggaccactggtgttttcctttagaagttcttcctggggttcctattattcgcacactgtttgccgccgacttctgcgtactatttgcggggttgtcgacagccataactggttgcttttcctttccccca

SEQ ID NO: 370967 - DNA, 949 bp, Homo Sapiens
  misc_feature (727)..(735): n is a, c, g, or t
agcgggcgctaactgcctcttgattggttggaagcggcacttactacgtggcggattctgactgtgaagaggactgtcccaagtgaagagtgggaggcaagtgccttgtgaccgggatggaggtcgaccttaaaggagctggtattgtgagctcttctaaagcctagtctacttaggaaggcgaaagcgaagcagcaagaagtggccacagaaaggccatgtggtccctagaagtagaaagggtaaggaggatgcacgagatgggtcctactttgtggcgcgcaaaggggctcacgaagtccgcttgttagagatggcagtgacctgtgacaatccaagtctgcccgacacgcctcccgcctccttaggaacgggaaggagccccggcccagtgcaactgagcgtagttagcgctaagatcacgtatgctggttggtcacacgaatcactgactttaattcactgtcttctgactctgacctggcacgctttgtgacctctaccaaagacagggatgaaattgcaaaagggcagagtgggagaagactggaatgttcagccaaggcatttgaacttttaatgctgcaagtcaagacttcctgaagatttttgagcagatgagtgaagtgataagaaaatgcatcttcagcagtgacagcatcaacgaggaggagactggcgggaggggatttaaccccggatcaaaaccagtgaacattgtgaaacnnnnnnnnnagagagagaggctgcgcttggcccaaggtggagtgcaggggttgaccatagtctctataaccttgaattcctgcgttcaagcgatcttccttcctcaaatccggagtagctgcgactaccagatgcgtgcgcccagccaggcgatttaatttggttgggaagaagggggtctggggtggccggtaggcaaagaggatgtcaagggtgttagcac

SEQ ID NO: 370968 - DNA, 564 bp, Homo Sapiens
agatcgcgggagaacgtctgcgcgaagccccggtgcagccctggcgggaccgcagcaaccaccggagcgtgagcaacagcttcccggctggaggagccactgccccacgcgcccgcggcccgcgcgccgagatgttctacatttcaactccatcaaatattaaattgatgtttatgggctaacctggaaaccgaaaaacagtttgtttcactacaagaataagaaaatatgtccaaattcctgtcagctgacttataaagggacttttagaacacaacccaatgcatgaggtactccttaagccctgacaaccatcttgaagatggaatcatgaatatggcaaattttctacggggctttgaagaaaaaggggataaagaacgacaggcctgaggaccagttgagcaaagagaaacaagaaaattcttttctccttctgtgaggtgtgcaacatccaagctgaactctgcagcccaggctcaggtgcattcaacgggcaaatcccaccgcaaacgagtgaagcagctgagtgatgggcagcccccacacccgcccaggccagcc

SEQ ID NO: 370969 - DNA, 706 bp, Homo Sapiens
gagggcagctgccatcactggtggcatggacagcggcacgcccgaagggctgcacgcctggagaagggggtgagtattttttaatcggtgggcctggaagaaggcatgctcaacccaaggcgaggctctccggtgtgaggaccggaacttcagagaggagggcgaattcccagccgaagggggtgaactccgcttgttcaccgtgaggtccactggctccatctgtattccgttgcgacagaccttctggggtctgaaagaacttctcaggcaatggtgtggagtagatgaccccatacttgttaggcttcatggattccatgtaattagatgggtatgacactgagacagggtccatggcctcttgcttgacaggaactgggtcaaacatgagcattcttttagttaaaccttctagggtgctctggtgtttggctttgcgaggcgcggtgcagggcgccgccgacgagaaataaaggccccgatacgggctgcctggagccccccgagcgcagcaatgtcagggctccagtccgggcggcgttggcggccgcaggggacggggacgggcgcgcgtgcggcgggcgctctcgctgcgctccggctcgggccccggctccgcgcggctccgctcctggctcccctctggctcctggcaccaactccgggcagtcacatgacgccggcgccgctcgctcagcccgct

SEQ ID NO: 370970 - DNA, 768 bp, Homo Sapiens
accttctcatatagagaaatggtagacatatacatgcgctctggggcacttgtatgtccttccagggaaatgaaaaccccctaggagacaggctgatacacaactagaaaataatatcagggagtaatttagaatgcagttgttactgttgatttataatgaactgcaaggttagttcacaggtttgaaataacagaacttgggaaggtgagcagcacactcatttaatccaagtttcttttccatttaatgacatcaactaaagagtctagaatgttggcataatgctgatgtgctatgcttaccactataattattatacttattccacttagctaaattatttactacttttatttaaatttgagtggccctataaagaaggccccagggacaaaatgctggaagctaccattttactagtctaccccagaaagcagaactacagaaacacacacaaaaaaacaaagagcattttgaaataagatttccactttgttattctggcataaattaaaagaatgaatatttctaagtataagtgaatatacatgccaagaaatcttttgctggaagaacttagagatttggagcaatcttgagttttgagtgtacgtgggaggaaatttagagctcattttcacaggccaattcattaaaaccccaaaccacagatttttaaataaaattcccatgtatgaaattgagattgtggaattgactggggctctgtattgtaaaataaaaaggactttaaacaaacccgct

SEQ ID NO: 370971 - DNA, 701 bp, Homo Sapiens
agcggtgagacccgtgcggtagcaacagcggcggcggccgcggcggctggccggactcaggtgtttcggacgctattgcccttcgcgccagccgtcgagtgggcagcagcgggactcagccgggcgccaggttcctgccaggcagcgccgggaagcgcgggcggccgagaactccttcctgctacttcgcccagcgccgctgcttcggcttcccagcgaagtgggagaccttcctccctgtttgcagacgtccgtgggagacccttattttttccaccgctaaggttaagagattctggaatagaagcgtcgaaggagatcaagtgaaccttctacaactcctcggatgtcgccagtctccctttcggggcggaagactacgtaagagccatctcacttgaggtgcaggaatggaagaacccaccttgcagctttctctgcagagtggcattgcctgatctaccccataggaatgaagaggaggcttgtaaataatccgatgaagtacagatgtcgaagaggatatcgcaggacctaaacttgtgcatccgaagggggaggtcacacacgtttcctgagtggcgactggcatgggcgtgaatgacgtgccctcttaaaaagcacaacaactcctttaagaggagcaaaatcgagttatcccattttggacaagaattttgaagacagatccatgtatccta

SEQ ID NO: 370972 - DNA, 1745 bp, Homo Sapiens
  misc_feature (1104)..(1229): n is a, c, g, or t
  misc_feature (1233)..(1329): n is a, c, g, or t
  misc_feature (1418)..(1512): n is a, c, g, or t
gagcccccgggggggcaacctcggggacccccgcgcgtgcccacgggcacggcccccgggaatttggcggcgcaccaagaggaaaccccgaccgtttgcgggaaggaaggagagcacaaaccgggggcggcgaaccagtggtgcccaaaagggcagtaaaagtacgccaaccgctccctaaccgtaggagaattataactcggacctgacctgcccaaggaatgctgctgtcgcccaggacaaaatggctgccacatagttggagatctggccaatgcctacaaggacaaacagcacgacaaacatctcaaaattcttcgagaagatctgcaggaagctgaagcctgtctgcatgcccatggtcacgaacagcacattcttccggcaaaacctgtctgacagctgccctgaaatgaaggagcccaacagcacacccacgaagaacaaggagattgtgagtggggccttccagtcggtcctcacacaccaggttccactcggtcacaatggtggacaggtagacgtcctgactgaactcccagccatccagacagctctcctgctccagctgccccaggtccacgtcgcgccccggctccagcccgagcgccgagaagttggcgatggtggcgagccggtagcggcggcagctgtggggcacctcgcggccgtcccgcagccgcagtgggacagtgtggttgcgccaggcgctgctcaggttcgcggcgtccggcacccggcagcggtgctccggggtcgctatcaggaacacggaggacaggccggtgaagccattggggatgatgctggcgctgagcaggaagaagatgaggcgctggaagggcccccactcgcccaggaaggcggtcacctcgtcgtagtcccgcatgccgccctcagaggcccacagagcgcggcctggggtcggggaacgcggcgggctttgcgcgtgcgcgcggggcacccgccgccgaccaggcaagccaggcagcaggcgacccaagaccgtccgcggaggagacaagcaagctgtcatgttataagcagccctttgaggggtccatgtgatgtcaaggaatgaagtctctagccaacatttaatgnnnnnnnnnnnnnnnnnnnnnnnnnnnnnnnnnnnnnnnnnnnnnnnnnnnnnnnnnnnnnnnnnnnnnnnnnnnnnnnnnnnnnnnnnnnnnnnnnnnnnnnnnnnnnnnnnnnnnnnnnnnnnntcannnnnnnnnnnnnnnnnnnnnnnnnnnnnnnnnnnnnnnnnnnnnnnnnnnnnnnnnnnnnnnnnnnnnnnnnnnnnnnnnnnnnnnnnnnnnnnnnagttatctacggccaactgggtaaaccaaatagatgctctttacaaatattttttaacttcttaaaatatctcattgaggattccgttnnnnnnnnnnnnnnnnnnnnnnnnnnnnnnnnnnnnnnnnnnnnnnnnnnnnnnnnnnnnnnnnnnnnnnnnnnnnnnnnnnnnnnnnnnnnnnnttgaatgaagagaagcacacctcctccccagaacagtactgcagctatgatattaacgcctgggcagcgttcgcaatagcagccaggctgtaatgtacgctggaatttcatcaaggcagagaggaaacagttcagatggagtcttggtctgctgcccagctggagtacaagtatgcgatcaagctcactggaaactcacctcctgggtcagtgatcctctgcctcagcttcca

SEQ ID NO: 370973 - DNA, 309 bp, Homo Sapiens
  misc_feature (107)..(107): n is a, c, g, or t
tgccctggtggcaccgacggcccctccgcccggctgtctgtgttcacagatggtctcgtttcccatggtggtgtcggggaaatgacgaaaaatcaggtttcccggcnagcacagagaacccttccacaaaagtagaagggaaagcaaatagttttactaaagaagcagcttcaaaccagaccgtgagccaccgcacccggcctcctgagttaacattttctaaagacgctccggcgtgctatcctgaaagctgccagaggtgtcttggctgcattggtggtaataaaattcatactcatatttgacttt

SEQ ID NO: 370974 - DNA, 624 bp, Homo Sapiens
gggctgttcacatcctgaggatatcgaaaggtggacactattatgagagtggaacggagaaccgtggaaccccgaatcctaatggttctcaaaccttttggtctcaggaccctttgataccttgaagatttgaggaccccaaagagtttttctttatataagttatatctgatcaatatttactgtattaggaattggatatatctgttcattacttcattttaaaaataacccattatacattaacatatgaataacacatttttgtgaaaataactgtttgccaaaacaagaagaattaagagaaaagtggcattgtttgatatttttgcaaacctgtttcatgtctggcttaacagaagacaactaggttctcatatctagcttctgcattcaattggttgggttatcacatatcacatcgtagcctctgaagaaccccactgtacactcttgagagaatgagagtgaaaagcaaataatgtcattattatgaacatagttttgaccctctgaacccatggaaaggaccttaggggcccgctggggccccaagaccacactggataaccaatgtcctagttgaaaagaagtttttacaggcctgctttaaaatcctccgct

SEQ ID NO: 370975 - DNA, 761 bp, Homo Sapiens
agcgggtcgtgcctgtcagcaggggcagagtagcgatcgtcgccaaagcgcgcggttttatttctctccgctttggacggggcaaactagcttttgggagtgaagcgggtacgcagttatccaacaatgtctggtgagtcaggacagcctgaggctggtccctcacatgcagggctagattggccgaaccctgagaggaatcgggctggggtcccgggaggggtgatccgaagagctggttcccaagggcccaggtcctggatccaaaaggttcttgagcagattatggactcacctcgccagtgtgtcaccccctcggaggtggtgcctgtaactgtgctggccgtccagaggtacctgttagaggatgagccacgcgacacggtgcccaagcctcccctttattgctatgatgtgacgatctcagatggggtgtaccaggagaagtgctacctgcaccccagcttgaactctctcgtatatcaaaatattcttaaagttggcattcaaatgagaatttccagggtctcatgtctttacaatgagaaacaggataggccaggggatcctgtgcatagataacgtccactgtggggagacttcagaacagtatttctttagaaactcccttcagaaatagagcgcacaaggagaaaccagaagaggcctttaagaggcgggaagagtcattacctggcgctgtggaataacgaagatccctatggagatatctggttaacagacaagcaacctgaggaaca

SEQ ID NO: 370976 - DNA, 808 bp, Homo Sapiens
  misc_feature (760)..(760): n is a, c, g, or t
agcggcgacatctacgagaacctggacctccggcagagacgggcctccagcccggggtacatagactcccccacctacagccggcagggcatgtcccccaccttctcccgctcacctcaccactactaccgctctggtgatttgtctacagcaaccaagagcaaaacaagtgaagacatcagccagacctccaagtacagtcccatctactcgccagacccctactatgcttcggagtctgagtactggacctaccatgggtcccccaaagtgccccgagccagaaggttctcgtctggaggagaggaggatgattttgaccgcagcatgcacaagctccaaagtggaattggccggctgattctgaaggaagaaatgaaggcccggtcgagctcctatgcagatccctggacccctccccggagctccaccagcagccgggaagccctgcacacagctggctatgagatgtccctgcaatggctcccctcggtcgcactacctggctgacagtgatccactcatctccaaatctgcctccctgcctgcctaccgaagaaatgggctgcacaggacacccagcgcagacctcttccactacgacagcatgaacgcagtcaactggggcatgcgagagtacaagatctacccttatgaactgctgctggtgactacaagaggaagaaacctgactgcccaaggatgtaagacaggacccgtttagtagcgccacctgtcccagtgaagagttctaccatangtctttggtcatgacctatctctgtagtttgacccggctggtccctct

SEQ ID NO: 370977 - DNA, 442 bp, Homo Sapiens
tggcgccagtttggagtcggaggactcacatctaactggctatggtatggagagctccgtgccactctcgggcccagagcggtagtagtggtgaggtgagcgggagaaggtgggggacatgccctgcctggctgtgaggtgggggagtctatgtaccccggtgctggaggcccgtctctgcgcggaggtccaggttctcgtcagatgtcctggcgagtagggagataatgttcccagcgactctccatagccacatctctccagcatctcgtcggacatgtatctggaatgaggctcataggaaatgaggtcggggcgttgtacctcgtagatagacttaaccttggggagagccgccaggtctttgtaattaaggatctcattatccactttagcgcagatgactcggtagggtgacccaatgctggatccagggggtgag

SEQ ID NO: 370978 - DNA, 664 bp, Homo Sapiens
  misc_feature (58)..(81): n is a, c, g, or t
agcggagggcggagccttaggcggagcgaagagaaccggtcgcggcaatcctagcgcnnnnnnnnnnnnnnnnnnnnnnnncccgcatccgctgcgggagtccgagccggaaccacacccaagtagctgccctttcctcttctgtcatctcaccgccccaccacagtaccgcgttcccagaggaaaccggcacgaccacgcccggagacatccatcacccatgatatgagcgggcgctgacggaccacggaaggcaatgatgcggctgcagaggcctcggggatgctgcgggaccctgctcctgcagtcgccccgacggagtgagcgcgactctgacggcgggcacagcaccattggacacaccatgtgaccggcgtcaccgaggcgagggagacggcacggacgagggcccggcatgacagccgagacgatccaaccgtggtgggggcgaaggagcggctaggaaccggcgagaagacaacccaaccggctagcaggggaccatgtacacaaacatccaacccaaacggaagaatactagccaaggaaactaggggcaaagggggcagacaccgccagtccagaaagcaccggggaggtcagacccaccgagactaccccggagagagcccaggacaccaaaggaacgagacccggggaagaa

SEQ ID NO: 370979 - DNA, 837 bp, Homo Sapiens
agcgggctgatacacggttgtggagggtacggccgcggtctccggaggtggcgggggtgttggggacgggtgctgcgaccggcactgcacatccgagcgggacgggcgctgagtggccgggaggcagccgggtagccgcctggaggagcagtctcggggcctattattggttttttccctccgagaccgattccatctgcagagaccgcgacgccccatcctgggccgggccgcagtgcccgcccgcctgagaggcgccgccctgccagccggcccgagcgaacctggagccgccgccgtgcccgccgctcttctcgcggagcctgggcggtcggcggggcctggggcctgggcttcgggcgcggcgttgcggcggccgctcctccccgcacagaacacgctgggccccgggcctggcccggccgagctgccgcgccctcctgacccgcggcagcgggagtccggcccccacggcccctcgggccccggcctgcctgcccggatccccgcctcctggggcggatctggagttatattctcgggtctcccacctcccccttgagatcccggcaccggaggggcagaccccgccacctgggtcacgttgcgcgccctgggggaagcgtccctccgtagggtactttccacgggaagctctcccccgggtgacaccatctcccttttctggtgccttaactgcgatggggggggtctggagttgtttaccccccatgtatattggtcgcgctccttggcactgcgaagtgccaggatgagagggctctgcggcatctgcgtcccccgtcacggcctacgacggcccgtggtgggaaccag

SEQ ID NO: 370980 - DNA, 767 bp, Homo Sapiens
agcggagtatgcgcctgacctcatgaagcgcctccgcttcgccctcatcccggccccggagctggtggagcgggtccagtcagtggatttcatgcgaaccgacccggtctgccagaagctgctgctggacgccatgaactaccacctgatgcccttcaggcagcactgcatggcatgagcctggccagcagaattcgctctaacaagaaaatgctgtgattggttggagggctgcctcctggaccggaccggctccccaggcaatttggttcacgtattacgacgatgaagaagaagacactggaaaactagctcacaattagtgccatacaagcagtgcccagccactgcgttgtggaggtggcaaaacttcttgtgcgtgctgggtggagaggaccagtggaatccgaactggaaaaacacagtacaagatttggtcagccgatatgatcctcgatttaatagctggattcagacgttccacccagtgcatggaaagaatgagccagtttctatgcatgtcggtgggacaagcatttatacgtaattggtggaagggaatgaaactggctacttgtccagcgtggcagtgctattaacctagtaaaccgaaatgaataggcgctatgtgtccctcttttgcaacaggctctgggcgggctccattgcgggaaccaggtgcaccaatggggacacactatacctttccaggggggtgtaccacaagggggagaagattgtcccatggctcatattggctatgaccc

SEQ ID NO: 370981 - DNA, 982 bp, Homo Sapiens
gccgcgaggagagggtggcgcgcactttgcagaacgtcggaagtctacgtgagggtgttcccgaggggacagccaggagagaggcagtgccattccgcgaatgggaaggggaaataacaccctactagcggtgtttgcaacttgtctgcggactgaaggagaagtaccctggcgtggatgttgcaaggagtccccaaaggaaagtcctttcaagcatcagtgtgtcgcgccatgttggcacaagtagccaagttcgtctggcgctgaaatgggaattctggcaggccgccacaatacagctggctcggggaaatacgcatgcgtgtcctggtagcgattgatcgtgcgtccgcagccaatgctcctgtccggtagtggttaagtatgtgcaatcgtgtcaccgcgtcttaaatgaaaggttcttctggtagttctagccttcagtgaatcagataaggccacaagatatagtaacaccacctggtaaaccagcaggaatatgaacttggcaccactgaaaatgaggaagatgcacctccaaaaggcgttacccctgaggatcctccaaatggtgtcatggaaagactgctgaaattaactgctgttccctttgctgaagatgacggacatggtgaccactgtagtgggttctgctccataatggctcacacttgtactgacaggcttctggagtattttcaggtctgtatttaatggctggacttttgttttctttacttttaatgcagccccattatcaaatctgtcctccggccgcgctctcatgagtcgctgctaccgcagctcgaggtggcggagggcggaggcgaggcccgcgggccctctccctcctccacctcctcgtcccggggcgcccggcggcagcaacgacggcagagccggcccgggacgcgttacttcaggaggagggagttcccgggctccgccacgcctcggcctcactctccacctcctccccgct

SEQ ID NO: 370982 - DNA, 809 bp, Homo Sapiens
agcggtatgtagtttccgccgcgtttatggccgcgttaagtctgagtgccgctttgagttgttgaatgaagtgaacttcatttgtcagcgttcggttcatgaactggaatgtaagaggcaccagaggattcctgctctgtcccctggtttgcggcttgcgacgttggacatccccggattgttgtttaatagagaaaactcacctgccttcttgcttttaagtagccccaaaagcagaaccttgatttgtctgtaaggaagaaacacaaaccttttaaaaagttccacttcgactctgcaccgccgacccccaatctctttaattttgccatagaagaggggttttttcaacatctctctcactatctggtgctgatctcactgcataatgactttctatttgtttggtattcgaagctttccgaagctttggaagagcccataccttgggctaggcccagggcactcttatgtgtcgctgtttctggcagaccgctgtggcatcaggaaccagcagaggttgttttctcttaaaacaatgtctccacagaataccaaagcaacgaatctgattgccaaggccagatatctcaggaaagatgagggcagtaataagcaagtttattctgttcctcatttttttatagctggagcagctaaggagaagatcaccggattgaattctcaaacgtgaagatcatgccttgggcaccctgtgagggaacacgtattcaagtccaaaaacgaacctttgaatccagaggagtggggattactttaggaagaattaaaagaaacccggaaagact

SEQ ID NO: 370983 - DNA, 407 bp, Homo Sapiens
ctcaacgctttatacttcccatattcgaatatgggaagttttaaagacagaggagagctcgattcaggactggggtgaagaggtagaggaaggagctgtttaccatgtcaccctcaaaagagtccagattcaacaggctgccaataaaggagcaagatggctaggggtcgaaggggaccagctgcctccaggacacacagtcagtcaatatgaaacctgtaagatcaggaccataaaagctggcaccttggacaagcttgtggagaacctgctgacagcttttggggacaatgactttacctatatcagcatctttctttcaacgtacagaggctttgcctccactaaagaagtgctggaactactgctgcacaggtatggcaacctgacaagcccaaactgtgaag

SEQ ID NO: 370984 - DNA, 1030 bp, Homo Sapiens
agcgtgggcggaggagggagaccacagagccctgggttgtggaagaggtggctgttccctgtcatcagtatgcagcgattgctctttccgccgttgagggccttgaaggggaggcagtatctgccgctcctggctcctagggcagcgcctagagcacagtgtgattgcatcaggcgccctttgaggccagggcaatacagcaccatctctgaagtagctttgcaatctggaaggggtacagtgtcccttccctcaaaggctgctgagcgggtggtgggccgatggctcctggtctgcagtggaacagtggctggagcagttattcttggtggagtaactaggttgacagagtctggcctctcgatggtagattggcatttaataaaggagatgaagccacctacaagccaagaggaatgggaagcagaattccaaagataccagcaatttccagaatttaaaatcttgaatcatgatatgacactgacagaattcaagttcatctggtacatggagtactcacaccgaatgtggggtcgccttgtaggccttgtgtacatcctgcctgctgcctacttttggagaaagggctggctcagccgtggcatgaaaggacgtgttcttgccctctgtggcctcgtctgcttccagggtctgttgggatggtatatggtgaaaagtggactagaagaaaaatcagactcccatgacatccctcgggtcagtcagtaccgccttgctgcccacctgggatcagccctggttctttattgtgccagcttgtggacctcactgtcactgctactccctccgcacaagttgcctgaaacccaccaactcctacagttgagacgatttgctcatggaacagcaggtctggtgttccttacggccctctcaggggcttttgtggcagggctagatgctgggcttgtttataactcctttcccaaaatgggagaatcctggatcccggaggacctctttaccttctcccccacctgtgaaaagtaggaccgagctcgattcc

SEQ ID NO: 370985 - DNA, 525 bp, Homo Sapiens
  misc_feature (71)..(186): n is a, c, g, or t
gttactgttataagttgggaaaaagagaggcagctttagaaaagaaacttcaccgaaatacgtgcatgcannnnnnnnnnnnnnnnnnnnnnnnnnnnnnnnnnnnnnnnnnnnnnnnnnnnnnnnnnnnnnnnnnnnnnnnnnnnnnnnnnnnnnnnnnnnnnnnnnnnnnnnnnnnnnnnnnnnaatatatatctatagctgtacatatgtatacacccataaacaaagctcatagtttaaaactttggaattttcagtttggagaacttattattattacaatttatatttggtttcctagacggtctaatatagttctaatttccaaaattctcttccactaaaagtggatatatttatttatggtgccgagaacattaacaaaatatttagatttaatatctatgaataataaaccaaaaaaagtgcatttaaggaaacaccaaacttgtaaaaactggctctcttatccaaaccatttgttggaatttcaaactacatgttttcacacttcttcattcc

SEQ ID NO: 370986 - DNA, 1070 bp, Homo Sapiens
ttttgcggtgaacattcgttcataaaatgtgattaaggctattaaatataaagcttggatgagggtgcagacaattgtacgaaacagctgtattttggcaaatatgtgtattatgataaatgaaaatacagagttttaaaacggcacttaatctgttctctctctcagagtctgccaaataaatcagatttcttggaaaatattcaaacttgataccattgaggcaaaattaactcttgtcaggtaagtcatttgccataaacgaaaggacccataactgcattaagcagagagggactgactgtcaatgaagcttctctatttgcaatttattcagcaaaagcgaacaatttttaaaaagtctctaatgcaaaatttagttcaagtatcaaaggtctgatcaattttaaaaggcattagttttatttttaataaattgaactggccttagatgaaagatatagttctgttcacatattttatacattatttacagagaaatgaaaaatcctgctgcctttgttatcacttgtcatttgcgaaattcttactaaaataaaagaaaatggaaagataatttgacctctgacttccaggagaatgttcaggccacatctaaaatttaccaaagaatggggaaaaaacttttttcaagttggaaggtaccagagtgattagctggtctaacctactcattttacagattagaaaactgagatatggccgggcgacagagtgagactccatcccccaaaaaaagatttatgcaaattatatctgctctatagaaataactgtttaacaccatgcaagaaggcggttcaacggtgaaaatttggaccttatatcactgcagaggttagaaatacataattttggaaatataagtgcatatttttgtagtatttttttaaacccaatcctttcataaacttgagaactgaaattacttcagactgcacgtgtattatattaagaacatttttccagatatagagaaacataatatatagaactagtcactaaaaggagacagacactgaaatctagttttcattggtttgacagcc

SEQ ID NO: 370987 - DNA, 919 bp, Homo Sapiens
gtgaggcggattatacaagcctcctggatgttcccaattcttctagagatctttcggaaatcgccatcctggcgacatcagaagaccaaagtcatgcccccatacctagtgaccaccacacaatgcctggaatccatcattctcactcaagctggactgggaagtcccttgcttttgctgacataaaagtgcagataatatccccacagacaccagggcaatggaggtatatttgaatatactgtatctcttctttcaaaatgataattcctagaatcatgttggcaattagagaaccggatctaaatatcatatgcagggggcatggcaatgttgagattcagggcatagttgttcaccacgctcacggtgaagaacatggtcaccattatggcatagtaccttattgggatagctggtggcttccttcccaaatcagcttcaaagaggaagccttccacagcaataaataaaaattgtgcaaatgtcacaatgttcccacatcctggatgcttccgggccaggagctctaggaagatcacgttactgcagcagcctgcgaacaccaggcccaccgccaaggccgggcgcatggccggtgcagggttggggaagcaagcgcacagagtaagcgcccgcctgtaccgctaccccaggaagccggcctcctgcctcttcgctgcgcagcacatcgcaccgtcctggaaagccgctctcactgggggccgccgcggtctccccttctcccgcggccaacaccgacgctgccaagaagctgtagttcgcagtcagcttcggtcccattcatccgagggggcgtccgagccccggccagactacatgtcccaggatgccgtgcacctttacctcaggatgcgacgttcccgcttccgccaggcagctccgccatagagccgct

SEQ ID NO: 370988 - DNA, 606 bp, Homo Sapiens
atggcttatttaataaatggaaggttcataggagaaaaattttagctttctactttatatcatatacaaaaataaaatccaactaaagaccagaatataaaaagcaaaattttaaaactatgatgaaagtagaatccgttactttagggtaacaagatttctttaaaaaacatgtaaacatggaatagtctgttgaattttggtgtattggcctcacaggcacccacaaatgtacacaaagagatatatatcactgtgttcctgaatcatggtttgtattgcccaaaattggatataacaaatttttatcaattgtggaatagatgaataaatgtgatcatttctgtgataaaatacagaatttagaaacaaaatctacctatagttatatggatagattacaatatataatattgagagaaaaaattaaaatgcacaaaggaacacagtataacatttgtataatttaataagatcttgcaaagaacagtactgtgtattggtcatggatccatatatgacttggttgccttttgggatgtgggaaaggtttggtgggagttgttatatttatctgtaatatttctttaataaaagagtgaaagc

SEQ ID NO: 370989 - DNA, 743 bp, Homo Sapiens
atacccactttcaaatagatatttaacgaatactaaccttaattatagacacccatgctaagaatttagggcatgtatggcctaaaatttactttggaatgttctttaaaaaacatctgatggatcgatggatgaaaagagggatagagaatatgaacagatacatggcaatacaagtatagtcaaatgttgatggtagaatctagcagtggttatactgcaaagttttttcaactttgatatatgtctgaaaattttcttgagaaaatgttgaggaacatgttaacatttctataataaaatcagtctagcagggcgtttctaagattctaagtagtcaggcaatttagaattttaaattaattaaactagggaaaattttgcttttaatggcttcaaacctgatttgtgaagatgcttcatttaatatagaaatgaactaacacaattaataattattgtgccagtctcttcgctttagctgcaaatacataatttttcccctctctacagaagacaagtttgaaaatgaccactagaataaagaatttttccaaacatcagtgtcaagctcttccaatcaaccacactgccattcactaagtacaaacgcaacacagatcaaggtgaaaaatgatctctgacttctgccagcttgggaaaactggattcattttcagaatgtatggtttctgatcaataatgacaatagttttacttgatatcaaattgacatttattta

SEQ ID NO: 370990 - DNA, 1000 bp, Homo Sapiens
  misc_feature (50)..(82): n is a, c, g, or t
  misc_feature (176)..(203): n is a, c, g, or t
ttcagaaggaagagagtttattccaatgtaaataattttggtaaagtacnnnnnnnnnnnnnnnnnnnnnnnnnnnnnnnnngaatatgggctttccagaacactgagtatggagtaaaactggcatagtggggttcactttggaagaatgaaaatgtataaatatataatatttnnnnnnnnnnnnnnnnnnnnnnnnnnnncagataatgttagtatttttggtaaatacatttgaaactatgattatggattcattgggggtacagatcatggaataaaaacactctttattggctgctgtggcctaagaggatggcggggagggccctggtggggctggagagggagggggcggcgtccagcagaaggtcctttgaggagaagaatcatgggaggcaagggatttgggcatttaggacatggcaggacttcttgaaagactgtatttgcaaaccatagctgtgggtcacatttctatgtgtgtccagtgccctgttgttgactttcaccacctctggctggcaacagctggagccccaaagacctcctcacaccttgcctgggaataagggtgggcatattctttcaaaatgagaagtgacagctgtgaagaataggcctcttccaaattttccatgttgggaagaaacattagctcctcagggggtgcgtgaggtgtctgaaggaggttctctgctccatgaggtcagtgcagagcagtgggcatgccacagtagcaatgctgtgtgggttactgtttgtggacaaagggccattcagtttcttaatatagtcatatgtcatctttaccattaagcccttgtttctctgttcatagtttcatctacaaaacagcacttaaaagtctcctctggatttcgcaacgaatgctgaagtttatagactggacgcttagtatattaccattaacccaaatataaaaattgaaaaaaatagcaattctgcacaactcatttctactagcacttatacatta

SEQ ID NO: 370991 - DNA, 443 bp, Homo Sapiens
  misc_feature (40)..(40): n is a, c, g, or t
  misc_feature (57)..(57): n is a, c, g, or t
  misc_feature (63)..(63): n is a, c, g, or t
  misc_feature (73)..(73): n is a, c, g, or t
  misc_feature (114)..(114): n is a, c, g, or t
  misc_feature (137)..(137): n is a, c, g, or t
  misc_feature (147)..(147): n is a, c, g, or t
  misc_feature (168)..(168): n is a, c, g, or t
  misc_feature (175)..(175): n is a, c, g, or t
  misc_feature (196)..(196): n is a, c, g, or t
  misc_feature (220)..(220): n is a, c, g, or t
  misc_feature (229)..(229): n is a, c, g, or t
  misc_feature (243)..(268): n is a, c, g, or t
  misc_feature (372)..(396): n is a, c, g, or t
acaggctttcaagaggcctgccatggcctaatgcccaaancccttgcctcccatgantcttcncctcaaaggnccttctgctggacgccgccccctccctctccagccccaccngggccctccccgccatcctcttnggccacagcngccaataaagagtgtttttantccatgntctgtacccccaatgaatccntaatcatagtttcaaatgtatttnccaaaaatnctaacattatctgnnnnnnnnnnnnnnnnnnnnnnnnnnataaatattatatatttatacattttcattcttccaaagtgaaccccactatgccagttttactccatactcagtgttctggaaagcccatattctttctaaannnnnnnnnnnnnnnnnnnnnnnnngtactttaccaaaattatttacattggaataaactctcttccttctg

SEQ ID NO: 370992 - DNA, 833 bp, Homo Sapiens
ggggtgtgaatgaacaggaatgagcacggagacgctcgctgatgccttctgtgatgtgtttcttccccagctccagaagaaaaggaagtcattaaaggacagtatggcaagctcacggacgcgtacggctgcctgggggagctgaggctgaaatctggtggcacgtctctgagcttcctggtgttggtgacaggctgcacatctgtgggcagaattccagatgctgaaatctacaaaatcactgccactgacttttaccctcttctaggaagaggccaaggaggaggaacgcctcatagctttgaagaaaatcctcagctcgggggtgtactatttctcatggccaaacgatgggtctcgctgtgacctgactgcccgcacgcagaagaagggggatgacagctctgaatgggcggaactccttcttctggaaccagctgttgcacgtgcccttgaggcagcaccaggtgagctgctgtgactggctgcttgaagatcatctgccggggtggtcaaccatccgcaccgtgtatgcctcccacaagcaggccaaggcctggcatcgtatctcggcgtaagctgtgagcggcacagagcacgtcgctttccacagcaagataacgtatgcaagagaagctacagtcaaagtcaaacgtagatataagactgacacaagacagaagaacacatatgacaacgtgagacgaagcagatatagaaaaagacacaaaacaaagagacgacagaaaacaaaggagaaacgcaacaaccaacagggaaaaaccgacgagagcaacgccagacaagaaccaacacaaagagacagaaagcac

SEQ ID NO: 370993 - DNA, 766 bp, Homo Sapiens
  misc_feature (630)..(630): n is a, c, g, or t
  misc_feature (642)..(642): n is a, c, g, or t
  misc_feature (656)..(656): n is a, c, g, or t
  misc_feature (701)..(701): n is a, c, g, or t
  misc_feature (709)..(709): n is a, c, g, or t
  misc_feature (738)..(738): n is a, c, g, or t
  misc_feature (746)..(746): n is a, c, g, or t
tgagccatacttcattttagcaaatgggcctaccctagctttagctttcatgggaaacagaggcatgcagtactcttaagccagtcaagagcatatgccctcaaggacttgtataatctggaggaaaaataaataagctccatgactaatgtgccatcagatgaccttggagtggtgttcaagtgggcagaagttgccaatagggtagagggagctcaacctaaatctaagggcgtgatttattgacatgactgacaaaggttcaatggcgtgggatatgtttacaaaagtgtgttaacttcgatttcagaaagcgttgaatcgtgtttagtacaaaagcacctcaagtaaataagtaatcaactaataagtgaaaaaagtaattgttaatactaaccaccagcttagttgagctgaagcaatcatgggtggccacagtttatgaaatgggtaccagggcaactggtgccgtgcagagcacgtttccaaccctagtgggacatgcgctgctccgtcctgcccaccagtccttccttggggagcaccatccctgcttttctcggcattgcttgagcccaattaggggctgtggggtcacattcccaaattacaaggttcaggccacatggntgcggaacgggncccccatgttggtnttccatcccttttgcagttcgtgtttttggtcagaagggttgggncttttggncccaggcaaggcttccccggagggtttantttttttnaggcaggtgggtttagtttg

SEQ ID NO: 370994 - DNA, 824 bp, Homo Sapiens
agcggggggggctgcaggtcctcaagctcacgggctctcccagacggctcagtgagggcaagatcctgtggacggtgtggcccagtggatgtaactctcgctgccacttccgtggccatcgttaagctagctccgaacagccccaatgagggagctaggcagctccgagttcccggggtaggagagccccttttgtaaatttccatagctgtgggtgagccacagcggggactggcagggatacccttctccatccttacaaaagcggatggaccctgagcctctgatcctgtaggggcagcccggccgggaagaggtggcattcctttcttcacctgcgaggagcataggctgggccctcctttcctcccggagctcggttcctgaacgtctctggcacattgctccccccaggactttgtcctccgttcctcgctccgggcgccctgaaccaggacccttccagggggctgactgctgctgcggaaggggcacggggagggcgagcgagccctgcccaaacgcgggctgcgggggcgctcgactggcggagctcttgtgcctggcatgtgcgcctcaaacatgccccactttctggttcacctgcacgttctgcaactcgcgctgccacgatccgcagcttcctcttggcctcctccggacctgccgggcagagggtaccgcctgccaccacctgctgccggttccctcgctaggcgacctgcccaacttgcggctgctcaccgctacttgccgctgctgccgctgccacttgccggctgttctattccgcctgcgccggcggttcggccagccccgtggtc

SEQ ID NO: 370995 - DNA, 1398 bp, Homo Sapiens
ttggaagtcgactctgtgaggatcccctttttgccttgcggagctgtctgcgaaggtctcttgtcttcttacacatgttgtctaaagcaatattcagggtattactcctttctttttttccagcgttgttcatgtactctgaaagcagatcctgaagagcctggcgaatggcgttgcattctgcgataatccgctctcggtgtaagtccctcgtacatgaagaatccgccagcagagcagccccactgataatggcttcaaggcgtttctctagtgatggtcgtatttcctcctcagttactgtgagtggattcaggacaattaaattctccagctcatcaagggcacttcccagggttgctgcctgaggttctggtggggttgtcatattctggatcccttgtgaagcatttgaaattacattgagagcattctgaatttcttcacaaactgtgtccttgcttgctttgagggaagcaacatcagaatgctccaaacaagctgaacaaattgaatgcaagaggggagagttctccttcagtgaagctcgggctcctgcaatttcatctctctgatttggagattttaagtcctgctgacgtttgaaggctaaataatccaaattttccagctccttcccaagcttctggtaggttttctggaggtcagatttgttggcaacatttttgagagactcaaatgtcctttgaaaagctgacacatgttgcaagaggcacatgacatcaatcatgtccgcaaggataaggagtctcgtcaccgcagccagcaaggcacgggcagcttgaaccacagcctccctttttgggagaaaacaggggtcatctgtaaatctctcagctgatactttcagagcttcactttctttgcgaactttctcaagtgaagccgtaagctcatcctttaaaactgtagcttcctgggcaatcttctctcccttgtctaataaattccaagttgcttcctccacagaagctagaaggacactggctcttttcgaacgtccttttttcctgctggaagggttctggggacagtttacaagtgtggtaacctggattatgagaggctccagtagcttctccacggtgaatgtttggacctgcagatcctgaggatcgatattcaatgtgattggtgtttcagctgacatgctgccttgtttctctctcctttgcgttgatttcattctccttctaaaagtagaaacatggtctcttttctcagcgattcagctactgcaggacagagtattgcccatatacagatactaaaccaattgtctaagcaatttcttgtatttagaaattcagtgccactatcatggctcacaatttggcttatgatgcatctgtaagcaaacagcctgaaaagcccgct

SEQ ID NO: 370996 - DNA, 428 bp, Homo Sapiens
ctgtgtgggattgtcatattcgggatcccttgtgaagcaatttgaaattacatcgagagcattctgaatgtcttcacacactgagtccttgcaggctttgagggaagcaacatcagaatgctccaaacaagcggaacaaagtgaatgcaagaggggagagttctccttcagtgaagctcgggctcctgcaatttcatgctctctgatttggagattataagtcctgctgacgttatgaaggcctagataatccaaattttccagctccttcccaagcttctggtaggtgttctggaggtcagatttggttggcaacattttgggagagactcaaatgtcctcttgaaaagctgacacatgattgcaagacggcacatgacatcaatcatgtccgcaaggctaaaaggggacctgcagaacgactacaa

SEQ ID NO: 370997 - DNA, 898 bp, Homo Sapiens
  misc_feature (525)..(831): n is a, c, g, or t
agcggagtaagtcggggcgctgcgggccggggcaggatgtgggcgctcgccgggggacgtgctggggccgggcgagggtcaggcagtccaccgcgggcctctgccagggaacagccgatctcctgagtcgaggcctcgcgggctgcagccgggacggccggaaagccgcctccagctgccagaagggggcggggcttccggtggggcagccatagggacctcgcggcccagggcagcgcggcctccgcgcgccgctggcgttcttccctgcgggacccgggctggctcggcccggctgtcagtgcgcacgcgcggcgacgcggcctgagaacctgggttcgcgcgccctgtccccctcccacgggcccctggccgcgtgccccgcgcccatgttaggggcagagccgcaggtcctacccgccgctaaaaagcacggttgactaggacctgcgtgtggggaaaggcttcctaatgacccagcgcctacgtgcccggaacaaaaaagattgatacataataacattnnnnnnnnnnnnnnnnnnnnnnnnnnnnnnnnnnnnnnnnnnnnnnnnnnnnnnnnnnnnnnnnnnnnnnnnnnnnnnnnnnnnnnnnnnnnnnnnnnnnnnnnnnnnnnnnnnnnnnnnnnnnnnnnnnnnnnnnnnnnnnnnnnnnnnnnnnnnnnnnnnnnnnnnnnnnnnnnnnnnnnnnnnnnnnnnnnnnnnnnnnnnnnnnnnnnnnnnnnnnnnnnnnnnnnnnnnnnnnnnnnnnnnnnnnnnnnnnnnnnnnnnnnnnnnnnnnnnnnnnnnnnnnnnnnnnnnnnnnnnnnnnnnntttacccccgcattaccaccagtggggccacaaccttggggctcaaccctgtatctcccacccctgg

SEQ ID NO: 370998 - DNA, 1560 bp, Homo Sapiens
  misc_feature (404)..(404): n is a, c, g, or t
tgtcgcagctggccgtgctttatcgcctgcacggcatcatggcgcggccgcgcccacgtagcccgcgtcatcgctggctacgaccagtctctcgtgtctgagctcctctatgcggcacggtggtgcgacgttgcggttgctgtgcctgtggttgttggttgggcccacattgcactcgggcacgtcgcagcggtacgctcagcatcgctcgtttctgtcctgtctccgtctcgtgtgtcttcttcgtctcattggtcagcacataggttcggccgcgcgtctcctgtcagccgtgccctgtgtcctcacgctgcttatagagtcgactgccgagcggcctcctgcgctgtgctgagcgtcgcggtccggccctgtgctgggtgccgacccgcacggcgtgtggngtggtggtctgagcatctcagtgttgtgtgtctaggtgccacccccaccgcgtgttcgtggggtcgtagctggggcgtgtcttgcgtggcacgcgtgggtgggtgggcgctgctcactcggcggtgtaggctggtagccgcagcgggggtggctcggtagccgccatcacctgttgtgttggagtcaccgatcgctcgcgtggtgtgcgctctgttctcggtggttgcggagtacgccagtcgggtgctggcgttgttggtgatacctgtgtcgtggtgtgcgtttgttgtctcgtgtggtatgagttctccgcttgggtgtcgttgtgtggtgcgccggtgcgtgccgtgtcttgtaggtagcgggcgcgtcgggctttgcacgctccgacgcgttgtggtaagccccgccctgtagtgtgcgcggggacggcctcgatggcgctgcccgctgtgctctggtgcgcccgcgccatgccgtggtatctgctcgtgggcgccctgcgccgtcgcgagcgtgctgacgtgtcgctctcgtgccgtttgcgcgccggccgggtgtgtgcctcagatctgcgtgctctgcggggttgtggccggtgttagtgtagggcgccgtggccgggtggggagcgtgttgcggcgaggagctggggatgccggtcgttgcccatggtggaggaaaatatatcactagtgttcacagtctcaactctgatagaacctgatggcgtgtaattgcctacagggcattcgccggggaagactagctgtctaggttccttgcgtgggagtctgggggctctataagggggctgggcctgagtggggagctggtgatcagcggttttatttctcgggttgctagctttggcatcagactttgaaccccaacttcttgccatattcctcagcatctgcagttcagcctgatgaaaatagcagaatgcagatccttgaattttcacacaaatgagataattatagtacatgtagcaactgtgttggacaccaaatgctggcagaatctttagttctactaccaatacttcctctacacacatacagccatccccctccgtggtggtcttctttccccgtgtccacctcccacagaagttggctgcaggtggaaatgacacctgtcaacagttgg

SEQ ID NO: 370999 - DNA, 282 bp, Homo Sapiens
cctgcgccgggacccaagccccagggcggcgacgtggggggcgatggcaccagctcgaatttcttccagatgtcctcgctgggcgccgtggagcggtagaaatcctccccgcagtcatagtcgtagaaatacgtgctggtacgagtcgtagtccatgtccgctccctcgctccagccgcccgccacctggagcggaccggctccccgccggctcggggcagcccggcagccagcacacacgcacatgcgcgccgccgagagcgcggcccgcacccacccgct

SEQ ID NO: 371000 - DNA, 820 bp, Homo Sapiens
cggaatatctagttaaagacaggacaagggaaaatgcatttaaaagctaagcttaccagaaagcaaagagatttaatatgtcaacttgtccacaataatgccaagatgaaaaatgacaatgagtcttaattattttgagtcaaatatttcagttcaagaaaatacaactacaggatttcctacaccacacaccaatgggattcatattcattatgcaaactatggtgacagacactcagggctgtaaagtaatttgccttgagtgtttcagtgactttcaccaagtttttggatcctggagtaatcagtgcaaacaagccataaagcttcagtagcaaattactgtctcacagaaagacattttcaacttctgctccagctgctgataaaacaaatcatgtgtttagcttgactccagacaaggacaacctgttccttcataactctctagagaaaaaaaggagttgttagtagatactaaaaaaaagtggatgaataatctggatatttttcctaaaaagattccttgaaacacattaggaaaatggagggccttatgatcagaatgctagaattagtccattgtgctgaagcagggtttaggggagcgagtgagggataaaagaaggaaaaaaagaagagtgagaaaacctatttatcaaagcaggtgctatcactcaatgttaggccctgctctttttaatctgactgaaggcaaaccctctcacagtctaggtaacagagtgacagaatagaagaatatacaaccacaggtggatttttaaccttttccctttaccactccctgtctgcccccgct

SEQ ID NO: 371001 - DNA, 279 bp, Homo Sapiens
ctctagagtatccccggctcatcttagttcaagaaaatacaactacaggatttcctacatcacacaccaatgggattcatattcattatgcaaactatggtgacagacgtgattgacagaatagtccccgaagtcccataattgagcaaacagcttgtcaccatacaaataattaaaatagcgtttgaaaaacgtacactgacaagtgctaacttagatgttgttcacagctactcttctgtgcacacattttcaaactgaaatgagccgggtaccgag

SEQ ID NO: 371002 - DNA, 739 bp, Homo Sapiens
tctggtcccatatgttcttctaaaacaaagaactgattccatacccatccccttttgggacgatgatggacttcggtttcaccttcaatgtgtttggtttggtttctcatcaccttgatggagctgtggtgagcagttccataacacctctgcacaaaacagagacacactaggactggacagatgcaagatgtgctagtaattttcattgtaagataactttccagttcacagttttccttcctttccttgtcagctacgaaagcttagtgagcattcaagagagaagccagagcatctttaggaaggacagtccaaagtaaattgtttagcgtgtccatgatttaactgtccatcagggaaaggtcagatcatatttacattctgaaccacttggaaaataaaagccgtagttgtctgattccaactcttcacagtagttgaacacaagcaaccattttcaaccttttctctcaatctccactgctgtcactctgctgcagacaccatcatctctccccagaattcttgggatagatctgtaactggctccctgtttctgttcttgctcctcttcagtctatcttggcggacttgccctaactggtggaaaggaacttaatttataagaagcaaagagaggggactttcccagagctctgggcacagctgctcgccgtcctcggaaagcccagacccccgctctcgacgaattcgagctcggccgatttggcctgat

SEQ ID NO: 371003 - DNA, 1307 bp, Homo Sapiens
gggagaatatgagccgaaaattgaggtccattttcctttcacggttacagctgctaaaggaacaactgttaagatggaatgctttgcacttggcaaccccgttccaacaatcacatggatgaaggttaatggttatattcctagtaaggcacgtctgcggaaatctcaggcggtgctggaaataccgaatgtacagctggatgatgcaggcatttatgagtgcagagctgaaaactcacgtggaaaaaattcctttcgtggacaattacaagtatacacctacccacactgggtaggaaaaactgaatgatactcagttaggacagtgggagccctctccgatgggaatgtaaggctactgggaaaacccagacccacgtatcgttggctgaagaatggagtacccctctcacctcagagtagggttgagatggttaatggagtattgatgatccacaatgtgaatcaatcagatgctggaatgtatcagtgtttggctgaaaataagtatggagccatttacgctagtgctgagctgaagattctagcttcagctcccacttttgcactgaatcaactgaagaaaacaataattgttaccaaagaccaagaagttgtcatagagtgcaaaccccaaggctctccaaaaccaaccatctcttggaagaaaggagacagagcagttagagaaaacaaaaggttagaatctattttataattcaagttcaacattagacttttttgaggttacaggtgacacacacaaactatgcaagaaagagtcttgcagtaccgtgagacgtattttatgaactgattgaaacatggttttgcctatatagtgattttaaaagaacccaaagtttgacttcaaaatggtcagtcttctttgactccatggggttttagcataagttggatatttcactaggttttgaagaaagtactctttaattaaactaattattttgtttgttttcatcttgcttctgcatttaggaggtcctacaaatcatctgtgataacttttaaagcattgtgtttaactttgattttaataccaatgatacaacctattgtgaatcttctggataatcctgacagaatactttctggtgctcttttattgcccaaggcttgtctttcttatccgggtcctatttaggccaaataagtattaggagttattttagggccctagcccatgtggagttggccgagggattttttttgtcacccttggttttgggagctaaggcccaggtatccccgggttcactgggaacactcctcacggagtcatctcg

SEQ ID NO: 371004 - DNA, 522 bp, Homo Sapiens
  misc_feature (53)..(151): n is a, c, g, or t
ctcggctcaggtgatcctcccacctcagcctcccgggcacatgccaccatgcnnnnnnnnnnnnnnnnnnnnnnnnnnnnnnnnnnnnnnnnnnnnnnnnnnnnnnnnnnnnnnnnnnnnnnnnnnnnnnnnnnnnnnnnnnnnnnnnnnncaacaggcatgaaccaacacgcccagccagtttcagtgatttttgaagaaatacatactcattttagaaagtacaaagagattgaaataagagctcactaaccagagatgacccattatggtttaaatttctttgtatatgtgcctaccttttcctgtgtgtgcatatttaatatacggcttgagtattccttctctgaaatcgttgggaccagaagtgttttggatttccggcttgttcagactttggaatatttgcattaccccttactgtctgagcatccctaatgggaagatctgactccctagcacctttcttttgaatgtcatgctggtgctccgaaagtttcagatttgggagatttcagatgt

SEQ ID NO: 371005 - DNA, 880 bp, Homo Sapiens
gttcagcacccatagatgtcccaaaggtttggatactgccttgtgacttaaaaggtgtctatttattacattagtaaatgtttattatcttttcttatgaaaatccagcctgagccagttgaatgatactgactccagaaaagcctgtttgggcctgggacaagatattgagcctccctgttcccagtttttccatttttaaaaactggataatatcctggagccttagcagctttaaagctttgtgctgggcgggaccagctcagcttcagaaataagagcctgcctatctgtactgtctttctgtggtacatccaggatgcgtgtgaaagatgaacacattttaagtaaagaaagagcttgctgcatttggaagccaaagagagggcaggcagaagagccgtcggggtgtacagcgttctggggctccagggctttgaaatgctttccagtgttgtcacttgaatgtcgaacacgttattctcagtggacactaaagagaagtacaggtaccgtgggctccagggggattcattattcaaggcacaaaatttccttctccggcatgtggccaaaagaggggctgagactggacgtgggggccttgcctgccccgtggagcttcctcaggcaccggctgcctctgtccatacctccactttcctgggtgcagtcttcagggcttggaccagtactggggtctttcaatttacatttaaaactgttgggcagtccatcacaaagcgtatccaccatgatcaagtctgcttcatccctgggatgcaaggctgtgctgtggttctattttgagtcccagaaagtttatcagaccaattaggagggtttcctgtgaaaagaaaggcttatagtcccagccgct

SEQ ID NO: 371006 - DNA, 731 bp, Homo Sapiens
  misc_feature (543)..(557): n is a, c, g, or t
  misc_feature (582)..(687): n is a, c, g, or t
agcggaggtgagtcacacagcctcacatgcgcacagtcagaaaggtcgactctacctcttctgtcctccagccctgcaagaagcctcaagcctgagcgtgcagcaggggcccaacttgctgcaggtgaggcagggcagtcaggcgaccctggtctgccaggtggaccaggccacagcctgggaacggctccgtgttaagtggacaaaggatggggccatcctgtgtcaaccgtacatcaccaacggcagcctcagcctgggggtctgcgggccccagggacggctctcctggcaggcacccagccatctcaccctgcagctggaccctgtgagcctcaaccacagcggggcgtacgtgtgctgggcggccgtagagattcctgagttggaggaggctgagggcaacataacaaggctctttgtggacccaggtacgggagccagcagggagagggaggggcagtggggaggatcctagaatcttaagacttttgagtcttaaactcctagaaacaaaaaactctaaattcttcatatcaaacnnnnnnnnnnnnnnnaagagaccgagtcttgcgctgtcgnnnnnnnnnnnnnnnnnnnnnnnnnnnnnnnnnnnnnnnnnnnnnnnnnnnnnnnnnnnnnnnnnnnnnnnnnnnnnnnnnnnnnnnnnnnnnnnnnnnnnnnnnncgggacgtgcccagacgcccagctaattggatttacgaaaagcg

SEQ ID NO: 371007 - DNA, 1226 bp, Homo Sapiens
  misc_feature (1143)..(1143): n is a, c, g, or t
  misc_feature (1149)..(1149): n is a, c, g, or t
  misc_feature (1173)..(1173): n is a, c, g, or t
  misc_feature (1180)..(1180): n is a, c, g, or t
  misc_feature (1211)..(1211): n is a, c, g, or t
caatgttttcttaatcttagaatgtgaataactgaaaatcatagtctgtggaaaggtgtcgaattgagtataatcttcttctgtttatttcttgtgcttttgtatttattaacagatgggtatcttgctatgttgcccaggatggagtgcagtagctattcacaggtatgatcatagcacactgcagcctcaagctcctgggctcaagcgatccccgtccctcagcctcccaagtatctggggttactggtgtgcaccaccgtgcttggctccaataattttttttctaattcaaaagttacagtttcactgtgaaaaaggccttgaacacactatttatgacatcttttgaggcagctccagtgccttgacttcaatcccagtttccggttgcagcatccttgttgtcttagcaacacagtgaactattctgaagcatagagtaacacgaaactgggagtccgagaaataatcatctctgcatcacattatgggagacgaagtctgctttatccattttatctttattcagttgtctatgattaacttgattaccagagtagtagattagaatagtgcatggatatacatttgtgttgaaaaaaggggaagttgatatatatcaatcttagttttcatttatcagtttgatattcatgcatttacactaaacgcttccatttatcccgaaaaagtatatgcaactgtattctgtaggttgatttttggaaaaggggagaagcacactgaattcataaggtcacatgtagtcttaaggtcttacttgcttacagccaattaaatttgaagcaccttatttatacttgttaaaggtaaaacccaaaagaacaagcagaggacattttaaggtcataaaaggtaaataagcttaccttcttaatgttttcattctctttttgtataaatcagaaaatgatctaaactgctgtaacaaggagaccccaaaatatgatggctcatgtaagataatttatttttttctcacataggcaatccagaagtgggcttcatttcacaaggtattcaaggggatatagggagtccatctaccttgttagttctctttaatacccaaggggtattgttctttccctgggtcaaagctgggctccaggacttccntggccngtggaaaaaggaggagggtggggncaggccntttcctttttgggggatttaccggccttcanttttgcccaccgtcc

SEQ ID NO: 371008 - DNA, 757 bp, Homo Sapiens
agcggggcggcgaagggcgcaggagcatcgctcggaggggacaaggggacgccacgggccacatgtttaggagggagccgagccttctcccggaccctcgccgagggcgaccgtgatgctgcagaaccggcgggagcgactcgccgccgccgctctctgcgcactcggagaccccagcgcccgccttctgcaggggaagcgaccatggccatagatcgtgacttcacccccagccacttcccctagaaagaaatccttggaaaagttgcatttgaaaaaatccttgcgctgacctttggggccgacggggccgaagaagcgtgcgtgcgtttgcaagtaagagaaccaaaggtgtgtgtgcatggggggctggcggtgggggaccctccgctgccacttcgcctagctttgtgctgaggccccggcccccgcccctgggacgccggggctgcgatgagcccctgcgggcgggcccggcgacaaacgtccagaggggccatggctgtactgggtggaagttcccgcggacccggctgcccatgggagccagtgccctctgtgtcgtggtcctctgttggctctacatcttccccgtctaccggctgcccaacgagaaagagatcgtgcagggggtgctgcaacagggcacggcgtgcgaggaggaaccagaccgcggccatgagcgtccaggaaacacaatggaagactgctgcgaccctgcccatctctttgctatgactaaaatgaattcccccta

SEQ ID NO: 371009 - DNA, 932 bp, Homo Sapiens
agcggaggtccgcaaaagagggacgggggtggtgcctttggggcgcggcgccggggattgggagggcttcttgcaggctgctgggctggggctaagggctgctcagtttccttcagcggggcactgggaagcgccatggcactgcagggcatctcggtcgtggagctgtccggcctggccccgggcccgttctgtgctatggtcctggctgacttcggggcgcgtgtggtacgcgtggaccggcccggctcccgctacgacgtgagccgcttgggccggggcaagcgctcgctagtgctggacctgaagcagccgcggggagccgccgtgctgcggcgtctgtgcaagcggtcggatgtgctgctggagcccttccgccgcggtgtcatggagaaactccagctgggcccagagattctgcagcgggaaaatccaaggcttatttatgccaggctgagtggatttggccagtcaggaagcttctgccggttagctggccacgatatcaactatttggctttgtcaggtggaaggaacagcatatttaagttcttttctgtggaaaactcagaaatcgagtctgtgggaagcacctcgaggacagaacatgttggatggtggagcacctttctatacgacttacaggacggcagatggggaattcatggctgttggagcaatagaaccccatttctacgagctgctgatcaaaggacttggactaaagtctgatgaacttcccaatcagatgagcatggcatgcattgggcagaaatgaacgaacgaagtttgcagatgtctctgcaaacgaagacgaaggcaggagtggtgtcaaatctttgacggcacagatgcctgttgtgactccggttctgactttcgaccgacgttctcatcatgatcaccaacaggaccgggctcgtcatcacccg

SEQ ID NO: 371010 - DNA, 582 bp, Homo Sapiens
  misc_feature (316)..(316): n is a, c, g, or t
cacatctatattagacaagtttcacacctcacccactgagacatattcactgctattcctttcagtccttctgcttggcatctttaaatcctaactccctaatcataagcatgagagaaatccggcttatccatgttcttgggagttctttttaacaacattaaactcacaaacttctctccctttaaaaaaaatgtacccaggaaaccagtggagaaagatgaggagacaaagcagaaagtataccattctacaaaataaatgcctgttgctaaaacatcgtaagcaaaaaacccatagagcggcgttcagtggnggctgtagtacacttgtttccaggttaagcactataaaggtttaatttcaacagctctaaccctcgtgatttaggaaacaagcagggtctttaacctttaacttacaaaaaagattatttctcacataaagataaattcatatacattcatactgttctaaaagaaagtacctttcatatgctctttatccagaacattgttttccttttgtgcatttttggtttgtttgaggtggagtcttactgtcaccaggctggagtacagt

SEQ ID NO: 371011 - DNA, 849 bp, Homo Sapiens
acagtcaggctgtagcgcctggctctgcggccggtcctgcagcagcaccaggtcgcgcactgagcccggttccgtcggggtctgcagctccacgcgaaaggggctgtcggcttcggccaggcgcacggtctgcagccccgttgccgcccaccgtcctcgtccaccggcacctccaaggggatgcgcgtgcccactgccgcaccctcggacacctctaccgggatctgggccctggggaagcgcggcgcgtggtcgttgacgtccctcacctctacctccacgtgcaccagccggaactgctcctgcgagaagctgaccacatcgaaggccagcacgcactgcggggcctggccacacagccgctcgcggtccaggccggcgtccccgacggtcagctgcccgtcgccttcgcgcacccggagcagagagctgttgaattgcttcatcaggcggaagcttgtgtcacccgatactttcatatgcaggtcctcggccagggtcccgatgaccgtgccgggggcatcctcctcgaaggtgctgtatcggactgttttgctctgggccactgagagcacccagcagaggctgaagagctgcaaggggaaaaggcaggggctgccccgacgcctcacaggactcatgcctccagcctcaagtgcgatccgaaaggctaaggaagtcttctctggtttccaggtcgggcgtcagtctcaggctctcggaatcacgctctttgcgagccctgtgcgggagaagtctgcgggtagcagctccgagcctccagcgggctctgagacgcgcggacccgccctcactctgcgcctctccgtctcttacagaagctccgct

SEQ ID NO: 371012 - DNA, 820 bp, Homo Sapiens
cgctaacggaagataccttgcgattgctggaaaaaatcgccccttccatcactaacatacgagcagtcgagtgctgactggtagtaacgtcggcgtcgcaagtcgtctcgcttcaacaattcactgaccacaggacgctagcaatatatgtaacaaccgactaattctgtcaccggacggaaacctctatgcattaaggcttcagtgacaacttgcattcagcggacaaatagagtggtcggcgatggattccctggataaagatagtacaaaagttattcttccttgcacacgtagtcacagcagaaacgactgctacgtaaatctctttgaacaagtcgagaaggagcacttgtcacatagcgaaacccgtaaggtattgactgagtaccagatacactttgcaaacaccatacgtaacattgacctacaggagtctgaatgccctaagaaaagcaaatgcctttccacgacatcttcaagatgtaattgccagtttaaagtatatgcaagaaatgtctaaccaccttgacacgccacggtgaacacaaatcgactcagtctaattttgtgggcaacgcactacatacattgcaccgatcgagcttggactcccaaggtagggtcacacacatggcgttagggagaccgagaagaatctatgtaagagactacttggggtgaaatttagcccgtagaagctacttacagacaagtcggcgttgccaccgaataggggtcttaaatgtagattgtggtaacacatagtgaattgggaagcacacacttctggctatagggaatatcaaccagtgtttgg

SEQ ID NO: 371013 - DNA, 1048 bp, Homo Sapiens
  misc_feature (35)..(35): n is a, c, g, or t
  misc_feature (275)..(275): n is a, c, g, or t
ggttctccttcctgccgttttccagcaccagcacntcggcaagtccgtcgtgggtcctgctcctcaccagccccgtcggacccgagcttttcccgtcccctttgtttttgaccccaaaaatgctgggcatggtgccacccgatttcctcttcttgaataatttgaaggcagctttattaatcttccccgacggcggctcggcggccggcgtttcggcggcacagtcacaatgcaagtccatgtctgccgcgagggtcccggtcccggccccggcntcccccttcctcctgcagacccccacggacgcgccagctccgccgcgcttcgctgacagccccgccgccgccccggctccggctcgtcgtgccatggaaaccgcgcggggataagccgctttcgtcagcagtgggctcgcgccaggccactgtcacccgtattctaaatctaactggagccgcgctcgccgccgccgctgcaaaagaaacacacataaaagaccatgcttcccgtcccgcaagggcttatataataccctgaacccacttccatccgacttggctcggcgctgcatggcgtttttgtggcaggagcaggcaacacagccgcgagctgattgcagaaattcgagtcgtaattatggaattcaaattccctcaactctcacccaccttcggattccttctctagactcgctcttcacgggagcgcaaccatggatcacgaaatgcctctaaaaacgacaacgcaattcaacccaccacaaaatgcttgtttttcttatcctctctcctagactccctgcatcttcatgcctttcccaagcccttcatgtctgtccttagcattggtgcactaagcccagcaggcaggaagcatgtctgcctacatccatgtcttgtccagagctgagcacacgctaggtccatgctgtgtggctgtcattgtggttatggttcttgtgacaaaagtacacgccaccactcaatcagtctatcagcagcccagcaatgcaagcacaacagctccccggggtggagttcgccacgct

SEQ ID NO: 371014 - DNA, 1782 bp, Homo Sapiens
  misc_feature (217)..(217): n is a, c, g, or t
  misc_feature (646)..(701): n is a, c, g, or t
  misc_feature (774)..(897): n is a, c, g, or t
  misc_feature (1036)..(1115): n is a, c, g, or t
  misc_feature (1307)..(1367): n is a, c, g, or t
  misc_feature (1449)..(1488): n is a, c, g, or t
caagccagacctggaggagctggtggctctcaccccgccgtcccccttcagagactcggtggactcggggagcacaacccccaactcgccagtgtccgagtcggccctctgtatcccgtcgtctcccaaatatgacactcttatcataagagattacactcagagctcctcgtcgttgtgaatgtccctggaaagcacgccggcctgcgcgtgcggnagggacgccccccgtgttcacacacacacaatgggcaagcatagtcgcctggttacggcccagggggaagatgccaagggcaccccttaatggaaacacgagatcagtagtgctattcttcatgacaaccgacgaagaaaccgacgacaaatcttttgggcagattttcttctagctggacttagaaaacatggcgcttttaagaaacacggctgatatctttgagcggctgacaaggccgtcatacttccacaaccagttccaacacacacgatacgtaggcaaactactgcacaaagactacgacagccagactcatatcaaaccacaccacatataaaacaaaaactcacatcacacaccacccccaatacccactctacaactacaacacaaaacatgttacctccaccactcactaaatccacnnnnnnnnnnnnnnnnnnnnnnnnnnnnnnnnnnnnnnnnnnnnnnnnnnnnnnnntcactgacagaacaacaaaccaaaaaacctatacaataaacctacaaaacactccacatatgacacacaacannnnnnnnnnnnnnnnnnnnnnnnnnnnnnnnnnnnnnnnnnnnnnnnnnnnnnnnnnnnnnnnnnnnnnnnnnnnnnnnnnnnnnnnnnnnnnnnnnnnnnnnnnnnnnnnnnnnnnnnnnnntacaatcattctcaaaaataaactaccattataaccaaataacataatcattaacactcataaaaaaaccacatatcaaaaataatcatccttcccaacccctaatacacaaattaaataataccaacaccaaacattnnnnnnnnnnnnnnnnnnnnnnnnnnnnnnnnnnnnnnnnnnnnnnnnnnnnnnnnnnnnnnnnnnnnnnnnnnnnnnnngaacaattaatatttatccacaccaacaataaaacattcacaaatcattcataaaacaattacttctttacaatactatgtcacactacacccactacaaaataattttaccacttaaaaaacaaaactactacactaccctacgccgaatatcataaaaacaacaacataaaatccactatattaatactnnnnnnnnnnnnnnnnnnnnnnnnnnnnnnnnnnnnnnnnnnnnnnnnnnnnnnnnnnnnncaacactaacacatcaattctacaaactagacactacaaaccaaccataaacataacactacattatatacaacaccatatnnnnnnnnnnnnnnnnnnnnnnnnnnnnnnnnnnnnnnnntcgaacacacatctaatcacataaaaaacacaatacattacatttcataactcatcatcatatatccacaaaaaaaccaaatacaccataaagtaatcaaaacacattttaactaccaaaatgactactgcacctcacacaccttaacatccaaactacaataacaataaaaacaatacttaacacaaaacagtagaaatatctcacaagtattaaacaattccaataaaacaaatacaaaccctaaatcactacaatcaaaaaattaaccaaccattaatttattaattcatc

SEQ ID NO: 371015 - DNA, 1041 bp, Homo Sapiens
  misc_feature (909)..(909): n is a, c, g, or t
ggggggtccattggacctttgctcttgtggaaagtcaaacgactgtgtgccatcatgtcctctgaaagcgctgttcgccaggattcagaatgtattggccctggggtatttacgacctcatcggttggcgattctccctctcctatgtcggaacctttctattcctgctcggtcggttcaaagggtatccaaccatgtcgtgcatggtcccacacgtatgccgccctcaatgcatctgcgaaaatgccctcgagactttcgccctgtagtgctatacctaggggtgttcctttggtgcatggtgattgggactcgaagccctttggtatggaacgtgcgttccgccaacccagtctagtctcaagcgagacgcgccagggtgcctaagaccaattgcggcaactacgtctgggttccagggggcaactggctgtcagcggtcatagtgaaggggcacgagtgcttcacttggccaacgcgtccccctagaaattccccaccaccgatgcaacccttccgctttagggaaaatggccaagatgcgttttaccgttctcacctgctgaaaccgatggtaatggtgcggtccgattccttttgggcacacggcgttcctcgtggaaaatcctcctggcgttcaccagtattagtcacctgccttccttcctgatgtctgcgagtgcacacccataatctagtatgtaccacacccttgcacgatggcagcaataactttgcagctccgcggcgcgcgtcaagatgccctggtggccgggaccgaggaaccgcggcaaggttcacttctcgtggtggcatcctgcagtgtctgtcatggcgcgtgcacggggagtccactcgcagtccccgcactgtctgcgctcttcccgaccggcgtcgggcaccggggangggggctcccctcggactcggcgcccgcctcttctccacccatgctgaggaccacagcaggtcccgcggcggcggcagcaacaggcaccggcggacggtggcggcaccaggagcagcagccgaagagccgct

SEQ ID NO: 371016 - DNA, 790 bp, Homo Sapiens
  misc_feature (517)..(517): n is a, c, g, or t
agcgggaggcaagtgtgaaccggacagcagacaggagaacctggcaccaaggagacggagaagctgcctttggtgcctcctgcctcctccctgctttgttccaataattttgtgctcgattacgctcgatttgaggccaaaatccatgacctacgagagcagatgatgaaccacagcatgagctccgggtccggatccctgcgaaccaatcagaaacgctccctctacgtcagagccatgttcgactacgacaagagcaaggacagtgggctgccaagtcaaggacttagttttaaatatggagatattctccacgttatcaatgcctctgatgatgagtggtggcaagccaggagagtcatgctggacggagacagtgaggagatgggggtcatccccagcaaaaggagggtggaaagaaaggaacgtgcccgattgaagacagtgaagtttaatgccaaacctggagtgattgattcgaaaggggacatccccggattaggtgacgacggttatnggaacaaagactctgaatactttcttcatttgctaaaaagaagaaacagcaatcaagcagcgggttcctgtaaaatggagataaagttttcatcttctttatcttatctgagttttcttaatgcagcctcctctgcggcttttacttgcctttcgctcacatttctgggtagccttgcatgagtgtattcctttccgttctggctgctcttcaatgcttggtatctctttaatttgctgtgctgttcttgcgaacatgtttcttctaatgcca

SEQ ID NO: 371017 - DNA, 804 bp, Homo Sapiens
agcggagtggcaacagctgcagcagccgcgccgccccctcgcccgcggctcccagggtgatcccgagcacagccggtggctcgcggcgcggcagccccagaagacgggaaagttcgcggccggagcgcggagatgccgggcagcgacacggcgctcaccgtggaccggacctactcggaccccggccggcaccaccgctgcaagagccgggtagaacgtcatgacatgaataccttaagcctgcccctgaacatacgccgaggggggtcagacaccaacctcaactttgatgtcccggatggcatcctggacttccacaaggtcaaactcactgcagacagcctgaagcaaaaaattctaaaggtaacaagagcagataaaacatcgagcaaacatcgcgcgatgggaatgttgcggagtatctgaaactagtgaacaacgcagacaagcagcaggcgggacgtatcaagcaagtctttgagaagaacgaatcagaaatcagctcactccatcgcccagctgcagaagaagttagagcagtatcatcgaaagctcagagagatcgagcagaatggagcctctaggaagctcaaaggacatttccaaagaccacctgaaggatatacatcgctctttgaaagatgcccacgtgaaaatctcgaactgccccccattgcatggagagcagcaaatcgggcatgccagggggtctcacttactccacctgtgttcgttttcaataagtccaggaaagtttgccaacctgatccggaataagttggcagcgccgaaaaattgctcact

SEQ ID NO: 371018 - DNA, 572 bp, Homo Sapiens
  misc_feature (303)..(502): n is a, c, g, or t
  misc_feature (526)..(526): n is a, c, g, or t
  misc_feature (536)..(536): n is a, c, g, or t
  misc_feature (549)..(549): n is a, c, g, or t
tccccagtaagtttagtcttgtgaagtccgaacgtttgaataatttactcgctgcaggcaaaccgcctacaactaaatccatcaggcccccgtatccgaatcttccttcacgcgagaagccggccatcttttgtgtagcattctttctggttcctctaactttgcctctcctttacgccaaatacgtgtccttatatctgaatctacaccactattatagattcaccttcttggagaagtccctattagaagagaggaaaattcaggctacttgtaaccctcttattctttttagacggagtnnnnnnnnnnnnnnnnnnnnnnnnnnnnnnnnnnnnnnnnnnnnnnnnnnnnnnnnnnnnnnnnnnnnnnnnnnnnnnnnnnnnnnnnnnnnnnnnnnnnnnnnnnnnnnnnnnnnnnnnnnnnnnnnnnnnnnnnnnnnnnnnnnnnnnnnnnnnnnnnnnnnnnnnnnnnnnnnnnnnnnnnnnnnnnnnnnnnnnnncggcctcagcctcaggtgatccgnccgcctcggnctcccaaagctgntggggggataacacgttcgcgag

SEQ ID NO: 371019 - DNA, 1031 bp, Homo Sapiens
agcgggtcggaaccccgagatgtcccccgcgctgttcgtcccctcttcgtctccctcttcgatgttccgggtcccagaaaccagtgttatcacagtgtgccctggatcatagtggaaatttgcgaaatcatccagattgggatcacctgagcctgcaagtggtccccttcctggtgcgagcctcctggcccctgtgctatctggagtgcctggacacccccgccagggacccagctgacccagcaagtccccaacccctctaagggcgaactgggcctcgcgggtgagaggtccgcctagcacgtaaaaaggctgccgcccttcaatcctagaccccgatgattcctttcacgtcgtggaaatctcgtaatggcatccattgtcattttgatcttatatgcctgaatttctagctcctgcgtcgtccatgttgccggacctaaaagtcgccgtattcactaagcttcggaacctgactccgagaaatctatacggtcgtcccaagatctcagccagaaagagaaatcctgctcggcgtgccctcttctagctacgggtgctgatgaggcgcccgtcctgatcctctgtcgccctgtgccgatctccactcagtgatcactggtgaagaggaacctgagcagctctgaggggcgagtcatctgaacggtggaggatcgcccatcgatcctgacacggagcctgacccaaggagaagatcccctataggactggtaccagtatttaagcactgtttctcctggcatcttataggagcatcttgggtatacaggttgcctgaatgatgtcataggggaatccaatcttatccgttgttcggctccaaggggagctcaatgaccattcccttcttgatcttaactaatcatcgtgcgactgctacgccgtctacgacacggacgtgcaacacattgctgctagtacatgataacgcggataatgtagtagaaaaattcgatatttggcaatgattgcattatggatcatttagattgttatgactatcgtgctga

SEQ ID NO: 371020 - DNA, 938 bp, Homo Sapiens
cggactcggatgcatgaacgcgcaatgctaggccagggagccgaagtggacctcccgggaggaccaggctgacaggccatgaaaggcacccgtgccagttgccgcagaacccggtgcctgaatggtgatggccaaagggggattggcgagcaccacccactgcgatgtcggcccccgccaggtgaacaccaaccaaagtacgttggtgacgtttctgcaggttcgctgttgagcaacacggcccaagaacaccagcacattgcccaggatgggccagcacagcaatggccagctccaccgtgatgtacaccgaggagcccatgatgggcatggccacagacgacaggcaggctcagcacggacgcgggctgggccagctcacggtccattgctgcagcccagccgcccgcctggctcccagcccggcccaggcggaggggcccagacccctgagccccttcctcacaggagccaagtgcagccctgctggggcgctctccaagtgctttttcacagaggactctgagtctcctgaaaccaggccctctgcaggggttctggcagcagcatcatggctcagcccagcttcagggttcctgaggcacctgccgctcgcacgccggctcccgctgtctcggcggccgctgggtctccggctccggccgcgccgctcacgggcgccccctgcaggcagctttgagacccgcgctgcccccgccccgccccgctgcgcggagaaaccgaggccggagggggacccgaggcatcggcccgcgaggcccgcaggcgatcctggaaggacgatcccgcaggtgtccctgtcaggacgaggccgcgacgggcctggaccgcgccacatcccccgcctgcggccccccagcgcgctcctcccgggctcgcatccgtcccgccgcttcctcagcgccacactccacgct

SEQ ID NO: 371021 - DNA, 587 bp, Homo Sapiens
  misc_feature (43)..(81): n is a, c, g, or t
agcggagtaggctgggtctctggcgccgcagaggccgcgggcnnnnnnnnnnnnnnnnnnnnnnnnnnnnnnnnnnnnnnnacgcgagtgcggggtggcgccggtccacctccgcagcgctcctgcctccccccggctttggaaggcgggcccgggctgcggcagcggcggcctcggctgcctggggagtcaccttcaggccattcagaggaggaaagagaggggaatatgaagtcagccaagccccaagtgaaccacagtcagcatggggaaagccagcgggccttgagccccctgcagtctactctgagttctgctgcatctccttcccaagcgtatgagacctatattgaaaatggactcatatgccttaaacacaaaattagaaacatcgagaaaaagaagctcaaactggaggattataaggatcgcctgaaaagtggagagcatcttaatccagaccagttggaagctgtagagaaactatgaagaagtgctacataatttggaatttgccaaggagcttcaaaaaaccttttctggggtgagcctagatctactaaaagcgcaaaagaaggcccagagaa

SEQ ID NO: 371022 - DNA, 945 bp, Homo Sapiens
agcggagaggcggggggagacatggctcggctgcggctggcggcgggcacccctccgccgtggcgtcggcagcagtccccgagcccgcaggctcatgcggcccctttggttgctcctcgcagtgggcgtctttgactgggcaggggcttcggacggcggcggcggagaggctagagccatggacgaggagatcgtgtccgagaagcaagccgaggagagccaccggcaggacagcgccaacctgctcatcttcatcctgctgctcaccctcaccattctcacaatctggctcttcaagcaccgccgggcccgcttcctgcacgaaaccggcctggctatgatttatggtcttttggtgggccttgtgcttcggtatggcattcatgttccgagtgatgtaaataatgtgaccctgagctgtgaagtgcagtcaagtccaactaccttactggtaaatgttagtggaaaattttactgagtatatgctgaaaggagagattagttcacatgaactcaataatgttcaagataatgaacatgcttagaacaggttacttttgatccagaagtattttcaacatattacttcctcctatcatactttatgcaggttatagcctgaaaaggagacatttcttcgaaatcttgggtctatcctagcatacgcttccctgggaacagcaatacttgtcccgccactgggtcaataatgtatggctgtgtaacgctgattgaccgtaaccgggacaacttgccaggagacttttgaactttaacagatttgccctactgcttgagagcccaaggtatcaaccaacatggatccgagggactggtccttggcttacattcacagcaccctcccagttgcactgtcaaacgcaaatgacatcctcctgtcgacagctcacaccaccgatgtccagccactcagcacgcgccaca

SEQ ID NO: 371023 - DNA, 938 bp, Homo Sapiens
agcggatgttagactgtcggtgcctgggcgcaccgtgttggctgtatttcggtatgggtgacgatcctccagcagttgagtgggtgtcctcgactgtgcccatacagatagtcagttttcttccttaataactgcccgtcctcgaagagtgcgaggatgtccaagcggcaccggttggacctaggggaggattacccctctggcaagaagcgtgcggggaccgatgggaaggatcgagatcgagaccgggatcgtgaagatcggtctaaagatcgagaccgagaacgtgatagaggagatagagagcgagagagggagaaagaaaaggagaaggagttgcgagcttcaacaaatgctatgcttatcagtgctggattaccacctttgaaagcttcccattcagctcactcaacccactcagcacattcaacgcattcaacacattctgctcattcaacgcatgccggacatgcaggtcacacgtcacttccacagtgcattaatccgttcaccaacttaccccatactcctcgatactatgatattctaaagaaacgtcttcagctccctgtttgggaatacaaggataggtttacagatattctggttagacatcagtcctttgtactggttggtgagactgggtctggtaaaacaacacagattccacagtggtgtgtggagtacatgcgatcattaccaggacccaagagaggagttgcctgtacccaacccaggagagtggctgcaatgagtgtggctcagagagttgctgatgagatggatgtgatgttgggccaggaagttggttactccattcagatttgaagactgcagtagtgcaaaaaccattcttaagtatatgactgatgggatgttacttcgtgaagctatgaatgatcccctcctggagcgttatggtgtaataattctcgatg

SEQ ID NO: 371024 - DNA, 941 bp, Homo Sapiens
agcgtgggatgacgtcagcgttcgaattccatggcggcgcggcggcgacggagcaccggcggcggcagggcgagagcattaaatgaaagcaaaagagttaataatggcaacacggctccagaagactcttcccctgccaagaaaactcgtagatgccagagacaggagtcgaaaaagatgcctgtggctggaggaaaagctaataaggacaggacagaagacaagcaagatgaatctgtgaaggccttgctgttaaagggcaaagctcctgtggacccagagtgtacagccaaggtggggaaggctcatgtgtattgtgaaggaaatgatgtctatgatgtcatgctaaatcagaccaatctccagttcaacaacaacaagtactatctgattcagctattagaagatgatgcccagaggaacttcagtgtttggactgagatggggccgagttggggaaaatgggacagcacagcctggtggcttgtccaggcaatctcaacaaggccaaggaaatctttcagaagaaattccttgacaaaacgaaaaacaattgggaagatcgagaaaagtttgagaaggtgcctggaacacatatgatatgctacagatggactatgccaccaatactcaggactgaagcaggaaaccaaagaaagaggaatctcttaaattctcccttgaagccagagtcacagctagatcttcgggtacaggagttaataacagttgatctgtaatgttccaggcccatggaagaaatgatgatggcactgaagtctaaataccaggaaagccccactggggaagcctgacagggccaaatcaggcaggttaccgtctcctagaagattgcggatgcatccgggtggcccgcttgacaagtctatggaaagcttgcatgaatctacgcgagattccgtgaattggacgccgacttc

SEQ ID NO: 371025 - DNA, 867 bp, Homo Sapiens
agcggggattgtgcggccgccgccgccgctgcgggagggttgggggaggagttgggagtttagcgcagtcgccggagtgcgaggacaacgaccatccggccctagcctggccgggcgggtgccgggagcttccctttctcagcgcggcgcgaaggtggctcgccgtcagcgcctgcttccctcgacctcgtcctcctccccgctccggaggagctgcgagatgtggcgcctctgactccacttctccccgcccctgtcaccgagagggggaacgagctctcgcccactcgccggaggagacggccctggactcccaaaccccgccggcgaaaccatgagctccgtccagcagcagccgccgccgccgcggagggtcaccaacgtggggtccctgttgctcacacccgcaggagaacgagtccctcttcactttcctcggcaagaaaatgtgtgactatgtcttcagcagtggtgcagctatatgcagcagatcggaactgtatgtggtccaaagaagtgcagtggtgttgcttgtcttgtacaaggaccatccaacaggagatcttatttccacacgaatatatcgacatccacaggatgcggacactaatcgcgggcaaccacgcacgctactacagataacctattggtattattcatagtcctagaggcatatgttccattacattttgcgtggaagagtacttgttccaagtttgcctccgttaatttaggacacatgacagcacgaagcacaacagcgatttcgacagcagcaggataccggacctttctggggccggtcgaacaaatggacagtctgcgacaccaggacgaaaatcccccacaatggtcctaatctaccca

SEQ ID NO: 371026 - DNA, 861 bp, Homo Sapiens
agcgggaggtggaggcgagcgaacagagggagggacccgcccgccgcgccccggccgctgggcatgtgtgtccgcaggcgcccgacgctgccgatgtcccggggctgagccgcgcccaggtgtcccggacagtgcgtgcgagcgtgtgtgtccgcgcaggcgagcaccgcgccggccctgagcctcccgctcgctccccacggccgcggtgcatgttcgcctcctgccactgtgtgccgagaggcaggaggaccatgaaaatgatccactttcggagctccagcgtcaaatcgctcagccaggagatgagatgcaccatccggctgctggacgactcggagatctcctgccacatccagagggaaaccaaagggcagtttctcattgaccacatctgcaactactacagcctgctggagaaggactactttggcattcgctatgtggacccagagaagcaaaggcactggcttgaacctaacaagtccatcttcaagcaaatgaaaactcatccaccatacaccatgtgctttagagtgaaattctacccacatgaacccttgaagattaaagaagagctcacaagataccttttataccttcagattaaaagggacatttttcatggccgcctgctgtgctccttttctgatgctgcctacctgggtgcctgtattgttcaagctgagcttggtgattacgatcctgatgagcatcctgagaattacatcagtaagttcgagattttccccaagcagtcacagaagctggaaagaaacatagtggacaattcctaacaatgaactcacggggcagagcccaccagttgctgaatttaacttgcctcctgaaagctcacaa

SEQ ID NO: 371027 - DNA, 837 bp, Homo Sapiens
agcggggcggtgacggcggttcggaagtcgtctggcctccccgcggccgctcgcagcttgctggcctctcccgcgcctcacgtcggactccgtctccgcggcaggaaagcagcatggaagctgaggacatccaggaggagttgacctgccccatctgcctggactatttccaggacccggtgtccatcgagtgcggccacaacttctgccgcggctgcctgcaccgcaactgggcgccgggcggcggcccgttcccctgccccgaatgtcggcacccatcggcgccagccgcgctgcgacccaactgggccctggccaggctgactgagaagacgcagcgccggcgcctgggccccgtgcccccgggcctgtgcggccgccactgggagccgctgcggctcttctgcgaggacgaccagcggccagtgtgcctggtgtgcagggagtcccaggagcaccagactcacgccatggcacccatcgacgaggccttcgagagctaccgggagaaacttcttaagtctcagcgtaatctcgtggccaagatgaagaaagtcatgcatttacaggatgtagaagtgaagaacgccacacagtggaaggataagataaagagtcagcgaatgagaatcagcacggagttttcaaagctgcacaaacttcctggttgaagaagaggacctgtttcttcagagattgaacaaagaaagaagaagagacgaagaagaagctgaatgagaacacgttaaaactccatcaaactatcgcttccttgaagaagctcatcttaaggtgggggagaagagccagggtcccacccggagctggttcaaatcc

SEQ ID NO: 371028 - DNA, 907 bp, Homo Sapiens
agcggggcggcacagctagggcatcccggcgaggagcgccgccaggccccgggccacagccgggcctggcggggggaccatgggcgcctcggtctccaggggccgggccgcccgggtccccgcgccggagccggaacccgaagaggcgctggacctgagccaactacccccagagctgcttctggtggtgctgagccacgtccccccgcgcacgctgctcgggcgctgccgccaagtgtgccggggctggcgagccctggtggacggccaggccctgtggctgctgatcctggcccgcgaccacggcgccaccggccgcgcgctgctgcacctcgcccgcagctgccagtctcccgcccgtaacgccaggccttgccccctgggccgcttctgcgcgcgcagacccatcggacgcaaccttattcgcaacccctgcggccaagaaggcctccgaaagtggatggtgcaacacggtggggacggctgggtggtggaggaaaacaggacaaccgtgcctggggccccttctcagacgtgcttcgtgacttcattcagctggtgttgcaagaagcaggtcttggacctagaggaggagggtctgtggccagaactgctggatagtggcaggattgagacttgtgtctctgactggtggggagcccgacacgacagcggctgtatgtacaagactccttcgtcccaacttctagacgccaaccagactgttctagataaattctctgctgtgccttgatcccatcccgcaggggaacaacaatgccttgccttcacgtcaccccacgtgttctccaacatcacgatggggcgtccgcttggtgtctttcgaacacccggggccccggacaccccagttctgggctgggccctatgggagcccggttgaccc

SEQ ID NO: 371029 - DNA, 565 bp, Homo Sapiens
agcggtgagaaaaaaaagaggtgggttcgcctggagtccctgcggccgccgccggacggcccccgcctctttccccgcggcgagcagcagcgctggggcagcggagagacagaggagccagcgggtggccatggccttggcgtgacagagcctccccggcggccgggcgggtgcggacggcggggccggacgacccccgcgggagccggggcccagaaacccgcccgggcagcggtaactggaacggagccctcaggcctgagccggctgggctgcgcgagcaggaagcggggtccctgggcccctttgtgtgaagggcgggggaggagtgccgggcagccccgggctgcgggctcctccgacgtccgcctcgcctgcagggtcccctcgccgaatccccacccttttccctccccgggggcactgcgcctccttcggccacccttcgccagggcctttttccccaggcttcgctcatccgtcccgcaagggccccatgttctgcggctggccggttccttattaggaagggggcattaccattccccttgcgcatagctggcta

SEQ ID NO: 371030 - DNA, 1134 bp, Homo Sapiens
agcgggggatcaacccagtgcaacgggccggacagaagttcagggaggcctggatgcagttctggtcagagacgctccccagcaagatacaacagtggcaccagaagcagaagaacaggaaggcccaggaggacctctgaggccaggcctgaaccttcttggctggggcaaaccactcttcaagtggtggcagagtcccagcacggcagcccgcctctccccctgctgagactttaatctccaccagcccttaaagtgtcggccgctctgtgactggagttatgctcttttgaaatgtcacaaggccgcctcccacctctggggcattgtacaagttcttccctctccctgaagtgcctttcctgctttcttcgtggtaggttctagcacattcctctagcttcctggaggactcactcccccaggaagccttccctgccttctctgggctgtgcggccccgagtctgcgtccattagagcacagtccacccgaggctagcaccgtgtctgtgtctgtctccccctcagaggagctctctcaaaatggggattagcctaaccccacactgtcacccacaccaggatcgggtgggacctggagctagggggtgtctgctgagtgagtgagtgacacacagaatatgggaatggcagctgctgaacttgaacccagagccttcaggtgccaaagcaatactcaggaccccaccgacattgtccaccctggccagaagggtgcatgccaatggcagagacctgggatgggagaagtcctggggcgccaggggatccagcctagagcagaccttagcccctgactaaggcctcagactagggcgggaggggtctcctcctctctgctgcccagtcctggcccctgcacaagacaacagaatccatcagggccatgagtgtcacccagacctgaccctcaccaattccaaccctgaccctcaggacgctggatgccagctcccagccccagtgccgggtcctccctcccttcctggcttggggagaccagtttctggggagcttccaagagcacccaccaagacacagcaggacaggccaggggagggcatctggaccagggcatccgtcgggctattgtcacagagagggcggagcag

SEQ ID NO: 371031 - DNA, 586 bp, Homo Sapiens
  misc_feature (454)..(506): n is a, c, g, or t
ttaatgggtcatgttacaaagaaaacaaaacccacaatggaaaaatccatatttattttataaatagtattcctatttataaaataggagtaaacttctatttcaattatgtataggtaggtgtatactgtgttgcaatgtaaaatttttatgtggttcacataaatgtttgaatgatactgctatatgtgatgttaacacataccaccttagtaactgtaaaaatgtggtgggtagatagctcccttaaacaaaaacaagaaaacaacaaaaagagacaacgatccgagaaagaagaagcaatagggaacgcacacaggagagaccaacacaaccacagcaacacagccaacaacaagagaagaaagggtacacagagcaccaggggaagagcgtcaccaagaacagaacaagacgaagaaaaaacacacgggaaagagcaaaagcgatgtannnnnnnnnnnnnnnnnnnnnnnnnnnnnnnnnnnnnnnnnnnnnnnnnnnnntaccaagacacacacgacaacacaaaagaggaaccaaaacaatgagagaccaagaaaacaaacaggcaccaaacaccggg

SEQ ID NO: 371032 - DNA, 1054 bp, Homo Sapiens
tttgtgcgctgtggtgttggggttcgctgcgggttggtgcatgctcgtcgggggtgggtgtcgtgtctagtttagctacctggggtcgggtagccgtgcttgggtgggcgtgcgtttgtgaccgccgtggcgtggtttcgagtgggtgcctttgctaggcgggctatgtgcccagggggtccttgtttcgccgttgcgagcggtggttcattgcggcctgtgtgatgtgttggtcttcggctttgggccagtgctctcgatgttttgcgacgtttcgggggatatgccttggatgatgtttccagtgtgtacttctctgtttgtctccatgctcgtgtctttttagtgatcgttcaccgagtctcagtctatcttcagcacctagtacagcgtctgacacatcatagtactcatttaagatctggttaaatgaattcgtatgttggaacacttctgaaaccagggaattgaactacatcctaatgaaacccataacatgctgaatagtactggtagttcggataaaagaatctcgtgtccattttagctcacatgtgcatctatttaacctagtttcggccaactctaagcaccaggaaaactactgttcttttcctacagtgacatcccgtttaaatgttcttggatagaaaggatgttccccgactgcctctttttcaccaggcttctaaatgttacatggatttccagacccatctgaccatctgggcggaccctctactgaagaattaatagttagcttaataagatgtggtctaccagtgaagagcagctggactataacttcctaagagctggacaatcctctgttaatgcaggtttgcactttgcattaggtttggggcatttgttatataggattaatgttcatcagcagaggaaccacacagttggttcacatcaagccaactgtgtggtcaacactaaccccaggttttctttatgtagattactgtcaaatcagacctccacatcctgtattggttcaagtcacttcctgaaatataaatgctgaatcttaaattaagccgct

SEQ ID NO: 371033 - DNA, 772 bp, Homo Sapiens
  misc_feature (49)..(94): n is a, c, g, or t
  misc_feature (144)..(204): n is a, c, g, or t
tggctcacacctgtgattccagcactttggaaggtctgaggttgtccannnnnnnnnnnnnnnnnnnnnnnnnnnnnnnnnnnnnnnnnnnnnntatttacacttattaaattagccaggtgtggtgtcgagtgctacacacgnnnnnnnnnnnnnnnnnnnnnnnnnnnnnnnnnnnnnnnnnnnnnnnnnnnnnnnnnnnnnctccagcctgggtgtgagagtgagactcttgtctccaaagagtagaaactgtggttttcccaagatatttggaaaagtttgtcttctgggccagaagaaatggtttaaaatacacgttgtgggtgggagaagatgtattttctctatattcctgcttcacttctaaagcctaacaaagttgcatgaaatggcagactttcagctgttagccaggcactgctcaatatgctcttgaaactattcaatctatgaaacgactctagccctcattaatagaatgaagagaaaaatggtatggggatatttttccccttttgttaacttagagaagttgctaggatcctagtctcttacctctatttaggaaatagtttattcaatttctaggactacagactacagttcaaagacaccatttcctctgccaaggtccaaagcccatggagttaagtcagaacatagatcaaatttttggctctaccatttgaataaccatagggctttgaacaaggcaatctctctgaagctccttgaagcacagaaattacttgcatacgtacgtaataga

SEQ ID NO: 371034 - DNA, 685 bp, Homo Sapiens
agcggagttgccgcttcctcgtcctccatcctgcgtccatggccaccgctgcgactgaggagcccttcccttttcacggtctcctgccgaagaaggagaccggagccgcctccttcctctgccgctacccggagtatgatgggcggggggtgctcatcgcagtcctggacacgggggtcgacccgggggctccgggcatgcaggttacaactgatggaaaaccaaaaatcgttgatatcattgatacaacaggaagtggcgatgtgaatactgctacagaagtagagccaaaggatggtgagattgttggcctttcaggaagagtgcttaaaattcctgcaagctggacaaatccctcaggcaaatatcatattggcataaaaaatggctatgacttctatcctaaggcactcaaggaaaggatacagaaagaacggaaggaaaaaatctgggaccctgttcacagagtggcccttgcagaagcctgtagaaaacaggaagaatttgatgttgccaacaacggctcttctcaagcaaataaactaatcaaggaggaacttcaaagtcaagtggaattgctaaattcttttgagaagaaatacagcgatcctggccctgtatatgactgcttggtatggcatgatggcgaagtctggagaagctggattgattctaatgaaagatg

SEQ ID NO: 371035 - DNA, 598 bp, Homo Sapiens
  misc_feature (354)..(399): n is a, c, g, or t
atgagccaccacgcccggaccatgatgcagatttcaagctatgaacatgattctctggagtttaccatttgtcttttaattggcaaatttgatgcagaattgggaacgagaagcacacaattgactctcgtcagctggcacaagctggtgccagtgcaccactgtatatatccatggccctctgtgaagctagagtttactactaaaatttgtgctccataaatatacaaaggcactagtaagagaaaaaatataaagagaatataaactaaattcaaattagggagctcaaatggagaaaattgacagataatattttggaaactttgaaaagtagtatttgtctagattcannnnnnnnnnnnnnnnnnnnnnnnnnnnnnnnnnnnnnnnnnnnnnggaaacggagttctctctggtcacccaggctgaagtgcaagggcacgcaatctcagctcattgcaacctcggcctccttgtaaccttcaccttccgtgtccacatgatgctcctgcctcagcttccgagtagctgggattacaggcacccacaacatgctcagctaatccttggcatataagggaacaaggggtaacaa

SEQ ID NO: 371036 - DNA, 569 bp, Homo Sapiens
  misc_feature (242)..(250): n is a, c, g, or t
acccagagcataaccttcggtggcaggacaaatcaaggccagcacgcagtctgccaagtcctgctcgctccctgtcaagaaaaacaagctggatccatttctaatcaacacttcccaacgcaacacttctgagtctctgaaggagaccagagcttgaaactttccagacttccaacagacatcgagtgcaaaaggatatttaggttgtctttgcacaaatctggttgatttgagagataaannnnnnnnnaaccagtgtgactttcacctaagaagtcacatgaacatatttcacatttgaactacataatgaatgatgggttattgaaatagcccaaacctctaccacagagcgaggggatatagctcaaggggcaaccaggcagtcgcagaaccaaggaatggatgactacaagtatcaggacaattatgggggctatgctcccagtgatggctattaccgcggcaatgagtccaacccagaagaagatgcacagagtgatgtcaccgaagccattgatgaggaagacgagatctatgatgggcgagtaccagggtatccctcaccc

SEQ ID NO: 371037 - DNA, 1026 bp, Homo Sapiens
agcggaaagattaaaccagccttctgcagtgggtactcgtcagcaaaaattgacatcagcattccagcagcagcatttgaacttcagtcaggttcagcactttggatctgggcatcaagagtggaatggaaactttgggcacagaagacagcaagcttatattcctactagtgttaccagtaatccattcactctttctcatggaagtcccaatcacacagcagtgcatgcccacctggctggaaatacacacctcggaggacagcctactctacttccatacccatcatcagccaccctcagtagtgctgcaccagtggcccacctgttagcctctccgtgtacctcaagacctatgttacagcatccaacttataatatctccaatcccagtggcatagttcaccaagtcccagtgggcttaaatccccgtctgttaccatccccaaacattcatcagactcagtacaaaccaatcttcccaccacattcttacattgcagcatcacctgcatatactggatttccactgagtccaacaaaactcagccagtatccatatatgtgaaaaacagtatattggggaagctcaatgatacaaacactttcgattcacaaactacagacacatggtattcaatattacgccatggcagcaagaaaatgattcacgactcatgtagacctcggggtgcaatctctcaaccaacctcttgacgctctcaaccagctccctcctccgatgctgtacgcacacatcggcgacaacacgctcgcagctgcgggcccccggccacaccgcaccgccacacggaacggctagaccccgtatgcagcaccggcagcacctacacgagagcacgcacacaaggttcccagaatcaacgcgcaccgggcaatcgacgcgacacaacacactagagcgctacgaaacccagcctcgcaacgacacacaggtacaccagaccacagggacagcaccaacacagaggctaacaggaagctgaacaagcaccaggctgccgc

SEQ ID NO: 371038 - DNA, 878 bp, Homo Sapiens
  misc_feature (45)..(81): n is a, c, g, or t
tatcgatcactataggggaatgccgctctatgcggtggcggccgnnnnnnnnnnnnnnnnnnnnnnnnnnnnnnnnnnnnnatcaggccaaatcggccgagctcgaattcgtcgagagcggtggtttccgcccggagagagctggccgggttgaggcgccggctttcccgggtcttctccagctgccaccgctttactgcaaaactgacgggcgcaaaaacatgagtgactccgcgggagggcgcgctggtctccggcgttaccccaagctcccagtgtgggtggtggaggatcatcaggaggttctaccctttatataccgggccataggctcaaagcatcttcctgccagtaatgtaagttttttacatttcgactcacatccagacctccttattcctgtgaatatgccagcagacaccgtgtttgataaggaaacactctttggagaattaagtattgaaaattggattatgcctgcagtttatgctggccatttttcacatgtaatatggtttcatcccacatgggctcagcagatcagagagggcagacaccactttttagtaggcaaagacacttctaccacaacaatcagggttacaagtacagatcattatttcctaagtgatggtctgtatgtacctgaagaccagctagagaaccaaaaacctttacaattggatgtaattatggtaaaaccttataaactctgtaacaatcaagaagaaaacgatgcagtgtcttctgctaagaaaccaaagctagccctggaagattgggaaaacactgcctctactaactgtgactcttcttcagaaggactggaaaaggacacagaaacacagagaagtgaccagacttgcctagaaccatca

SEQ ID NO: 371039 - DNA, 906 bp, Homo Sapiens
  misc_feature (50)..(72): n is a, c, g, or t
atcaggccaaatcggccgagctcgaattcgtcgagagcggagtatggtannnnnnnnnnnnnnnnnnnnnnngtcccctcgccggctcgctggtaccggcagtgccatggcggccttcagcaagtacttgacggcgcgaaactcctcgctggctggtgccgcgttcctgctgctctgcctgctccacaagcggcgccgcgccctcggcctgcacggtaagaaaagtggaaaaccaccattacagaacaatgagaaagaggggaaaaaggagcgagctgtggtggacaaggtgtttttctcaaggctcatacagattctgaaaatcatggtccctagaacattttgtaaagagacaggttacttggtacttattgctgttatgctggtgtctcgaacatattgtgatgtttggatgattcaaaatgggacactaattgaaagtggtatcattggtcgtagcaggaaagatttcaagagatacttactcaacttcatcgctgccatgcctcttatctctctggttaataacttcttgaagtatgggttaaatgagcttaaactgtgcttccgagtaaggctcactaaatacctctatgaggagtatcttcaagctttcacatattataaaatggggaatctggacaacagaatagctaatccagaccagctgcttacacaagatgtagaaaccaattttgtaacagtgtagtcgatctgtattcaaatcttagtaagccatttttagacatagtgttgtatatctttaagttaacgagtgcaattggagctcagggcccagcgagcatgatggcctacttgggttggtctgggctattcctaaatcgacttcgaagacacaatgggtacggatggccacttactgaggcaaaagtttgtaacgggaac

SEQ ID NO: 371040 - DNA, 657 bp, Homo Sapiens
  misc_feature (447)..(447): n is a, c, g, or t
agcgggcggcggcagcggaggcgcgagctgcccgataatggcggcctgcagagcccatgagagggagaagcggcagcgtctaccctgagaaacctcgaccttgaagatggtgagtagccagccaaagtacgatctaatacgggaggtaggccgaggtagttacggtgttgtgtatgaagcagtcatcagaaagacctctgcacgggtggcagtgaagaaaattcgatgtcacgcacctgaaaatgtagacactagcccttcgtgagttctgggcactaagcagtatcaagagccaacatccaaatgtgattcacttggaggaatgcatcctacaaaaggatgggatggtgcaaaagatgtcccacggctctaattcttccctttatttacagcttgtagaaacttcattaaaaggagaaattgcctttgatcccagaagcgcctatntatttgtggtttgtgatggatttttgtgacggaggagatatgaatgagtatctgttgtccaggaaacccaatcgtaaaactaacaccagcttcatgcttcagctgagcagtgccctggctttcttgcataaaaaccagatcatccaccgagatcttaagcctgataacatcctgatttctcaaaccaggttggataccagtgacttggaa

SEQ ID NO: 371041 - DNA, 167 bp, Homo Sapiens
cctaacttcctcaggacctaggtcacctttattaaaaggaagaattcactcttttttccttggcagtttaatcattcaggaatccctctcttaaaggaaattgttattttattcatgtaacctttttttgtaatcaaaagtgaataaaaacgatctttttgtcttac

SEQ ID NO: 371042 - DNA, 321 bp, Homo Sapiens
  misc_feature (196)..(208): n is a, c, g, or t
aaacctccttttctgtgtttaatatgctgtagaataataacctagatgctctagactgtatatcaggatctgatttacaagaaaaagtcagagctaaacactagtgatggcatagcattactgaaatcattgtttcttaatttcattttactacattgtgaacttgtgattcagattccattttctcagagaattnnnnnnnnnnnnngtactcttgtaaaatgcacttttctgtcttttctttgcaaagcagaagtatctcaatgtaaaataaaaatggagctcagtgggcagtattaataaaggccatgttttaaacat

SEQ ID NO: 371043 - DNA, 421 bp, Homo Sapiens
gaaatatataggcttgtctctttggtcttttattttggctctattgttgggaatctatttcctattccataagtaagtatacctaacatgctgtggaatcttgagtttccaacaccgtgctgcttgatagaatgactttgaggtccttggataaaatgtgatatatgcaagtacagtatgttgctattactattgcaggaatataaataataaaagactgttattagcacttagtaagtcttcatctatgcatgtttttgagttgactgattccaagaatgaaatatgaggtttattgaattattcctttgaaagggatcaaaacttatattcaatgcactttataattaatggtgtctaaatgcctcagtcagtgcctaactgcacatacaaaaataaaaccttctttctgtaatctacc

SEQ ID NO: 371044 - DNA, 427 bp, Homo Sapiens
cgaaggaacattataatatatggatggtcctgaaaaatatttctatagcattcactggagttgttggcttcttattaggtacatatataactgttgaagaaattatttatcctactcccaaagttgtagctggcactcccacagagtcccttttctaaatttgaattccaacatgcttaacatctggtttgaaatagtaaaagccagaatcatgagtcttctatttttgtcccatttctgaaaattatcaagataactagtaaaatacattgctatatacataaaaatggtaacaaactctgttttctttggcacgatattaatattttggaagtaatcataactctttaccagtagtggtaaacctatgaaaaatccttgcttttaagtgttagcaatagttcaaaaaattaagttctgaaaattg

SEQ ID NO: 371045 - DNA, 447 bp, Homo Sapiens
cgcaggacacaccaagagtgtccgtgcacgtagccggttctggccgtacatgttaagggcatttcagtggcagtgctgtacccctgggcagtgctacctgggcacacacgtagacaagggcagctattccttagaccagcctcctgaaagaaacaggtgtgtctttttagtggagtcgtagtaatatgtgcacacacagaaggggacctgattgggtgggagctggttatgtgtaactagcgttggagttgacattttggcatgtgctctgagcttgaattttgataccaaccattcagtgcatcatacctagtctttctatgctccaaatgaatgtctgtggggacctgagagcacctggaatttgttggaagcagatcagagcacacgtacgaaaaggtgcaattccttttctcatgacaaaagggaaaaaaataatcacaagca

SEQ ID NO: 371046 - DNA, 491 bp, Homo Sapiens
  misc_feature (409)..(409): n is a, c, g, or t
  misc_feature (465)..(465): n is a, c, g, or t
tttttttaggtcaatatagtttccatttttactgtgcatacacatatatacaatgtattttaaaaatgggctttacaatatgtagtttgatcacttggtttacaactaaatatattgtgaacattttgtcttctacaacagttaaaagaattgaatagcttggaggaaacacaatttattaagcaatcttgttggggacattgaggtataattttttttctaaggaggcttcattctttttataatgcctttgggaaaaaaaggggagttcttgtcttatatagctttctatagatgatggaaacttgcccttccatttagcctttttacttgcttctctaccaccacctaatcaccaatcaagtaacccattttgtttttcaacctctctcttctatttgcttcctcnttcctacccagtctccctgcacacacgcagatggacttccattccttcagcactcnggttcctccccttaaagatggttttc

SEQ ID NO: 371047 - DNA, 406 bp, Homo Sapiens
tgtgtgaaatagaacatgctttaaaggaagtatttttatgtgaatttgcattccagtataaatagtattcacaaaaaagattttcctagattttatctattgaataggtgtcaatatggcatgcatattgtaactttcattagaaataagttgctttgacttttaaaaatgacatagttagattatttaaagtcaatgtatatagtatatattatgtatggatttatataccaaattttggaatacagcctatctcatgaccatattgaaatgtacggaatttgatccatgcgatactatgtgtgcattatttgaaagttattggaaattttattcaaaccgtggaacaaatgtatgtgattttgttatacttcttaatttaaataaaatatttaatgcactatta

SEQ ID NO: 371048 - DNA, 1582 bp, Homo Sapiens
  misc_feature (740)..(801): n is a, c, g, or t
  misc_feature (966)..(1015): n is a, c, g, or t
tcgctcgcctgtactacacttatgccgtcgttccgtgtcgactgtctcatacactactactccgtcggctcttcctttctatactgttctcttgtattgctggtctgagtctctctgtgcttgtatatcgtaccctatagtctcttctcgctatgtccgccttcttattatttgtcaagtcgccccgatacctttctttactacttgactgtgttaaaccatcttcttcttggttgctctcctaccactttcatttcttgtcattttttcccttgtcgcctctttatcttgtcgtctatatgttctctgatcgtcctcttccgatacttttgttgctattcactatgttgttccttatatataatgaatatatatagttattaactgtattctatctgaattattgggattaaattgatattagcgccttatcagtctggacttattctctcctttcttctatttggtatatttcctttgttgtttttatattgttgtgtttcaattgtctgtgtgcatgtattatgtggtttgtaattcttgttgatattcgttgattgtcctgagtttctcaagtgtcatgatttgtctttttctcctttttattatggttttctcatcatgggttttattatatgtcattgctactgtctttttcagtcctactactagtctcgttcctttcttcctgttgtattttcccacttgattttccttactagtatacagcctttctctgnnnnnnnnnnnnnnnnnnnnnnnnnnnnnnnnnnnnnnnnnnnnnnnnnnnnnnnnnnnnnnattgcggcatttgcggtatgtctttctacctctatcatgtagccatcatgtaatggtttcttattgctttattccatggatcatgattttggatttatctggtatggtctctagtgcctattggtgcgatgttatttgtcttgtcatgtccaccgtatctaagcnnnnnnnnnnnnnnnnnnnnnnnnnnnnnnnnnnnnnnnnnnnnnnnnnngatagtctgtatatattacattttataatgtatcatatgtagtctgtgtagtatattagatattgttagttagtattatttgtgtcttctaatcctataatttgtcactgtagttggggtaggtgttaccctatactcccagtctttcgtagttattgtactgtattactagttcacacctgctacttctccagtaattgtccttgtctgtacctgagctaccttgttttagttatgttcttgtgtaggtctatgctccaccttcctctgggcagatccatcttggtctaagactaaacatacccaaccctctaatttctgggaagatatcacctccgtgattaatctaagctcctagatctcccagagataatcatgctgaggctacattgtgtgaaactacatttttatctagcttcttcctttgccctttcctgctgtcctcacttccttatgaatttttttctgaaagatgcttgagtaataaattgatttaaacaagatccgcccagtcataagttctgtgttttggaatataacctatacaaaaataaattaattggtact

SEQ ID NO: 371049 - DNA, 611 bp, Homo Sapiens
agcggagagcctcgcccccgccttgcggagccgcatccacgagcgcctggcgcacctccacgctgcctgcgccccgcgccgcaaggtggcgctcctcttggaggtgtgcagagatgtctatgcgggcctggctcgaggcgagaaccaagatcccctgggggccgacgccttcctgccggcgctgaccgaggaactcatctggagcccggacattggggacacgcagctggacgtagagtttcttatggagctcttagatccagatgagctgcggggagaggctgggtactacctgaccacgtggtttggggcgctgcaccacattgcccactaccagcccgaaacagaccgcgctccccgggggctcagctgcgaggcccgcgcctccctgcaccagtggcaccgcaggcggacgctgcacagaaaggatcatcccagagcccaggtgactgcccatctggctgcaagtagaagggagggtgagacctggtgcccttctgacccagctcccacctctccccacaggccaacctgccctttaaggagccatgggcagaagagactgtgacagggaccagtgacaactaggggtttcacacccctccgttcat

SEQ ID NO: 371050 - DNA, 920 bp, Homo Sapiens
atcaggccaaatcggccgagctcgaattcgtcgagagcgggtgggctggttatcaggttcgtcaatattttattttactaaatactccctgctcttttgggagttggcaaacaacagcctgcaagccaaatctggcccatcaccctgcttttgtaaataaagttttattggaacaaggccatgttcactcattctcatatccatggctgcttttgcaacaggttgagtagttgcaacagagaccttacggctggcaaagcctgaaattttctaccaaaaaatttacagaaaaagtttgctgacctctactctagaagatcagttgataaaatacaacaacgttttcatgcccatcattatttttcctatttcaatgaatagcatggaaaccaaggtgaagtaattgaactgaagggatttctgaatgaaggattcatgtgttcatatgtttagacaaaattactcattagactagtttttagggagtaatttgctgctgttaaactacctcttcatatgaataattttttaaaagagcagacacatatatacttaaataggaaataattttgaatttaataacttcatgttcatttttaaaaattgtggcaaaatatgcacaatataaaaatttgccattttagccacttttaagcattaagttcattggcattaagtatatttgcatagttatgcaaacatcaccaccatctgtttctagagctttatcattctgctatattgaaacccattaaacaataactctccatcctccgttccccaggtctacatcctggcttatgattggccaccttaggtccctttagggaatcatcaggctgtgctggatcggaaattactacgcaaatcacgggtcatcctttgtgaaatgttaactagcctctgggaaaaccggcaaa

SEQ ID NO: 371051 - DNA, 1027 bp, Homo Sapiens
  misc_feature (587)..(601): n is a, c, g, or t
  misc_feature (951)..(987): n is a, c, g, or t
atacgtataatggacctttaattatcagcctgatactaaagattaataaaagtcagcctaagtaccttagctacaaacagtcatcaagtgccaactgccatgctgggagctcctgggagatgcagatgctgagaatcctcgaagggctccaaagtcctctggaaaggtcgatttaccaagggtgttggacacaagtgcagaacccattggcacgccccctgtgcaatacacagcctcaggaaagttgtagattaaagaaatactcaggacaggggtgggattccttggagagaacttcctagagggcagcatttctctgggggaatgctgaaggttgagataactgtgaaggacagtgaaggtatcttcaggttctctgagctccttggctacaagaactttgtgttagtcacctggggtaccttctatacctcaaaaatagattgtcttaatacatgtttgtgaacttcatgtggattgaattgagccaagccccaaggatggcatctagtaaattatcagcagaattctgcaaggaaggaaaggggttgtggtaggggtagggagagatggaagatatggagttnnnnnnnnnnnnnnnagggtagggtatattaaaggcagtggttcataaggtgacatgaggctcattaagtagatggaaccacttgagggaagtgccataaagagccccagggaactcacatgctagctgggggctcaggatgagcagggtcccatgagggttcctaactctgtggattggagtccttcagacgaggttgtgctccttgtgaatcaaggcaggtggcggtggggtgtcttttgtcgatgtgcctgcagtgactgctgatgtgccaggagggcacaggcagaacaaccaggaaagggaggaaaatggaaggtcaagccgctctcgacgaattcgagctcggccgatttggcctgatnnnnnnnnnnnnnnnnnnnnnnnnnnnnnnnnnnnnncgccgccccgcgtgaatccaggtccccttatgacgtatca

SEQ ID NO: 371052 - DNA, 1363 bp, Homo Sapiens
  misc_feature (1086)..(1196): n is a, c, g, or t
atcaggccaaatcggccgagctcgaattcgtcgagagcgggggagccagcccagccctgccgaccgcagcactctcggaagggctcggccacccggagcctcgtcacgagtcttacccagggttcggagcgggcctgcaagaaggggcaggccaggctggggctgcaaggcagggtcttcccttggagaagggacctgactctattattaagagaacgaaagaggcacttgccctacagtgtgtagagcatggcctctctcctggaatggcatcttatacatataacccattggagccaagagttttacctttacatgcaactacattttcagagatgatttgacttcctcttcagatgttttttctattcaagaggtaaaacatagggatatttggactctcagaacagcggtctggattttcctctttgacctttgcttacatggggttcctcagaaagcagagtctcagataaaatatatatgctatatcttttgaagaacgcagttccaaggaagcaggagaaacagaaaaggagaatgagtcagacaagcaaggaaagcgaccggaattgtgcccccaaagagctggcggctgcgtggtaggacatgcatactgtgtttaagctcccatttcaccggtcattttctgaaaggacctgtgaactgccgcatctcacagggggaagaacccacagaacattaacatcttccatttccaggctgcagaggtaccaagccagtggatcctcccgcccccatgtctctcacaaagctgcttgtagcccagtggggaccagcaggcgtccaaggacctggggagccgtggtggcagctaggctgtgtctcctgcaggcctctctgaaactgcctggctggctcatgccctctcattctgtccagtcattgacggtggctacactgcattgatctgggaacacaatgtcatttcttccctgacggcgaagagacaaatccagcaagccacagagcccctgtcacggagtggaaagcgatggtctctgaagagaatcaacaaggggagttaaaaaaagcagaaccaggctgggcacggtagctcacacnnnnnnnnnnnnnnnnnnnnnnnnnnnnnnnnnnnnnnnnnnnnnnnnnnnnnnnnnnnnnnnnnnnnnnnnnnnnnnnnnnnnnnnnnnnnnnnnnnnnnnnnnnnnnnnaatacattcgtgggacatagtgcatgcctgtggtcccagctactcaggagcctgagatgggaggatcgcttgagcccaggaggtcggggcttcagtgagccatgatcatgccactggcactccagcctgggccacagagccaatacatcgtcaggacaaatataata

SEQ ID NO: 371053 - DNA, 914 bp, Homo Sapiens
atcaggccaaatcggccgagctcgaattcgtcgagagcgggttgaagaggtaccacatcgaccacctagccctccaaagaagccatctccgacaatctgtggctccaactatccactgagcattgccttcattgtggtgaatgaattctgcgagcgcttttcctattatggaatgaaagctgtgctgatcctgtatttcctgtatttcctgcactggaatgaagatacctccacatctatataccatgccttcagcagcctctgttattttactcccatcctgggagcagccattgctgactcgtggttgggaaaattcaaagtcctatcattgatcggcctgagtctaatagctttggggacaggaggcatcaaaccctgtgtggcagctttcggtggagaccagtttgaagaaaaacatgcagaggaacggactagatacttctcagtcttctacctgtccatcaatgcagggagcttgatttctacatttatcacacccatgctgagaggagatgtgcaatgtttcggagaagactgctatgcattggcttttggagttccaggactgctcatggtaattgcacttgttgtgtttgcaatgggaagcaaaatatacaataaaccaccccctgaaggaaacatagtggctcaagttttcaaatgtatccggtttgctatttccaatcgtttcaagaaccgttctggagacattccaaagcgacagcactggctagactgggcagctgagaaatatccaaagcagctcattatggatgtaaaggcactgaccagggtactattcctttatatcccattgcccatgttctgggctcttttggatcagcagggttcacgatggactttgcaagccatcaggatgaataggaatttggggttttttgtgcttcagc

SEQ ID NO: 371054 - DNA, 1119 bp, Homo Sapiens
  misc_feature (48)..(84): n is a, c, g, or t
gaatgatacgactactatagggcgactggagcttacgcggggcggcgnnnnnnnnnnnnnnnnnnnnnnnnnnnnnnnnnnnnnatcaggccaaatcggccgagctcgaattcgtcgagagcggaaatgcttgaggagagagagagagtaaggagccagccatgaatcctttccagaaaaatgagtccaaggaaactcttttttcacctgtctccattgaagaggtaccacctcgaccacctagccctccaaagaagccatctccgacaatctgtggctccaactatccactgagcattgccttcattgtggtgaatgaattctgcgagcgcttttcctattatggaatgaaagctgtgctgatcctgtatttcctgtatttcctgcactggaatgaagatacctccacatctatataccatgccttcagcagcctctgttattttactcccatcctgggagcagccattgctgactcgtggttgggaaaattcaagacaatcatctatctctccttggtgtatgtgcttggccatgtgatcaagtccttgggtgccttaccaatactgggaggacaagtggtacacacagtcctatcattgatcggcctgagtctaatagctttggggacaggaggcatcaaaccctgtgtggcagctttttggtggagaccagtttgaagaaaaacatgcagaggaacggactagatacttctcagtcttctacctgtccatcaatgcaggggagctttgatttctacatttatcacacccatgctgagaggagatgtgccatgttttggcagcaagaactgctatgccatgggctttgtggagttccacggactgctcctgggtaattgcactggtagtgtttgccatggggaggccaaatatacaattaaaacaaaccccccgaaaggacaaccatagtgggactcaagttcgccaaatgcataccgggaggtagtagccaatcggttcaagaaaccgggacgggagacattccaaaaggagagacacgggctgaaagggcgcggcagaggacatatacgaaggaggccactagggacagtaaaaggccggaccagcgtcacacacctgcaatacccagggcccg

SEQ ID NO: 371055 - DNA, 996 bp, Homo Sapiens
  misc_feature (907)..(943): n is a, c, g, or t
ggtgagacagtggaccacctgtctagtgtaatgtagaaatccatagattcggtaaaccagtggtaaccatttaggaaggcattctaagtgcttgaagttcttggaccaatttgtaaggttctaattctaccaaactgccatgaaggctaactcgagaaacttcctatcattctaaaatttctcaagctgaagaaacatttgttcggacactgtcgtgataaatagtaccctttgaaagcacttacaattccatttgttccacatattatgatcttaacttacatagggctgatctcaattatccatggaatatcaaacatgataggaagaacaaacctgagagaaacattacaatacaatagcaaacttgctcaattctttaccagcactctctgcaaaaaaacttcctaagcctttctcctctttattttagcaatgtattgtggaaaatgtgcgactttatcttgatatgaaaatatttcaatgcgtggtgatcttgcctgatgggttttagtattttctgcataactgttacaggaactcttaaatgattctcttccattctgttgtaaaggccagaaaaaagcagcaaacggagagggaaagagcttatcaccagagtcataatgtctgaaggctttcagagtaggttggtttttccctccttctgtttgtctccattttcttcttacagctcataaatgtaggggtttgctgttgtgaacagttgttgtttgtaggatatttttcctccagattaaagtcctatctctccttagtctgttcctctatgcagtatttgacttgctcagttcctgcctgattgcatcaatgagctcttcttttaactttgttaattctttcctccgctctcgacgaattcgagctcggccgatttggcctgatnnnnnnnnnnnnnnnnnnnnnnnnnnnnnnnnnnnnncggccgccaccgcggtgagcccgaggtcgccctatagatctgttacaacgttc

SEQ ID NO: 371056 - DNA, 467 bp, Homo Sapiens
  misc_feature (41)..(77): n is a, c, g, or t
  misc_feature (164)..(164): n is a, c, g, or t
  misc_feature (337)..(337): n is a, c, g, or t
  misc_feature (357)..(359): n is a, c, g, or t
  misc_feature (365)..(366): n is a, c, g, or t
  misc_feature (370)..(370): n is a, c, g, or t
  misc_feature (377)..(377): n is a, c, g, or t
  misc_feature (379)..(380): n is a, c, g, or t
gatacgatcctatgggcaactggagtcacgcggggcggcgnnnnnnnnnnnnnnnnnnnnnnnnnnnnnnnnnnnnnatcaggccaaatcggccgagctcgaattcgtcgagagcggatgttacaggaactacgccattaacatttgtcaatgaatgtgtttcnctttacaacaaacgtgtctgccaggttctggctgatagattgtcgacagatccaggaatccgttacttttgcatcacaagcatacagagaaattatctgcgtaccttatatggccaaatttgtagtgtttgccaaatcacatgaccccattgaagccaggttgaggtgtttcntgcatgactgatgactaaannngtgganntaangaacccntnntgaacaacaagaaaattttgctgaggtggccagaagcagggatgtggaggtgttagaaggaaaaccaatctacgttgattgtttcgg

SEQ ID NO: 371057 - DNA, 965 bp, Homo Sapiens
tagagtctctgcggcctgttttaagatgtactggaaaaccagtcctggaactttctgtcattggagaaaggtggaggagatcagctctgatatgctgctatctctcttgtctaatccagtagaagaaaaaaaatgcttcaagacagggccaggaattggggtcaggacagaatctagggagtcatcagagttttgtcttcttggtctctagtttgatcatgttcccctggatgtgaggaatgtccttatctgctggaccccgcatatcctctgtctttacaggaacatagtagtagcccatgatggagaagatcaggcagatcaccagcaggaggcaggaaaacaaaatgaattcggcccactgtaccaggccactgaactgtgccacaacaagcacgatgatattcccaactgcaattgtcaatagccaagctgcctggagcacagatttcatgctagagggagcctgagaataagaaaactcaagacctgtgacagagaacatgacctccccagctgtaaccaggcatattgtggtagctgccacgcaatggacattttgttggctgaatgtcttcaatcttccaggcctgaagaccctgattggtgttattagtaataacgaacagatatgctgcaccaaagtctagaagacccaaattctgagaacagtcttaatccttctgtttctacagtgcactgtaggggaattctcctactttgcaccagatctttaagccagaaccacccatattttgcacccagcgtgcagagaggtacagtactcaggggaatgtttagactctttattcaaaggttacaaacgtcaacgtgtcacaccactggtagtctgactccggtccttgacacctgcgggatatgtccctgcacaatatcaggatgacattatcgacagaagcagtcgagcactgattccggagcaacgcgtatacaggaggaaaggg

SEQ ID NO: 371058 - DNA, 413 bp, Homo Sapiens
  misc_feature (55)..(55): n is a, c, g, or t
taggatccaaaggggtcccaatacatacctggccggaacattttatccccatggnctgcagaaataccacattccttttttaggcaccatgtatccattcctcaaggatagacccatatgttaggtcacaagtccttaaaacattaaaaaagttgaatacccatcaagcatccttcctctgacccacagtggaatacaactagaaactaataacaagaggaatttttgaaactacaaatacatgaaaattaaacaatatgctcctgaatgaccattgagtcaatgaagaaattaagaaggaaattgaacaatttcttgaaacaaatgataaaggaaacacaacataccaaaacctatgggatacggcaaaagcagtactaagaggcaaattgatagctataagtgcctacatg

SEQ ID NO: 371059 - DNA, 417 bp, Homo Sapiens
  misc_feature (49)..(71): n is a, c, g, or t
ggcccactgcactcccagcccgggcaacaagagtgaaactctgtccccnnnnnnnnnnnnnnnnnnnnnnncataagtgattgccagaattttgttccttcctcataatttcctggtttagaaaattatggagccttacatcctgatcatgctgggccttagaattctgacacagtgagtcatcacatttcctcccactgcctgtggccttgttccaccatgactctcacagtacagtgtaggcttagtgtagtattattcccttggaaagggtctggcctaccatcacatgccccaagaaacttctggttggtaaagaagataggctgcttattgccatgtgtagtcacttccaagtgcccactgcctttccatcctgcaattgtggcctgtgtataattaaatgattttagcctc

SEQ ID NO: 371060 - DNA, 1022 bp, Homo Sapiens
tggggtatacgttaacaataacgataccccgtgttggagtagactctatcatgaatatgtatattctcccaaaattaatctggtagagaattcaaattgaatcccaacaggatgtgccattgttattattatttttgaaattaaagttgattttataatttatttgtaagaacaaaagcccccaaatagccaccaagttggagaggaatgttaagcaaatggattttaagatttactataaagctatataactaagaactgtagtctatatatatgcacagataaatagacccatgaatggaatagaaagcccagaaacaaatgcatgcaaaaatggtttgtaatgacatataatacataggaaactatcagatacactgggaaaaagatgaggtattccaaagctactaggcattttaattacccttgtcaaaaactgttatctgattcctacatcacaccatgcatatatcaaaaagaaacaaatagttactggttgattgacaatcaatatgaaaggcaaaaacataaagtctttaaaagataatataagaaagcatccttatgacctaaggtagaaagtatttcttagcaagacacaaacatgaatctattgacgacccagtattgataattcagctacatttcaaacagaaagatgtccggtcattaaaagttacccatagagtaacaacctaactccagctaaagacgatatttgtgacccattattgaaaaaatcttatattgagaatatattaagaatcctgatggacaaagcgtgaagacaatgactgaaatccacaatatggaagcaagaaggaggatactgaggcagagatagacagcaggcaatagagaaaacacgatcgatatagtgaattacaggtatagataatatgtcaccaaaagtttgatgatacaagccaacgaattaaaagacgagggaaggaggaatcccacagtgatacaatcaaaatacgtaagaccatgaaaaataagacgatgacaaaatagagcat

SEQ ID NO: 371061 - DNA, 1082 bp, Homo Sapiens
  misc_feature (163)..(179): n is a, c, g, or t
atcaggccaaatcggccgagctcgaattcgtcgagagcggagctgcagccacgcgcgtgcggcacgcgccggccgcctgcccggatcgcggccaccagtgccgcggcctctcgactcccgccccgccgagccgcgcgcgcgactgccatcctcctcaattgcnnnnnnnnnnnnnnnnngtgcatgcattcattttctgttccgttttgtcctttttaaggcggtggcggcggcgacagcggcgtaagctcgcagcggggagcggggcggccggaggatgcggcgcggggctgcgctcgctacgtccgctgctgctgcccggctcgggcctgagcgccgagcaggatcccaagtgatggtggtttcctcggagggcgagctgagtactgcgcgactggttagcacggtggagctggtagccacgcctgctggctggcgtgcgtgaacaggtgtggaccgcaggatctcagcactctgacccaaggggaagcatgtcgaagaaaggccggagcaagggcgagaagcccgagatggagacggacgcggtgcagatggccaacgaggagctgcgggccaagctgaccagcattcagatcgagttccagcaggaaaaaagcaaggtgggcaaactgcgcgagcggctgcaggaggcgaagctggagcgcgagcaggagcagcgacggcacacggcctacatttcggagctcaaggccaagcctgcatgaggagaagaccaaggagctgcaggcgctgcgcgaggggctcatccggcagcacgagcaggaggcggcgcgcaccgccaagatcaaggagggcgagctgcagcggctacaggccacgctgaacgtgctgcgcgacggcgcggccgacaaggtcaagacggcgctgctgaccgaggcgcgcgaggaggcgcgcagggccttcgatggagagcgcctgcggctgcagcaggagatcctggagctcaaggcagccgcgccaatcaggcaagaggaggcgctcagtaactgcattgcaggccggacaagaccaatgcagacgacctgcgtgccgctaccaggagcaccaagacgaagagcacc

SEQ ID NO: 371062 - DNA, 588 bp, Homo Sapiens
  misc_feature (52)..(88): n is a, c, g, or t
ggatgtatagactcactatagggcgaacggagctttacgcggtggcggccgnnnnnnnnnnnnnnnnnnnnnnnnnnnnnnnnnnnnnatcaggccaaatcggccgagctcgaattcgtcgagagcggaataaaagaccaaatcatctgctataagaaccaggagagtggtgactgagtctcagcacattctagggacaggagaaaagcaggtggctggggaaaaacccagtgggagtgctcacagcagagaacgaagactcagccaagctccattcgcacttcctttcccgtagcattggagacagagctcctggggctgctggtacctttgaaagggctcataggaaaagggagatccatcaactgcctccttacaaaggaggtactgaaacaaagcaacacaactgagaagaccaaaaatgtgtagaaagtcactatgcatggaatgagctggctgtttcaatattagcttctgtttgactcccacatgcaattcaaaggctcactatataacaaaaatagtctgaaattcatctttgttcaccaatccattgtggactatagaaactcagatttcctaccagtt

SEQ ID NO: 371063 - DNA, 1111 bp, Homo Sapiens
  misc_feature (52)..(88): n is a, c, g, or t
  misc_feature (328)..(342): n is a, c, g, or t
  misc_feature (1003)..(1039): n is a, c, g, or t
ggaatgtatagactcactataggggaaccggagctctacgcggtggcggcgnnnnnnnnnnnnnnnnnnnnnnnnnnnnnnnnnnnnnatcaggccaaatcggccgagctcgaattcgtcgagagcggtgagtatggccgtgcggaggccaggctgtttcctctgtcgagaggtgagtgcagatgaggatctattcagagaaagggatcctggcaagtaggggccattgttttccggccagaaccaagggtcggtaagccagctttagccttttacccacatgttctgttctgttatttgctctaggtatttctttgatttgtgctcnnnnnnnnnnnnnnnaaacaactcaccctctcctacgggggttagcaacacatctcagtttcccttagtactcccaggcctttcaccctgtgctgtaccttctgagtcctggaccatattccaatttaatcaggggcagtgaccaggtccaattccatgcttctgatgctcagcacagatatatgatgtgcctggactgcttctgattcgggtgtggtcagtccctccctgtgatgaagctgcagtgtcggaggaaacacttcaaggttacctattagagcaaacctgcctgtctctctttccttggggagctcttagagtccatcgtggacagctgaaagccacattctcacagtgttagctctgcctccttgctggggtgctctaagcattgaatcgtgtagctcagtgggatttcagtcatgccagtagtgcatttggcatgagagtttgttgaaagttggagctcactgactgggtggtctccaggttggcccctcgaagggaagacatcatctatttgtaggtgatggagcttatcagtggaaggaaggaactgtgattgttgaaacacaaaatgctagtgtgagaaggaacattgccactacttggatctagccttgtccctttataggtaggcaagctgaggaccagagtggttagtggtctgtttgtnnnnnnnnnnnnnnnnnnnnnnnnnnnnnnnnnnnnntgaaattactgccctgcctgggagaaaactgggaatgacagtattcctgctcgtgagacactttgcatccaa

SEQ ID NO: 371064 - DNA, 832 bp, Homo Sapiens
  misc_feature (50)..(86): n is a, c, g, or t
aatgtatacgatcctataggggaatcgccagcttatcgcggtggcggcgnnnnnnnnnnnnnnnnnnnnnnnnnnnnnnnnnnnnnatcaggccaaatcggccgagctcgaattcgtcgagagcgggcagctctgggagtcgatgacagtgtcccattgagattatgctgatggttgcatagctgtagaaatgaatggcaacccttagaaccatgtgcgcttgaagattagcgtgcccagtgtgcatcgcagggtgtgtaactgcaccccagtgaagctgtgacaccaacagaaaagctcagcccgaaaaaggaggcgcagggctggaaggtgtgcagagcccggagaggtctcggactttgcatttccggtgccgacggagccgggccggaaggtgtgcagagcccggagaggtctcggactttgcatttccagtggacatggtgcagggccggaaggtgtgcagagcccggagaggctcagactttgcatttccggtgccgacggagccgggccggaaggtgtgcagagtccggagaagtctcggactttgcatttccagtggacatggtgcagggccggaaggtgtgcagagcccggagaggctcagactttgcatttccggtgccgacggagccgggccggaaggtgtgcagagtccggagaggtctcggactttgcatttccagtggacatggtgcagggccggaacggtgtgcagagcccggagaggctcagactttgcatttccggtgtcgaacagagccgggccggaacgtgtgcagagtccggggaggtctctacctctgcctttcccggtgcccctgcgtgc

SEQ ID NO: 371065 - DNA, 887 bp, Homo Sapiens
  misc_feature (53)..(85): n is a, c, g, or t
  misc_feature (519)..(558): n is a, c, g, or t
  misc_feature (581)..(635): n is a, c, g, or t
  misc_feature (643)..(818): n is a, c, g, or t
ggatgtatacactcactatagggcacctggatgtacgcggtggcggcgcatcnnnnnnnnnnnnnnnnnnnnnnnnnnnnnnnnnatcaggccaaatcggccgagctcgaattcgtcgagagcgggtaaggctatggtaaatactaacattaagctctccttatgtgccacacacagttccttcaccaaaatgggcagaattttagctgaagactaatagtgaagcctagacattcatgcagaaattaaacaactcgaccattattagaatatagtaaacatatacatgttcaataccagcatcttcttttctcactttatgttttttgaatgtcattagatttacatatcctgctaacataacataaaaacaaaccttaagtttcaagaaattaacaattctagtttcatactatttacatgtttttcttattaactattagttatttcaaaatttaccttttatgtctggagataaaaaatatctaactagaaaggtagttttttgagaagaattcnnnnnnnnnnnnnnnnnnnnnnnnnnnnnnnnnnnnnnnngagacaacttcttattctgtcannnnnnnnnnnnnnnnnnnnnnnnnnnnnnnnnnnnnnnnnnnnnnnnnnnnnnngttcaggnnnnnnnnnnnnnnnnnnnnnnnnnnnnnnnnnnnnnnnnnnnnnnnnnnnnnnnnnnnnnnnnnnnnnnnnnnnnnnnnnnnnnnnnnnnnnnnnnnnnnnnnnnnnnnnnnnnnnnnnnnnnnnnnnnnnnnnnnnnnnnnnnnnnnnnnnnnnnnnnnnnnnnnnnnnnnnnncgtgagctacttgcactggctctttctaattcatttcgaaagggctaactttagtttcctagtaatccg

SEQ ID NO: 371066 - DNA, 959 bp, Homo Sapiens
  misc_feature (49)..(85): n is a, c, g, or t
cgatgatagactcctataggggaattggagctctacgcggtggcggcgnnnnnnnnnnnnnnnnnnnnnnnnnnnnnnnnnnnnnatcaggccaaatcggccgagctcgaattcgtcgagagcggtgtttcagggccgcccgctcgcctccagtgtccagaaatgtccagaatgagaagccagctaactgcagggcctgggaccatgtgggctggagccccaggcctagatgctgcccaagttggggtgtctggagcggatggcaaggatccagaactggcctgtgggtggtgtcagggctcttgaaattgcaaggacagaaccatctccttccggcttcgtgtaaggaagaccaagccaaggccaaggtgtctaccataccacacctttgggacatccgggcttagcgacgtcagccaggcccatctcctctctgtccacctcttgctctgctttcgccatgcaggggaccatcactatcaggtgcccttctcctccccgcagcttgcctgcataagagagcctcttcctcccaaaggctccagcacacttcccagagctgagtcttagcctggaagggggagcgattgccaggtcaattcctgaaccaatcacagttgccaggcacactggagaatgctgattggccagcagggtcatgcccaatctggaccaatcaccgtgatccagggttgcagtgaggtgcagtgattggccagcctggatcacatgcacatctctggaaccaaccacctgctctcaaaagcactagtgggtgcctcgaggagtactggggtcccccctaagaagaaggaggacggatgctggggaggcagacatgaagggtgtttaccttggccatctgattgccatacgttctgttatgcagtatcaacgatgtgcttggtgagcagttaagtgagttacaggcgctgctctttgtggggaacaggccattc

SEQ ID NO: 371067 - DNA, 1430 bp, Homo Sapiens
  misc_feature (1344)..(1380): n is a, c, g, or t
tggaatcaaaggcatcacaaaatgccatacttactgtttgtgaggagtcaatatttgactgggaccaggacacaacttatgtccttcatatggtagatcactaggatcagaccatctagatcccactttctctgctacttcagctgtgtagacttgagctaattgaacctgtctaaacccgtctcccctattccataggatggagataagtatttcacaagttatcaatgatgatgaaatgagctgacgtaaaactaagtaataagcatgttgaaaacgacattatacttgaaaaccaccttttgctttgagaaatacatgatggacaaaataaatttctcaggtaggtaggtacactgggtgtcagcaaaatggcaattaatactgaagcccacatttctcaaatcgcctttttgcgatgacagctcatttattcacaagtcaaaaatctttagtggtattccagcaatcctaacttgacaagcaaagcttttatgcaattttttttaagcaatacctaacagtgactcctccagtttaaagaaaaataagtattataaatttcccctgtattgcctgaagtcaagtcttaaattaaatctacttcatatctgcctttggcatttaaaaacctacataaagcaactgtctggccgatgattggagcttgaaaaaaactaccatgccagatctccaccccagaccaattaggtcagtatctctgggggtgctattcaagcaacaattatcttttatgttcctaagctcatcatgagttaaggtactgctatagttgaatatcactactacaaaagttatctgaataacttcctatatactctctttcaagatgggtgttatacatagcaacaactggaaaacaagaaactgagttttaaaacaagaaatgtggcaacaggaggatatgcataactagaagggaattgtcaagaggccaggccaatcaaatgttacattataaaatgtccataaccttaagaaagttaactataaaaacaaagcaaaatgcttttagtcacatttatacttggttttcaataaaccacagaaattaagctggaaaaaaataggatacaacttataattagtgattatgcttaaagaacattaatattacagggaaatgaatgaaatgttcctagcaattgatgctgctgaaaggcagaatttggaattttttatattttccaaaaattgcctgaagtgcacacactgtgtcagaagggcaagacaaactttctttttccttagtgatatatgtttatacttctttgcaccaaccccgctctcgacgaattcgagctcggccgatttggcctgatnnnnnnnnnnnnnnnnnnnnnnnnnnnnnnnnnnnnncgccgccaccgcgataagctccgattcgccctatagtgagtcgtatcatt

SEQ ID NO: 371068 - DNA, 1115 bp, Homo Sapiens
  misc_feature (51)..(83): n is a, c, g, or t
tgaaatatagatcactatggcgacctggagctcacgcggtggcggcgcatnnnnnnnnnnnnnnnnnnnnnnnnnnnnnnnnnatcaggccaaatcggccgagctcgaattcgtcgagagcggagcccgggactccggcgagagcgacgcaaggtcggctgcggcggcggcccgagggcgcccgtgtgcccagtgcgcggcggggacggccgcgagctcgctggagggctccccagaataatccagaagtcgattccatcatggcagaactcaaggtggaggcgccggccagcgtagactggcagaaacgctgcctgaccctggaaactcagcttttccggttccgcctacaggccagcaagataagggagctgctggctgacaagatgcaggagctggagcagaggctgctggaggcagagcagagagcagagaacgctgagacccaggtgggtgtcatggaagagaaggtaaaactatccaatctgaagaatgtggactctgaggggagcctgcaccggaaataccaagaattgctgaaagccataaagggcaaagatgagctcatcagccagctagaggctcagctggagaagcagaagcagatgagggcagaggaagcaaaaactgttcaagaaaaagctgcaaagatcaaggaatgggtgacactcaagttggcaaagcttgagatggagaatcagcatctgaaaagccataatcagcgcctggtggagcaggtgggatcccttcaagatgcgctagaaggtaggcaggccagggtgtgcaggtgtgcagtacgtgtgtttggtgggtatggggctgagctacggagctctcaatgtgactgtttttacccgaatcacagctattcagatagctccttcacggaagctgctggtgcccccctacggagctgcagagcaggattctgtcccttcagagccgggaatccagcctatgggccaggacagtggctcccaggcccagggtctgaaggcagctgtgcttgcaccttccccaggtgccctgcagagcaaggactctgtttctgaagcagcaagcctccttggaggattctagttccagcacggtccattctggggaaacagtagagg

SEQ ID NO: 371069 - DNA, 667 bp, Homo Sapiens
  misc_feature (42)..(78): n is a, c, g, or t
  misc_feature (372)..(399): n is a, c, g, or t
gagatcactataggggaatggagctctacgcggggcggccgnnnnnnnnnnnnnnnnnnnnnnnnnnnnnnnnnnnnnatcaggccaaatcggccgagctcgaattcgtcgagagcggatgcaattgtagttatactcagtaatatagttacacttgattaaagccattataaaggaaatgtaatcccatactgattatcttcacatttcttttggttaaagatcagtctgtttcattgagataacagttcaggagaaaagttattgactacatgtatctatagtattgtctaagcaacaggagtttagtttgcatgttttttatttttgagagtacatcaacgtaatgaaatgtatttaaaattgtacccnnnnnnnnnnnnnnnnnnnnnnnnnnnnttatgttttacagcagtgtttttccttggagcatgattcaatcaaattgcagaagagacacttctaattaattattgggaagtacaagctaggattattgttttcctgaacgtttgtgactagcagtgatctcttacagacgtgggggtctggacacttggaccttaaattggaaatggttaaaaaattgttatccaaagaatgacaatggtttgtttgccaagtcttttcgttatgtgtgtttagttttttgagacggaatctgtca

SEQ ID NO: 371070 - DNA, 799 bp, Homo Sapiens
  misc_feature (44)..(80): n is a, c, g, or t
  misc_feature (669)..(751): n is a, c, g, or t
aaccctccactaaatggggacccgggttatcgcggtggcggcgnnnnnnnnnnnnnnnnnnnnnnnnnnnnnnnnnnnnnatcaggccaaatcggccgagctcgaattcgtcgagagcggaggaggggaaatggtcaaagagcgatgggcccagaaaagggtcggacccagatggagatgccactggctgctagcagacccccacgctgggtctagcccacccaatcccatggggatgctcctgtgctctgcagacatctgggtgctgccacaggggcccgacagagttggcatctgggtggatctgagccaagtggtgcttctgggcctcagcaagttgctggtgctgattctgggcagccaactgtggcagcatcttcaggtgcgagtgctgctgggtgaagctgcgtgggcagtccagaaagtgacgtgacagtccacagggaccgacgtagggtttccagcccctatctgtgcagatgctgtcctccaaaccatcacggtccctctctggctggggacgtgcgcctgccactgctggcttgccagcatgatcattggttgtgacctgttgagcccatcttgccagcctcacaaaggacagtactagctgcttatgacaggaaagtggaagaacttggcctggatatttctggagaattaccgtgnnnnnnnnnnnnnnnnnnnnnnnnnnnnnnnnnnnnnnnnnnnnnnnnnnnnnnnnnnnnnnnnnnnnnnnnnnnnnnnnnnntcgtgtgctgctggaatgtggtgaacacctacagtcgatttcacctac

SEQ ID NO: 371071 - DNA, 779 bp, Homo Sapiens
  misc_feature (589)..(633): n is a, c, g, or t
  misc_feature (706)..(738): n is a, c, g, or t
gggaagcggagttgcaatgactgagattggccctgcactccaagcctggcaacagagcaagactctgtttaagaaataagaagaagaatgtcttcccaaagatgtccatgtcctaatccctcaaacctgtgttacgttaccatatatggcaatgaggaattaaggtagtacatggaatgaagatcatagggtggagaagcacattcactgcgcaatgtctattggtggatggaaataggtacatgacagtgtatatagctctctaccattagggttaagggggaaggcatgtgaatcagttaagtgtataggcctaaactatcactgggtggagacacaataaactgaaacctgggttgtctatgaggagggcaatgaggtagctgaagtgtgctgggagggagattttttcctgtatacccttttacagttcctgaattgtcaatcatgaacatatattacctatttacaacttaaattaaaaagtaaatatttattgaataaatgctatttctaaaaagcagaatattctcattgatgtcttggttgctactgattccgattaattcgctctgtttacattagtatnnnnnnnnnnnnnnnnnnnnnnnnnnnnnnnnnnnnnnnnnnnnntgaagtggagaaaagggcaaggaagacacagcccgctctcgacgaattcgagctcggccgatttggcctgatnnnnnnnnnnnnnnnnnnnnnnnnnnnnnnnnnatgcgccgccccgcgtaagcccagtccccattagtcgtctc

SEQ ID NO: 371072 - DNA, 894 bp, Homo Sapiens
  misc_feature (46)..(82): n is a, c, g, or t
cacgatcactatagggcgaacccgcagcttatcgcggtggcggcgnnnnnnnnnnnnnnnnnnnnnnnnnnnnnnnnnnnnnatcaggccaaatcggccgagctcgaattcgtcgagagcgggcggctctgacaggacgggtcgcagggggtcgcctggccggagctgggctccgagaatcccgggtgccagcaccagagcagcggctctccgcactaactctcctctcctggtcagctgtaacccctgccgcagagcccggcaactttcagctgtcgcccgcggagccccgagggccactcgcctcacctgtgcgtgcagcgcctcgcgcgccctgtccggctgcggagatgagcgagcttaataccaaaacatccccagcaaccaaccaggcagctggccaagaggaaaaaggaaaagctggcaatgtcaagaaggcggaggaggaggaggagattgacattgatctgacagcaccagaaacagagaaggctgcccttgctattcagggcaagttccggcgatttcagaaaaggaaaaaggatcccagctcctgaatggccagccttgcccttcaccttcaccttcatgctggtcccttctctccccttctccacacccatgtatctttatcccttgtccctctagcctttccttgaggcaagttcaacctttatatactcttgtatctggccccctcaagccatcacagaagtagaggcacaagagaggtggagaagatgaagacttcaatcagcagtcactagtctaagggtggaacaatttcttcttggtataaggttctttgatcagtagctatgcctgccctgtagggcttaacaagaggcttcgaggctgagagatctccccaaagaacaatgtgggaacggaagg

SEQ ID NO: 371073 - DNA, 831 bp, Homo Sapiens
  misc_feature (53)..(89): n is a, c, g, or t
ggaatgataaatcactatagggcgaactcggacgctcaacgcggtggcggcgnnnnnnnnnnnnnnnnnnnnnnnnnnnnnnnnnnnnnatcaggccaaatcggccgagctcgaattcgtcgagagcggattgctgctctcaaatttagataaccagtcatttattcactgggaatctatgtctattctgcccttcattcattgccttgcttacttttaaaggttcatatgaggagaacatttgaatattgtatttgtaacaattgaaatacaaccagatgtgcaaggatagtgataacaataggcataaaaaatttcatggaatgttcagagggtcatttgcccccaactagattttatgctctgaagaacacataagatgaaaaatttactaaacaaagtgaagggtctgaaaacaaataatagtgaatatgtataggaaatgctatttactagttttttttaaggcttatctaagccatgtaattctgtcccagaaatatacctaggttggtcataactacatctaaagtgagtgactttaatgaatattttaaatggtaattattacttatagtttatattgggtattgctttaaaactcaaattagattgaatgtcaacttgacattttatttgaccctgcaattcttgtgaaatactgtaaagggaatttatggttgttatagataaatttattttaaaaaatcacttttactgactgtttaacataataagatagataaatacctggtaaatttgatattcatcattaaaatatccatgcatgtgcagataaaaatatgaataactgctgactaatacctccta

SEQ ID NO: 371074 - DNA, 1127 bp, Homo Sapiens
  misc_feature (46)..(82): n is a, c, g, or t
gatgtatagatcctatggggactcggagctcacgcggtggcggcgnnnnnnnnnnnnnnnnnnnnnnnnnnnnnnnnnnnnnatcaggccaaatcggccgagctcgaattcgtcgagagcggagttgctgtatgagcctggcctggtgcaaacacattgctagagacatgttaaagagttccaggtgaatcaagcctgagggagacaacagcaaaacgatatgtgtcacaaagatgtctacacggaactgccagggaatggactcagtgatcaaacccctggacacaattcctgaggataaaaaagtcagagttcagaggacacagagcacttttgacccatttgagaaacaagctaatcaagtaaagagggtgcattctgagaacaatgcttgcattaactttaagacctcctccactggcaaagagtcacctaaagttaggcggcactccagccccagctcgggtaaatgggaagttggtagctctgaaggtgatcaggctgcaggaagaagaagggacacctttcacagctatcagggaagcttctcttttaaaaggactaaaacatgctaacatagtgctacttcatgacatcatccataccaaggagacgctgacacttgtgtttgaatatgtgcacactgatttatgtcagtacatggacaagcaccctggggggctgcatccagataatgtgaagttgtttttatttcagttgctgcgaggtctgtcttacatccaccagcgttatattttgcacagagacctgaaaccacagaaccttctgatcagtgacacgggggagttaaagctggcagatttcggtcttgcaagagcaaaatccgtccctagccacacatactccaacgaagtggttaccttgtggtacagacctccagatgtccttctaggctcaacagaatattccacctgccttgacatgtggggagtaggttgcatctttgttgaaatgatccaaggagttgctgcttttccaggaatgaaagacattcaggatcaacttgaacgaatatttctggttcttggaacaccaaatgaggacacatggcctggagttcattctttaccacattttaagccagaacgctttaccctgtggaaata

SEQ ID NO: 371075 - DNA, 759 bp, Homo Sapiens
atcaggccaaatcggccgagctcgaattcgtcgagagcggcgtgctgtatgagcctggcctggtgcaaacacattgctagagacatgttaaagagttccaggtgaatcaagcctgagggagacaacagcaaaacgatatgtgtcacaaagatgtctacacggaactgccagggaatggactcagtgatcaaacccctggacacaattcctgaggataaaaaagtcagagttcagaggacacagagcacttttgacccatttgagaaaccagctaatcaagtaaagagggtgcattctgagaacaatgcctgcattaactttaagacctcctccactggcaaagagtcacctaaagttaggcggcactccagccccagctcgccaacaagtcccaaatttggaaaagctgactcatatgaaaagctggaaaaactaggggaaggatcttatgctacagtatacaaagggaaaagcaaggtaaatgggaagttggtagctctgaaggtgatcaggctgcaggaagaagaagggacacctttcacagctatcagggaagcttctcttttaaaaggactaaaacatgctaacatagtgctacttcatgacatcatccataccaaggcagacgctgacacttgtgtttgaatatgtgcacactgactttatgtcagtacatggacaagcacccctggggggctgcatccaggataatgtgaacgtcgtacatttccagttgctgcgaggcctgcttacatcacc

SEQ ID NO: 371076 - DNA, 787 bp, Homo Sapiens
atcaggccaaatcggccgagctcgaattcgtcgagagcggcatggaatcaaccttaattctgtgtatttactaatgtaaatgcattcttacgttacaaaattgtgctttaagctggaaaatagtgctttgaccctgtttccttgctgtctgtgttttagatttactgaggaaatggagactgcttacttaaagcctgtatcatgctttagttattcttttccattttacaaatcaggagggagaatttcctgggcaaaaaataattcatgaagtagtggtgccatttttcacaaaaattgatcctgagatgaatattaattgtgtagtctacaaagagttaattttatttctccattgatagtttggacctttgaagtgaagaaattctaaccgaactcctttctgacccttaagcctttttgtttccatgcaaaagaaatctgttaataatctagcatcttgccaaagattctgtctcatttctctatagctgatttgagtattccattttaattcactgcctgtggaattagtaattatatgatttttgtagtgactccaatcttaaataatgatatccttctaataaggcttgttctatttatagggcttaaagagaaattagattgttaagaagaaacaacagaaatactagaaataactattaaaatatactcaaatctattttgtcggcctgtttctcatgctttatttatatttctggggcaaaagaacaggagtacaaatgatgagcatgtgacgccttgccctggcttcttccaacca

SEQ ID NO: 371077 - DNA, 1015 bp, Homo Sapiens
  misc_feature (770)..(791): n is a, c, g, or t
  misc_feature (929)..(965): n is a, c, g, or t
ggctgttaggacggaataaccactggattccccgttcctacatagagggggttagcatcccctcctgaataccaaaaaggcctcgggttcctgcagacgcttaaggaacatgccaatcacaaccggatttcctgaaaaacgcaagaaatcctggtgagggctgggttgcaggacgctctgcacaccacgggtaacagttttgtggtagcttctctgagaccggctgcctcttactgtcgcctggaccaggggggcgccgctctcatcctcctggcatctcccaggcccctgccccactcagagctccaccgcaggggctcccgaggctggactcagacccgctggatcccatccaggccacgcaaggcagcagtggagaccctcaaggctggactccagcccctaatgtagactcagggacccctgggatggatgggttcgaacccccaaagctgacttcaggaccctcagagctggactcgagcccccagggcagacgtggggactccggggcagcttccggggcccccacggcggctctccaggttccagggcagacgtggagacccctgggcgacgtcacggacgcccagggcgggactcgagcccccaaggcagacgtagggacccctgggcgccgttctcgatccccggggctggagtcaagcccccgaggcggcgttccggactctcgcaatcagacttggactccacccagcgcggaacggggtaggacgggagcgaggacgaggtgagtgaaggcagcgctnnnnnnnnnnnnnnnnnnnnnnaggctcggggtcctggcgcctaccgggccggcggctgcaccgcgggatgggtctgccaggagccgcccacgccgaacaagaagcggcccggtccccaccgctctcgacgaattcgagctcggccgatttggcctgatnnnnnnnnnnnnnnnnnnnnnnnnnnnnnnnnnnnnncgccgccaccgcgtgcagctccggtcgccctatagtgagtcgtatcatta

SEQ ID NO: 371078 - DNA, 929 bp, Homo Sapiens
  misc_feature (44)..(80): n is a, c, g, or t
tgatcaccactatagggaactcgagctctacgcggtggcggcgnnnnnnnnnnnnnnnnnnnnnnnnnnnnnnnnnnnnnatcactgccaaatcggccgagctcgaattcgtcgagagcggatggccggtggaagggctgcatccatgacaaccggacgggcaatgaccgggtgggctacttccagatcctccctgggcgaggccattgtcaagcgagcaggttcccgagcaggcactgaaccaagcctgccccagggaagcagctcatcgggaccctctgcacccccagaggagatctgggtgctgaggaagcattttgcaggtggggaccgaagcggcagcattagcggcatggctggcggccggggcagcgggggtcacgccctacacgcgggctctgaaggcgtcaagctcctggcaacggtgctttcccagaagtccgtctctgagtccggcacgggggacagccccgccaagcctccggaaggctctgcaggtgtggccaggtcccagcctccagtggcccacgccgggcaggtctatggggagcagccgcccaagaagctggagccagcatcggagggcaagagctctgaggccgtgagccagtggctcaccgcgttccagctgcagctctacgccccccaacttcatcagcgccggctacgacctgcccaccatcagccgcatgactcccgaggacctcacggccattggtgtcaccaagccgggccaccggaagaagatcgcggcagagatcagcggcctaagcatccctgactggctgcctgagcacaaacccgctaacctggccgtgttggctgtccatgatcggcctggcccagtactacaaggtgttggtggaccaatggctacgagaacattgatttcatcaccgacatcacctgggaagacctgcaggagatcg

SEQ ID NO: 371079 - DNA, 927 bp, Homo Sapiens
atcaggccaaatcggccgagctcgaattcgtcgagagcgggcgtggctccctgggcctggaacgcgctctgagcgcgccggtcccttccaggttgcgcgggctccggacgagacccagcccagccgggcagccccgcgcgctcccgggtcccgccggcctcgcgccgcccggttgccgtgggaaccacggagcctcggagcgcccgcagactagcccgtgtctgagggggtgagggatactgaggcccaggcatggagctgccagatccggtgcgccagcggctgggaaacttcagccgggccgtgttcagtgattccaatcggaccagtccagagtccaatgagggtccggaaaatgaaatggtctccagtttggcactgcagatgtcactttattttaatacctactatttcccactgtggtgggtgagcagcattatgatgcttcacatgaagtattcaatcttgcctgactactacaaattcattgtgatcactgttatcatcctaataaccttaattgaagccatccggttgtatctgggctacgtgggtaacctacaggagaaggttcctgagttggctggcttttggcttttgagccttctattgcagttacctttaattcttttcttgctctttaatgaaggcctaacaaatctgcccttggaaaaagcgatacatatcatcttcactctcttccttgctttccaagttgttgcagcatttcttaccttaaggaaaatggttaatcagttggcagttcgtttccacctccaagactttgaccggctctctgcaaacagaggagacatgagaaggatgaggtcatgtatagaagagatctgatccagtgttgttgagtgaaaatctgacagatcattctagagactgtaagagttaggaaaatatcagagctctgagaaa

SEQ ID NO: 371080 - DNA, 1048 bp, Homo Sapiens
  misc_feature (904)..(904): n is a, c, g, or t
  misc_feature (1030)..(1030): n is a, c, g, or t
atcaggccaaatcggccgagctcgaattcgtcgagagcgggatgagaacttcaaggcctgcttccgcaagttctgctgtgcatctgccctgcgccgggacgtgcaggtgtctgaccgcgtgcgcagcattgccaagggacgtggccctggcctgcaagacctctgagacggtaccgcggcccgcatgactaggcgtggacctgcccatggtgcctgtcagcccgcagagcccatctacgcccaacacagagctcacacaggtcactgctctctaggcggacacaccctgggccctgagcatccagagcctgggatgggcttttccctgtgggccaggatgctcggtcccagaggaggacctagtgacatcatgggacaggtcaaagcattagggccacctccatggccccagacagactaaagctgccctcctggtgcagggccgaggggacaccaaggacctacctggaagcagctgacatgctggtggacggccgtgactggagcccgtgcccctccctccccgtgcttcatgtgactcttggcctctctgctgctgcgttggcagaaccctgggtggggcaggcacccggaggagggagcagcagctgtgtcatcctgtgccccccatgtgctgtgtgctgtttgcatggcagggctccagctgccttcagccctgtgacgtctccctcagggcagctggacaggcttggcacggcccggaaagtgcagcaggcagcttttcttttgggggtgggacttgccctgagcttggagctgccaactggaggacttgcctgttccggactccacctgtgcagccggggccaccccaggagaaagtgtccaggtgggggctggcagtccctgggctgcagaccccgagctgggccctgggcacggncaaccttcttgaaggttttcttgtgtgctgcacggtgcaggcctcatccctgactgcagcttgatttggggcccaacccccattttccttcaagagaccagcgagaggcctgggcccatttccttncagcggtgcaatgaatta

SEQ ID NO: 371081 - DNA, 386 bp, Homo Sapiens
  misc_feature (123)..(131): n is a, c, g, or t
atcaggccaaatcggccgagctcgaattcgtcgagagcggggtgaatgtacgtacaggctttttatataccaaaagtattttttgactagaccattcaaagctacccgaactatgttggaaannnnnnnnnctcattaaaatacaggcccttaggctctatttttcatgtatgagtcgtgtgtaatttatgtaaaaatgtgtgtacagactcactgatgcagcactgtagcccatcaccttggagcactgactgtacatagtgtggtgaagaaaagtgaacgcccttgtagagcagcccgaccacaggagcatggccgctgccagcccagacgctgctgacgctgtgtaaatgtgcacaataaacccgtctcacccgggaaaaaaa

SEQ ID NO: 371082 - DNA, 556 bp, Homo Sapiens
  misc_feature (51)..(87): n is a, c, g, or t
  misc_feature (156)..(270): n is a, c, g, or t
ggatgatacgactcactatgggcgaccggagctcatcgcggtggcggccgnnnnnnnnnnnnnnnnnnnnnnnnnnnnnnnnnnnnnatcaggccaaatcggccgagctcgaattcgtcgagagcgggacatttgtcttggcgctctggggaaaannnnnnnnnnnnnnnnnnnnnnnnnnnnnnnnnnnnnnnnnnnnnnnnnnnnnnnnnnnnnnnnnnnnnnnnnnnnnnnnnnnnnnnnnnnnnnnnnnnnnnnnnnnnnnnnnnnaccagataaggacactgcaacccagagaagaaacctgcaaaggccgtgttcacacactcacaagagatatggctgtgatttggatccagatgtgatgggctgacaacaaaactcctgtgataccatgaagtcttcgggaggcagaattgaagtgaacatgaagtttagcttagagaagaaaagaataaatacatacaaaacatttgatggtgaataaacagaaaatggtgtattcaacagaatttgactcagcaataaaaatgaaccaaactatggaaaacaacac

SEQ ID NO: 371083 - DNA, 983 bp, Homo Sapiens
  misc_feature (48)..(84): n is a, c, g, or t
aatgtatgatcactatagggcgaatggagctcaccgcggtggcggcgnnnnnnnnnnnnnnnnnnnnnnnnnnnnnnnnnnnnnatcaggccaaatcggccgagctcgaattcgtcgagagcggagcgttggcctttttcccacagctccaccaggcagtaccctgttgaggactctgtgtgggggctccagcctcacactttccttctgtactgccctagtagtagaagttctctatgagggttccaccactgtggcaggtttctgcctgggcaccagggctttctcatacatcctctgaaatctagggggaagctgccaagccccacttctctcctgcattctgcatgccagaattaacaccatgtggaagccaccgaggcttacagtggctttgactctccaaagcagtggcctaagtagtatctggggccctttcagctgtggcaggggctagagcagccagataaagggagcagtatcccaaggctgtacaaggcagcaagagccctgggcctggatcctgaaattattctctcctccgaggcctctggggctgtgatgagagcggctgacttgaagatttctcaaacgccttcaaggccttttcctcattgtcttggctattaacacctggctcccttccaatcctgctaatctctctagcaagtagttgctccataggctgcttggattccttccctaccacaggcccaggctacaaattttccaaatgtttatactctgcctcccttttaggttcaactttaagtctttattttgctcccacatctgatggtaggccgtagatgcgggcatgtcacttcttgaatgccttgttgcttagaagcttccttcaacaaataccctaagtcatcactcctaagttcaaacttccaccagattccctagggcaccacacaccaaggcagtaagttctctgctaagggtttactggggcgaatctacactccccttcccaa

SEQ ID NO: 371084 - DNA, 948 bp, Homo Sapiens
  misc_feature (53)..(89): n is a, c, g, or t
ggaatgtatagactcactatagggcgaatcggagctcatcgcggtggcggcgnnnnnnnnnnnnnnnnnnnnnnnnnnnnnnnnnnnnnatcaggccaaatcggccgagctcgaattcgtcgagagcggaggggggacccaaagggtgcaggacgcctggtctgccttgtgggtcctggacggagccctctacctctgcaaagatgacttggagacaggccgtcctgctgtcttgcttctccgccgtggtgctcctgtctatgctgagagagggaaccagtgtatctgtgggcaccatgcagatggcgggagaagaggcgagtgaagatgcaaaacagaagattttcatgcaggaatcagatgcctcgaatttcctcaagaggcgcggcaagcggtcccccaagtcccgagcatgaggtcaatgtggaaaacaggcagaagcttcgggttgatgagctgcggagagaatattacgaggaacaaaggaatgaatttgagaacttcgtggaggaacaaaacgatgagcaggaagcagaggagccgggaggctgtggagcagtggcgccagtggcactatgacggcctgcacccatcctatctctacaaccgccaacacacgtgatcccatcctgaagccggccaagaagacaaagcttgtagcaccattggcatccccgtgttccagcaatctttcccatgcaaaccggcccttcagagggtctcagcttggggtctgcagtggccagcagctcttgaaaagacgcatgcctttccttccagtgtgtgaaagtgtcctgactttcacctctttgcagaccatcatctgaggtgagcaactgctggcgggcctcctagtacaaacctacagtggcttcccctggcttcgttcccaagcaaaagatcagtcaagatcacatgttgcttatggcttacaataaaaacgtgaac

SEQ ID NO: 371085 - DNA, 1006 bp, Homo Sapiens
  misc_feature (47)..(83): n is a, c, g, or t
  misc_feature (993)..(993): n is a, c, g, or t
gagtatagatcactataggcgaacggaggctcacgcggggcggccgnnnnnnnnnnnnnnnnnnnnnnnnnnnnnnnnnnnnnatcaggccaaatcggccgagctcgaattcgtcgagagcggggggtttgccctgggccgctgccggtcaggtcggccgcccctgacagctccgggagcatcaagcgcgacagcggcgccctcacctcgggacatccacacaccgaccgctcctgctccagaggcaacaacccagcgcgcctagcctggcgccgtgcagcgaagcccaagagctggcctcgccacgaaggttgaaccagccaaattttcgagacagctcacggcttagaggaaggttcatctaaataaaggccggctaaagtgacattgcagggattaaatccttctttggctgcctgtgtgaccagaaggcttatttgcaagtttcttctttcctggggtccagattattaggtctccagcgccctgcagcttgacagaaagagaagcatgaaatgaaggtcagagatgagatcccgcagcagggacgtgggggcctcccaggggcatttacgcaccagagtgcaagattctctggccatcaagggaaatagcaaacagaagcctttgtcctggggcacagcacctaccacaaagcatcagactccacgtctggccagaaagttcctggagtcccatcaggccagtgggtatgtaacatgtgcctaattgtacagctagagcctgcaagttcaacgtgagggaaggtgggaaatgtcttgagtgaggcgagcagctcctggctgggctgggcagactcagctaccacgttcactgccttcctcttcactaaagccgagagggaggctgctcagctctcagggaaaactctttttgaaccctggggcacctgctgttcctcagttggcatctcccaccctctgagcctcttctgctcctgcacaacctgcctcttcgctgagatggagacgngagcccccgtgga

SEQ ID NO: 371086 - DNA, 901 bp, Homo Sapiens
  misc_feature (52)..(88): n is a, c, g, or t
  misc_feature (597)..(735): n is a, c, g, or t
ggatgatacgatcactatagggcgaacctggagctgcacgcggtggcggcgnnnnnnnnnnnnnnnnnnnnnnnnnnnnnnnnnnnnnatcaggccaaatcggccgagctcgaattcgtcgagagcggcctcagtttattctaaatgtcccagacctttggccttctaaaatcttcactaatatcaaggagcctgaatcttaatgggatttatggctcaccattgccatacaagctttctaaggtattcatagaacttgtcacttcctggtcaacatatcaacagcaggatgtcatccttatagtgtaccaccaagatttcctctgggatatcaacatgattaattcatattgattcacatttgaatgatattttgaatcgcatcatattgatttaaatttatattaattaatattaaattcagtctattgtagtggaatgttttgcctttttcatgtaaaaaccatgtttgattaatattactctcagcgatgagtactgagaagaaagccatatcagtagcataaagcaagcagcaaaggctctgtggatctgttgcagtaaagatggcacattcccagttgctgcaggtagagnnnnnnnnnnnnnnnnnnnnnnnnnnnnnnnnnnnnnnnnnnnnnnnnnnnnnnnnnnnnnnnnnnnnnnnnnnnnnnnnnnnnnnnnnnnnnnnnnnnnnnnnnnnnnnnnnnnnnnnnnnnnnnnnnnnnnnnnnnnaacaaaacacacaaaacaccctctccacgcccggaatccgcccaaaggggcctaacctccagcggggagcccgcgtcaccacccttacgcccccttcaccgccacggtaacaccccacagctcgccgcacccatggcagaccgcccccgcgtgaaactgccatccg

SEQ ID NO: 371087 - DNA, 632 bp, Homo Sapiens
  misc_feature (54)..(90): n is a, c, g, or t
cgaatgtatagatcactatagggcgaattggaggctcaccgcggtggcggccgnnnnnnnnnnnnnnnnnnnnnnnnnnnnnnnnnnnnnatcaggccaaatcggccgagctcgaattcgtcgagagcgggggctcatagtccgactgccgcgacagaaaggctgggagtggatctgagactacagttccaacactacggggaaaatttcatcttctctgagactacagttccaacactgaggggataatttcatcttctcctccgcccctccatgtttccagtgcaattccgccctgctgaggggagcctatctgttcccaaacttctgcgtgcgaggagacagcgtggccagggcaggtggtctcacttgtaattgtgacacagtctccccacgtgccacttgtacgactatttgtccctgaagtttgatttctctctgacaagacagagcccgggagcctccaacagcctgcccagcgttgccgtaaagcttgctctcggggacctgggcgcgcccagacctttgcaagggcccctccctcagccccgacccttctcctcgcccctcccctgccacgccactttcgacatgctggaaagtcatctacctttaataacagtcatctttgc

SEQ ID NO: 371088 - DNA, 777 bp, Homo Sapiens
  misc_feature (351)..(351): n is a, c, g, or t
gcgataccttcgtatacatacaattataccgaagttatggatcaggcaatcggcgagctcgaatcgtcgagagcggctgtcttacagctgatccggttcttgcggcggtgcgtgctggcgccggagagttccgcgcgtgtcctcgggctgtccgcggggaagctggtccgggagtgggcgcccgcccgcctgccttgcgccttgcgcccccggcaccgcttccagacagggaaagtcgccgccgctcgcggtagacccgggcagcgcttccattccgcggagctggaaatagggatccagccatccgtgggctcaaggaggaatggagaactgtaccgttccagcaacaancatacagacgcaagacgcggccgcgcacccgccgcggcaaaggcggagacagcgcagcgggcaacgagactagcagagacaacagctactaaacagaacggcagagcaaaacgaaaagcggacacacaggagaaccgacaagcaaccgagtaaagcacagacaagaaaagccgcgagcgcagtccaagaagaaaggggagacagggacgggcagaaacagactgaaagcaaacgaaagccaagaagagcagaagaagcagagagcggaaacgcggacaagcaaccctaaccaaagaaaagacaagaagcaaatgaggaaatcagaaagaggccgagaacaaacagagagacgacagacatacaagagggaactgacgaggaaaaacaccaaaaacagataacgacaacaaagaagaacaacaggaa

SEQ ID NO: 371089 - DNA, 1309 bp, Homo Sapiens
  misc_feature (49)..(85): n is a, c, g, or t
gatgatagactactatggggaacttcgcggtttatcgcggtggcggcgnnnnnnnnnnnnnnnnnnnnnnnnnnnnnnnnnnnnnatcaggccaaatcggccgagctcgaattcgtcgagagcggagagagtagctcccccttactttcctcccttaaaaactcagagccacctttctgcacagcttcaagtcataggcaggcttctttgtttgtcttgttttgttatttgaaactggcttatttttcaaattaccatgctggtagtgcaaaagtctcatgatttttccaagaatcaatcaagtgcatattatagagccagattatatgccatcttcctccaagctcttgcaaatttaaattgtatagttgaaaataccccccaaaatggtcagtttagggttttgcctttctctgcccctgtcccaccaccatcaccaccacataccaccctgtagctccaaatcctggtttgagtcacatgagaatatagaagagagagagagatacaaagatgaagtagagttaagagggtggtgagacttggagctgggcattggctctgaaaccaaataaattcaatgtcacatttggtgcctgtggagaaccagagatgactttttttgcttaaggtagagagcaagatggaattattatcagttaactaactggctcttatctgatcaatcttgcctttgaaactttattgactgtacgtcttgtgacctcatgacccagatggggaaagagttctaactgatgttgctgcctgttaaatactaaatctcatgggagccttctggtttagagcttagtggaaaaactcccaacactgtcccagaaaaaaaacctatttgaagccccctgtgtattattggcttgggatctcttaaacacggtgtctcgggcgccttcaataacgttatgtaccttgaaattgcccaggaattattaacctggttaggaaagacaacggttgtataccaagggctgttatatttacttcccttatattgaacacatacggaggagaaggcaaagcatcaatgggaggacagcagatcaactaaacggtgtcccaacatattcttgaatggcgaccccgagaaaaacacaccaggggggggacaaccatacaaaagcctacacaacgcctgagtggttgggggaccacgaaggtacccaggtggtcgagaacaccaagatggggggtcaacgaacacaagtaggggacgaaagtagggaccaacactattagaacacccaagatcgtggcgaaaaaaacatcgacagaagagcctactgagaat

SEQ ID NO: 371090 - DNA, 754 bp, Homo Sapiens
  misc_feature (565)..(565): n is a, c, g, or t
  misc_feature (568)..(568): n is a, c, g, or t
  misc_feature (614)..(614): n is a, c, g, or t
  misc_feature (654)..(654): n is a, c, g, or t
  misc_feature (671)..(671): n is a, c, g, or t
  misc_feature (732)..(732): n is a, c, g, or t
atcaggccaaatcggccgagctcgaattcgtcgagagcggagtctccgcaggccggcgattcagccggtggctgtggctgcggcgccggggtcccggccgcgacggcgttcaagaacgggctgcagaggctgctccccggcaggcttaacctccacggtctgcccagcgtccggggacccctcaaacgactgtagcggcggctgtgtccctggcacaagggcagagcccggagacggagccgccggaccttccccaactccaaagtcggtgccattgaatttcagagtttccagctgagcgacggcggcctccactacctccatcgcaccgcgccagaaaccgggtcggcctcaggattggggcccctggacaagctcacggctctctccagaaatagtaaaacaacttaggcaaccgcagcaacactgcctgggcccaacttcccgcgtttctcaggtaactacacgcggaggagccaaaagacacgcccccgccatttacgcagcaacgctttccgaagagcgtgtgacgtatgtggcgcgacggcgagacggccctcgcggnggngcaggatacatgcgtcatatcttcgaaaatcaggatttagggggtncgggcgccgtggttcacgcttcgtaattcccagcactttngggagaccgaggtgggncggattcacaaggttcagggagtttcacagaccagtcttgcccaacatggtgaaaaccccntctgttattaaaaattacattt

SEQ ID NO: 371091 - DNA, 823 bp, Homo Sapiens
  misc_feature (43)..(79): n is a, c, g, or t
atggaatagtatatgggacctcgagctgacgcggtggcggcgnnnnnnnnnnnnnnnnnnnnnnnnnnnnnnnnnnnnnatcaggccaaatcggccgagctcgaattcgtcgagagcgggaggggccagcagtagaggaggtctcagaagctgaggggcctggatgggaaaggcgccaggccctagccagctcaagaagtctgaaagcgtccccagtgagtccccactcagagccctgtcctctctcgccatggctgtccagaggatactgtctcagagaccttcaaaaccgtgtacattcctgaatggtactgggccctcagcctcagctctctgctttgtaaaagaggacaagaacaccactcctgtcccccgggtttgcctccctcaagtcactgcagatggacagaacagaaattaaatgtcttcgcggtggccacatttggccccaaagccgttggacaagcgcagggccaaagagcccgccctgcttcagtgggtgctgcctatgaggcttgagaaagtctcctgcctacttctctgggcctccgtctcctcttgatgtggggctggaaacagtaccctctccccagcacagctgccaccatcagagcccagcactggggcaggtatacggtggtgtaacagtggagtcgccacccacagccagcatgccccaggcccaggactgcccagtcctggcagcctggcccacaagtagtgtccagccctggtgacaagaacagaagaggtggggtcctaggccctccccaacccacccaccagcctctgtttgtgtccagttgccatgaggcctcgggat

SEQ ID NO: 371092 - DNA, 634 bp, Homo Sapiens
  misc_feature (48)..(84): n is a, c, g, or t
  misc_feature (123)..(254): n is a, c, g, or t
tggattgatcactataggggaactgcgcgctttatgcggtggcggcgnnnnnnnnnnnnnnnnnnnnnnnnnnnnnnnnnnnnnatcaggccaaatcggccgagctcgaattcgtcgagagcnnnnnnnnnnnnnnnnnnnnnnnnnnnnnnnnnnnnnnnnnnnnnnnnnnnnnnnnnnnnnnnnnnnnnnnnnnnnnnnnnnnnnnnnnnnnnnnnnnnnnnnnnnnnnnnnnnnnnnnnnnnnnnnnnnnnttttgtctcccagtttctgtgggtcaggaatccaggtgcaccttagctgggtcctttggctcaaggtcttgcacaaaatctccatcaaggtatcagcagaggctggggcccatctcaaggctcagatgggggaggatttgcttccaagctcactcacctgaatgctggcaggattctgttcctcatggcctgttgggctgaggggcttagctcctcgacagctgttggccaaggcatctctcatgttcctggccatgtgggtgtcttcatagggcagctcatacagtggtgggaggcttcgtcagagccagcaagccagaggaggcaagcaggagggaagccagggtcctttcgtaacctactctcagaagtgacatccc

SEQ ID NO: 371093 - DNA, 1088 bp, Homo Sapiens
  misc_feature (73)..(109): n is a, c, g, or t
gggaaattgatagaactcactaattagaggggcgaacccccgcggaggttttttaactggcgggtggcggcgnnnnnnnnnnnnnnnnnnnnnnnnnnnnnnnnnnnnnatcaggccaaatcggccgagctcgaattcgtcgagagcggagctggaagagcctggggccacctgtctggtcagagtctctctgctgtgggcctcttggagccaggctggttttgtggtctgactgaagtgacaatgaaattaataggatcctgatgctgtgactgaggccatttccctgtgtactccaaacaaggaatgaaagagggaaatgtcattaggataccaggaggcttggaaatacatacaaggagggaccacgctgacagcgtaaccagactaatacagacaaagcaaagaacgagagacaaaataataaacagaagccaggatcccaaaagaaataaaaagaataggcaataaggaggaaatataacaccgagaagagagataaaacggcccacagtcggaaaacatagcaatataaagccccaaataaaactgcatggaaagaagcaagtatccatgctcgcgagaaaccagatccagtcatgaataaaaaaatgcaatggaacgacaagctgaaaagaagcgaaagttgaaatgggggaaatgaatataaaggaacacgacgcccgaaaaaaacccgaaaatagatggggagacgatcacgaaactgtcggagcacgagaaatagaagagaccgaaaaaaagaagctaaccgtaaaatagagaggaaaatacgaagggaaaaacatgaagaagaccaggtgaaccgaattgaagtgagaggcaccagacaggaaaatagcactgcgggaccacgacagaaactcgggggcgacccataccgactaaacgagccaggctagatatagaaaacccgaagctcctcgacaaagcagggaggacgaagaaggctgggagaggctcaagaacgttgttcgcgagagaaaacgagagacaaggataagaaaggaccgtaaaagcggagctgcgcgaacgcgatgctaacacagaaaacaagcggcctggaccca

SEQ ID NO: 371094 - DNA, 852 bp, Homo Sapiens
  misc_feature (54)..(293): n is a, c, g, or t
atcaggccaaatcggccgagctcgaattcgtcgagagcggaatatcgttctgtnnnnnnnnnnnnnnnnnnnnnnnnnnnnnnnnnnnnnnnnnnnnnnnnnnnnnnnnnnnnnnnnnnnnnnnnnnnnnnnnnnnnnnnnnnnnnnnnnnnnnnnnnnnnnnnnnnnnnnnnnnnnnnnnnnnnnnnnnnnnnnnnnnnnnnnnnnnnnnnnnnnnnnnnnnnnnnnnnnnnnnnnnnnnnnnnnnnnnnnnnnnnnnnnnnnnnnnnnnnnnnnnnnnnnnnnnnnnnnnngtgcgagctactgcacctggctaccaaatgtttttaatctaatacttagaaagaaatacttaggagagctactttatgaatatatcatggatctatctactcacctggatattctgaccatattagctgtcctacttgcaaaattattttattcttagctaggataaactttgctacccatgaagaactgttccattttatattttctgagataattaacgtgttgttcttttctccttgcctataagcaagctctgaaacaaattttacactagtcacagcaactatattaactatactctccctttgttgccctgattttctgtttttatttctggtttattaactaaatagtatatatccctagtttaagttatttatgtacagatacattcaatcaaaaagcaatcaaatctaagtttcctataaaaattagtgcatatacattattggcctattggtgtgcttgactatcagagcaaaagtattagaaatactttccctctagggaattcttaagacttcttaaagaaaaatttaggaattcagctattgatcc

SEQ ID NO: 371095 - DNA, 794 bp, Homo Sapiens
  misc_feature (604)..(604): n is a, c, g, or t
atcaggccaaatcggccgagctcgaattcgtcgagagcggccggaccctgagagacacattaagggagcaataacctgttaaagaacaatagatgatagtcacagtctcaatctcatttgcttctcctgggaaggaaacactgagatgttgtaggactaaggacctcaggttgcatttggggcattgttcgaggggtttcccatgacccatgcaaccagcattttagctgcactagacttctcatggtttccagaatatatgtgaaattgtatgttatgttgccttacttctttgcttgaattcttataaatatcaccttttctctttagcttgatagtttcctcccctcaaagtgagcctaatggctttctctcctgtatgaaaccttatacacaattgtatctgatgtttagcatcttataggtatttgttcactaaatactaagccatgcactcagggatcacaaagagactgtaatactataaataatatctaatactccaaatattgatgaaattgaatggaactgaatgtgtgaacactaagccaagccttcaccagttaacaaaaaattatcttttgtgatctgagattcatatatntttgtctacttttcattaagaataaagtgagaagcacattaacaatctcaccgttttagtagtaatcattttcaaagggacgttctattgggaaaggacgaatttgtatttaaggcaaggcaattaatagatattaccttgtttcaaagcccacggtgaaatcattgttaaagaatttataataggccat

SEQ ID NO: 371096 - DNA, 958 bp, Homo Sapiens
  misc_feature (50)..(86): n is a, c, g, or t
ggaatgatagactcactatgggcgacctcgggctctacgcggggcggcgnnnnnnnnnnnnnnnnnnnnnnnnnnnnnnnnnnnnnatcaggccaaatcggccgagcgtcgaatgcgtcgagagcgaaagggatcgtgctatacaatattttatgcaaaaatttcaactgaaacatctttccagaaataatcggctagtaaaaaaatctagtattggttgtagtacaaatacaaaatggtttgggcagaggaacaaatattttaaaacttataatgaaaggaagatgctagaagccctttcatggaaagataaagtagccaaaggatactttaatagttgggctgaagaacatggtgtatatcatcctgggcagagttctatttcagaaggaacagcttccaatcttgagtgtcacttatggcatattttggagggaaacgaaactgccaaaggtaaaatgttctcctttttgcaatggtgaaattttaaaaactcttaatgaagcaatggaaaagtcattaggaggagcttttaattgggattccaagtttaggccaaaacagcagtattcttgttcttgtcatgtagattctgaagaactgatattttccgagtcgtgtagccttactgagtgccttcaggatgagcaggttgtagtacccagcaatcaaataaagtgcctgctggtgggcttttcgactctccgtaatatcaaaatgcatataccgttggaagttcgactcctagaaatcagctgaactcacaacttttagcatgttcattgcttcatgatggagatccaacttaccaggcggtatatcagtggacatgccttctacattcaattgcgggagcttcataccaggcagatggccatgatttgtgcctggtacttcatcggattcacaagattactggcatgcgtagatctttgtactacaaaagaggaaaacagaa

SEQ ID NO: 371097 - DNA, 557 bp, Homo Sapiens
  misc_feature (420)..(428): n is a, c, g, or t
  misc_feature (474)..(510): n is a, c, g, or t
caaataataattatggaagtcacatacacgaaatcactgaataggcttaagttaaatggcattaggtagtaaacattttccagtttcaaaattactatttctttttcacttgataaattttagcttttaagatttttctggggaggaaaaaaagtctgtactcacatataaggacaaaaatcttcctacttctaaggctatagaaacatattgaggagattctgtgaagtaaagcagacagtatagaaatgcttcccatgtaaggattaggtaatataatggaaagaatacatacaagaatagaatgaaatggcagggagaaagaggaagagattaaaataaggaggactatgtgtggactggattgggtagaggcagagagatttaatgcttgaattccatacagactttgagaaatgnnnnnnnnnggagaccgctctcgacgaattcgagctcggccgatttggcctgatnnnnnnnnnnnnnnnnnnnnnnnnnnnnnnnnnnnnncgccgccccgcgtgaagctccattcgcctatagtgatgtatcattcc

SEQ ID NO: 371098 - DNA, 849 bp, Homo Sapiens
  misc_feature (52)..(52): n is a, c, g, or t
  misc_feature (58)..(90): n is a, c, g, or t
gggggatgataactcactatagggcgaatggaggcttctaccgcggggcggncgcatnnnnnnnnnnnnnnnnnnnnnnnnnnnnnnnnnatcaggccaaatcggccgagctcgaattcgtcgagtacgtcgctgtctttccactcgttgtacgccttgtagctttcggccttcttgtccttgtgggcgtacagcaggtcctggcgggtctccagcttgacgtggccgtcggtggtgccggaggcgaggttgtctgtgagctcgtcgcgatcgtcgagcaggccgcgaccgaaggaccacccggattcggttgcgcggtcctcgccggacgtcaggaacgatactgagaggttgtcgtgctcgatggtgtcgagcagggacgcgttgcgctcggcgtttcgcaccccgatgccgcgcagctcttcgcgtccgaacgcggtgaggttgccgtagccgccctcaccgggaccagtgagggcacggtttgcttgggtcatcgcttcgacctgggggatgaggcgctcgccgagctcagtgagttgaccgcgctttttcgcctcggcgagcatttgagccgccaggtcgtcgtacttgaagctggacaggccgcgcgaaccgtggcggttgacgctaccggtgtagatctgctggaagccggcgggtgccgcgctgtagctgtcgatcgtggcggcgggggagtacggctgcttcgttgagtagtaggtggtatctgccgcggcgccagtggcgcggctgcggcagcaagcgctgcggcacttaccgcagcgatgcggcgacgggatttaacggacacgggaagactcctaaaaacacaggtgagaaggggta

SEQ ID NO: 371099 - DNA, 691 bp, Homo Sapiens
  misc_feature (41)..(54): n is a, c, g, or t
atcaggccaaatcggccgagctcgaattcgtcgagagcggnnnnnnnnnnnnnntctacaagtgcatccttgacctctagctctaagttaacacgtctgtgggcaaagtcccactttgaattgtcctaacatctcaaattctaacaacctttgactttatctctcaagtatgatcctgggttaggattagccacaagggaaatctgtgaagataggaaaggcagaagtgaagcagcagccattacagtctgaaggtcagtctaggacactaggcacatctcacgcacattggctgctcatctgctgggctcaccctggtgcgaggagtagctaagtctagaagctcttgcagttccctactgaatattctggttcctggcaagtctggggtgagacgcaggtgcagcgcatggctcctataagcacctgcaccaggctactgcaggcacctgcctcattggaggtgtaagtgataagagacagatgctcagtctagtttatccccatgggatccagattctcttggggggctccagttgtgtccctgcccatgttcactctagcttttctggcctaatgggtaagcagtactggatttaacagaaatttcaagaccaataccagacacagagatgttagactcctttcatagaccttttcccatgctcacaatttcatgagacttaacccc

SEQ ID NO: 371100 - DNA, 633 bp, Homo Sapiens
  misc_feature (50)..(86): n is a, c, g, or t
agatgatacactcactatagggcgactggagcgtcacgcggggcggccgnnnnnnnnnnnnnnnnnnnnnnnnnnnnnnnnnnnnnatcaggccaaatcggccgagctcgaattcgtcgagagcggctgaaatatctcagaatggttaaaacatttaaaagcagactacccacaaaggaaatagaattaagcatctgaagagcaacacatgagtttccacaaaacttaagagaaaatgatttcaaatctagaatcttatactcagattaactattagttaaaggtgagggaaaatcatggcattttcaggtttatagtaatggctaatatttaatgaactcttactatgagccagttgtatctccatgctcgttgcaattattaacttatttattttatactcagaacagcccagctagttcggtactattattatcactggttttacaaatgaaaaaccagaagtatagagaagttgagaaacctgccaaagatcatgccactcgtagaaggcagagttgggttttgaatccaggaagtttggctgcagactctacactcttaactactacacaacagtgccactctgttggtcaggcactcagaaaatttatgtcccatgtagcctctttg

SEQ ID NO: 371101 - DNA, 455 bp, Homo Sapiens
atcaggccaaatcggccgagctcgaattcgtcgagagcgctcgggaaatgctcagattgatgtcttaccagcatttcttctgggcttgtgatgttgagctgtagtcttgtagccataatgagcaaattgactaagagaagcaaaggtttcttggggttattaaccagtagtgtggaaatactagttttatgtggccaaggaaaagcaaaggcttttcttttcagtttgtgttatttggaagacagaaaaacatcttgtctacatcctttggctgtttgtaggatcacgttgtccttacgatactgaaactttacagctgctgtaaattttttataaatgaatttcaaaatgttataatgggactgtaggttgtttttctacatcttcattatttggacctaaaaccagtttttaataagaaagtttatctttactctttctgaaattatgactcc

SEQ ID NO: 371102 - DNA, 1091 bp, Homo Sapiens
cctcgaagatcaggccttatggccggatccacgtcttctacagagttatcagggaataccagagcagagagagcatccaggaacctagatctgattactacaatcatgaagttcctgatattgacctcagtgattgtgaattccaacatgtcattgaaatttatgactctccccaagaatttcgtactgaagaccttctacgggttttctgcagttatcaaaagaaaggatttgatattaaatgggtggatgatacacatgccctaggagtattctccagtccaattacagctcgtgatgcgttgggtattaaacacaccatggtgaagattcgtcccttgtcacaggccacaagagcagccaaggccaaagctagagcttatgctgagttcctccagccagcaaaggagcgtcctgagacttcagcagccctagccagaaggttagtcatcagtgctcttggggttcgaagtaagcagagcaaaccgaacgagaagcagagctcaagaaactgcaagaagccagagagagaaagcggttggaagccaagcaacgggaagacatctgggaaggcagagaccagtctacagtttgaacatcactcaatgaaagggataattccatgaatcagaaaatgtttccatagccttcagataagatgatccttccagagctctatgtacatgcagatgtgcatgttaaagagataaagtgatcgagacaaggactgactgggtatagaaggaagacagactcctgtcttcactcctaaatgcagttctttggaatcaccctactgtggtgggcgtagtagggagccatcagctaggaagaaacgtgggagatgtgaattccaagagttgcccggacagggcaagtcatgttagcgtgggtcacacttccaagatatttaaagcaaatacaaaacagaacggaggattcaaccgccagtatgggagatttaggccctgcagaggcagaccattccttagtatctcacaaagcagagtaatactggaggcagagtagggggtggtttggagagcagttagtaacaggagtgctgacgttggtaccgagctcgattctat

SEQ ID NO: 371103 - DNA, 882 bp, Homo Sapiens
  misc_feature (735)..(735): n is a, c, g, or t
ccggaccaagaggctcgccaagagtgagtgtcttgggaggagccccaggacacaaccccgaccgcaggacgaagatggtatcgatacacagcctctctgagctggagcgtctgaagctgcaagagactgcttaccacgaactcgtggccagacatttcctctccgaattcaaacctgacagagctctgcctattgaccgtccgaacaccttggataagtggtttctgattttgagaggacagcagagggctgtatcacacaagacatttggcattagcctggaagaggtcctggtgaacgagtttacacgccgcaagcatcttgaactgacagccacgatgcaggttgaagaagcgaccggtcaggctgcgggccgtcgtcggggaaacgtggtgcgaagggtgtttggccgcatccggcgctttttcagtcgcaggcggaatgagcccaccttgccccgggagttcactcgccgtgggcgtcgaggtgcagtgtctgtggatagtctggctgagctggaagacggagccctgctgctgcagaccctgcagttttcaaaaatttcctttccaattggccaacgacttctgggatccaaaaggaagatgagtctcaatccgattgcgaaacaaatcccccaggttgttgaggcttgctgccaattcattgaaaaacatggcttaagcgcagtgggggatttttacccttgaatactccgtgcagcgagtgcgtcantccgtgaagaatttgatcaaggtctggatgtagtgctggatgacaatcagaatgtgcatgatgtggctgcactcctcaaggagtttttgccgtgacatgaaggattctctgctgccagatgatctgtacatgtcattcctcctgaca

SEQ ID NO: 371104 - DNA, 658 bp, Homo Sapiens
tgataggcgtattacttcgtatatcatatattatagcgaagttatggatcaggccaaatacgggcgagctcgaattcgtagagagcgtgagagggagccgggccgacgtcgctgccgcctggtgctccccgggtccctgcgcccgtatggtggcatgagggacccgtgggaaaggccccagaagatccttccccctgtggagttgggcgtgttggcgtgggtaggaggcgaggtcccggcccccacgtccccccacaggcactccagtgcgatgtctcggtggaggaggacgaccgccaggagtggacgttcacgctctatgactttgacaactgcgggaaggtcaccagggaggacatgtccagcctcatgcacaccatctatgaggtcgtggatgcctcggtcaaccactcctcgggcagcagcaagaccctccgtgtgaagctaaccgtcagccctgagccctccagcaagaggaaggagggtcctcctgctggccaggaccgggagcccacccgttgcaggatggagggtgaacatggcacgaggagccaacggtggctgacaggaggcttgtctagcacacagtcaggcgtccactctccttcctgctctgcgaggaggtagaggtgctggtccggatgcaccccggaccaca

SEQ ID NO: 371105 - DNA, 826 bp, Homo Sapiens
atcaggccaaatcggccgagctcgaattcgtcgagagcggaaggcgattgtcatatgatagctaagaagtggcacattaatgaagcgccgctacaggggtcttttctgctcctgtcaccgcttaaaactatcagatggttcgagggaggacatggaggcagccacctagctcagcggagacgcggagcccacagcagcgccctccggagccctaacacgtcgctgccaccatccgcgccgggactccgcagccgagctcggccgcccgcaggacgctccaggagcgtcgcggaccgggcggcacgggacgctgcggggctgacctcaagagccgaggttcgcgccgagtccaaccggacccggacgctgcgcgcggagtgcgcgtcgagtgcgcgccgagagagaagcggcgcgcagcggcgtcctccgggatgcggacgcgcaacttgaagcaactttaagcagagaatgtggatttaaatgggataaagcaacaaagtcgacttagggtcagaaagcccatcggggaccttccacttcctttgcaagcagagataactggctacagtcagcctccccaggacctgatgccaatggataactgcaagatcagaaggagatggttcttgccatgttgtgctggctggactcgaactcctggattcaagcaatcctcctgcggactcagatgatccttctgcctcagcttcctgagtagctggggtaaagcttataaaataacatcattattgccaaaacctaagattggatgcaagatatttttggacccttgcattctgcctaccaactgactccaacccagacc

SEQ ID NO: 371106 - DNA, 799 bp, Homo Sapiens
  misc_feature (105)..(126): n is a, c, g, or t
  misc_feature (755)..(755): n is a, c, g, or t
gtggtatcaaacctgttcagagggggttacaaagtataatgaatgttgttttgcgatttcccataagcaaggaaaatgctaatatataaatggagtctggtggtnnnnnnnnnnnnnnnnnnnnnnccacatcatctctatttcctgataagagactgtagtgttttatccatcctgataagacaggtagtaactcagtctgagatatattatacataaaacgtatcttctcctacctaatacattttatggtgaccatttagaatttacaaatgactaacagagggaaggtagaaagagactgcaattaaaagtcttccaatttaaggtaaattaacctccaaaacctctaccagcaactaacatgcttgttaatttagtgcagtctaatgccatggtttttaagagaaagggaataatcaagtcagcaaatgaaagccagtagcaccatctactgctaattaaaatattttcactctttttgttattaatttctctctaccaccactactccatcaattaaagtaattccaaaacattgcttcgtatcaacatttaaccaaaaaaagcattgtgtgtgacaataatactatgttaacttactactttatattttatgggatgcttttatcaaaggataagaaaaccaactgttgctttatagctacgtattaatatagagagcaagggggaaaataattatcttggttactcaaccgctctcgacgattcgagctcggccgatttggcctatnccataacttcgtataatgtatgtactcgaagtatcgccgcaccc

SEQ ID NO: 371107 - DNA, 759 bp, Homo Sapiens
  misc_feature (371)..(371): n is a, c, g, or t
agcggagcgtggctcggtgacgtcctcccaagatggcggagacagagtgaagaaactgtgttccccccttggggttgctatcgatcaagggtaaaattccattctgatatcaaaatgcagtattcgcaccactgtgagcaccttttagagagactgaacaaacagcgggaagcaggttttctctgtgactgtaccatagtgattggggaattccagtttaaagctcataggaatgtgctggcctcctttagtgagtattttggtgcgatctacagaagcacttctgagaacaatgtctttcttgatcagagtcaggtgaaggctgatggatttcagaaactgttggagtttatatacacaggaactttaanatcttggacagttggacatgttacaacgaaagttcatcaggctgctgactatctcaaagtggaacgaggtggtcactaaatgcaaaataaagatgggcacagattttgcttttattgctaatccttcttctacagagatatctagtattactggaaacattgaacttgaatcaacagacttgtcttcttactctgcgagattataataatcgagagcaaatcagaagtatctacagattcgcattcaggcaatatcctaaacaaaggcgcgttagcgaaaaagtcatctcaaaccgacacacgaagacagaaggcgtttcaacttcccccgaaaaacaggggcagcaataaaacaggtgcaatatcccagtggacatcttagagaatg

SEQ ID NO: 371108 - DNA, 988 bp, Homo Sapiens
ccattccttttgtgttttggtgacatatatcctcaaacaaggtatatcaaatggaatttttggatgtacaccgggacatttcaaagttccattttggaattctcctagtcttaagtaagtagaacatgtctcctttgtttgctaggcataacgttttccccaacatctagggctccatgatgcaaaatatcatttgccgatcttctgttccagtatttactttaatgtttttttagttataattggattttcaaatacaatcacaaaaacatctcctgttgaaggtggtttcccccaaaagtactcatcaacactactgtaagccttgcttgcttcataattttcaaacacattcatgttggtgtacagacttgcaggggggttatcaggaatgtcaaatgactcctcttcaaaatcatcatccttcagcttattctccgtccctttgtatgatgaataatagcccatgtgctgaaagagagatggtttaaaacggatcacatttttctgagccaacagaccacggaaatgagtcaatagccaatcacaaggcatttcttgataaaacattaataaaaaatgggccaaacgtgggagatcatgagaatgatagagtttaccaatgtagccaagcttagagaattcaagagttacccagtaagttccttctagggatgcaatgactttcttgatggcagttaagaaattttttgaacatcgaacatcatcttcaagcattacataatagtctgaagtattggcacaaaaattaagcagaaaagcataatctacattttgcttggaacgaaatttgactctatcttctggatcattgtaatttcttttaaggccatctaggattgggtaatactcctctggagcatgtataacccttaatcttccgtgcaataatatggtgcgcgaatttccgtgtaatatccctggaccatggtatcacgccaggaagtaattacagtctgcgactgac

SEQ ID NO: 371109 - DNA, 1038 bp, Homo Sapiens
  misc_feature (11)..(11): n is a, c, g, or t
  misc_feature (24)..(24): n is a, c, g, or t
  misc_feature (38)..(38): n is a, c, g, or t
  misc_feature (71)..(71): n is a, c, g, or t
  misc_feature (89)..(89): n is a, c, g, or t
  misc_feature (119)..(119): n is a, c, g, or t
aaactcccccnaggcaatcctcangttccctccaatangaaaccccatttctgggccaaaaaatttcctangttaccccaatttccccnggaaccccattttattttccaatgaggaangttccctaggaatcctgtgtccctaagtagtaatcctgctcatgcctattcccaaacataaacctcattatcctgagggatctttgctatttggttgcttagtctttcctaaatagtcaaagaaggaaatcctttgtatttcatttttggctttgaataatttttactcattatatcatttatcatagcataacagcgtacattccaaaaaggaaggcccaacataaactgagaaattgaatagatacatccataatccctttctattctaatccatacacaaatattttatcataatggttttagaagtgaatattatttctatattcttttcccacacttttcactatatatcatagacactttcctaaaatttataaaatcttcacatgtaacaacagcaagtgctgtaaggaacagattacaagctatctaattggaagatcatgtagtaaaatgatgcactaaaatatggttttccagcctaagttctaaacactacagcaacctttaaattttctcaataagcccactagtgttagcattccatttactctttatggaaaaagaggtctaacactggcagttggctttggcatatgattttctctgattcaggtctgagtgctttctgcaaggaaaagtgccagtatttattattttcataggaatatgtcataagaatcaagtttaacattgtatatggaattgccaggttgaaaagtcgttcatagactttccccctttcttttccagaacaaatttgagacacacaattaacagagggctggaagttttcccacatatattgtttttatagtagttcttccaactacatgtactaccttaaaataaattttttaaaagaatgaaataaaaaggaagaaatcccagctgatttacaaactagttacccgct

SEQ ID NO: 371110 - DNA, 834 bp, Homo Sapiens
  misc_feature (371)..(394): n is a, c, g, or t
tggaaaatagatccgagttaacggattaagggctaactgctatctgctaaaaattagatgtgcgacgataaattaatgctcacaatatcgaaaattctgaatgatgctaaacttagttgcaaggattccaaatttttaaggtaccagttacgaaaataaatggattaagagttaatagagcaatttgtccaaaatactctaaatcaaatattacaaaaggtcaactgaaaagaataggcctccttttatactttttgtgccaacttttggtcaaaagcctatatacattcagtttgcccaaatccatgaggttttcacaattgtaaaatttcttacatttttggaaattagaggcagcagattagtttcannnnnnnnnnnnnnnnnnnnnnnncaatcatccactgaaactattacttcaccagaattatacttacgcattctcccagacttagcttaagattaaatgacaggatgtagtacctggcacatagtaagcattcattaatgctagctttctgtctttccctactagtagctctgccacctactgaccatgtgagcttaaatgagtccttgttatcttaacctcaaattctttataaagtgggaatatagcttgtttttactatttcagggctggttatgaggttcaaatgagataacatatatgaaagcattttataaaacagtaaatcactactcaagtttaagttatctacaatagtaactaaatacaattatattattatatttcactttactaagagatgtattccaaaaaagttctgtgtaaaccaattcctacaattaaataatatatttaaagccgct

SEQ ID NO: 371111 - DNA, 794 bp, Homo Sapiens
cataatctggcctgtttaaattgcagcccaaaaagtaataagttcagaaaaggtaccactttcgatacacccagataatggaaagttttgtttatttattgccaatcaccggtgaacagctcgaaattccattgttctacaatcacagacccaaagccaatgggaatcctgcttgttcggcccagttgcagcatgtctcgccacccatttttccagctcatttagcaagtgtgtcaactccattgttgtcctcaatggaaagtgtcataaatccaaatataacttctcaggataaaaatgaacaaggtggtatgttatgttcccaaatggaaaatttacctagtactgccttgccagcacaaatggaagatctaaccaaaacagttctgcctttgaatattgacagtggctcagatcctttccttcctttacctgcagaaagtagttcaatgtctctcttcccttcaccagcagatagtgggactaattctgttttttcccaactggaaaataatacaaatcattattcctcacagattgaaggaaacactaattcctcctttctaaaggggggtaatggtgaaaatgcagtttttccttcacaagtgaatgttgcaaataacttcagtagcaccaatgcccaacagtctgcacctgaaaaagttaaaaaagaccgtgggcggggcccaaatgggaaggaaagaaaacctaagcacaacaaaagggctaaatggcctgcaattatcagagatgggaaatttatctgtagcaggtgttacagggcttttaccgct

SEQ ID NO: 371112 - DNA, 992 bp, Homo Sapiens
  misc_feature (752)..(809): n is a, c, g, or t
gtaccccacgtggaaggcatttccctgccagctccttccttctcacttatgtgaacaggagggaagatgccggcgatccatggatctgtgggacatgaaggacgtgtccatcagaaatgaaagcagcctgggattggaagcatccacagaagacttgatctgcaggtcttgatttggacctggcactttgacaccaggcgagtcactgatcccctgagcatccattttcaatattggtgagaggggattataatgaatattggctgtgaaggtcacacaagaccgggctatatgcacttgctctgccataaggcagtgtgaagtgtgttcgtgatcacttgtgggcgggagcctgtggctgtcttgcctggactggcttttttaaacatggatgagtggtgacaaatcctgcggccgtgtgcaggctacatcagcagcgagctccgcatatctggtctttgcctttttaggtcatgactgtaatatcaagcttacacgagagttttaaaagactgagcagtatccccttcccctggcagctgctgcttccgtagcatttagggataaacctgcagacactgagaagagagcttcctccctcctggggctggtggcgaggctgctgttgtggaaaatagggcatgtctcctgtgaatgcgaaatgcgagggttgccaaagcctcccttccaagaaaacttgcttaggtgtctgggtgtccacagaccagactcttctccgacagggaccacannnnnnnnnnnnnnnnnnnnnnnnnnnnnnnnnnnnnnnnnnnnnnnnnnnnnnnnnnctccttcttaggtattgtggccccccaaaaaactaagcaagattacttgggacaaggcagtcctaactgggaagcctgagctacaggctgttggattactttccaattgtggttcacaggtgtttgaactttcccagggcagtgatcctttaatcagccaaagtccttcggtcctgctgtccc

SEQ ID NO: 371113 - DNA, 664 bp, Homo Sapiens
  misc_feature (451)..(511): n is a, c, g, or t
  misc_feature (529)..(529): n is a, c, g, or t
  misc_feature (562)..(562): n is a, c, g, or t
  misc_feature (572)..(572): n is a, c, g, or t
  misc_feature (593)..(593): n is a, c, g, or t
  misc_feature (613)..(613): n is a, c, g, or t
  misc_feature (626)..(626): n is a, c, g, or t
  misc_feature (630)..(630): n is a, c, g, or t
gcagtgtgaagtgtgttcgtgatcacttgtgggcgggagcctgtggctgtcttgcctggactggcttttttaaacatggatgagtggtgacaaatcctgcggccgtgtgcaggctacatccgcagcgagctccgcatatctggtctttgcctttttaggtcatgactgtaatatcaagcttacacgagagttttaaaagactgagcagtatccccttcccctggcagctgctgcttccgtagcatttagggataaacctgcagacactgagaagagagcttcctccctcctggggctggtggcgaggctgcctgttgtggaaaatagggcatgtctcctgtgaatgcgaattgcgagggttgccaaagcctcccttccaagaaacttgcttaggtgtctggtgtccacagaccagactcttctcccgacagggacaaaaattcttgcctgnnnnnnnnnnnnnnnnnnnnnnnnnnnnnnnnnnnnnnnnnnnnnnnnnnnnnnnnnnnnnaggtatgatgccccccanaaaactaagcaagattaacttgggacaggcagntctaactggnaagcctgagctcacaggctgnttggattactttccaattgngcttcaaagatgnttanacttttcccaaggccagctgaatccttataatca

SEQ ID NO: 371114 - DNA, 296 bp, Homo Sapiens
ccttttacttattcttgccttttttcttcttcttcttctttaggtatgatgccccccaaaaaactaagcaagattaacttgggacaggcagttctaactgggaagcctgagctcacaggctgtttggattactttccaattgtgtttcaaagatgtttagacttttcccaaggccagctgaatccttataatcagcccaaaagttcctttctgtttctgtctgtcccctttgagggtgttgactcagagaacctggggcaatatgagatgttaaaataaaaatagcgtccaacgtc

SEQ ID NO: 371115 - DNA, 845 bp, Homo Sapiens
agcggtctgaaatttccactgtatctgtaaaagtggcaggttctctagaaggaaattttgtgtcccaggtgtaagccaaaaagtatcatgtgaaactgttgtaagtattcagcttcataaatggaaacctaacatatatgtgactggacacctgtgtattttagttgctgttaaatggtacacactgtgtgaagaaactaggaattaaggggatgttgatcttgcctctgaacctttttaaggcctaaatgggaataaggagtaataatactttgagtacaattgctgttttcattacattcctagaaggttcaatatcctctgggtgatacagttattttctcagagaaactaagtaactgtgaaggttatttatttttgtcagaccaagagttttctctcttcatggttaactcataaaagtggttcttgttatttgtaggtattgatgtcaagaaaggccgaggtcgatacattgatacctgcatggtcatctttgccccccgttacctgttagataataaatcatctcacaagcttgcatttgcacagagggaatttgccaggggacaggtgagcagtttgcttttgaaggatgagagtgcctatttaatagcacgagttttaatgtcatcttctgtgaagactgtacgttctgtgatgcaagtaactgctctgtgcctttggtacccagatagctcctgttagagggtaaggtcagagtagtactcagtaacacttatttgtcatgaatcgacttgttgactaaagcctgtgaacctatgtgttaagggaaccaggcatcccgaaggtttactttccacccttccggttccagtgtggtg

SEQ ID NO: 371116 - DNA, 852 bp, Homo Sapiens
agcgggtgttcgcaagaggcgaactcagtttcccaggtggcgctgcggcagccagatccaatagtcggactttcaaaaccaacccgaagttttgaacccggcggcggcagttgtcactggcacaggtttggcgtggtggcgccagtgtactacttctggggaggtctcaaccaggttctggcaccttcaatccccacctgatatctgcgtatcatcacggtatcccgcttttcccccagttccccaagagcgtccttcctttccatagtcacaggatcgcagttttggtctgatagtgcatccacctaccccagtgttgcatccccacttccctctttccatctaacgtggtggcctttcctggggataccttgggtatcccccgctaggagagcaagcacaagacaccagggagccagacccctgccgatcccctgccacaggatatgaatacgagcctcagctggtttgagcagctggatgtgcttctcaacgctactgatggaacatgtggtccggaataagcagtggctgtatcctcttggggtctccacagagctcattggcctgtgcatctgtttcttctgtagcagtggctgtatcttcttggggtctccaccgcagaatagcactgctgtcactcctgcagtgctgtgggacggagtcagagattatgcagaaggaattgaagttgctgcagtaccagttgagccagcaccaggagctgctgctgaaacagctggctgagggacgacaggctcaggttggcagttggaaggatctccattcatgttgtccaatctaagcttgccttctgccactaccttcaccaaggtctgtttccttcatcca

SEQ ID NO: 371117 - DNA, 699 bp, Homo Sapiens
agcgggggggctccccagcgtcgccctaggctgggactctagtaggtcttcggctcagttttggctgcagcgcccgcgtagatcgcttcggccgggttctacgcccggctcaactatgagccggtgcgcccaggcggcggaagtggcggccacagtgccaggtgccggcgtcgggaacgtggggctgcggccgcccatggtgccccgtcaggcgtccttcttcccgccgccggtgccgaaccccttcgtgcagcagacgcagatcggctccgcgaggcgggtccagattgtccttcttgggattatcttgcttccaattcgtgtcttactggttgcgttaattttattacttgcatggccatttgctgcaatttcaacagtatgctgtcctgaaaagctgacccacccaataactggttggaggaggaaaattactcaaacagctttgaaatttctgggtcgtgctatgttcttttcaatgggatttatagttgctgtaaaaggaaagattgcaagtcctttggaagcaccagtatttgttgctgcccctcattcaacattctttgatggaattgcctgtgttgtagctgggttaccttctatagtatctcgaacatgacgaatgcacaagtccctctgattggcaagactgttacgggctgtgcaaccagtttggtgttccgtgtagatcggattccg

SEQ ID NO: 371118 - DNA, 713 bp, Homo Sapiens
agcggatgaaaaaacacattgcaaagatgtttttcagaatgttcctatctagtatttatgtgaagatatttccttttccaccataggcatcaaagtgctccaaatgtccacttgcaacttctactaaaggagggtttcaaaactactcaatcaaaagaatgttttaactctgtgagatgaatgcacacatcataaagaagtatctcagattgtttctttctagattttatgtgaaaatatttccttttctaacttaggctgcaaagtcctccaaatgtccacttgcagattctacaaaaagagtgtttccaaactgctcaatcaaaagaaacattcacctctgtgagatgaacgcacacatcacaaagatgtttctcagagttcttctatctagtttttatgtgaagatatttccttttccaccattgtcctcaaagcactccaaatgtccacttgcagactctacaaaaagagagtttcaaaagtgctcaatcaaatcaaaggtttaactctgtgaggtgaatgctcacgtcacaaagaagtttctcagattgcttctgtctagattttatgtgacaatatttccttgtctaccatagtccgcagagaacacaaaaatgtcctcttgcagattctactaaaagagtctttccaaactgttcaagcaaaggaaaggttaaactatgtgagatgaatgctcacatcactaagaa

SEQ ID NO: 371119 - DNA, 525 bp, Homo Sapiens
agcgggaaggtcttcttaagcaccaatataagcaccttaaatgatacatagaaaagaatgacataacgtttgtggtcttgttctcttaaatatgaatatagctagttagcctaaaatttacacaaaatgtattcaagatcaaattagtgaacaaagcaatggttcatatggctaatttaaaagcaattcaatttaccaatattaaaataattataaaatgtaaaagaaatttcagaggagttgattgaaaattttttgttcagtaattattcttaaactgcattcttaggtttattacaataagaaatagtaagccaggattggccatgggcaaggtgaactggtcttcggtgggagagatatgagttagagatcaaggagtaggcagtcatcatttgtaactattgtgtgtctggctatacagaaaatgtttctggaaaaattccttaagtgtcatctgagtatagagagtaagagactggaggccagacgcgaggaggctcacgcctgtaaaaacccagcact

SEQ ID NO: 371120 - DNA, 893 bp, Homo Sapiens
agcggatattaataccaccgctaataatgacagtagcagtcgagggaggagcaagcatgctaatattagccacacctgttgagggcccggcacacgccaggcccttacatatgtgatgatgtcagtcctcgtgatgagctgcactcagcatctccacgttgactgcgagggaccgctggatcccagagccaggacagaactcaaggctattttggttgggaagaaaagaggtgttcagctgacctcaagtacgggagggttgagtgaaacgagcatcattgtgggaacctgggtgaatcaaagcagtgggttgcagacagagctgggactgcagtgtggagctccagggagccagaggcaccctgtgcatctgccacaagtccctgaagctgcagtcctggcatcatccccaggtacctccgtctccgctgcttctctgcttcttcctgttgcacgccgtctcctgcattcatttcttcctgtgtatctggcctggacctcagcccctgctccttatagacgtggctgctctgcggccctaactcctccctggcttccctccagggcctccttacaggccctctccctcggctgccctgccccagttcaccgtgcataagccctgttgctcccctcaatccctgccgattcccacaccaccgttttgcctctgagattgggttgcccactagtcaggtcccgcccttcatccaatcagctgtggtggggcgggacacttcctccagccgttcctcaaggcctggcctcaaggacccctgtcaacattctgaaaagttcgttgacgacccgaaaagaagcttggtttagggcaacatcattgtgtaaactatctccggatattaccacctttaaaattaaacttgagaaatggc

SEQ ID NO: 371121 - DNA, 778 bp, Homo Sapiens
agcggatctgggtttgaaattggccaagtattggaagccttttcatagaaaagctccaccaagcagcattttatgtggaacagagaagccagaagtatacattgaaccttgtaattctgtcattgttcagattaaagcagcagagatcgtacccagtgatatgtataaaactggctgcaccttgcgttttccacgaattgaaaagataagagatgacaaggagtggcatgagtgcatgaccctggacgacctagaacaacttagggggaaggcatctggtaagctcgcatctaaacacctttatataggtggtgatgatgaaccacaagaaaaaaagcggaaagctgccccaaagatgaagaaagttattggaattattgagcacttaaaagcacctaaccttactaacgttaacaaaatttctaatatatttgaagatgtagagttttgtgttatgagtggaacagatagccagccaaagcctgacctggagaacagaattgcagaatttggtggttatatagtacaaaatccaggcccagacacgtactgtgtaattgcagggtctgagaacatcagagtgaaaaacataattttgtcaaataaacatgatgttgtcaagcctgcatggcttttagaatgttttaagaccaaacagctttgtaccatgggcagcctcgctttatgattcatatgtgccccatcaacaaagaacatttcgccgtgaatatgattgctatggtgataactaattcattggaaccgattggaacccacg

SEQ ID NO: 371122 - DNA, 946 bp, Homo Sapiens
gttattcccggtttccccgtctcacgcggtgtccgcgggcctcggggccctggtcgattgaaatatcaggccgtcacgcttccttgaagttcgagatgatcggcgtctcgatgatttcgcccgacggcttgcccatcagccgcgcatgccggcgagctgcttgatctgcgcctgcgaaccgcgggcacccgagtgggccatccatgtagatcgagttgatgtccttctcgcggcccttcatcggccccgtcctcatagtgacggacggcctcgatctcgttcatcatcgagttcgcgacctggtcgccgcaacggctccaggcgtcgatcaccttgttgtatttctcctgctgcgtgatcaggccgtcctgatactgctgctcgaagtccttcacctgatcgcgcgtctcgtcgaccagcttgtccttgtccggcgcgatgatcatgtcgtccttgccgaacgagatgccggcgcggaacgcgtgacggaagcccagcgccatgatcgcgtcggcgaacagcacggtctccttctggccggtgtgacgatagacctcgtcgatcacgtcgccgacgtccttcttggtgagaaggcggttgacggtctcgaacggcaccttgtggctgtgcggcagggtttcaacccaagcagcatgcggcccggcgtcgtctcgtagcgcttgaggtactgcttgccgttctcatcggtctgcggaacgcggctgatgatcttggtgtgcagcgtcaccgcacccgcgttgagcgcctgatgcacctcggccatgtcgccgagcagcatgccttcgcccggctcgccttccttcatcatcgacagataatagaggcccagcaccatgtcctgcgacggcacgatgatcggcttgccgttggcgggcgacaggatgttgttggtcgacatcatcaggacgcgcgcttccagctgtgc

SEQ ID NO: 371123 - DNA, 741 bp, Homo Sapiens
  misc_feature (284)..(284): n is a, c, g, or t
gagcggatgatttgtgcagccagtcttagaggaaatacatcattttaacattattcccacaaaatgttaaagctcaatggttgactatgagagtcaaacaattactatttgaaaatctcttatgacatttttataatctactctgtttttatttgcatgattatgcttatgtgatgaaccatccatgattctgatattgtatttctttccagtattaaccatgtgtattgtgtggcccaactctgatttgtacacccgtattaatgttgtaatgattcaactgntccctacatttaattgcagtttaattattatgcccttttggggttaaatgatgtgaagtgtttccacctactgataaataccatatgaaaacacgactaaaagactgatttaagaaacttgttatttttaaaaatatgaatttcaaaagaaatgttctcaaagacacatgcatttattttaaattcaaaaaattcttatgaatttattattgcttgtactttaactttttttattgtagacaatcctaagtgaataatgtctcatgggagaacacatgatatgtgcttgtatttgtgtaatctgatcatgcactcaatggttggaaaaggcactccagtgctaagaaaataaccagaagccaatatatcgattcttatatctcggtttatgttaccaacttgaatatggtgtaatgcataactttttccagtaaattaactgggttatttttggttc

SEQ ID NO: 371124 - DNA, 981 bp, Homo Sapiens
cctgttgctgcgcgaggcttaaggtttctgtcatgcaagatcgtcaattcagtttcgaattcttcccgcccaagacggcggaaggcgccgagaagctgcgcaacacgcgcgcgcagctttcgccgctcaagccgcgcttcatctccgtgacgttcggcgcgggcggcaccacgcaacagggcacgctcgacgccgtggtggaaatccagcgcgaaggcatcgaggcggcgccgcacctgtcgtgcgtggggtcgtcgcgcgagagcatccgcggcattctcaatacgtatcgcgaacacggcatccgccgcatcgtcgcgctgcgcggcgacatgccctctggcatgggcgagatcggtgaattccgcttcgccaacgagctggtcgagttcatccgccaggaaaccggcgaggcattccacatcgaggtggcggcgtatccggaataccacccgcagtcgcgctccgcccggcacgatctcgaaaacttcgcccgcaaggtgaaggccggtgcggactccgccatcacgcaatacttcttcaacgccgacgcgtatttccagtttgtcgacgacgcacgcaagctcggcgtggacgtgcccatcgtgcccggcatcatgccgatcacgaattcgtcgcagctgatgcgcttttccgagatgtgcggtgcggaagtgccgcgctggatcgccaagcgccttgaaggctttggcgacgaccgtgaatcgatccgcgcgttcggctggacgtggtgacggccatgtgcgaccgctgctgcaggcgggcgccgggcctgccatttctacacgctccattgccggccgctctacgcgagcgatctggcagcggtctgggcttgtaaacgctgattgcggcaaggcgcagggggatcgtcctgggcggccgaccccgatccgctgattcgcctgggtgcttgacgaacctcccggtcgttcgcgccaaatcttggaaatccgggcc

SEQ ID NO: 371125 - DNA, 760 bp, Homo Sapiens
  misc_feature (86)..(94): n is a, c, g, or t
cgccgccgccgcctctattgctgatactctagtggggctggaagggtggttcctattcgcaccatcgccaaccagagacagagggnnnnnnnnnccggcagccactgctgatgttgggttcggaggctgcatccgactcggtcacaaggaaaatggattcagtttgcatctctccctcctttaaacagcttctccgggtctcagcatgggcttccagggcagcgattgaggagaccttaccaaggagcaccacacagtagatgctgagacatcgtactccaggataagaaacagtaacatggcagcacctgcttgaaagaaattaaaaaccaacagactccatttagaaaggaacaatgtccaagaaagggcgaaataagggcgagaagcccgaggcactcattgttgcccttcaagctgccaatgaagacctcaggaccaagctcacagacattcagatagagctgcatcaagagaagtccaaggtatcaaagcttgaaagagagaagactcaagaagcgaagaggattcgtgagctggagcagcgcaagcacacggtgctggtgacagaactcaaagccaagctccatgaggagaagatgaaggagctgcaggctgtgagggagaaccttatcaagcagcacgagcaggaaatgtcaaggacggtgaaggtacgtgatggagagatccagaggctcaagtctgctctctgtgctctcccggaggcagcagtgacaaaaggtaggacagcgctcaccat

SEQ ID NO: 371126 - DNA, 468 bp, Homo Sapiens
ctggtggggcatggcagtcccatctggcattctttcaatgatggtccttcccgatcgagggccagtgtggttccacttgcaggttatttggttgcaacgcacagcacaggcgcttgtgggccttaaatttgcacacctcgcaggacagcccgtgcgacgtgaccccagacagagcctcacggcacacattgcagtacggtcggcctcgcgtgggaacaggcgtaccaattgtgcatccctgagaagtggtccatgctgtactgggtgggctcaaagtgctccctgttctgcacagtctttaatgctgcaatccaatcttccatttcttttctgttatcagcacacaagatgagcttcctgcatggagttatgaccttctgtcggatctgacccgaacgtggaccaccttgtggatgagcttctgtggggagccgggctccgcctcgggctcgctgtcggacgactcct

SEQ ID NO: 371127 - DNA, 393 bp, Homo Sapiens
tcatagcaggatacccgcacgattggtacgcctgttcccacgcgaggccgacctactgcaatttgtgccgtgaggctctgtctggggtcacgtcgcacgggctgtcctgcgaggtgtgcaaatttaaggcccacaagcgctgtgctgtgcgtgcaaccaataactgcaagtggaccacactggcctcgatcgggaaggacatcattgaagatgcagatgggattgcaatgccccaccagtggttggaaggaaacctacctgtgagacgccaagtgcactgtgtgcgacaagacctgtggcggtgtgctgcgcctgcaggactggcgctgcctctggtgcaaggccatggttcaaacatcgtgtaaagaatgccttgctgtcagtgcccacttg

SEQ ID NO: 371128 - DNA, 770 bp, Homo Sapiens
agcggcgctccgctcccgcgcggttgggagtgtccagcgccctccgcgatttgggctccagcgggcagggtgacttcccttttctgcccactctggtaacttattgctctgctgggctctttcccttagggtctctggccctgttcttgccccagcatgacttttatcgggacgccgttgtggaagcctcacgcaggagccctgcccccgtggagaagatcccactggtgactccaaccctaccaccatgaatggggtcctgatcccccatacgcccatcgcagtggacttctggagcctgcgccgggctggcaccgcacgtctcttcttcttgtctcacatgcactcggaccacaccgtgggcctgtctagcacctgggcccggcccctctactgctccccaattacagcccacctcttgcatcgtcacctacaggtatctaagcaatggatccaagccatggaggttggtgagagccatgtattacacctagatgaaattggacaagagaccatgaccgtaaccctcctcgatgccaatcactgtcctggttctgtcatgtttctctttgaaggatattttggaaccatcctctacacaggtgattttcgatacacaccatccatgctaaaggagccagccctgacactgggggaaaacagatccatactttatacctagacaacaccaattgcaatccagccctggttcttccttcccgacaagaagcttgccaccagattgtcccagctcattcgaaagaagccaa

SEQ ID NO: 371129 - DNA, 1042 bp, Homo Sapiens
  misc_feature (167)..(187): n is a, c, g, or t
  misc_feature (400)..(563): n is a, c, g, or t
agcggataaatatatattaggtaggtagtcataacacatttgttttagacatttattcaatcatttgtcagtcttattaaatacctatcatgtgtcaagaaccaatgctaggttttgaatttaaaaatggaaagggctaaatagctacatgatcttggatgagagtnnnnnnnnnnnnnnnnnnnnntacatatatatatgtggtccttcataaatctaaaatgctgtaattattaggtaatctgcagagtgtattttttttcctcagtccctttgggtgtgactgctgtacacattttcatgttaccattgacatcttcagtttttcaatgtgatgtgtaatgcatataagcagcatatgtagtggttgaagagtacaggctgtctggagtggcacagnnnnnnnnnnnnnnnnnnnnnnnnnnnnnnnnnnnnnnnnnnnnnnnnnnnnnnnnnnnnnnnnnnnnnnnnnnnnnnnnnnnnnnnnnnnnnnnnnnnnnnnnnnnnnnnnnnnnnnnnnnnnnnnnnnnnnnnnnnnnnnnnnnnnnnnnnnnnnnnnnnnnagtatacatgtgtgaaaccaggaaacatactttttaaaagtatatcaggcagaagtgtaaggtagatcccttgtatacggtaaatgccaaaatactttaggtaagccttaaagtgggagtgtaataattctcactgggaagaatctgtaaccctgtgtttcataagaattgctgttaaatagtgagagaaaggaaacaaggaataaaagattaagaaaaatttagagaaaataagaaatgatatagatgtaagacaaatatatcgaaataatacgatagaacaacaagaacggaggatcatcacccagaaataattaatgacggtcaataaaaacaacccaccgactcgggacgagacacaaatctcaaactggcatgtacagacaaacatgaaaacgcgtaaacgaggcacataggagaagaacagaggaaagagcaaaagaaacaccacaaagcgacaagacaagccaaacaatgtc

SEQ ID NO: 371130 - DNA, 807 bp, Homo Sapiens
ttctcattctcttagaggatcctatttgcctcttcccgtactggaatatttcatgacccatccttctggcaaaaatttcctcctagcatttgtaactgacaaacctttccttgatagctgtcagttcctaatacactttctcttgcctgtttatgtctcaaatctaatgcttttgtttctcttttcctttgcgatttgttacagttgttttatgaaagtgcttcctataatatccagctaagatgtcttagaaaaaacagaggggtttatttgtgtgtgtattacacacacacacgcgtacaggaggttgagctaccaggaggccgtttttgctaacatagttagaaaactgatggaaaatgcattagtcctttttcaccctgtggacaaggaagctgagctactttgctacaatagcaggaaggcacttgggtaaaacattcagataactgaggaaagcccaaattccctcatgtacaaaaaacagctcctagccagtcctagccaggtcgagtgagaacaaatcactcaccacacactcttggcttttccccagtgaagtcaatattgctggagagaaaattctttaggtgaagctgctagtataaggaacttataataaggaacttattttgttcatgaggaagtatttagcatcccagaagttccatggtaggggtcaacctcttactggcattctgtttatttaaaagagaattttgctaaactctttgagcttagggtgggtgagggaaaggtcgttcattgtcagggaaaaataaatgctaggtatcgaccgacaccgct

SEQ ID NO: 371131 - DNA, 853 bp, Homo Sapiens
gagcggacccggacacaaggcgggcggcgactagtggcttcactggctgcctctcggcggtgcgcttcggccgcgctgctcccctgaaggcggcgctgcgccccagcggcccctcccgggtcaccgtccgcggcctacgtggcccctatggcccgctgcgcagcgggggcggcgtccggctccccggcgcgggaactggctccccgactcgcggggggcgcaggtcgttctggaccagcggatgagggagagcccttggttaatgcagacagaagagactctgctgtcatcggaggtgtgatagcagtggtgatatttattttgctttgcatcactgccatagccatacgcatctatcaacagagaaagttacgcaaagaaaatgagtcaaaagtctcaaaaaaagaagagtgctaggacagctctaaacagtgagctcgatgtgcaaaacgcagtccatgaaaaccagaaagagcgagtcttctgattggcagctgtggctgtctctatcatcgtgactgtggacttccctgctgttgccatcagggtgcacacaagcaggtgcagtgctgtcacctggctgaagacctgcagcctcggagcctctgggaggtccctttctccctcggtgaaacacagtcctccacatcaatttccaaacaatgaattaggtatggccattcatcactgttcagtagtttccccccgtccaaagggctctcttccaaaacttgcagtttgatcctgtgttaataattgtggggaaaaggatgcaaaaacatggctaataaagctgtgggcctacttaatttttaaaaatgacagaactttgttcagatgtaacagcacacaa

SEQ ID NO: 371132 - DNA, 649 bp, Homo Sapiens
agcggaaaagccagctcgcccggggcggcggcgcagagccgggccggcgcacgaggcagccagcgcggccatgacggcggagaaggcgctgcccctgggcaatgggaaggctgctgaggaggcgcgggagtccgaggcgccgggtggcggctgcagcagcgggggcgcggcgcccgcgcgccacccgcgcgtcaagcgcgacaaggcgggtccacgagcgcggccactggaacaacaaggtggagttcgtgctgagcgtggccggggagatcattgggctgggcaacgtgtggcgcttcccctacctgtgctacaagaacggaggaggggcattcctgattccctacgtggtgttttatatttgctgtggaattcctgttttttcccgtggagacagctctggggcagttcacaagtgaaggtggcattacgtgttggaggaaagtttgccctttatttgaaggcattggctatgcaacacaggtgattgaggcccatctggaatgtggtactacatcatcatcctggcattgggccatttttttaaccttgagcaacttgcttcactactggagcttaccctgggctaccctgtggggcatgagtggaaacacagagaaattgtgtgggagttcccagaaaacttgat

SEQ ID NO: 371133 - DNA, 722 bp, Homo Sapiens
atctcattggcattcccaagcaacggcccagcaatcttagtcatattagctgcatggcctttggggttagaaaggagctgagcttgggaggggaagataaaggataaaatcagagtgaataacacagaagaggtctagccagctgcctttcctgcttacaaggggccactggggccagagcaggccccctcccccggctgttgcgtccaggctgtttcccacactgtagacccccttcctcctttggtcctctctgcccttccctgggtctcccatttcagaccttgctgtgcttcccagtcccccacatggaactcagactccaatttccatcagtcaagggcttgcctcttcaggcacatgtcctcagctcccactaagaggtcctcagctttaggccagctcggcagactggggaaatggacgcctctgcactgacccagcaatgcttatccagatcagtgttcagggagcacctttctctctatgtcctgtggatgcagggtctgcctggtcaacggcaaaggtgtctttatgcatcttcgggaggttggcctgttacaggacagggaggacagagcagtgtcaaaatttattttccaaaccagacagcctgattctcttgctgatctgctgtagctgggttttcatttagttgtcctgtctctgaggtgtcctggagcaggaatcaggtctcccctctctctttgacatcatgactt

SEQ ID NO: 371134 - DNA, 905 bp, Homo Sapiens
  misc_feature (386)..(395): n is a, c, g, or t
  misc_feature (491)..(499): n is a, c, g, or t
agcggtatggattctaaggattctagcctgtctgaaccaatacaaaatttcacagattatttgtgtgtgtctgtttcagtatatttggattgggactctaagcagataatacctatgcttaaatgtaacagtcaaaagctgtctgcaagacttattctgaatttcatttcctgggattactgaattagttacagatgtggaattttatttgtttagttttaaaagactggcaaccaggtctaaggattagaaaactctaaagttctgacttcaatcaacggttagtgtgatactgccaaagaactgtatactgtgttaatatattgattatatttgtttttattcctttggaattagtttgtttggttcttgtaaaaaacttggannnnnnnnnncagtaactggtattatgttttctcttaaaataaggtaatgaatggcttgcccacaaatttaccttgactacgatatcatcgacatgacttctctcnnnnnnnnngaatgcttcatagttgtattttaattgtatatgtgaaagagtcatattttccaagttatattttctaagaagaagaatagatcataaatctgacaaggaaaaagttgcttacccaaaatctaagtgctcaatccctgagcctcagcaaaacagtccccctccgagggaaatcttatactttattgctcaactttaattacactgatttgataataacccacttttatttaaaacctaagggtgttttttcccgtaaaacttgacccatttattacctggcggggggatgccgtggtccaaattaatacctattttcaaggcttcggtggtattggaagtatcacccggctttggccctaaactctttaattgtacttttaatccggtgcaatttaaattccatttc

SEQ ID NO: 371135 - DNA, 716 bp, Homo Sapiens
aagtctctgcatatttggaggggaacaaaaatcactcacaagcaatccatgatctatacacataagcataatttcctttagttctagttagtcatcagagaacagtcatgtatgcaagttttgtgactgagaaatttctgtgcttccaatccacaatgagatgcatgattttgttttcatcccatttcccccaagcccctgtaaatcagggaaaatgcgcaactgatcgcctaggagagggcctcgtagtggcacagctgggagatagtttcaaagtctaaaccaccagcccatcctgagggaaagcctcctatgggaatgttaaagtgcaatcatttcttcagatataagactttccccaacaatgtgattggattcctttatggcaaaatcgagagaagctgccatccacctgcttatgcatttatctcttttgtggacttgtctgaccaccttctatttgcccagagtttgctcaattccaagacagtgcccatgaatgggacacctgtaatgtaacccacacagcggtttgcagagaatgttagccatgacttgggctttctgaaagttggctataatttctctatccctacccacaaccctgggaagttggagcaagaggggcatactattgggctgggaggatttgacagcatttccccagttgccctttaagttcttctatttcaaacgttaattttgcttctctttct

SEQ ID NO: 371136 - DNA, 898 bp, Homo Sapiens
  misc_feature (40)..(40): n is a, c, g, or t
  misc_feature (54)..(54): n is a, c, g, or t
  misc_feature (57)..(57): n is a, c, g, or t
ggatgctggcgagatagatgttatcttccagaggaagagngaggaggcggcgangtntttcccagcctcagtctctctttcgttttccttttcccttcccccaaccctccgcccttctctaaatcagccggccttccttgacctcagtgacccgtctggccccgccaccctcgtcgacgtgattcccgccggtgagtaagcgccggtggaacctagagccccgcggaagagcagaacgtttgggagtgtgcagctcctgggcccggctcaggcccgtcgcggaggcgcggcgcaggggagcgctcgggtgggagtctcgctcctccaccagtttattgctgacgtagcatccaggcctaggcctccccgtccatccccgccggactcgggcctctggcagcagcgggtgacgcagacaggaacatcatgtcgtccgcggacgaacctccgtacacccccgcctcccgagagcgcgccttccaaggcccgcagactcgatcgccaagcggcgggagcaacaagcaagctaacaaagggcggcccccgaagggcgtcagcggcgccaagggcggttgcgttctgcggccagcgctggttccctgctagaacgccccgaagaatggagggaacactaacttctgattgagtgcaggtcaccctttgggaataggcaaaacaaggggataaattcccacatgaaaacccaaggattccattaccgcgttaattgacaaagaaacagacagaattggcagagagcttgaacacggggagaccaacacaacagaaatctccagaaggtaatttaatttaaacacggccaggagcagacaaaacctttttattggcaacaagttttgcaattcaaaaccttgagttggctccatgaaagaacttc

SEQ ID NO: 371137 - DNA, 708 bp, Homo Sapiens
gtaataaatgtggtgtgtatttccagatagaaggtctgtgtgtaatagacagtaaggaaattgccagccccttttgcagcctgaaatatgctttccgttcgacatcaatgctgacagcactggtacattcagtccagcaaggcatattttggcctgataaggtagcaatgaggtaaatccagaataggcaacattctacgggacaagtgaacgccaattccttcagcaagtcaaaggtataaaaggtaggtggggcttatgataaaacatacgagccatgcccattctttgcttttcccctcctgacaggacatctttccagtccataacagcatcccatcctccttctctttgaactatgtgatagagatggacattgtgtaggatacgttccagatcttggtctgtataacctttatcatgcatatcatccactgaatcagggtaaatgacttgatcccgaagacttccaagagacatatatggcctttgtggaatataaaacatatgttgaggaggtggtttatagaggactccttcatacacaggccagagcccacttagaattctgaagagagaacttttcccacaaccattgggaccagttatcaaaagatgcattccttcttctactttgaagtttagcctggaagccaccacttctcctgctggtgtaattatgggaacattttcacaaataattccgct

SEQ ID NO: 371138 - DNA, 480 bp, Homo Sapiens
agcggtgatacggtgttcatgacattctaagtacaaagaacatttatataaagtactctgagagcaaatgttattagagtactttaaatacatttaaagcatgggttgcatatgttattatgcagctctgcttactaaaatagaatgtgattttatatatataaccaattgtggcagacactgttgccagctcacccgtttcccatgccccatcctcattcccttttcttcctgactaaagaggctagaagagctaaatgcatgttttcccaggcttcattgcagtagaggtggcactgtgacactgttctgcagataagatgtaaacagaagtcagctgggatggtttctgagggtgctatgcttttcctatcagagaggtttgttctagttactattgctgcatgaaaaactatccaaaacacgcatttactgtggcacaaaaggtcaattttattatacccttggatcctgtaggta

SEQ ID NO: 371139 - DNA, 711 bp, Homo Sapiens
agcggaaaaatcgtgcttgcaagatcgttcatatatttgagaatacaccttatgacctgcttgttctctgtactgtttttagtgactttgaaggtaaatccagagtatacttagaggatacaagcaagtaactatttctctagaagtgacattggtgatcactcatgctcaaagagaattgcatttcattgcttcctctttcagttcctgtgaacatgactttgtcccaatcaaaaaatgtaatttattttcaaatcactgggaaaatattggtctagatgagaatataagcctttttccctcctctataaatagaaaattaaacattaaggggaagaaccttatgtgctgtgaactaaggggtttaatttaaccttctgtatctgaggtctagagaaagagaaataatgacagtttacaactgtgtgccgagctgttgtgcttaaatgtgtttttgacagaggtggcagtgaaaactaggctatttttcttttttaaaaaatggtacaagcttttaattggtttatgtaaaagaaaataggcaagatatacttttaattctaacaatagttttagtagatactctgataggaaatataatattcctcggaaatgtagaagacataccctaaaaaaagttatgatttagtattttacgaatcgtcctagctactacaggcagattaagaactcttccgtaacttaaatctg

SEQ ID NO: 371140 - DNA, 731 bp, Homo Sapiens
ggtattcctgccatctctgaattcatggattagaacccggaaaatgagagcttgggctggattttatagttttgaacattattgcttcctacgtccaagtccaaagcatgattcagagggaactcagttcctagaggactgttttccgggtatttttagaatcatttccttttcagtgaacatgggagaatggtcatttatatctatcaccctcagttcagcctgaaatatttctaaagggttttccattaacacttggaaatgtagtatgcaaggctcagtgggaccgcatagctcctctcgatctagcttctcatttatgagcaaatccccagtttgagccttgagctgcaaatgctgtttgttcccctgggaaatgatcctggaccttgcgggtggacatctctgtcaaccccaaccccaggtcttttcctagatttgccacaaaagagcctctctccgtttcttccactacggaataggaccccaactcggcgcccgccccagacaagctcagcaaaacaaagaaaacaaggacttgcctttgtctccgattgtgcatccatccaatctccattgctttttcttgaaaagttggttcacagaagcttcatgtatccccaggatcctagtagaactgttttgcagtccagaatgtcagaaccaagcagcccaacggtgtcttaaagaggtttcacactcacgttcgctctcgctcagctatctccgct

SEQ ID NO: 371141 - DNA, 814 bp, Homo Sapiens
  misc_feature (437)..(478): n is a, c, g, or t
agcggtctggttagtgcaccaaacataatacaatatgccttcaatatgtcagcctgtttcatcctccctaaatacataattgattttcaacattttatgctccaattattgcccaaaagcagatggggcaagttcatatttcaaatactccttgcttaaaagtacaaaaagaatgaccagaacaattaatgaattgtcttcaatttttcttggaagagagtcatttgtttatgaccttctccaatttctccatcacacacatacatccccctaatatatcaaaaagaatacagaatttatataccctggctaaaaaatagagctacataaataccatgcaaaactaccaacaagaagagaagaatttttctttatttggaacaccgaaagagtagcctcctacatccccccacagaaacagaattaggaacaatgtnnnnnnnnnnnnnnnnnnnnnnnnnnnnnnnnnnnnnnnnnngtagagctttatatttaggtcattttatttttaaccacagcctcctaaatgacctgaatatcccaacatccactctaagtgacaagtttcgtaattcctctgaataatttagttgggcaaatttgttttactccttgttaaataaaaatgttacttcagaaattgacaagtcagttgccccacagaaattttcagtctcagtatcttccattcctattaggaaaaaactgtgtgagggaaagcacaactttaaaaactgggtctcttgtgtggcagagacttcaaccgcacaatagagaggggcagttcttgttacctgagtcttccatctatcac

SEQ ID NO: 371142 - DNA, 771 bp, Homo Sapiens
  misc_feature (110)..(110): n is a, c, g, or t
  misc_feature (226)..(326): n is a, c, g, or t
ttcattgtgacaattggtattgatcccaccttatatgagcgtacttagaaatagttaaatttcaccagaagaccagaaagtagaaccaggtggttatcagaaggccaagngggttggaggagcctgctcagcggcgagttattggcttcaagaagtcacagaagttctcagtttggggaatgataacaaaattctgggagctgggttggggaagtgcatgtattgnnnnnnnnnnnnnnnnnnnnnnnnnnnnnnnnnnnnnnnnnnnnnnnnnnnnnnnnnnnnnnnnnnnnnnnnnnnnnnnnnnnnnnnnnnnnnnnnnnnnnccatttttaaaaattggatgggaaatattatttggcaatgggaatagttgcaagtggttggttaattggtccaaaccaccttggtactggctcattgggttgagggagattagagggaagaaatttgcaaaagatgtttggctagtgtgtactacaagatttcagatgacttgttgcctggtatagtagctgcacttctttaaacttggctatactgtatatacagccaggaatgttttctcaaggaccttggcagctacctcttttgaaattaaaatcttcaagggacgattagttttccctaactccttacttttgtgggaaggggtaggaagtctaacttcaagggggaatcttgccccaagctgcaaaactgcctccctgtcttagaagatttgaaccatctgttcttcttggaataaagcactagcaacaaaacaaccca

SEQ ID NO: 371143 - DNA, 1023 bp, Homo Sapiens
  misc_feature (73)..(134): n is a, c, g, or t
  misc_feature (147)..(162): n is a, c, g, or t
ctctacaaaatagagagaggcctatggttccagctactcgggaagctgaagtgggaggatcacttgagccctnnnnnnnnnnnnnnnnnnnnnnnnnnnnnnnnnnnnnnnnnnnnnnnnnnnnnnnnnnnnnnagaccctgtctcnnnnnnnnnnnnnnnngtatctgttgaagaaacgaagtagaatatcaatttcacaacaaatggtgtcccaacgaaaaagcatatttcatttttgaaagatcctctgatctagctgtgatggtttattttgatggacatatgtcatcagcatacagttttacaacagaaattatcactctcatttttggtggaggtgtttacacaatgaatttttaagatgataatgttgaggaagacaaactcactataattttatgagaacaaacttcccagcaccaatcctaaaaataactcacaaatttcagggaacaaaaagcgcaaaacctacaaagccggcagcctcggatcttcctgttcctgctgaaggtgtacgcaacatcaagagtatgtgggagaaagggaatgtgttttcatcccccactgcagcaggcacaccaaataaggaaactgctggcttgaaggtaggggtttctagccgcatcaatgaatggctaactaaaaccccagatggaaacaagtcacctgctcccaaaccttctgacttgagaccaggagacgtatccagcaagcggaacctctgggaaaagcaatctgtggataaggtcacttcccccactaaggtttgagacagttccagaaagaacccaagctcaagacgcaggacgagctcagttgtagagggctaattcgctctgttttgtatttatgttgatttactaaattgggttcattatcttttatttttcaatatcccagtaaacccatgtatattatcactatatttaataatcacagtctagagatgttcatggtaaaagtactgcctttgcacaggagcctgtttctaaagaaacccatgctgtgtctgcagcaggta

SEQ ID NO: 371144 - DNA, 886 bp, Homo Sapiens
  misc_feature (191)..(316): n is a, c, g, or t
  misc_feature (333)..(367): n is a, c, g, or t
  misc_feature (370)..(454): n is a, c, g, or t
gggtcggggacagccggacaaagaggagaccaggggaggaatcagggagagagccagaggggggcatgggccgggagcccaagcactgggaggccaaggcggggggatcaccgggaggtcacggaggtcgagacccagcccgggccaacataggcgaagtctcatcccccctggaaatcaccaaattagcnnnnnnnnnnnnnnnnnnnnnnnnnnnnnnnnnnnnnnnnnnnnnnnnnnnnnnnnnnnnnnnnnnnnnnnnnnnnnnnnnnnnnnnnnnnnnnnnnnnnnnnnnnnnnnnnnnnnnnnnnnnnnnggacaagactccatccnnnnnnnnnnnnnnnnnnnnnnnnnnnnnnnnnnnttnnnnnnnnnnnnnnnnnnnnnnnnnnnnnnnnnnnnnnnnnnnnnnnnnnnnnnnnnnnnnnnnnnnnnnnnnnnnnnnnnnnnntgcagaaggaaaccctgtctctaaaaacaaggtccagctaaaatcagggtccagctccaccacaagcgcagctccaggggctgttgagttttgcctctagccattccaagtagtctctgctccagaccaagtcccaccatctggcagtcatgtcagtccaaccacagtcatatcagggcgcttccagtcattgagtgccccttgaggaggctggaggagaggccaatgacatttgcacttgagactccagagtctagatttataaccactatgttacggctgccagtgtggctgcaaggacacttctttcacttcattcatttacaatagatgtagcatctgctgtgtgcctagatgccattctaggttatagggaaacaaggcagagcccctgttttccatggtatccacattctaggaaagactggtaac

SEQ ID NO: 371145 - DNA, 795 bp, Homo Sapiens
ggattgatcaaattagaagtcccattattgtcccatgaacctaaggaggtgctattcaaaggaattctagtagacttgcacatacgtgttaacctgtcaccacccattatgttttacctcttgtagttcactcactcagacaatcacacatctacattcattaattttaaaaacacacatgcctttaaagcagaaaattcatcctcaaatgacattttctaccaaaaaagcaggacaccatatttatatccaatgcttcagtcatggaaatggattttgcttcatagagctgttaattaacatacactattatgttcaacatttcaaaaggtgtgttttaggaggatttgtttgatcatgtgcaggaattctaaggcattataagtagttgttccacaggacaagtgctgcccttgcaatgatatactcttgatatatttgacaagtctttagtcttcaaatgctaccagccatagggagacattcgtagtctacgggtgggttggctcaaaggtcaaaaacttgtttgaaaaaaagtttatggaatagcaccataagaagtctttcagaaacaaatcttttttttccagcattgtgttttgaaaaaatgaatcccaggaagagaaaaatgaaagagacctttcagttctcacaaggcctacttctgcttcatttcaattttaaaaaatagattaaccatgacaacatcaacaataataatacaacaataacagatcgacaacaaaggaaagacaatagcagcagcagtaacttgagtaatgaaccacccccgct

SEQ ID NO: 371146 - DNA, 998 bp, Homo Sapiens
agcggcctaagaaaccatggaggaaatagagcacacatgcccacagcctcgactgaccctgactgcacctgccccatttgctgatgaaaccaactgccagtgtcaagcaccccatgaaaaactgaccattgctcaggcccgcttaggaacaccagctgacaggcctgtcagagtatacgccaatggaatatttgacctcttccactcaggtcatgcaagagcccttatgcaagcaaaaacactgtttcccaacagctacttgttggtaggagtttgcagtgatgatctcacccacaaattcaaaggtttcaccgtgatgaatgaagccgagagatacgaagctctcagacactgtcgctacgtagacgaagttatcagagatgctccctggacactcacgccagagtttctggaaaaacacaagggatgttcgttccaacgcagagaacagaaggcatctcaacatcggacatcattaccagaattgttcgtgactatgatgtttatgcccgacgtaacctccagagagggtatacagccaaggaactgaatgtcagctttataaatgagaagaggtaccgtttccagaaccaagtggacaaaatgaaggaaaaagtcaagaatgtggaggaaagatcaaaggaatttgtgaacagagtggaagaaaagagccatgatctaattcaaaagtggggaagagaaagtcaagggaattcattgggcaacttcctagaacttgtttggacctgatggagcatggaagcagatgttccacggagaggaagcagccggatgctgcaggccttatccccgaagcagagccctgtgagcaacccaacccggagccggtccccttaccgctccccatcgcccaccttctcatggcttccactcaaaacctcacccccttcctcacccaaagcagcctcagcctctatcagcagcatgagcgagggggatgaggatgaaaagtagaggctgctgggaggcaagagccc

SEQ ID NO: 371147 - DNA, 713 bp, Homo Sapiens
agcggtacggcatttctatttctagaaataatattgacatagccttaatggtccttaaagaagacatttcagtgtgagattcagacttcagacgctgaaactgctgcctttcaggaaagcaccaccaacgctggaggaggagccggccctcacgcccgccccgcgccacgctgtggaacggggctccggcaagtgaaacccagagggtgtttccagaggtgctcgacagtaggtatttttggaagctcagatttcaccatttgatttgtataatcttttacctataaaatatttatttgaagtagagggtaaatcagcggtaagaacagtgaacacagtggtggggataagaataaggtgacaaacatcgacaccaaagatgagggtagcgagcaacgtggcttgagcagacagaacggggaagactccactctgtcccgaggggccagccgcagttcgcccagggccaccctgccctgaggtccttgtgtggccgccctggcttggcagccctgcccacgctgcccccgcaaacaatggtgtgtgcgtttttacagccctttttaggaacccaatatgggcataaatgtaacacctgtagcgggggcagattctctgtatgttcagttaacaaattatttgtaatgtatttttttagaaatcttaaaattgcctttgcactgaagtattttcatagctgtttatatctcttt

SEQ ID NO: 371148 - DNA, 864 bp, Homo Sapiens
agcggagtttgcctgagtgcctggaacgcagctcgcttcctcagcagggtgtgggcaatgccaccagatggttaggggaaaaaagaggccatctctcagggaatgcgtgttcctgctgagcatggaggaaaggaaggtgaggcagctttggaactcaacaaattttattaaacctgtcagttagagagccattgttggtacaacagcaccatctgctgttagtttagagcaactgctaggagctactagcatacctgcataattgctgggagggattttattaatttatatttttgttattcaagcaatatctcttgagaacctactgctgtggagcacagggaagcagacgaggacaaggtaaaaacagtcctcatccatatggagttgtagtctacaagtctggttcttgggtctgaaacctgactgcacatcccagtcacctgaggaactttctgcacatcccagtcacctgaggaactttttctgactcctgaccagtgtggaatctgtctttcaaaaagcttcccagtcgattgagatgcagcctgaccatggagtggagaagtctgtggtccatgtgaactactgatctagtacaactctttccctttacaaatagggaaactgaggcccagaaaggggaagggtcacccagtgagcaaagtcagagagacaggtccagaacacaggtgtcctagctacaaatagggaaactgacctttcccagaaaccggaagggtcacccagtcagcaacgtcccaaagacgggtccagaacacaggagtttaaagatatacctaacttggaacgaagcaatctagcatcacgtcagcgatcaacacgggaagactgataaggccc

SEQ ID NO: 371149 - DNA, 703 bp, Homo Sapiens
  misc_feature (619)..(619): n is a, c, g, or t
cgggtactggtgagctgtgcagacacaccaagatctactagtttcactccaccttccgtggtcaatagaatgttattgcctgttcacatctctgtggatagttttgttgtatatgcaaatgttgaagtcccattagtgcttcatgtaaaatataggcaattagaggctcactcattctttcacccctcttcagaaatcctttcacaaggtcagtcactgatcctccactgcagagctcaagaaccaaccacagcttgtctccatttactttatccttcttaaagtatatcccatagaatctgaccacattagggtggtcagaaagtgcttttaagatgttatatccggcttcaatctcttcgtcaatatcgtgaattggatcaagaattttgactgctgctttttggccatttttcttattcaatactttaaaaactttcccataagttcctttgccaattgtctcagtgatttcccatgtatcagaaggatcaggaaagttatcaaagatgattgtttttccaattaatggaaacatctcaaaagtttaaaaaccgttagcaaagcttgaaaataacgcataacaatgctcagacgccaaaactttgaatactgtgtnccaggctgcactggggccctgggcctgggcgggaagccgggcgcctccttatttctttacgggggcgctggctacggccccgct

SEQ ID NO: 371150 - DNA, 799 bp, Homo Sapiens
attcggcacaggcgtccgctgcagtccgccggcgagggagttacgcacgtcctgattctcctggagtctccagcccgcccagtggccgcagtcacccaggtccagaggcggcggtatcacaggctctccgacatgtctatgctggctgaacgtcggcggaagcagaagtgggctgtggatcctcagaacactgcctggagtaatgacgattccaagtttggccagcggatgctagagaagatggggtggtctaaaggaaagggtttaggggctcaggagcaaggagccacagatcatattaaagttcaagtgaaaaataaccacctgggactcggagctaccatcaataatgaagacaactggattgcccatcaggatgattttaaccagcttctggccgaactgaacacttgccatgggcaggaaaccacagattcctcggacaagaaggaaaagaaatcttttagccttgaggaaaagtccaaaatctccaaaaaccgtgttcactatatgaaattcacaaaagatcaaatccagagcaaggcctgtaacaatcctggtttctacatttacttaagtgaactttgctaaaggctaaaaatttctgatacaagaatccatcatcaaaactttagacacatttgcaccttcattgatatcgcttactgtcttctaccagcttgacagttttcccctttgactttccagatctggtttgaatctgtgtgttcaccgttttgacatcatgttttagaaactgtgcatctcgcttgttcccgtcttcttcctttatccctcc

SEQ ID NO: 371151 - DNA, 667 bp, Homo Sapiens
cattcttatgagaaagaactttccatcacctaacggctttccggttgatgcctcaaagaggaagattattttttcatcagctttgtctcttattgctatggtatcattactcaaagacacagtctgtgcattcagaatatctgttctcattccaggaaattttggagatgaaataaagcgcccttcatatgaatataaatagatactactaccatctacaagaagaaaatgtctttctgcctgcagaatcaaactaacagttccttctttgagatcaaatataattggtgtgttccagttcttcgtggagaacacgtaacattgaagagacgttgaaacaactaagtgtgcatagttcaaagatgctttaatgactctatcacggaattccagtaaatccactgcatcattaagaacattacgaacctgcatggctcttcttttcgttaatgttacttgaaaatttttgccactcccaatgttgttccaccacatgtgcaaaaacgacatgtccatttccacaggctccagcaatctgagtgccatcgatagaccatgcaatattaaatatgctgccagtgttgggtttttctaatgcatatgaccacccagttttatcacacaagcgtaaagtatgaaacgatccaacagcaaataaatctccgct

SEQ ID NO: 371152 - DNA, 769 bp, Homo Sapiens
agcggaggtgtgaaccgccacacacaaccccaatttttgtttaaaatttgcatccacattaacaaaacttttattagaaaaattcatttaatatctaggcaaaattatatcactttcaaaactttttaagtaaattcagtaacatatcaattcagtttattagcatcaaatttgatgaagcagtgcataaatggaaacaaaacagtttatcaatacaatatatcattcttcagattttgcttattttttgcagccatttattacatttaaaattttgtgcatattgtctcatttgaaaaatgtgagttattctgttttatttgtattatgaaatgtttctattgtaaataaattcttttacctgtctagccaggtcacaagtttttcccattttaggagcttcaaatttagcttgttcatatgcagcgtgatattagggagaaaatgtgaatcacagtgctactttttgtctttgattgaatatttggtaagcatttcttttgtttcaaggaaatcttgaattggattttctagtacaggaaatccttataaaattcttttgtaagtcatccaggtaacattggtaaagaaacaagatcattagatacattgtcttggatatccagaaagtttcataaactgtcaacattctatagccttgttgtgcatatgtacctgaagcaattataacacattgtatccgtgacctcgtgtcttggagctcgtgcttcagacacaacttgatcacgaatatttccagtcatgtctc

SEQ ID NO: 371153 - DNA, 568 bp, Homo Sapiens
agcggaagggtgctttagggacccactgttttcatttcttcttggagtttaccttgtttcagatgcagccatgggtaggtcagagatggattgttggtgcaataaacccaagaatcaatgtagcctcttaatcccatcaagatgtagtttgtagcagcaaagtgtacagtctgaaaccgtatgttttatccttatattttagagctttcagcagcctttttaagagaggccacctacccaaagttaatttcctataagcctcaagagtgtttcggttggtaagttcttcccagctgaagcccactttttcccttatagttaatacaaatgacctatttttactttaaaaggcacagctgtccctggtgggaaatgaaacctgcagcagttacaggatgactaatgaaagcaattagcttgaacatttagaaaaaattcatatatgatctaaatttttatattatcatttctgtgccttctaattcctgcatcctgttcaaaacatctttccagacattaacttacacattgtataaaaccgaccaaaatgatttcctaaagttcatgc

SEQ ID NO: 371154 - DNA, 497 bp, Homo Sapiens
gaacttgggactggtactgggcgaacgagaagggctataactcaacacactctgaccctgaattgaaggggaaggtggagcgggagggatttgggttgctgccagatcatgtggaggcgtagtctgtacaacagctgttttcaaccctaaaagtgtttgctgtccaggactaacaaccagacttgttggtgccacagtatatttgaaatatctccaaaaatcaaataaggcattaaggctgaagagagatgcaagggcaagctcaatataccacgacgggccagtatgtcacattgtagtatgaactaatcaattttgccagtcatttcagtatatatcattccagccatagatacatttaggagtccccaggctaagaccactttcctagcctctgtttcttttctcatcttgatggttctgtcaataagggaagcactagggtgtgcctccccctgcatcatgtcctctggccggaaaacgcaggcacgcccgct

SEQ ID NO: 371155 - DNA, 659 bp, Homo Sapiens
agcggaaaaaattacagagtatattgattaaaatatattctaacaaaatactgatgtatagggatttaaaaaatcctataaaatgtcatcttgtctgtaaaattagcctgacaggaaatttaaaaaagacgttatctacgtatttttgaggaaaatgatattcttcatgttttaagagtaaaatataagaaatacattctcaaaaacacaagaattatgaaaagatagaattttcttaaaaaatggttttaaacaagtaatcatgctaatacatttaagaaattacaaaagagcttttgtgttatgaaatatctgataatacgtattttgttaacctcctcaaaatatgtggttgtctctatgagttttgtgtctcttccatcatatataatcaagctgtagtgtgtctggcagaattctccctaaggatgtattttatattaagttgaaccatgtgaagttgccgtctttgaaggtcaacaaatgattgaattatagacaattcatgagattccatcatatagttcaaaaaatatcacttctatgttgctgaaataatttcagccatctttgtcctttcttttatcttttaggtcatattttcaaatatatccttgtaattgtattcttaacactactatatttctcatgacatccat

SEQ ID NO: 371156 - DNA, 374 bp, Homo Sapiens
  misc_feature (195)..(206): n is a, c, g, or t
agcggagggtgtctggtaaattgaaaagtgtttcaaactatggcagttttgcaatcaggtgaaaatcacctcatgatattcagctgataaggtttataaaattgcccctttctagctgctctgttaggaattctggtttttgatacttttttcctgtctgcaaaccagaatttgattttttggtcttgcatttcnnnnnnnnnnnngactttgaatctgtttagtagattccatatcttggagtttcagggttttatatgtactacttaagttaaatagttaaaagcttttaaatagttgagctttttaatggttggacactttatttggtacctatttatatatgtatgtatatcttagaaaagcactttgtt

SEQ ID NO: 371157 - DNA, 619 bp, Homo Sapiens
  misc_feature (525)..(525): n is a, c, g, or t
  misc_feature (565)..(565): n is a, c, g, or t
  misc_feature (581)..(581): n is a, c, g, or t
  misc_feature (591)..(591): n is a, c, g, or t
gtagagatgggatctctagcctcctaagttaatttagcctcccaaatgccagacaaagaatctaacataaaatttaccttgaataagatatatgatattgattctgagctgctttgtattttttctgactttggcatctgtatcttggtgctttctgttagactggtagagtttaagaacctaaggagtatgcattgtacttcagtgctaacttttttcttcatttactttctgtgtatataggcagcatattttttttgtagaacattaacccagattgctaatagcttcatgttacggcattcttccacacagtccagattgatttaaggaaaagcagaaatggaagtcaaagtgtgttataaattgagactgaaaaacatgctttaaaaaatagatttaatttcttacactgtgaatagccattgtattggtttgtttctgataaatcagttgtttggggcccctatttttgaactgttaaaaaattttgatgcttttcgtggataaaagtagtgcctctcnttatacaaccgatggggttttaaaaagtgtaaattggccntttttggttaaactcntttaaaggcnttagtatttaaagggtgtatgttattaa

SEQ ID NO: 371158 - DNA, 608 bp, Homo Sapiens
  misc_feature (537)..(537): n is a, c, g, or t
cgctctttcctttcgcgccggttgccgctgcggagcgcggcgggtccatgtgcgcagtgagtggcgctattcctggcccagtagcacccgagccccgggtttgaccgagtccgcgctgcgatggaccccaacaccattatcgaggccctgcggggcaccatggacccagccctgcgtgaggccgcggagcgccagctcaatgaagcacacaagtctctgaattttgtctcaacactgctccagattactatgtcggaacagctggatttacctgtgagacaggcaggtgttatctatctgaaaaatatgataacacagtattggcctgatcgagaaacagcaccaggggatatatccccttatactattccagaagaagatcgccattgtattcgagaaaatattgtagaagccattatccattctcctgagctcatcagggtacaggcttactacatgcattcatcacatcatcaaacatgattatccaagccgctggactgccattgtggacaaaattggcttttatcttcagtnccgataacagtgcttgttggctaggaattcttctttgcctttatcagcttgtgaaaaattatagtataaaa

SEQ ID NO: 371159 - DNA, 865 bp, Homo Sapiens
  misc_feature (655)..(655): n is a, c, g, or t
  misc_feature (739)..(739): n is a, c, g, or t
  misc_feature (785)..(785): n is a, c, g, or t
ggaggaagaggaggaggaagcgccgcccccgcctcgggtagtgagcgaggagcatctgcggagatatgctcccgaccctgtattagtgcggggtgccggccacatcactgtgtttggcttgagcaacaagtttggtactgaatttccctccgttctaacagggaagaaattctagagagatacacatgaaactaataaaagttattacctttgatgggagaagaggaatgtgatggatagaggcaagggtggccccagaagaatttaaaaccagcattggccgtgtgaatgcatgtttgaaaaaggctctcccggtcaatgtgaaatggctgctgtgtggttgtctctgctgctgttgcacactgggttgcagcctatggcctgttatttgtctcaacaaaagaaccagaagatcaattcagaagttaatagaatgggaaaataacagattatatcacaagcttgctttgcactggaagttgactaagaggaaatgtgaaactagcaatatgatggagtatgtaatactaatagaattcttaccaaaatatcccatattccgacctgactgaggagttttatccagtcacttctgtgttacctgtcatttcctacccttagtgccttgtagatttggaatgaagatggtctcctntgctgtgttcaacttattctttataatggtagaatattcttctcgctcttttgtgttggtttatgaagaaaatttgcacatctnttttgtctttcaatgaggcttgtgttttgcactctcaattttaaantcacccacatgcgtgtgtgcatatacatatatagatagttgccattaaagataaatcatcagtgttggtgtttaaaaaac

SEQ ID NO: 371160 - DNA, 710 bp, Homo Sapiens
agcgggaaagatccaaggtctgtgagcaaacactggacaaatacctgagtccagaagactgcctcagtggctcatactggcatacctcccagcaggtatctgcatgggtcggatagattcctgactgcaatgagacgggttggggttgagactgagacccctcagaatatgctgtggaaatgaggttggtggaactgttttattggcccagattgttaggtaccacccagcaggttcctgcaaaagctggataggtagattcttgattgcaacaggggaggccagagctgggactggtgcctcttggaatctgctgtgggatggagattggtgagcctatcagggtggctcagattcccgggctgcaagatataggtgagactccctttggatgcttgtgcaggtagctatgagcagggagctcagctgagggcacactggagctgagtcacaaggcaactttcaagttttttcctgtgactgctaccaatggacagagaagcctttctgccaaggcactagtgtgtgtgattctttctggactctttggcagatggttatggttgcaggttcaaggcaaacaggcttctagccattccccttagagaactaggctgcttctgagcttcagcctgggagcaagcttggaggattagtgactcaagtattggtctgcattctcaaaatgatccttcaaggacttggattcc

SEQ ID NO: 371161 - DNA, 748 bp, Homo Sapiens
tctccctcaaccatggcatatatagctttcttaaccaagttagtaccgatgccatttctcctgtatttggaatccacggctaacatggctatataacctctgcggaacatctttttgtgcatatccaacttgcaaacgatggcacctacacactcctcccctaccatggccaagaagcacagctgtggccagttgtggataaaatatctataggtataaatggagtagggttcggacagatctttggtgatcagtctcatgatatcgggcatttgtagctcggattcatatcggacatatcgtatcgtccgatcctccccaggctcaacctccctgcctgaagggcttcttaagctgcagtcggcggtcagggacgaagacagcagccgcacctgctcgtcttcctcctcctcctcctgctcggtgccctcggccagtccattagcgggccgccgcgggatcgctcgccgccgctgcctccaccgggctggggaccgcagttcttgcacttactagagagggagtgagggggcctctcgcccgagtgtaccccggcatccttttgttgcacgtcgctctggggcctccgtcaggggtggctgtggtcgcggccacctctgctacgctcaggaccttgctcttgagggaggcggccgcccggaggtgccgcagttcggggctaatcaatccgttgagctgctgctgctcctgcggcggctgactctccgccaccgtcgccgaccccgct

SEQ ID NO: 371162 - DNA, 752 bp, Homo Sapiens
  misc_feature (423)..(521): n is a, c, g, or t
  misc_feature (593)..(704): n is a, c, g, or t
agcggtttgtatgtaatagtctcaacactgcatgcacgtcgtgcacttcccacgcactttacaaagtactctgtccagaatctcacatggacctcggaacaaccgagacctcttccagccagattggaggcacccagagtagggtctgggatgatacaggctcttgctcaggactctgggaaccctttaagggcctgcttgaactcagaagttggtggctcagccagcagtctctgtccctattctgtgtcagcgttgatatcacacacttgtgatgtgactcgtttttctctttttcccctgactggtttttggtttttactctcccattgtgatttatcccaattacatggaaggaatttagctaaattaaaattaaatttgcagtcatggagcacgaattaattttctttctttctttcnnnnnnnnnnnnnnnnnnnnnnnnnnnnnnnnnnnnnnnnnnnnnnnnnnnnnnnnnnnnnnnnnnnnnnnnnnnnnnnnnnnnnnnnnnnnnnnnnnngtttaagctattctcctccttctagcctcccgagcgagtcggggactaacgggcacacgccaccacacccannnnnnnnnnnnnnnnnnnnnnnnnnnnnnnnnnnnnnnnnnnnnnnnnnnnnnnnnnnnnnnnnnnnnnnnnnnnnnnnnnnnnnnnnnnnnnnnnnnnnnnnnnnnnnnngcgtgagccaccacgcctggcctctttattgtcttgcttacccaatcc

SEQ ID NO: 371163 - DNA, 742 bp, Homo Sapiens
cacccatgagtactcccaaccagggtggcattgtagccatagagccccagatgctattaatgacctgtcctggctgagcaagagggccatcagagtggagaccactgttcccagccagccagtgagagcccaccaggggttctgaacaagaagtcctaccagaatcaggattccactgacggggttgttgacgaacaccacttgggatatgccccggagaatccagtcaatgaactggagcaccacgggtttgtctttaagctggttggcaagttttttcatgtcaccggtgacatagccaagagctttggggaagcaccttctcccttgacatggcgaaacctggttttcacccctaaccatagtggggctgtccactctaaccatagtgggctgtcctccatggctatctcttcctctggctcctgttcctgcgacccatctgccagggccaagcttagccgggcgatgcctctgcgcgctgcgtcaccagctttagttccaaaagggtccttccaaacaggaccatgacgggcgtcaccagcgccgccaatcaaagaccgtccattcatccttacttttttataatctttattttaggtagtttttgattttaagtagcaggagatgcccagttttctttaaagaccactctagctggcttcctggcagcagaaggcagtggctgataaagatttgcccatctccacgacaagggagagtgcttctcaggaaatccgct

SEQ ID NO: 371164 - DNA, 258 bp, Homo Sapiens
  misc_feature (81)..(193): n is a, c, g, or t
cataaataaataaacatacaaatacaaggaactctaggagtggtcaagtaaaagtatagagcagggatgggatggatgagnnnnnnnnnnnnnnnnnnnnnnnnnnnnnnnnnnnnnnnnnnnnnnnnnnnnnnnnnnnnnnnnnnnnnnnnnnnnnnnnnnnnnnnnnnnnnnnnnnnnnnnnnnnnnnnnnaaatgagatcttaagggtggggcccccctactctgagaggactggtatccaataagaaggagaga

SEQ ID NO: 371165 - DNA, 746 bp, Homo Sapiens
agcggggtcgcgcgccgcgctccccgccgccagagagcgaaatgtcatcagtgcagtcacaacaggagcagttgtcccagtcagatccatctccgtcaccaaactcatgtagttcctttgagctaatagacatggatgctggcagcttgtatgaaccagtttctccccattggttttattgtaagataatagattctaaggagacatggattcctttcaactctgaggattcacagcagctggaagaggcatatagctctggaaaaggttgtaatgggagagttgttcctactgatgggggcagatatgatgttcatttgggggagaggatgcggtatgctgtatactgggatgaactggcatcggaagtgagacgatgtacgtggttttacaagggggacaaagacaataagtatgttccctactcggagagcttcagccaagttttagaggaaacttacatgcttgctgtaactttggatgaatggaaaaagaaactggaatctcccaacagagaaattattattttacacaatccaaagcttatggtgcattaccagccagttgcagggtctgatgattggggttcaacacccacggagcagggtcgaccaagaactgtgaagagaggagttgagaacatctctgttgacattcattgtggagaacctttacaaatagatcacttggttttgtagtccatgggattggaccagcttgtgatctccgttttcgaagcattgtag

SEQ ID NO: 371166 - DNA, 904 bp, Homo Sapiens
agcggggcggcggtgacggcggcctaggccgggcgagggccatgctgagcctcgcagccaagctggtggccttcttctggaggacggcggactcccctagggaggaagccgggcagctggagcccgagctcgcggaaggtggctcgcgggaggcggctgggaggcgggtcccgggccctcgcgtgtcggccacgagggagccgcgcccataggtctttgagtgcagtgcgggccggcaggcaacgctgggcccggcctttcctcatctccgctggcggggatccccgttcgcctcaggaggcttccgaccccacagcatcccgccgctctgggcgcccgtcctctgtgaggtctctccggtgacaccagcccctcttcccgccctcactttgtgtgtttacgccgagcagctgccaagtcgtctctccatgtcgttccttcctgtccgcagcgtcattggcggtggtgacactaagctgaaaactgtacggggtgtcgtgacaaggtactgcagcgattattggcatgattgatgatttgatctacttctccagtgatgctgtgactagcagagtgcttctgaatgttggacaggaagtgattgcagttgtggaacgaaacataaagtgtccaatggactgaaagcaatcaggctagaagctgtctctgataagtggggaagacgacagcagaaaccatgggagtccctcagactgcggccccgagtgttgatgggcggtgtgacttccctggtgaagggcgcaggctgtatcagtcagaccacctacttctctctggagagtgtgtgcgaaagcttcgagccctgcagggagactggttggaggctgagaccggatcggcctggcacgtggagcaggaagccctcagtgaaggcctgagattc

SEQ ID NO: 371167 - DNA, 870 bp, Homo Sapiens
  misc_feature (42)..(58): n is a, c, g, or t
agcggaggaaattattagccaaaatgttggtgttgggtttgnnnnnnnnnnnnnnnnnctgaagggccaagtcctgcaagaaatgtctaatattctaataatgaaaggaagatggtcattcacataatatagatacatgttatagcgtataagagctagaagggttccaacctcattttacagataagcaggtgtccaaattttatagcttttggttacagaattggactggaaacccttgccctttatattactgtctcccatcattctctgtggtaaatctgtttggccttgggttgatggcacagatgggcccaagctgcagatgaccttcagataacatatgaaaatttaactggcgatgtcctagtatcagcaggagtaatagcttaccttggtgctttcacttctggctttcgacaaacatgtacaaaagattggagcatgttgtgcaaggtaatggtttatatttggtaagtcttgttttagaacatccaaagtatgtttggggatatttgggggaaaaggatgataataatggcagaagagaagaaataactgaaaacatggggtcttgcttttttggcttcttgtttcatcagtaaaatacttccactattcaaccttttaatttctttactttctgttccttagagttattaaataatggcctagtgacaattaaaacccaatagttttaatcttagaaaaaatatttccagttacaccagggtggaaggacactaagaattagggacaatgcttaacagaagcaaacaaaaattcccgggttcagaagaagttcctggtggagtaaacacatgggtggatccaggtaaaatcttagagcctggaattggctggttaccc

SEQ ID NO: 371168 - DNA, 763 bp, Homo Sapiens
atgagaattccatctggatattatcctggttatataactgtgtataaggcacttcttcatacagtatttaatttaatcttcacaagagccatcctagtgaaatagacgttaatatcactattatagatatgagcagactgaatatcatcaaaatctgactatgcatattaaaaaaaagaactggttctactaagtcctaagaaaaattccgctgttgcctcaaacatcacaactagcactcctagcccagtgtttgacacaaagttgtgttcagtaaagggtgaggtgcaccaaagtcccaaaagataatggacagctgtgtccaggaattcctatctagaggtttcagttcatgttccaattatttcgggggcaagctctttacagaaaaatttagatgatacatcctcttcaatctcattttcgaagacatttgtaggaaaaatgcatttgctgtaaagctttattttaaagaggatgcaaatctaaaaggttaaccatctaatttactattttttttaaatgggattgaaggttaagacatgtatgtaaaacagatttgcttcaaaatctggagctgctgaactagatgagtaataagttttgaaaaagtgaatattagccccttgggcaataataataaagatgcacaacattatcgatcttgtatatgcctaataagtggcatatacaataaactaactgtgaatgcctatccttagagaaaaacggaaccccccttttttaaacagaactccgtcca

SEQ ID NO: 371169 - DNA, 1379 bp, Homo Sapiens
  misc_feature (29)..(29): n is a, c, g, or t
  misc_feature (823)..(839): n is a, c, g, or t
gaacagctccacaatgactctattcaagnacagagctctgccagtcacctctttactctgacagtccttagtaaccacgcgaatgagaaagtggagatgctactaggagctgagacgcagagcaagcgagcccgctggataactgccctgggacacagcagcgggaagccgcctgcagaccgaacctgtggctgacgtcgtcctcatctatcaacgtgtcagcgatggctggtatgagggggaacgactacgagatggagaaagaggctggtttcctatggaatgtgccaaggagataacatgtcaagctacaattgataagaatgtggagagaatgggacgcttgctaggactggagaccaacgtgtagtctctcagatggtcttttgttactgcaagatttgcacgacacttaccgggctggttggttctgggctagttttattgttaattttgtcacagcctatttaattaaaagaacgaaaacacttgcctttaagcttgccaggttgttccgctctctcatgagaagagcttggatacagtgagtttgcacagctcagtttttacctaaccacacacttgcagacctcctgaggtacacagaatagctgagcagttcacttcagggatcaggtcatctctgctcctcctagtttcaccatgttctggcaataaaaaacacatattatatcctggttttctctatccttgcattactaaggtgactgtctctctttatacatccttgtatggttctcccagtattagcaagattgtatatctgtaaagaatgtccagttttgtaaatatttccctgccnnnnnnnnnnnnnnnnnacatctgattttaatgcttcgttaacttcaaaaggaactggtagagttcagaaggtgagctgttgtttttctaaacctcttcccaggaaggggacattgacacttgaatttttgtcaacctttttcctcattagaaggcaagtagaccagccttactgtagggacttgttaagaaaaaaatcccatctcaacgccatattgggtcttcaaatcaagtatagactaataacctaagctacctttaaccacgttagaaattctgaaggggttcaatatgtgggaaacagtctgggacattaggaacagcggagtcctaaatatgatacccaacacctgagtacgccagggcgaagtatcaggcgggtgacaacaggaccacccgaggaaccacggctaccccagggcaaagagacacgaggaccagcacccaagaacagtgggagtgttgagaataacacaccacacgcagaacgatattggagaatatacaagacagagagtcatcatgactggcatggacgggtatcaaacacaagcaga

SEQ ID NO: 371170 - DNA, 840 bp, Homo Sapiens
agcggactgcacagcagctcccgagctgcagggagagcgggagtgcacgggcaccaaactgcgcctcttgggggtgctgcagcggattttctaacagatattttcctctcctttattctaggatctggaagaactgtgcctcacctccgtctctctgcctctgactgctccctctactccccaggccttgctgtcagcacctgcaacagagctgtccctgctgtggtctggggaaagttccagccaggccctctgtggcgcatctatccctggggtggggcatccagggtattgaatctacaaaatgcatccatttcacctccaagtcagctctgtgcacaccaagccgtgtgcaggataggctaccctagagagcctgggtacccacgcagccttccacgaagccccacctacatggctgctgcaggttctcaccatcctgtgctcaccgggaaggctggcaggtccacaccggaaaccatgggctggggagaagcagggccttggtgctagagagacctgcccaagcattcttctgcaagccccgagacagaggagtgagcaagcctcaggggcgtgacaggtgctcaggagagagcaggacacatgcagaacctggagagagccagagagggaccagccacagagaagccccatcgcctgccagcactgacgtggacgttgggaaaaaggtttctgctggtggccagcctggctgggattcctcactcccacgcctcaagcctgagaatccttccggaaaacacaaggtggacctgcaactgccaggtgaccatggctccggtgttgggagcaacattggggaagacctggggtccc

SEQ ID NO: 371171 - DNA, 683 bp, Homo Sapiens
  misc_feature (186)..(205): n is a, c, g, or t
  misc_feature (300)..(300): n is a, c, g, or t
  misc_feature (519)..(521): n is a, c, g, or t
agcggggttatgacatgtatttcactcctgtgattaggttctacgcacatgggtcataactcgcatgtcgagccccctctagtgaagggtaggagagctcagcctcggatggccaacattcagttgttcaggttcattcgtcaaagttaagttttagaactatttgtactcagtaacaaaaatcannnnnnnnnnnnnnnnnnnncctgttgtggaaaagcgtgaatttgttattaagcatttgatttcctgtgctccttaagtactctcctgaagatgaagcaaaattttaatctggcnaattatgaaaaagaaatattttagctctgaaggatttagtaaatcctgttagattagggaggccttacagactgactttacttaaagaggacgcgtcactcgctgtcagtgtggtgtgggctttatttgcttaaataccttcatttgtatagtacgtctcacttgaaattgctttgtatacattttgtaaaaatatttataaaatgttttgtaaaatannnaaaactataacgaaattgcagtttattttgttatgttggataaatactgttaaaagaaaccagtcagtaactatattgttaatccatggttaggaaatgtttagttggagattacaaattgaaacaaccattgcaatacagccaaagatttgggaaaatgaa

SEQ ID NO: 371172 - DNA, 356 bp, Homo Sapiens
tttaatagtttttattggatttcttaggatttctataaggattgtgtcatctacaactatagttttacttcttttttttcagtctggatgcgttttatttaattttcttgcttagttgtcccagctagaacgtccaaatactgttgaataaaatcggtgcgagcagacagccttgtcttgttccttctcttcgtgtagaagcatttaggccggtaccatcaggtatgattcctgctgtggggcttcatcaggtcacaggtaccaccttctagtcctgcctttgctgaacggttttgttatgaagaagtactagatttgatgtgctgtttactgtgtctaagatgagcttgtccgct

SEQ ID NO: 371173 - DNA, 1186 bp, Homo Sapiens
  misc_feature (270)..(320): n is a, c, g, or t
agcgggagagcgcagcgcgcctctccccggccgggcggacacttggttcattccagccgcagaagctcagggctcccgcgtaccgggattttttccgagcagaaaaaagctccagagctctcctgacctcctttctcctcggcggcgagctggagcctctccctcggcgctgccggccgcgccatgccgcgctcgcggggacgggagctggggcgctgcggctgccccgcggggagggctcgcggcgaaaccgggatttcggcgcttgtnnnnnnnnnnnnnnnnnnnnnnnnnnnnnnnnnnnnnnnnnnnnnnnnnnntctgctgctgttgctgggcctgtgggttgctcagcgtctcggccgccgcgggccagaactgcacgttccaactgcacggtcccaatgggacagttgagagcccaggcttcccatatggctaccccaattacgccaactgcacgtggaccatcaccgcggaagagcagcacagaatccagcttgtgttccagtcctttgccctggaacgaggacttcgatgtcctgtcggtgtctgatggtccaccccagccagagaatctgcgtacgaggctcacaggctttcagctgccagccaccattggttagtgcagccaccaccctctctctgcgcctcaatcagcgactatgcagtcagtgcccaaggcttccacggccactatgaagatagggatgacgggaagaaatgacccaaaacgagaattaacacaaagagaatattcaccatgattactggccagggagaagggcccttcttaaagaattagggaaacacgcacacagcagatctaaatggattcacccatgttaaacggagaatcctggttacagggcgtttaggggcaacattgtagagataccaacggtccttaggtgtgggttaccccttgcttgttacacaagcgggtatctgggcgcaaaatatctttgttttatcacctttggggaccataccatatatcatcgcggaggcccgggagaaagaaagcgtctctataatacagataatgagtcccggggaaccatgcgtgctaacccgagcaaaatataaacgaaccctctcataaatcgacgaatcccgctaagaaggattagacctatgccggacagaatattcgtgagcaaagcatatatattcacacccggag

SEQ ID NO: 371174 - DNA, 714 bp, Homo Sapiens
agcgggctccgctgtgtttttctattctggggtgtaaggggcagctggaccactccagctgggactgctaggaaggttgcgggtccacccggccgagccgaacgagggaaatggtcctcacccggccactcgccggttgaaaaggggccgccctggcagggaagcggccgccgcggcgcggtgcagcgcagcggcgagaaggagtgcgttatcgtcttgcgctactgctgaatgtccgtcccggaggaggaggagaggcttttgccgctgacccagagatggccccgagcgagcaaattcctactgtccggctgcgcggctaccgtggccgagctagcaacctttcccctggatctcacaaaaactcgactccaaatgcaaggagaagcagctcttgctcggttgggagacggtgcaagagaatctgccccctataggggaatggtgcgcacagccctagggatcattgaagaggaaggctttctaaagctttggcaaggagtgacacccgccatttacagacacgtagtgtattctggaggtcgaatggtcacatatgaacatctccgagaggttgtgtttggcaaaagtgaagatgagcattatcccctttggaaatcagtcattggagggatgatggctggtgttattggccagtttttagccaatccaactgacctagtgaaggttcagatgcaaatggaaggaaaaaga

SEQ ID NO: 371175 - DNA, 1244 bp, Homo Sapiens
ggcttcctgtttatacaaactgtagtcaccttggtgctagctacaaggttattcagcattctgatttaatctaagaatttctttattttatgcataataaaagggactacaaagaacagctgaaaagccagaagacaaaggaacaaaaataaacaatgacgtgtattccaacccaaacaatgagaaatctatgcaactagactatcagttcaatctatttccaggtcgctatcctcactgtgacacgtggcagagttacgcacagatgtcagcaccaagacttccttttctgggagtaatccaaattcctggagaaaagcttcaaggtccacagcaaagaaatcatcccccagctggtcagtaacacgaacaaaatggccgatcaattcaccccccttatagatcagcagggcaggaagggcattcctggtgaactgactgctggcgccaataactgagctcttcaccttgcagaacttgacagctgggtactctgcggcaaggcagatcatgcaaccattcatggcttcggtccctggaaatgccatcctcataaatatgaaccatgatgacaatgcttttctgttctttatcaatcatgtctaaaaacccttctccactggagatctcaaaaacctgcttgaattggggccccttgtgaagctgctgccgcatctcttccattcgctgcttccggtactgctgcagaaactcttcatcatcttggtcctcattcattatggcaaactccttcagagtcatcttcccactgatcttctcctggaggtctttctgtttctgttgctcctcctcttcatccagatgggacctgcaagtcattgacagcttcttgatcagcctttccatctcccggcactgctcctccctctgctctgtctccaactgcttgaagcggcgccagtcattgatcacaccttttgggcctgtgttaactgagatgccttcgcctgccagctcagcctctgcaggcacagaactgctggctggggcacatctgcctcggtccttgtcctcgtggtcactgtcctcatcctcactgctgctatagtagtactgcagtttctcccccagcaacttatcatcaagggtggtcatggtgtctgccctagctcgctccggatccctttgggccagcagctccgggcgccggaaggaatggagcactttcttaagaggaagagcagtgggtcagcgccctgagcgttaaagacaaaagccccgct

SEQ ID NO: 371176 - DNA, 759 bp, Homo Sapiens
agcgggtgcgtgggggtaaccggcgcgggcgccgagatagcgccgggcagagggacccggctaccctggacagcgcatcgccgcccgcccgggtcgccgcgccacagccgctgcggatcatggaacatctaaaggcctttgatgatgaaatcaatgcttttttggacaatatgtttggaccgcgagattctcgagtcagagggtggttcatgttggactcttaccttcctaccttttttcttactgtcatgtatctgctctcaatatggctgggtaacaagtatatgaagaacagacctgctctttctctcaggggtatcctcaccttgtataatcttggaatcacacttctctccgcgtacatgctggcagagctcattctctccacttgggaaggaggctacaacttacagtgtcaagatcttaccagcgcaggggaagctgacatccgggtagccaaggtgctttggtggtactatttctccaaatcagtagagttcctggacacaattttcttcgttttgcggaaaaaaacgagtcagattacttttcttcatgtatatcatcatgcttctatgtttaacatctggtggtgtgtcttgaactggataccttgtggacaaagtttctttggaccaacactgaacagttttatccacattcttatgtactcctactatggactttctgtgtatccatctatgcacaagtatctttggtggaagaaatatctcacacaggctcagctggtgcagttcg

SEQ ID NO: 371177 - DNA, 1049 bp, Homo Sapiens
  misc_feature (572)..(572): n is a, c, g, or t
agcgggtggtcccggcaggcggagccccagttagactgctcgtcaagtgtgggaaaagctccgtggcgtcacaagctactatataaaaggcggtgcccgccggggccgagtgggagtccgcggcgagcgcagcagcagggcccggtcctgcgcctcgggggtcggcgtccaggctcggagcgcgacacggagactaggtggcagggtacagctctgccggggggggaaaaagtggtaccattttgggcgttcttgagcttcagaatgcagtctcttcaacttgattgtgtggcagtaccttcaagccggtcaaattcagccacagaacagcctggttcactgcacagttcccagggacttgggatgggtcctgtggaggagtcctggtttgctccttccctggagcacccacaagaagagaatgagcccagcctgcagagtaaactccaagacgaagccaactaccatctttatggcagccgcatggacaggcagacgaaacagcagcccagacagaatgtggcttacaacagagaggaggaaagcgagacgcagggtctcccatgaccctntttgcacagcaaagacctgacggagaattttcagaatacagagggaaaacggcactgcttattccagtgcagccagtccatggtaatgcaagtgcaccaagccctcagggctcaccagccaacctcaagtactgtatcagaacaatggattatatagctcacatgactttggaacaagaccactggatccaggaacagcaggtcccagagtctggtacaggccaattccaagtcatatgcctagtctgcataatatcccagtgcctgagaccaactatctaggaaatacacccaccatgccattcagctccttgccaccgacagatgaatctataaaatataccatatacaatagtactggcattcagattggagcctacaaatatatggagattgttgggacgagttcttcactaggtagacagcacacatctgtacatctcggagtcagacgtatgagcgaggatgaggagttcc

SEQ ID NO: 371178 - DNA, 898 bp, Homo Sapiens
agcggggggactccgtggcccgggtattcgcgccgccgccgccagccatgcgcttccgctttggggtggtggtgccacccgccgtggccggcgccaggccggagctgctggtggtggggtcgcggcccgagctggggcgttgggagccgcgcggtgccgtccgcctgaggccggccggcaccgcggcgggcgacggggccctggcgctgcaggagccgggcctgtggctcggggaggtggagctggcggccgaggaggcggcgcaggacggggcggagccgggccgcgtggacacgttctggtacaagttcctgaagcgggagccgggaggagagctctcctgggaaggcaatggacctcatcatgaaccgttgctgtacttacaatgaaaaacaactttggtggaatggtgtgtattgtctcccaataggacactggattgagggccactggacacaccaatgaaattgaagcacacaacaagacttctattttaatattgcaggccaccaagccatgcattattcaagaattctaccaaatatctggactggggtagctgccctcgtcaggtggaacatgtaaccatcaaactgaagcatgaattggggattacagctgtaatgaatttcaagactgaatgggatattgtacagaattcctcaggctgtaaccgctacccagagcccatgactccagacacttatgattaaacctatataggggaaagaaggcttggcctaccatctgggatgccaacaccagaatttgagcaccgaaggcccgagtacgaatgctgccccaggcggtgttcctgctggattcgctgcctgcaaaaggcaccctcgtgtacgtgcctggaagtgggtgggcgatcacaagggggttaagaggcccg

SEQ ID NO: 371179 - DNA, 773 bp, Homo Sapiens
  misc_feature (97)..(160): n is a, c, g, or t
agcgggccgggctgaggagccgggagtccgccgcgccggctcggggctgcgggatggggagttagcgccacggcggcggcagtggccgcagcgcacnnnnnnnnnnnnnnnnnnnnnnnnnnnnnnnnnnnnnnnnnnnnnnnnnnnnnnnnnnnnnnnnaggcccgcgggcggcggcggagctgggcaggtggatgcggctggaagatggcgccctcgggcccgggcagcagcgccaggcggcggtgccggcgggtgctgtactggatcccggtggtgttcatcaccctcctgctcggctggtcctactacgcctacgccatccagctgtgcatagtgtccatggaaaacactggcgaacaagttgtgtgcctgatggcctatcatctactttttgcaatgtttgtctggtcatactggaaaactatctttacattaccaatgaatccttcaaaagaattccatctctcttatgcagagacaagattcgttggagagagagccaagaggagaagcccatcaggaagttcttaggcgagcagccaaggatcttcccatctataccaggaccatgtctggagccatccgatactgtgacagatgccaacttataaaaccagatcgctgccatcactgctccgtctgtgataaatgtatcttgaaagatggatcatcattgtccatgggtgaacaattgtgtaggatcttcaaattacaagttctttctccttttcttggcttattctagctctacggcctttttatgccgcaaa

SEQ ID NO: 371180 - DNA, 271 bp, Homo Sapiens
gtagatatcttgcattaccatggagtcacatattaaattgagctcatgataaaatgcacaatgaaatggcttgcttggtggtctgaagaaaaatagtcaaagtacagattgtaaggttgaacaatttaaaaaataaatagaggagcaatctgcagaaatttgtagagggtgagacaaaaggaggaatgtaggatgagtccaaagccttcagctgaggtgactgggcagatagtgatggctttaagtgaaataaggacaaatgaaacaagag

SEQ ID NO: 371181 - DNA, 941 bp, Homo Sapiens
  misc_feature (55)..(131): n is a, c, g, or t
  misc_feature (258)..(270): n is a, c, g, or t
agcggggttgaggataaatagactatactatggggtgacaatgtgctccgtaacnnnnnnnnnnnnnnnnnnnnnnnnnnnnnnnnnnnnnnnnnnnnnnnnnnnnnnnnnnnnnnnnnnnnnnnnnnnnnaaaatagtagtataccagtgttagtgacaagtgccttattagtaatatatggtgttaacatcagggaaaactaattggtgaggtatgcaggagactttctgagctatctttgtaacttctctttccnnnnnnnnnnnnnaaagcagtctccaaaaggcagactcatggatcaattttagatatcccgatggttttgggtagaatggaaaagtaaaatcacggcagcactgagagtggcctgacctactttagtgaagagctgatggtgaagggctctggcttttgcctcattctctgggaagatctggtgagccacacgaggggtctcttggtagttgggatactacagttcttggaacgttagtttgtgaaatggcactccactgtgctttgtagagtacccgtggctgagctcgggctactcatgcacaccgagccacgccagctggctgggggaatctacaccttggccaaggagactctggcgtgggagcttcggagtctagatctggaaagtggaaggaggggtggagaagaagggatagctagcccggaatctcttcgggaaaagtccactgaagctgttcgaaatctttaatgtgcctgttgcccctcccttcctaaaaatacgtccattttctcattgaaggaatagtggggaattataatggttcacaggtagaactgggccaatgtggcattgtggattttaccccctcgggtctaagcccacattcacaacaaattttttaaggaaaaattttaatttttctaaccttttctaaatgggctggactgttacattgagaa

SEQ ID NO: 371182 - DNA, 806 bp, Homo Sapiens
agcggaggaggagctggaagtgctaaagggtaagatgatggcatgcaaacactgcagtgacattttcagcaaggagggtgctttgaaactagcagccacaggcagagaggaccaggaattgaaacagatgatgagaaggactcacttacgaagcagctgagagagatggaactggaactggcacaaaccaaattgccgttggtggaggccaagtgtaaaattcaggaacttgaacatcagagaggagcccttatgaatgaaatccaagctgcgaaaaactcttggtttagcaaaaccctgaactctatcaaaacggacacgggcacccagccattgcagcgcagcaccggtcacccagccacccaaggagagcacataggttccagccttacccaagcacaacgagcacaatgtgcaaaccaagtggaaatctgggaggacttcttcctggtgtccctttgaaggaaagtcaagggaggccagaacagacaagccagaatttttcagtagctctcactctttcttgtatgacacttttcaaagggatgctatttaaactgacctgtactatggttgaacacctatgttccagccttctggacaggccatgtccacatccatcagtagtagttaacacagttacttgtcaggtgttgccgtgacatgtttaagttgggaaagtgaagtaattcagaacgtaaatgcgtttgtgagtttagaattattcataattatttttatcttacataaaaatggagacatctgttattccaaggttgaagtgataagaagatctttgtcacagg

SEQ ID NO: 371183 - DNA, 942 bp, Homo Sapiens
gttggagtgcagtgggatgtttgggggccttgccagcttcggcatggtggggttgctctttcggtcatgctaggtagtggccggtgcgtcgtcgcactatgcgtccgctggcctccgccgactgtgcccaacttctagcaagtcccttcgttagggaggttcggatgctctagtcgtctcgtgccggctgtcaagtcagtcgtggtagggggcgcgggcctggtccaggggactcaagcagtccggctcatgtggtcagcgtggagctaattggcttgagttcgctgtcttgacagagagcattgtgggggttgttggaggctctggagaggttgccgggggggtctagccggggaggccgctgcacctgggcataaggactgccatccaggggaccccgggtgtgggtcaaggagccatccacactgtcctcgtggtgctgggttgaagttctcataggagtcccagcgcacggctggctcagtggtgttgtagtcgacagagaccgaggggtcgttccgtggagtgctgcctttgatcttctcggggctggaggagaagacaaactccacggaggcttggaaggggaacctctcatcagtccaggcctcgtcaagctggtccttggggaaagtgagctgtggtccgtggatggtgcaggtgtggaactggactcggaacacgagggtccggtctgtgccccggccacccttgtgataacatgttaccatgacatcgcctttgaggaggagggctggctccaggctgatgcaaagctgctggggaccagggcctgcaatgtgatagactccagatgtgtagacaagctgcatggactggctagatttaaggaagggctggaagccctggaggggcagagcgagaaggcacaggcacgggctgctgagctgcgagagggccctgaaggctggtctctcccat

SEQ ID NO: 371184 - DNA, 655 bp, Homo Sapiens
ctattctgattgtcatataatcaggctaagacagattaaaccttccttcctatacttcctttctaaaaataagaaaaccactagaactaaaattctggacagaaaatccagacacctcaccaatgatgatataaggattgcagattaagtatatgaaaaggtgctccacatcactatgggattgggaattaaaacgatgagaccactattcacccattagctaaaatgcaagagtgacatcaccaaatactaatgagggtgaggagctacaggaactcttattcattgtcaatgggaattcaaaatagtcatgttggaacagtttggcagtttcttccaaaactaaacatactcttaacttacaatccagcaacctggttccttggtatttacccaaaggagctgaaaacgagtctacacaaaaacctgcacataaatgtttatagcagctttattcccttcctacaaacttcagattctcttctaatttgcttaacttggggagtgggagggtaatgtatttctaatgcgatagcgcaatttggattggaactctactgctgacatacataccattctcctctatactataggtcctaccaattcaatgtgagtgtcttccgataatttaggggaaactctcagaacaatggag

SEQ ID NO: 371185 - DNA, 695 bp, Homo Sapiens
gggagagagacagaaagtatgacacacaaaagaattaatttgttcaactttgatggaaggtaaacccctttagttctcactttgtttttaagactaggaaaagattcaaacttcttaattatggattatccaccatgttctttccttcctcggaatctttgagatccaagaacgtctgttctttaagatgtaacaaaaaacacctgaagaaatttgaaaatgacagaatgttaaatcataatagatagcagaattatggttttgtaagaaaatacctgatttttaggagatgcatgctgatatatttagtggtgaagttcaatgatgtttgcaacttcacatggttcaaaaaattttataaatatataattatacatatacataaagcaaatatggcaaattgttgttgaatttagatgatggcaatatgagtagtgtttaaaatagttaggtcaggcggggtgcagtggctcacgcctggaatcccaacactttgggaagccaatgagggaagatcacttaagtgatctccctcttgcaacatagcaagacctcgtctccacaaaaaataaagattagccaggcatggtggcaaatacctgcggtcccagctacttgggagccgaggaggaaggatcacccgagcctgggagttcggctgcagtgagccatgtttataccactgcactcccgct

SEQ ID NO: 371186 - DNA, 588 bp, Homo Sapiens
  misc_feature (159)..(169): n is a, c, g, or t
cataccatttcaaaaaagaaacataaaataaccaaataggaaataaacttaaaagcaaggcattatctcatcactacttctaagtcccacagagctactagtaacttcaacattcagcagggcagactgaaatcaaaacctttgggctcagtattgccnnnnnnnnnnntaataacatgacagtctctgtccttaaggaactatactctagccagtaaaacaagatatttaaacaattatcccacagtataagaaattatatcaataaatgctaaattgtatgaatcagatttaaagtagcataggtcaaagggataggtttgcaagggccaaagaagtcaaaggactacatgaagatcgggcttccactgaaccttgaaggcaggacagactagataagtaacactatgataaactgcaagctcataaggacagaggccatgcctctctctcttgcttaccaacgaatcccaatgtctggcacactgcctagaacacagtgacactcaaatatttgtagatgaaacagaaggataaatagaaggaagaaggtgaagaagaagggaggggaaaagagaaactcccgct

SEQ ID NO: 371187 - DNA, 832 bp, Homo Sapiens
gggacttaagcatgtcaaaggtcaagttggagaccggtccgagtgtgttccttagctaaaaaggttgaggcaatgattcttccaaggggtaagagtcgatgtaccaggctattttggccagtaaggttcaaaccagcttgcaagggacaattatatagctttaaaaacccgataaaaggtatttataagacagagatcacaaagaacaatttgttcatttggatttttctgcctgctggatcacaaagttaatatttttaaaaccatactctcagaaacctgtcattgaactataaagattatatatcagaaaatacttatatctctactaccatagcagttactgacataaaaatctgaatgcatgattttattattcagtacgataacaaagtctaagagaagaaccatggcaactgacaaagactactggtttttaaaattttttatgttttctgaagctgcacaccctgaaagaaaagcaaaatataatctatacaaaagaaagaatcattctgtttcacttatcaccatatttctaatatacaaaccaatgcttgcacatagtagttactcagtaaatataaataaaagaatgtttgaatgaatttatggatacatgaataaaggcaaggagttttaaaaatattaaacatgtaaattacagacataaagttcaagtagtacaactttttcatagcaacaatattcattactaaataaatattaagcatagactaaatcaactctttatattacccaagatgtattttctcaaatatttaggggtaggttaaatgcaaagaacataatatgctcatgatccaccgct

SEQ ID NO: 371188 - DNA, 584 bp, Homo Sapiens
gcacacatatcaagctgatacaaattctgcatggattatttttaagcctccttccttcaggagtaagttacagtgtaaagaacatagctttgcagccagactgggcttatatcctgcccacacaacttgctaactgtgtgaccttgggcaagttagttaactctcagagccttgggttcttcaataacaaaacccaggttttaggattgttgggatgttaaatgaaatagtgtatataaagtgtcaagcatgtaacagcatgctcaagaaatatgttttcttgtatgctagaagcaggtacatcagatgcctctttatcacatttgccttagttcacaaagcaattaaaaatagatacagggtgggaggggataaaggataaaaaaactacatattagatacaatgtacactactggggtcactcgggtgaagagtgtagcaaaatctcagacttcaccactagacaattcatccatgtaaccaaaaaccacttgtatcccaaaagctgttgaaataaaacatatatttaaaaaaataggtacagctagaagataagatgatggctttaaaaaagcaggccgct

SEQ ID NO: 371189 - DNA, 785 bp, Homo Sapiens
  misc_feature (443)..(443): n is a, c, g, or t
gagcggagtacacgcggagaactgggaagacagaaagaacaatcctttaagggagaacctagaagccattcaacaaggttaaaatcttcaggcttccgaggatttggtagacagatcagaggcacgtttcccacaactgcgaagaggcgctgaggcaattctgcaagaagattttggggttttggaaaagaagctatggaaaacggaggggcaggcactctgcagataaggcaagtcctgcttttctttgttctgctgggaatgtctcaggcgggctctgaaactgggaactttctggtgatggaggaattgcagagcgggagctttgtaggaaactttggcaaagaccctgggactcgaggtgagtgagctgtcttcgcggggggctcgtggtggtttctaatgataacaaagagtgtctgcagctggacacaaacactggnggatttgctcctgagagaaatgctagacagggaggagctctgtggctccaatgacccttgtgtgctgtatttcccaagtgttaatgagaaaccccacgcagtttttacaaagttgagctccaggtcagggatataagatgatcactctcccgtcttcttggaacaagaaatgctcttagaaatcccagagaacagtcctgtacggtgctgtgtacattgcttgacacgtgcaaaggactctcagatgtcgggaatcaagggctgtacagacagctagcgcaagaaatccgaactctcattgcacgttaaaaatcagagtaatccagacaataggaactacct

SEQ ID NO: 371190 - DNA, 695 bp, Homo Sapiens
agcgggacgagcctgtctgcagacagcattgtgccaataaggatttcagcgaacatgaatttgatccagactcttacaagattcctttcgtgattctttctttgaagacatttgcgccccaggttcacagtcttctccagagccacgagggcaccgtgcctttattgagctttccagatcgtccacattgcagagtttggcgatctagaagtagtgcaagaaaaccaaggaggtgtcccttagaagcacttcattacctgtgttccaggtgtaaacagttgccactgctcagaatggcatcaaagtggttaaatggattcacaacaagcccccgtgtcccaacactgacccttggcttctgcgttcgaagagtcctgtaggtaacccccagctgatccagttcagtagagaagtgattgacttgctgaaaagccagccatcttgtgtcatacccatcagtcatttcatcccatcctatcaccatcattttgcaaagcagtgccgagtgtcagactacggatactccaagctgattgagttattagaagcagtgcctcatgtattgcagattcttggaatgggctccaaacgtctgctgacccttacccacagggcccaggtgaagcgctttactcaggatttactaaaactttctcaaatcccaggccagcgaaacaggtcattggtgagagaat

SEQ ID NO: 371191 - DNA, 1097 bp, Homo Sapiens
  misc_feature (477)..(477): n is a, c, g, or t
  misc_feature (492)..(492): n is a, c, g, or t
cccctcctctcaaaggtgtcacatgcccccggatgtggcccttaagatccattctttctgaggaatttttctgtgattttttgggttaatttaaatgaaaaaggaacgcgttaaatttctgaaagtaaacctccatcaaaattaactaaaaatgcaatacaccacaaatcagtcaaagttgaagatttaatttcgcagcatcttagagcatgttttcggcaatgggggcccataatgttttaccgatgattaattggaacacccgcgccatctgcgccagggggcaatttgcttaatcgcagatttaagtcaaattgagattagcattgagatttttaaatcgtaagtttttaaccatctttgggatcccctgcattcaaagcaatgcctagtttttaagtatcgagaattgatatctaattaatgtatgagtcgtaggtgcgatggctgcttccatttttgaagctttctgcattntgttcccaattcctnttttgtcaattacgtcatggttggtcattcatctctgcatgtaaaatcgctcttcatcgtagtctttgattgtcagccctgttgatcttgggtcagcagcgccagaatatcttgttgagttctcatattagttccaggtactgtttcggctgtctctcgttctttgttcctcgaggtggtccgttatagggaatgcaggttgctcatcagtcgtgagtcatgtagcggcctgctcatcttgagtcccgccatgatatgggctttgatcgccgatgtgtaggcctccagcgagtcatgaggccctcgaggccagcttccgagttcatgcaattggtgttccgaggtctgttcacatacgacagcgggcgtctccccatagactcgagcgatacataccgataccattcctataatactctgtatgtagctccacggtgggcttaggccacccctgacccctactgccgaggctgctgcagaggagccgccgccacccacaccgctgtggagcagccgcacatgctagactccgcttcagtaaagcccgggcggtgagggctgccgcagaggcgagcccgctccagacagtggcggttgcctccgct

SEQ ID NO: 371192 - DNA, 1025 bp, Homo Sapiens
agcgggctttgtcccttaagcttaggtggttgctcttttcctgatgagtctactttatcctaaagttagtaaacttgctttgccactggccctttcaaactaggggtgataaaaatcactctaaccaaaggttactgcagtctcttgtgttctttctcatcccttcaacagctttgcaaagagtctccaaatcctctctgcattatgcttattaaattgcactatcagtttctttatatgaccccaacaaatatatgaatctcctagttagggaaactgatagactaagagtacttttctttcatgttcaaagctagaaggtaaatattttctaataatgtgaagcagttgaaatgacaatttgggttagagctgtgctgtggactacagctatttgaaagtacagttttatttttatgacagtttgctctctgctctctgggatatttacattttcctttccctatggagaaggtcagagtatgattgattcaacattaaaaataactttaggttgtttaaagtgaggatgttctaaatgataatatttgtgaagtcctctattttgatatttttcacttaagatcagtgatttagaaatcaagtgaaaatcttgtaaccatttgaatgaacatactgatattaacaaaatgataagtattttacactgatcatccaagttagaattttgacagaatgcctagggtcttggagtaaccagcttttggcaattcctggctctctttttcatattcaaattcgtaaagaaagcagagaagagtaaatgtgtgtgggtgtcttcctcctggaagtaggcacaaactgcatggaaaaccaaccaaaaaatggtaacagaaaaatatgataataatttatttaaaaataaaattctttagactttgtcataactggaagactatctagaatggtgactgaagtaaggacccaaataagacgcattctaatctcatattctggccatgcgggtggatgagcgggtacggccgattcgatcgcaggggggc

SEQ ID NO: 371193 - DNA, 948 bp, Homo Sapiens
agcgggtctactataaaagtcaggcgggctgaggaggagacaaaggccaggacgctccgcagctgttggggaagaggagctgcctcctgggatggagaaatttaaggctgcgatgttgctggggagcgtcggcgatgctcttggctacagaaatgtctgcaaggagaacagcactgtaggcatgaagatccaggaggagctgcaacgttccgggggcctggaccacctcgtactctcgccaggagaatggcccgtgagtgacaacaccatcatgcacatcgcaaccgccgaggccctcaccacagactactggtgcctggatgatctgtaccgggagatggtgagatgctatgtggaaatcgttgagaagcttccaggaacgccggccagacccagctaccattgaaggctgtgctcagctaaagcccaataactaccttctcgcctggcacacaccgtttcaatgagaaaaggctcagggtttggagcggccaccaaggccaatgtgcatcgggcctgcggtaactggaaggcctgagcggctggagaaccctcaatcgaggtcagcgtggagtgcgggccggatgacccacaaccatcccacaggcttcctggggccccctgtgcacggccctgtaggtagtcggacgccggcacaaggaaagccgcctggtccagtgggggagagacatgctgcgggcggggcctctggcagaaagagtactgccaggaaagacccatccggcacacggcagaatacccaagagcacctggttttactttgaagccttaatgggcactctcattccggacggacgaggaaacatccggtaaggactccggaaaatatagccatctttcccgacacttttgattgccaaagacagcggacaagacctaccggaagttgagctcgaaggccaggggcaaaacaggccacgagcccca

SEQ ID NO: 371194 - DNA, 965 bp, Homo Sapiens
  misc_feature (559)..(584): n is a, c, g, or t
  misc_feature (587)..(829): n is a, c, g, or t
gatttgaacggcctgtgacgatgcaccaggccagcacagcaagggttttaaggttccgagcctaccacaacgagggaaatccggggaattttcggggaggaaacaccggaaaggacccataaggggtgaagcataggaaaatagtgagatgaataaaggggatttctaatcagcggctggtgggaccttcccagggggaagtcttctgggtcatgcctggtttctgtgcgtatggattcaggagagggtttttgcctggagatatgggtttcagagagcaaagccagagaagtagcatagttagtatcttttgtcacatcttgctcttatgcatgaaaaaatcttttctccactatcgctacacaatgtcattatttcctcaaagctgaaagagaggctcattaaactataaaacaatcctatatacatcattccaaatcctcgttcttctattgtaagcacaaaaaacctgcttctgtttgcctctcactctatagggccataaaacatgtcctggtggacatctggtggcagaaaaggcttgatggacttgccctannnnnnnnnnnnnnnnnnnnnnnnnnatnnnnnnnnnnnnnnnnnnnnnnnnnnnnnnnnnnnnnnnnnnnnnnnnnnnnnnnnnnnnnnnnnnnnnnnnnnnnnnnnnnnnnnnnnnnnnnnnnnnnnnnnnnnnnnnnnnnnnnnnnnnnnnnnnnnnnnnnnnnnnnnnnnnnnnnnnnnnnnnnnnnnnnnnnnnnnnnnnnnnnnnnnnnnnnnnnnnnnnnnnnnnnnnnnnnnnnnnnnnnnnnnnnnnnnnnnnnnnnnnnnnttatgtgtaatagggcccagacacatgccctattttctatagtaacttccaagtcccccccattaggtttccattggtttattgctattttcccgattctctttgtgccttcctcccctttaaagtggactccgct

SEQ ID NO: 371195 - DNA, 753 bp, Homo Sapiens
  misc_feature (113)..(152): n is a, c, g, or t
  misc_feature (157)..(157): n is a, c, g, or t
  misc_feature (208)..(262): n is a, c, g, or t
gccatgtagagcagggagtaggagggcaaggaaggaggggatggccaggacacatggttcctgagctaagcctaactccccacgtttctcattcttcaccctccacctctgannnnnnnnnnnnnnnnnnnnnnnnnnnnnnnnnnnnnnnntggcncgccaggacctggccagggcttgactgcctctggccctcttattatagttnnnnnnnnnnnnnnnnnnnnnnnnnnnnnnnnnnnnnnnnnnnnnnnnnnnnnnncatacacagccatctgggagggaagcacctgctaaatagggcccatgggaatgagaggggagggctttgtgaggggagaatgggtctccccatctctaggtctgataactggagtcccttgggcagaaactgcaattcccatcagcccccaaaaggtgagaactataactcccatcagtccttggaggagtgtagaacacaattcccatcagccactgagtcaacaaccgtgactcccatcagcctcctggtcctcctctcaaaccaaaattgtgcaacctcctggtttggggtagaagggagctggggctcagctctaggtggctggtgggaggacttgctcctcttgcaggggcacctctgggcctgacaagggttggaggtttcctctctgactctctcttcagcacagcctaagccctgcccacatctgagtgcctctcgctggtctctgcagggcgtggtcttcatagatcacgcccagaagcccc

SEQ ID NO: 371196 - DNA, 927 bp, Homo Sapiens
  misc_feature (778)..(778): n is a, c, g, or t
agcggatgggggtcctagatacctaggattgatataagctctctccaaatttttacatattgacaactaactcaaaaacttacaaacaccgtgctaatcaaatgaaacatgcctgtgagctgcattcaatccatggggcattggtttgcaagctatgttcttagaggtggtatgattttgtattgaaattaaatataaccaagagtatgtcaatttttgaccttggaacctggaccttttacctcatttatattctgtatttttgtatgtggggctttttggccagtcaaaatagaaagtctacagcttccattttataatctaacaagcaacaagaaacaacatttgaaaaagaaacaggaatatagccattttttctagcaccaataaaaatggaaatgtttttcatttgctttaagtcattaatcagctgaaaaagaatagaaagagaatttcattccataaagaacttcacctaaaactctcagtgaaagcaaaacaaaactccatgtaactcactcttagctttaaatctttaaaaagtgtttcgaagggatattgagtaaaaatgcagttatctattaaaaatacaaaatgctatattatatgatgctatgaattgatactggagctgataaaaccattaaagtaattattccaaatcagtgctgactgaaaagcaatatttccaaagctctagcttattttctgcggtcttttaattcccttgaaatagctttcttcaaggttgaagcaggaattttggggacaaaccttnatcctatgggcaggattttggcttcttacctccgggttaaacaccccagagacagggtgtacacaccggatgtagaattactagctgtggggggcagcgaaagggaaaggcctacacaagagaaaacatggccttaaagtccggggaag

SEQ ID NO: 371197 - DNA, 764 bp, Homo Sapiens
  misc_feature (82)..(110): n is a, c, g, or t
tgggacggcgcaccgcctccggtgctggcactaggggctggggtcggcgcggtgtcttctgcccttctgcagccgtcgacannnnnnnnnnnnnnnnnnnnnnnnnnnnngaacatttggcaaaacgaggggttcgaggcaggtgagagcatcctgcacgtcgccggggagcccgcgggcacttggcgcgctctcctgggaccgtctgcacgtggaaacccgaaagtttgttgtttaatatagtatttttatgcagatgtatttataaagatataagtaatttttttcttcccttttctccaccgccttgagagcgagtactttgtggcaaaggacggaggaaaagctcagcaacattttagggggcggtgtgtttctttctttcttatttctttttttaaggggaaaaaatttgagtgcatcgcgatggagaaaatgtcccgaccgctccccctgaatcccacctttatcccgcctccctacggcgtgctcaggtccctgcgtggagaacccgctgaagctccccgcttcaccacgaagacgcatttagtaaagataacagacaaggaaaagaagctggatgatgagagtaacagcccgacggtcccccagtcggcattcctggggcctaccttatgggacaaaacccttccctatgacggagatactttccagttggaatacacggacctggaggagtttttgtcagaaaatggcattccccccagcccatctcagcatgaccacagccctcaccctcctgg

SEQ ID NO: 371198 - DNA, 666 bp, Homo Sapiens
gagcggcttagcttgggagacggcagagtggggagctgtccctggaggggccagatccttgaggggtgggggacgaggagagacagccccaaaccgagaggaagaggcgtggcagggagcagggaggccacggggcggggaggagagaacctggcccctgcggggttagggaggccactggccgggaggggttggggctcgcgacgtgtccccatccattcccgccagcggacctggctgagtccgggcacacccccggaggctggggtcagcttcctgcagcccatctcgtgggccgtcgccaaactggctaccgaacgaaaggacacggccgcgctgaaggaaagaactgaatggaaactgatgaagtgtgaacaaaccaacagatgcaacaccagaaagaaaagcataggagatcgccatggaagagcctgaggaacaagcgatggaagccatgaaccgagcctagccacggaggcccccacaccgcaacggagggcacacgaccaaggaacaaagacaccccacggaaacaccagctcacgacgacacaggaggacacacaccacaacacaccaaagaaaacaagaaggagacaacccaagcacacagcaaaaagaaccaacagcgaaaccacaagcaaaagaccaaaaacacagaacaaca

SEQ ID NO: 371199 - DNA, 970 bp, Homo Sapiens
  misc_feature (313)..(323): n is a, c, g, or t
  misc_feature (874)..(874): n is a, c, g, or t
  misc_feature (915)..(915): n is a, c, g, or t
  misc_feature (940)..(940): n is a, c, g, or t
  misc_feature (949)..(949): n is a, c, g, or t
  misc_feature (960)..(960): n is a, c, g, or t
agcggtgaacttaaactctaattaattccaactgtacttttaaggcagtggctgtttttagactttcttatcacttatagttagtaatgtacacctactctatcagagaaaaacaggaaaggctcgaaatacaagccattctaaggaaattagggagtcagttgaaattctattctgatcttattctgtggtgtcttttgcagcccagacaaatgtggttacacactttttaagaaatacaattctacattgtcaagcttatgaaggttccaatcagatctttattgttattcaatttggatctttcagggannnnnnnnnnnaaattattatgggacaaaggacatttgttggaggggtgggagggaggaagaatttttaaatgtaaaacattcccaagtttggatcagggagttggaagttttcagaataaccagaactaagggtatgaaggacctgtattggggtcgatgtgatgcctctgcgaagaaccttgtgtgacaaatgagaaacatttggaagtttgtggtacgacctttagattccagagacatcagcatggctcaaagtgcagctccgttgggcagtgcaatggtataaatttcaagctggatatgtctaatgggtatttaaacaataaatgtgcagttttaactaacaggatatttaatgacaaccttctggttggtagggacatctgtttctaaatgtttattatgtacaatacagaaaaaaattttataaaattaagcaatgtgaaactgaattggagagtgataatacaagtcctttagtcttacccagtgaatcattctgttccatgtctttggacaaccatgaccttggacaatcatgaaatatgcatctcactggnatgcaaagaaaatcaggatggagcatgaatgggtactggtnaccgggttcatctgggactggcccnggaaaaatnaacttccaagncaacaatcct

SEQ ID NO: 371200 - DNA, 633 bp, Homo Sapiens
  misc_feature (50)..(87): n is a, c, g, or t
  misc_feature (269)..(277): n is a, c, g, or t
gtttcaccatgttggtcagggtagtcttgaactcctgacctcatgctctnnnnnnnnnnnnnnnnnnnnnnnnnnnnnnnnnnnnnntaagccacagcgcccgacccaaagtgttcttttttccttgaaaagaagtacagattttttaaaaagctaatattgctgtgattcaactctcaagttacttgatgctatttcttcatttctattgtattcacatgtgaaagcatgtgatcagttgtcacggcatcaaagataggagagtttcnnnnnnnnnaggtgggcattatttatgaccttttctttggaagagtaaggacattaaaatgtaacatgcatgatgaaaatctaagtggagatgatatttgtggttaattatgatattgagtggtgcatgaggtaggtgtttagagtaatattcttttgcattatagtaagaacatttaagttttgttaaaattaaaaaattagtagtacgttattttactatttgtacttttatgtaataaaatgcagtacatttttaaattttcagatgatgtgtgaacttgtttcattatacatttttaacatgttaatactattgtgcattcaatgaagcattattatgccactaactgaaacctatcccat

SEQ ID NO: 371201 - DNA, 895 bp, Homo Sapiens
  misc_feature (680)..(709): n is a, c, g, or t
gggcgctggcggcggagcggtgtgcgcttgctcggcggggcgttctgctgggcggcggtagtattgcggggcttttcggcgctgtaggggcgccctaggcgggagggcggggtgcggggcagcggcgtgtgcggacgcgtttggccgtgtgcgggcgggcgcctccagggtgagtgttcccgggcgtgtttactgcgggatagggcgccgtacggtgacgcccgggctgctccatggggggaaggtcctccgggaagggtaggtagtagcttggagcgcccgcggggcgagggcgtggaggagctccagggctcttcggtgggagggcggtgaggggatctgggggatgccgcgctggggcgggagacgcgctgcctgggcgagggccgagcagtcgcggcgaagcctctggccgtcgactaactgtgcggaactggggacagagtgggggcaggggtgaagggcggggagtcccctctgggcctccgcccacaaattacaagctcaagctactgccacaactcaactcccgccgtccccatctgccagacgcacccgccgggcatctgtctcccatatttctttcgagatccacggactctctcctagctcctgctggcttccctggcatccttccgctagcaaacagcccaggaaagacaacgggcattaacattttnnnnnnnnnnnnnnnnnnnnnnnnnnnnnngccagcgtaaactgttacaacagcacaacagaagagctgagattgtgtctgactagcctcagtttcttggagtaccagtggaagtaaaccctcacgccgcgtctgtcgctcggtaaggcactaggagggaaggatgcagtgtcaagactgcgccagctagggtggcggcgccgagggccagccgct

SEQ ID NO: 371202 - DNA, 1056 bp, Homo Sapiens
gagcgagagggcctacaaccggggcagcaggaaaaaggatgactatatggagtcagggaccaagaaggataactccatcctggaaatccgcggccctgggctgcagatgctgcccatcaacccgtaccgcgccaaagaggagtacgtggtccacactatcttcccctccaacggcagcagcctctgcaaggccacacacaccattggctacggcaccacgcggggctaccgggacggcggcatccccgacatagactactcctacacatgatgcccgcccacccgggctgccccgcctcagccccagctgccctggcgtggccatgtggctttgcccagcctgctgcaatccaagagagcaaggaagagaaattccatgggtgactttcctccgcagaaagcaaagtttggggagggctgacgattttgtagaacacaacagtgacaattttttttaacacagaatagaaggcaggagggggaattcgacattgttgaagacataatttataccaagttatgccagttggggagggaaggactaaaaataatattgcaggcagggctgggatagggtatcaatcaattgtccccccttgagctggggacaggatactacctgttccaacatctgtggacaccctcatggctctgttcaaggccatctgaataggaaccggcagggaagaaagcaagcccgggtcacaagagtccccacgcagagtctccccgcccagtggccattcggctggacgaacccgaatggacggggttccaggggctcctcacaaaagggacgacaagggagaacacacacaagaatctttgccacgcgtgaacgaataatgggcccgtgagaaatgtctctcccccggggattaatcccaaaaccatattccccttggagaattttgtgagaaaacactgggcactctgtacccagggcaattctagtgggaacacaccgcgtgttgctcgtacattacacacagaacaacaacagcaaaaaaacaacacatctctacgcggtgaaacacgcccaaagggcgctgccaa

SEQ ID NO: 371203 - DNA, 545 bp, Homo Sapiens
tattattatgactatcgggaggaaaataccaagagtttggagtatgctccttacccagggtccccataaaccaaaccacctaaaattaaatagattaaagaatgagctagatgaagagtctactcgcttgactaagtggtcttttcattaatcccctacaactgaatttttataatctacatttgatgtatttctccataggccacaagtgtcagcagctgcacaggtacttttctgtttagccaattctattatttagcataactttcacaagagaatttaaagtctgttgtgtaacgtaggcctttaaagtagaatttgctgtagagcctattatgagggagacatttctaattattgcctcttttagtctaaaccatggaaaaaggacctaacaaatgatgtccatctagaagagtgaaggccacctggcaatgttctctttaacccatgatgtgggttaagaggagttttgactgattatgaggcaacataagtaccactaaagtttctcacttacattgggccttcatcttttatccgct

SEQ ID NO: 371204 - DNA, 1220 bp, Homo Sapiens
  misc_feature (884)..(884): n is a, c, g, or t
tggactttgggattggaggtgagagtagagaaggcataatgcacgtttttgagacgagggaaatgtgaatatagcctgtatgcctacactcaagtctgaagacatgtaaaccatgtctatactaaccagccaaatatttgaacactaaaaggaagaattttcttaatgtggtaatggtatcatggttgtatagaatgttcctcctcttgggagatgtgtgttgaaaatagggtttgacgtctaaacctattttgttttggcaaaaaggacgtgtgtctgtacaaaagaagtggagccagtatggcaaaatgtttacaaggactctgggtgagaggtacataggtgcttactatactgttttgtttctgaatttggaatttctcaaaattaaaaaaatatctactgaggagcttttcgttttaactggtggggaatgggttctgggtggttttgccccttttctttttagattcaagaaatccatggtgaaaggtttggattcctatgaagaaaaggaggataaagtgatcaaggaggtaagttaaagtagcagtccctcaccctttttgcaccaggggctggtttcgtggaagacggtttttccacagatggacccaggcaggggatggtttcagaatgagactgctccacctcagatcatcaggcactagattctcataaggagcacgcaacctagataccttgcatgcccagttcacaatagtgtttgtgctcctatgagaatgtaacaccaccactgatctgacaggagctcaggcggcagtgctgttgcagcctgcttcctgacaggccacagaccagtactggtccacgcctgggggtggagggcccaagttaaaggaaaggcctctgaagaaactggnccccatgatcctgtacctgtctaagcagcctctctcccacagatggcagctcagatccgtgacgtggagcagagcccgacaggaggtggttcgggctgtcttaaggttggtttccctcgggagatccagaaccacctcagcagtgccagaccagaagagggtcttcagcactagaagctggaagggatgaaaccggtagactatcacggaactcttgtgggaatttgcctcttgaacttctgcacctttgctcggaagggacccgtctatctttcaccccttgtccaggacccttggggcctgtccggtttcgccagtgctcgttcgcgccccatt

SEQ ID NO: 371205 - DNA, 891 bp, Homo Sapiens
  misc_feature (549)..(549): n is a, c, g, or t
  misc_feature (775)..(775): n is a, c, g, or t
  misc_feature (804)..(804): n is a, c, g, or t
ggcactgcgaccgcactgcacagatgagcaaaggaaggccaacttcagcattccctcctcctctctaagcccctccaaaaggcctgctcagggagctcggccaccgttctcaagcaattgcctgacgtttttactgacactgagggctggagatggtcccttttccaggcagctatgtgtccatttcctagagagggaaactgagtcccagagaaggcgggtgtggctggaggccatgggtcagtcataggcataaccatgccgtgaataaccgtcttggcactctctgacttctttccctggcaatacaacggatcccagtgcccatttgtcacataaggaaactgaggctggcgtcttcgatgaagcctggcaggagtgggggtcacacacggagtgcaaggctgtccaagccttcaaggtcattctgactgatctttgagccttagcaatacaggacgtgggtccaagagcatttccagcacaaaatggcgcctcatatgaaaaatgtagtcggagttccagcgcccacctccaccacggctcaanaggagggggcgcgggcggcagcgcacacttcatttgcatatacaaaaatcaacggatttcgttggctggcagcggtttgatctgcacgaaactgggtcgccctctgaccggtctctatcagtcattggcccatgcgagtctcgtgacccaccagtcactaaagcgcatccctattggcccgagcgccttccatcacgcgtttaaaaccccgagtcccgcctccccntgccacgctccggcccccaggaagaccgntttcgtgcgcgacttcctcagcgtcaggtgcccgcgcgtatgccggccgtggcggcgtctcattcaaacggtccaatcagcgttccc

SEQ ID NO: 371206 - DNA, 981 bp, Homo Sapiens
agcgagattgctcatgtaactcttgagtttacatgtaatcaacatatgctcattgaaaacgggattgcttcaagaggactttgagtccagggtgattaggtaagtaccaagatgtaaaaaggtagaaacattattgtacacttgagtctaccatacatgttcttataagtgccaacgcctgtattctgttaggctcagaagatcaaaggatttggctcttttaaaatatagaaagctctagcttcagctagaatttaggcctttagtaatagccctaatttttatgaagccattttgttccagtgatcttttggtgagagatgctatgtaagtactattcttcagaattaggtgtctttttaccctaatgaacataatttagattgcttatgatacaggtaaaacaaatatcctggcttccataattgtagaaaaaacttcatataggaatccttgatgtatcacaagtagcacctgatgggaatgaacagacaggaatggatgaaggatagcagttggcgttccatttcaagcctatgggctcacacatttattcagataagaacaccacctttcactagataaactccaacagtattcatgcatacttttgaatggcatgtaggaaatgtttgataggtacataatgtattcacttcagagtcactaatgtaatacggggtcgtgctccttagtgttgacagatcacctatggttctccaaaatgaacattctagtacaggaggtctagggaggaacctgagagtatactaatgcctaggaactttctctggagtggcaagagcagtgggaagaattatgtcaatagctacagaaataagggagtaagaacaagtcatctctctagtgaattcttcttcactttactgagataaacatacatgttaatgagcttgagttttcccaaaagtataattcttctggttcttctaagaaaatggcactccctgtggacaagta

SEQ ID NO: 371207 - DNA, 608 bp, Homo Sapiens
  misc_feature (224)..(312): n is a, c, g, or t
  misc_feature (361)..(466): n is a, c, g, or t
ttcatagtaataataaagtccctgcatgcagtttggaaataaaatttaaactcatttatgtgtaataaatatgtaataattcacagtcaccatcaaatgttggaatcattgaattgcatacttgtactcattccggccacatcatgaagtgtttaaagatttgtatttgctgttgtccctatgtagttctattgatgtttggtttgttttttggggttgttttnnnnnnnnnnnnnnnnnnnnnnnnnnnnnnnnnnnnnnnnnnnnnnnnnnnnnnnnnnnnnnnnnnnnnnnnnnnnnnnnnnnnnnnnnggtagctggtctgcaggtgctcaccaccacacctggctgatttttgtannnnnnnnnnnnnnnnnnnnnnnnnnnnnnnnnnnnnnnnnnnnnnnnnnnnnnnnnnnnnnnnnnnnnnnnnnnnnnnnnnnnnnnnnnnnnnnnnnnnnnnnnnataagccactgtgcccagcctgtttttaataatgatattaagtgggtttggttcatgtgttattaatcagtgttaataatcgtacttttttgttgttttaagaagaaaccagggtattctaagaatcagggagttccaaatt

SEQ ID NO: 371208 - DNA, 547 bp, Homo Sapiens
ctaccattatttgtttaagacacacaattccatagatctttagcaagactttctattagcaagacttccatctccagaaagctccagaaatgtagccatcatctctagatttagttaaacccctcatcttcaagaattctttctcaagggacaatgccaaaatgcacctgcaattaaagaagtattcatttgaggaatcaggtgtcagtcttctcttcttgcaggacttctcaatctctccaagacattgccctagaacagtcccacccctagtagaagagggagtggccaccaaccacggaactccttgaaagcccaaaggacactgataacagttgattttctcccctgtcctctcttcatctagaacaggcagagggtgttaggtaatggataattataaaagggtcttgtctgtgtcctattagggtatcattaactttctttataaggaggggaaactgagcatccatttttggcattggtgagtcttgattaccatttctggggcaacagataagtccccctcaaaagcttttataccgct

SEQ ID NO: 371209 - DNA, 606 bp, Homo Sapiens
gtggactcggcagctgcggcagtggtccctgcatccggagggagggtgctggctgctaaacctagaggagggggtggggtattttctgattcaccatcatgtcctccgggtccaatggccagtggtgctccccacgaatacttctttttcagctccagctgctgtgtgcgctccagggaccggcgcatcatcgcctccagccgttcctcctcctcccggagcttctgtttccttttctcttccacagcagctctcttttggtcctcccgctgccgctgctcttccagttttcgccatcgctcctccatttgcttttcgtactgcagcctggctcttttctgtttctccaggatctgttgctcccgagcagccagacatttttctctttcttctcgtctttctttggccaatctctgcctctcatctgatttcaaaaatccctccatgccttgaggccggtagttgggctgagaggtccgcaccgcgcccggttctgcgatcttccctgggagagaggttccccgcgcagtcccctcaggccgggatcccgtcccggagccgccgccgccgcgctccatcgggatgcgccggccgcacaggcgcact

SEQ ID NO: 371210 - DNA, 1292 bp, Homo Sapiens
agctggatctacagaaacgccgcttggcctttggactacaccatctgtcgctcgctctaacgagccggcgttgcctgccaggggacgctcgggccgcaggaggtcgctgtggtacgtgacgctggcagcctggggacgcctgaggcgacttgcgtgaggttatccctacacgcagtccttgcgtatacctggcttgcacacgaccggagcaatccctattggtaagttgtccctgtaggggcaggcagacaagtgccatattggaaaagaaacacttcactacgatagtgctaggggaaccccccggaagtagtaacacctttgctcgacgtagccaggacttaacttgtggcgggccccttggggggctatgcaggggatgagagggacattttgttccatttgtaccctgacacctaggggccgggtggcgatagaaccatggtccgaaggggaggtgccaaggggtcatacaattagcactttgtaaagccatatttattgcccgtgtggttaaacaactcccccaaaccgttccgttgtacccccctgaataagagagcgggccgaccagtggcacgtcacagtggggacggggctaccgagcaacagaggaacaggaccacaattgggggcgggacgacgagaaacgaatccgccaaggcggcaaaggaccagcccccaagaggggggacaccgaagctaaacacaggtggcgcaaactggcgtgtgcaacagcagaggggggcgcaaagaggagccgtcaccacagaaaatacgcgggtataaagacagcaaacaacaagggcgggagacccacacacagttttatcccggaagcgcggatatccgcacacgtgcagggggccccccacccagttgtggaggaaacatatccatgtacccttctggggcaggaagaaaaacgccacaaaggggaacgcgcagcaagggaacgcatagaagtgattgagtcgagaaaactcagacggcccattgtgaggcaaaaccagggtgggaacaacacacaatattcatacgtgcacaactttaccccggggattacatcccacacaatttaatccccgtcttagggaccaggaaggttggggatcatcgctacccaattcccccgtcttatcaccgggacccgcttaggtgggctagcggagtaagaaatgagtacacaacacagaagggcagtggcaaagagagggggtgagaaagaaatttgaggagtatccgcaagcaaatcacaagtgtttgggaccacaacgaggaaacgggttgag

SEQ ID NO: 371211 - DNA, 724 bp, Homo Sapiens
  misc_feature (364)..(364): n is a, c, g, or t
cacggtcaagaaataggaaggatcagtatagtacttccagcccatccttctgtcaatctctgtattgtctcaggaatgttcagaggcgggtggcttatcactctggttgtaaatatcagcaacaggactaaggaatgctgttctttgaaaccacttgctggtcttggactgtggaacttttgaaagcttgttttcaatgttgatatcctgctagtgagacctctccaactgttgaatccagctgggtgactttgaccagcaaggcggatcaattctgtcttgaagagaatttgctctgatgtagaagttgttagcctcattaaacaactcaccaaatatgtcttcagcatggtttgctcagacntgctcagctggcgtatgatagcggcaagagtactattggttacacattcaagttcgctggtaatccccttcaaggcagagcaccactggcacaagtgccggggctcaatgttcctcttcactaaaggcatggttcacaatcatgtaatcgttgactatgggttgcagaaattcccctcaagtagcatcaccactttggctcagttatcagtagtagttaacagcaatcaaaactaaaacggtccgcggtcccgccgccggcgccggggctgcgctctgagctccatggtcccgccgcgccgcggccgcccggcgcacccgcctcgcaccacaccgcacgcagcggcgcgagcgacccgct

SEQ ID NO: 371212 - DNA, 597 bp, Homo Sapiens
aatgaggtgctattgttttagtggtgagtatccggagacctgggagttctatttaccaggtataacctgggctcaaaattccaggctgacttcaggcttatcctcatctcatagatgccagcactaaggcccagagagggccgacctcattcagcccacccatcttctcacccctgactgcatttcccaggggtccttctgcagccaggtgctgctgtggtactttgggatctattggctgagctcccagagaagggtcatggattgggctaatttggaacaagtgaagggactgaagatgggctcagtatggggcgaagaccttcaggaagggtctgcagagtgagtaggggggtttgactaggaaaagttccaaccctgccggggccgctgtcaagagaaaagcatctatttacagttacatttttaagttaagtagactgaagaatatttcttgtgtattaaagacgctcctttttggttgattgcaactggaaaagctttgtttcttttttttgggaaacagggtctcactctgtcacctctgtctcccaagctggagtgcaggtggtacagtcacgggtcactgcagcctcc

SEQ ID NO: 371213 - DNA, 808 bp, Homo Sapiens
  misc_feature (761)..(761): n is a, c, g, or t
  misc_feature (789)..(789): n is a, c, g, or t
agcgggcgcggtggccccgcctccccgccgcccggaaagcgggctgcggccccctcccaaaacccggggaagtggattctacgctccgctccgctccgcaccaccaaccccgggccgcagtcctgacgagcgggtcagggcttgtcgggcggaagcctggcctggagcctggaagggggagacggcccgagcgggagcgggagcggacgcggcctcagtcctgcgcggaatattgaaggatgtttgttccaagatctctaaaaatcaagaggaatgctaatgatgatggcaaaagttgtgtggctaagataattaaaccagacccagaagaccttcagttggacaaaagcagagatgttcccgttgatgctgtagctacagaagcagccacaatagacaggcacatcagcgaatcatgccctttccccagcccaggtggccagttggaagaggttcattcagtaagtcccgagcagggtgcgaaggacagccatccttctgaagagcccgttaagtcattttccaaaacacagcgctgggcagaaccaggggaacccatctgtgttgtctgtggtcgttatggagagtatatctgtgataagacagatgaagatgtgtgtagtctggagtgtaaagcgaaacatcttctacaagttaaggaaaacggaacgcagaaatcaaaacttcagcaatccacagaaggcttgattcttgagccagagtctccactgaatgcttcctatgtctacaaagagcacccnttatttttgaaccttcagggaaggaccnggtttgaaatttttaaaca

SEQ ID NO: 371214 - DNA, 855 bp, Homo Sapiens
  misc_feature (744)..(744): n is a, c, g, or t
agcggggggtgggctcaggaggtccgcgggaggatggagcagtgagcgggtctgggcggctgctggcagcgcaatggagacggtacagctgaggaacccgccgcgccggcagctgaaaaagttggatgaagatagtttaaccaaacaaccagaagaagtatttgatgtcttagagaaacttggagaagggtcctatggcagcgtatacaaagctattcataaagagaccggccagattgttgctattaagcaagttcctgtggaatcagacctccaggagataatcaaagaaatctctataatgcagcaatgtgacagccctcatgtagtcaaatattatggcagttattttaagaacacagacttatggatcgttatggagtactgtggggctggttctgtatctgatatcattcgattacgaaataaaacgttaacagaagatgaaatagctacaatattacaatcaactcttaagggacttgaataccttcattttatgagaaaaatacaccgagatatcaaggcaggaaatattttgctaaatacagaaggacatgcaaaacttgcagattttggggtagcaggtcaacttacagataccatggccaagcggaatacagtgataggaacaccatttttgatggctccagaagtgattcaggaaattggatacaactgtgttagcagacatctggtcccctgggaaataactgccatagaaatggtgaaaggaaaagcccnctttatgctgaatatccatccaatgagggcaatcttcatgattccttacaatcctctccacattccgaaaacagagctattggcagataactttacacacttttgggaagc

SEQ ID NO: 371215 - DNA, 756 bp, Homo Sapiens
tgacagcacgagatgccgtcttaaaaaaacaacaaagaggtgtgctgcttgtcagcatgtattgtcacggacactcaataagtgccattttggactgtcaaatttagatgctttgtttcagaaagataagccagcatttagttttaaatcactttcctggtttgtaacttgatgctgtttagttaaattgctagttttcctaacactacaatattaattcttctcgtggaagtgtactgatttattatttttattccaagtcagcagatttggaagcattgtggtaaagtctaaggttttcatatccatagtgctgtttggtgagtaccggcagtacagttaaggggagcagggaacagcattgccccgtattgaaggtggagatggttacattcttcactgctttttgcactttgagttgtgtgcctataaaatttggccaaaccattttattatttggttcaaactcgactaagctgagtgatctaaaattatacagaacctaaatcaaagaagagaatgtaaagtcctttagttacttctaagaatttgaagtcaagcacgaatctaagacatagattattcttatatagctaatgaagagtatggttacgaaattgtcgggtacagggggtaattgacgggtgtgcaaattttgtgaattcatgcattgcttcaccgaaaacaaccaggttttttccagaattagtccggatcacgtggcctaacaaagctggtttttaattcctccacaag

SEQ ID NO: 371216 - DNA, 1071 bp, Homo Sapiens
  misc_feature (537)..(748): n is a, c, g, or t
  misc_feature (1012)..(1012): n is a, c, g, or t
agcggacatccacatctatgataatccaacaggtaaaagatgttgaattccaggtatatgaggagtaaaacttttgggaaattctgatttataactagcatttaacttccatgtaatatgacctcaaagacagtggaacttacttcgccaagccgaggttgggtgaaactctgccagtcggtgtacgcatatctgccagtatctccctgccccactcccttgacggactccaaggtctgatgtccacctcctttgttggaatccaaagtgtagcctcctttgaccatctcaaaactttgctgtgttttgattccctggccaccaacagtaccaacagacatgcttgtgtcacaaatgttggatgtctgcatggggagtctaatatttgcttcctaaaagtaaagtgagagtgataaagtgaatttgaaaaatggaaactaacaattcattttcattttttttcaccataggcaaatcacttgcctgctgtgcctctctgttcctcatacataaaatcagaataatagtatcataggnnnnnnnnnnnnnnnnnnnnnnnnnnnnnnnnnnnnnnnnnnnnnnnnnnnnnnnnnnnnnnnnnnnnnnnnnnnnnnnnnnnnnnnnnnnnnnnnnnnnnnnnnnnnnnnnnnnnnnnnnnnnnnnnnnnnnnnnnnnnnnnnnnnnnnnnnnnnnnnnnnnnnnnnnnnnnnnnnnnnnnnnnnnnnnnnnnnnnnnnnnnnnnnnnnnntcgccatatgaagatgtgaattccacctgccataggccaggaattggccgaacgctaggaaagaagtcccggaacagaatccttcccagattccttcagagggggagcacgggaccttcgcaacaccttgtaatatcctgaatttcctaggtctaccaggattctgtgtaaaccaataacttgtctggtggttaaggtcactccagttggtggttgaaagcctagccctgttggaatgggagggtctcaacggcatttaaacanctgaggggcacttgaaaactggtctaacaataaggctccataaacatctggagtttccc

SEQ ID NO: 371217 - DNA, 737 bp, Homo Sapiens
agcggcggggattacgggcatgagccactgtgcgcaatctgattttagatttcaaacagtataggataaaattgagagaaccatttggcaataaaaaatattaaaactgagtttgcagagaagggcatgatctatatatctactattaaaaaccattcaactgaatatatttccatggccatcacaccattattaaaacctctgaaaagactaacatgtaccagagtaaagatccacataagacatgtgtattagggttctccacagagacagaaacaataggatatatgtatatataaaccagagtttattaagaattggctcacacaattagaaggtgaagtcccatgatgactgtctgcaagctggaggagagaagccagttgtgtgtctcagtccaagtccaaaaccattaaaaccagggaagctgacaacgcagccctgagtctgaggccaaaggcttaagacccactgagtggccaccagtgcaagtcccagagtccaaaggctgaagagcctggagtctgatgtccaagggcagcaggaaaggaagcgagcatctggcatgggaagaagaaagattcagaagactaagcaagcaaacgaatcccaccttcctttgcctactttgttctagtcatgctggcagcaaactggatggtaccactcacactgagggtgggtctatttctcccagtctactgactcaaatgtcaatctcctctggcaacaccctc

SEQ ID NO: 371218 - DNA, 2065 bp, Homo Sapiens
  misc_feature (1877)..(1877): n is a, c, g, or t
  misc_feature (2019)..(2019): n is a, c, g, or t
  misc_feature (2052)..(2052): n is a, c, g, or t
tcggacgaggcggccacagctaagtccaacaccagcatgtcgctgcagagaatcgtgcgtgtgtccctggagcatcccaccagcgcggtgtgtgtggctggcgtggagaccctcgtggacatttatgggtcagtgcctgagggcacagaaatgtttgaggtctatgggacgcctggcgtggacatctacatctctcccaacatggagaggggccgggagcgtgcagacaccaggcggtggcgctttgacgcgactttggagatcatcgtggtcatgaactcccccagcaatgacctcaacgacagccatgttcagatttcctaccactccagccatgagcctctgcccctggcctatgcggtgctctacctcacctgtgttgacatctctctggattgcgacctgaactgtgagggaaggcaggacaggaactttgtagacaagcggcagtgggtctgggggcccagtgggtatggcggcatcttgctggtgaactgtgaccgtgatgatccgagctgtgatgtccaggacaattgtgaccagcacgtgcactgcctgcaagacctggaagacatgtctgtcatggtcctgcggacgcagggccctgcagccctctttgatgaccacaaacttgtcctccatacctccagctatgatgccaaacgggcacaggtcttccacatctgcggtcctgaggatgtgtgtgaggcctataggcatgtgctgggccaagataaggtgtcctatgaggtaccccgcttgcatggggatgaggagcgcttcttcgtggaaggcctgtccttccctgatgccggcttcacaggactcatctccttccatgtcactctgctggacgactccaacgaggatttctcggcatcccctatcttcactgacactgtggtgttccgagtggcaccctggatcatgacgcccagcactctgccacccctagaggtgtatgtgtgccgtgtgaggaacaacacgtgttttgtggatgcggtggcagagctggccaggaaggccggctgcaagctgaccatctgcccacaggccgagaaccgcaacgaccgctggatccaggatgagatggagctgggctacgttcaggcgccgcacaagaccctcccggtggtctttgactccccaaggaatggggaactgcaggatttcccttacaaaagaatcctgggtccagattttggttacgtgactcgggaaccacgcgacaggtctgtgagtggcctggactcctttgggaacctggaggtcagccctccagtggtggccaatgggaaagagtaccccctggggaggatcctcattgggggcaacctgcctgggtcaagtggccgcagggtcacccaggtggtgcgggacttcctccatgcccagaaggtgcagccccccgtggagctctttgtggactggttggccgtgggccatgtggatgagtttctgagctttgtccctgcccccgatgggaagggcttccggatgctcctggccagccctggggcctgcttcaagctcttccaggaaaagcagaagtgtggccacgggagggccctcctgttccagggggttgttgatgatgagcaggtcaagaccatctccatcaaccaggtgctctccaataaagacctcatcaactacaataagtttgtgcagagctgcatcgactggaaccgtgaggtgctgaagcgggagctgggcctggcagagtgtgacatcattgacatcccacagctcttcaagaccgagaggaaaaaagcaacggccttcttccctgacttggtgaacatgctggtgctggggaagcacctgggcatcccccagccctttgggccccatcatcaatggctgctgctgcctgnaggagaaggtgcggtccctgctggagccgctggggctccactgcacccttcattgatgacttcacttcataccacatgctggcatgggggagggtgcactgtggcacccaagttgtggcagaaaagcccttcttctttcagntgggtggaaacttgggtgcccctggagacagcntcccaaacccacc

SEQ ID NO: 371219 - DNA, 1045 bp, Homo Sapiens
  misc_feature (931)..(980): n is a, c, g, or t
tgggtggcgaattcggcacgagggagaacacgcagatttgggaatctttgtcaagtccattattaatggaggagcagcatctaaagatggaaggcttcgggtgaatgatcaactgatagcagtaaatggagaatccctgttgggcaagacaaaccaagatgccatggaaaccctaagaaggtctatgtctactgaaggcaataaacgaggaatgatccagcttattgttgcaaggagaataagcaagtgcaatgagctgaagtcacctgggagcccccctggacctgagctgcccattgaaacagcgttggatgatagagaacgaagaatttcccattccctctacagtgggattgaggggcttgatgaatcgcccagcagaaatgctgccctcagtaggataatgggtgagtcaggtaaataccagctgtcccctacagtgaatatgccccaagatgacactgtcattatagaagatgacaggttgccagtgcttcctccacatctctctgaccagtcctcttccagctcccatgatgatgtggggtttgtgacggcagatgctggtacttgggccaaggctgcaatcagtgattcagccgactgctctttgagtccagatgttgatccagttcttgcttttcaacgagaaggatttggacgtcagagtatgtcaaaaaaacgcaccaagcaattttcagatgccagtcaattggattcccttaaacacaaaatccaaaaggatggatttagtagctgaccagactacactcaatacgggggatgaccacaaagcacgttctcccccccaaagaaggggggccccctccccggggcctgaacaaatcacagctacttggggaagcttgcccacccccaccttgcccccggggcattttcccaatcgcgcgcaattcctcttcccctcccnnnnnnnnnnnnnnnnnnnnnnnnnnnnnnnnnnnnnnnnnnnnnnnnnncacacaacctctctccgagactcgtctatcctcgcccacatctctctcttggccgcgcacccctc

SEQ ID NO: 371220 - DNA, 961 bp, Homo Sapiens
  misc_feature (639)..(639): n is a, c, g, or t
  misc_feature (906)..(906): n is a, c, g, or t
ggcctgggtggcgaattcggcacgaggcactctcattccccaggtggctgacccagtccctgggggaagccctggatttcagaaagagcaagtctggatctgggaccctttccttccttccctggcttgtaactccaccaacccatcagaaggagaaggaaggagactcacctctgcctcaatgtgaatcagaccctaccccaccacgatgtggccctggcctgctgggctctccacctcagccttggataatgctgttgcctcatctataacatgcatttgtctttgtaatgtcaccaccttcccagctctccctctggccctgccttcttcggggaactcctggaaatatcagttactcagccctgggccccaccacctaggccactcctccaaaggaagtctaggagctgggaggaaaagaaaagaggggaaaatgagtttttatggggctgaacggggagaaaaggtcatcatcgattctactttagaatgagagtgtgaaatagacatttgtaaatgtaaaacttttaaggtatatcattataactgaaggagaaggtgccccaaaatgcaagattttccacaagattcccagagacaggaaaatcctctggctggctaactggaagcatgtangagaatccaagcgaggtcaacagagaaggcaggaatgtgtggcacatttagtgaaagctagagatatggcagcgaaaggatgtaaacagtgccctgctgaatgatttccaaagagaaaaaaagtttgccagaagttttgtcaagtccaaccaatgtaaaaaagcttttgttaatggtaaataaaaatggctcactacttatatagcacctcaactttgttggccagtaactgcctgaaaaataaatgcttttatgccaaccccccgncacaccaacaacccacaatcaaacttctcaggcattctttggtccggggggcggg

SEQ ID NO: 371221 - DNA, 1019 bp, Homo Sapiens
  misc_feature (142)..(142): n is a, c, g, or t
  misc_feature (181)..(181): n is a, c, g, or t
  misc_feature (440)..(599): n is a, c, g, or t
ttgggagccccagtggcccgggccttgagaaccagccagggcccatttccaacaaggaaggccgggaaaaggacattcccattgtttttcccagcaggagacactggcttccaacccagtgggggtccctcaagatttcttnacaggggcacagagacgccaggcaggctgagatgaagcncaggtgttcacagccagagcaggtgagcagggccctgagagctcaggcagggcacggcaggaaactcaatgctgccgtccaacaccagctttcagaagcccctgaagttttgtcaaaacagaccgagaagcccaccctgcagaggcttaggctcagtaagtctggggtctgaaaacttgtcccaggtaatggcgttggtcaggggaccacactggttgtataaataggctgtccctgagaagatgacagaagtaggggnnnnnnnnnnnnnnnnnnnnnnnnnnnnnnnnnnnnnnnnnnnnnnnnnnnnnnnnnnnnnnnnnnnnnnnnnnnnnnnnnnnnnnnnnnnnnnnnnnnnnnnnnnnnnnnnnnnnnnnnnnnnnnnnnnnnnnnnnnnnnnnnnnnnnnnnnnnnnnnnctgtcttaaagaggaaaccacaatctggagacacagtccttcctcactaacctggcctgcctactagaggagaggcctgaggcaccagcctgggtgtagggcaggccttgtgcttgaaggtcccagcagtgggctctggctgggccaggtcctggaaacagggccaaggcccttggcaacaggttaagggatgggaaggctgtgggctcccaggggccaggaaaggggatgcaggcagcaggcaagcaatttattggctggcagcagagggcaggctagaaaggctggaaatggagatgtggacatgggcccccagccctgcaaccccaccaaggtccacagcggccaacctactgctaccaggagctgaagtccccaaaaccccgactgggcctcgtgctgagaatcgccacccaggcc

SEQ ID NO: 371222 - DNA, 1128 bp, Homo Sapiens
  misc_feature (526)..(568): n is a, c, g, or t
  misc_feature (847)..(847): n is a, c, g, or t
  misc_feature (952)..(952): n is a, c, g, or t
aaggagcgaggcctgggtggcgaattcggcacgaggactgccaggccgaggctcagccccagactctcagcatctgctgccctgatcacagagacgggaccgagccaggtccataccccttcctctctccctcctaccacctgccagtttccccagcctcagccccagccccagccccagtgggcaagaccaaagtgtggcggggagtggggtgggagtcaggggaatagatgtgactagttcaggggcggggactcccaggcctcagtgtggcagggtgtgttgaaggcctgtggtgccatctccccatggttcatgtggagccacgaacatcctttccctgcagtccatttgtctgtgtggcaggctggctggctgggggcatctgcctgtctatgtgctgttggtgtgcctatgcctgggggaggtcagtaggggccccctccccacatggccctcgctctgtctatgcaggggccccaaagcccgcactttgtccgtgtgtcttagccctgtggttttgtcnnnnnnnnnnnnnnnnnnnnnnnnnnnnnnnnnnnnnnnnnnntcttggtgctgtggcctgtgtgtctctgtgcctatgtggctgtgctatggtttctatgagtctgctccatccatgtgtctgtttgggggtctatctctccatccctctgttggtgctgtgcccttggctatccctgaaagagggaggactccgctgcagctccaccaataaacttgtgtctcactgcatctttcagcctgtgtgctgactcctcaagggagggggaagtcaaataggtcacttgagaacaacaggaatccctcctgtccctttccagcnctctgggagtgactccccacagactcctgttcctttccagccccttcacccctaagaatgggagggtaaaagccacccagtctcttttactcccccttccctggntcacagcatgccctggggcccttgggctcaggggacggcccctggggcccctggggctttggtttgcaggaaaaatggcttggaaggtaaagggaacccagggaatccccctgggaaatcaatccctttctccaaagggtcccctgaatggccaaggggcccccatagggttgtgt

SEQ ID NO: 371223 - DNA, 1256 bp, Homo Sapiens
  misc_feature (835)..(863): n is a, c, g, or t
  misc_feature (1213)..(1213): n is a, c, g, or t
gtagcgaggcctgggtggcgaattcggcacgaggcatggctggggaccggctcccgaggaaggtgatggatgccaagaagctggccagcctgctgcggggcgggcctggggggccgctggtcatcgacagccgctccttcgtggagtacaacagctggcatgtgctcagctccgtcaacatctgctgctccaagctggtgaagcggcggctgcagcagggcaaggtgaccattgcggagctcatccagccggctgcacgcagccaggtggaggctacggagccacaggacgtggtggtctatgaccagagcacgcgggacgccagcgtgctggccgcagacagcttcctctccatcctgctgagcaagctggacggctgcttcgacagcgtggccatcctcactgggggcttcgccaccttctcctcctgcttccccggcctctgcgagggcaagcctgctgccctgctacccatgagcctctcccagccctgcctgcctgtgcccagcgtgggcctcacccgcatcctgcctcacctctacctgggctcgcagaaggacgtcctaaacaaggatctgatgacgcaaaatggaataagctacgtcctcaacgcccagcaactcctgccccaagcctgacttcatctgcgagagccgcttcatgcgggtccccatcaacgacaactactgggaaaaactgcctgccctggctggaccagtccatcgagttcatcgataaaccccacccttctcccgctgaccaacacttcgcccccctgccagcgcagacacactccgacccacgccactcaccgccatccgcctaccactcagannnnnnnnnnnnnnnnnnnnnnnnnnnnnacaacctatagagctcccacgccgccccgccacaccgacccacaccctcacgcaccgtcaccaccctccggggccaaacactcccaacacccccacgccccacatatcgacgcttgcccacctacccatccgacacccgcgctgccactccaccaacgatctaatccgaccccactagcgcacgagagtgacccccacctaccccgtcgccgccgccccacctcgctcgcacgtcgcgcaccacacgcgcaatacgtactttaccacagtcaatctcaaccggtagagatgacacgaccaccccaccgaccagactacacaaccatgtcccctcacgatcaacaagacgntccgcgccgtctaaaacacagcgaatctgctctccaatatctt

SEQ ID NO: 371224 - DNA, 959 bp, Homo Sapiens
  misc_feature (169)..(230): n is a, c, g, or t
gagaagcataaagagaagcgacactccaagtccaagagaagtttaggactttctgccgtgccagtgggagaggtcacagtgacatctggccctcctcccagcatcccatacgctggagcagcagcacctcccctgccacttcctggcctccacacagatgggcatagtnnnnnnnnnnnnnnnnnnnnnnnnnnnnnnnnnnnnnnnnnnnnnnnnnnnnnnnnnnnnnnagaagaacatgtcggcctaccaggtgttctgtaaagagtatcgcgtgaccattgtggctgaccatccaggtatagattttggggaacttagtaaaaaactggctgaggtgtggaagcaattaccagaaaaagacaaactgatttggaagcaaaaagctcagtatctgcagcacaaacagaacaaagcagaagccacaactgtgaaaaggaaagcatccagctcagaaggttccatgaaagtcaaagcctcttctgtaggagtactgtcaccccagaagaagtccccacccaccaccatgctgttaccagcctcaccagccaaagcccctgagacagagcccattgatgttgctgctcatcttcagctgttgggagagtccctaagcctcattggacaccgtctgcaggaaactgagggtatggtggctgtgtctggcagtttgtcagtgcttctggattccattatctgtgcccttggccccttggcatgtctcaccacacaactacctgaattgaatggctgtcccaacaggtcttgtcaaacacattagacaacattgcttacatcatgccggggactgtgacagcaaagaatccctgggacaggaaaccttatcctacacccattgcctggtttgggggatattatgactgtttgcagattcctttcagggggcctcctgggctggtagggtttttaaattttttaatatcctaatactctaccaa

SEQ ID NO: 371225 - DNA, 1288 bp, Homo Sapiens
  misc_feature (468)..(580): n is a, c, g, or t
  misc_feature (582)..(597): n is a, c, g, or t
  misc_feature (599)..(601): n is a, c, g, or t
  misc_feature (603)..(833): n is a, c, g, or t
  misc_feature (836)..(836): n is a, c, g, or t
  misc_feature (838)..(1031): n is a, c, g, or t
  misc_feature (1033)..(1033): n is a, c, g, or t
  misc_feature (1044)..(1044): n is a, c, g, or t
  misc_feature (1051)..(1051): n is a, c, g, or t
  misc_feature (1141)..(1141): n is a, c, g, or t
  misc_feature (1146)..(1146): n is a, c, g, or t
  misc_feature (1172)..(1172): n is a, c, g, or t
taaggtagcgaggcctgggtggcgaattcggcacgaggcgccacgctcgcaggtgtccgcacgccgcgcactgggggccgccgctgcccacagcttcccaccggagacaccggggcggggacctgggcacccgcaggggctcggcgcacttctctagcctcgagtccgaggtatgacgcggccccgggggccccaccgcccccttggtcagcgcaggccacggcccgagggggcgcccgcagtggacaggacccgcgtgggttgggaaggaaagcagtggaactggccggaccccgcctggagcagcgtcctgcgccccctggttctggaggaaccgcaagccggagaggatttggtccctcaactatcacccagcctgagaacgagggggcgggggccttggagcccaccggacttttttttaaacccgacaagggctttttaacgtcaccacatggggcgggaggnnnnnnnnnnnnnnnnnnnnnnnnnnnnnnnnnnnnnnnnnnnnnnnnnnnnnnnnnnnnnnnnnnnnnnnnnnnnnnnnnnnnnnnnnnnnnnnnnnnnnnnnnnnnnnnnngnnnnnnnnnnnnnnnngnnngnnnnnnnnnnnnnnnnnnnnnnnnnnnnnnnnnnnnnnnnnnnnnnnnnnnnnnnnnnnnnnnnnnnnnnnnnnnnnnnnnnnnnnnnnnnnnnnnnnnnnnnnnnnnnnnnnnnnnnnnnnnnnnnnnnnnnnnnnnnnnnnnnnnnnnnnnnnnnnnnnnnnnnnnnnnnnnnnnnnnnnnnnnnnnnnnnnnnnnnnnnnnnnnnnnnnnnnnnnnnnnnnnnnnnnnggngnnnnnnnnnnnnnnnnnnnnnnnnnnnnnnnnnnnnnnnnnnnnnnnnnnnnnnnnnnnnnnnnnnnnnnnnnnnnnnnnnnnnnnnnnnnnnnnnnnnnnnnnnnnnnnnnnnnnnnnnnnnnnnnnnnnnnnnnnnnnnnnnnnnnnnnnnnnnnnnnnnnnnnnnnnnnnnnnnnnnnnnnnnnnnnnnnngngctccgcgctnttgtgtntttcctcgccgcctgtgtttctcatcacgtttcaccccgtacaagttattgatattcgccacgaacagcgcaaataagctcccatcctcnccagncagatagatctgctcgacaccccggntccgcgcgaccctcgccggctattctcagaggcagccggtctggtcactgtaaagccgaagctgtctttaggacggcgtatccgcgttttatccacgatctgcggtggaccccggt

SEQ ID NO: 371226 - DNA, 1065 bp, Homo Sapiens
  misc_feature (547)..(547): n is a, c, g, or t
gcagtaactcctaacggtgataaggtagcgaggcctgggtggcgaattcggcacgagggcccagagcaccatgtcaatgagaaagaaggaggaatctgaagccttggacataaagtacatcgaggtgacctccgccagatcaaggtgccacgatggcccccagcactgctccagcccctctgtcaccccgcccttcggctcccttcgcagtggtggcctcctcctttccagagacgtcccccgagagacacgaagcagcagtgagagcctcatcttctctgggaaccagggcagggggcaccagcgccctctgcccccctcagagggtctctcccctcgacccccaaattcccccagcatctcaatcccttgcatggggagcaaggcctcgagcccccatggtttgggctccccgctggtggcttctccaagactggagaagcggctgggaggcctggccccacagcggggcagcaggatctctgtgctgtcagccagcccagtgtctgatgtcaggctatatgtttggaagcagccagtccctccntgcactccagcaactccagccatcagtcatcttccagatccttggaaagtccagccaactcttcctccagcctccacagccttggctcagtgtccctgtgtacaagacccagtgacttccaggctcccagaaaccccaccctaaccatgggccaacccagaacaccccactctccaccactggccaaagaacatgccagcagctgccccccatccatcaccaactccatggtggacatacccattgtgctgatcaacggctgcccagaaccagggtcttctccaccccagcggaccccaggacaccagaactccgttcaacctgggagctgctttctcccagcaaacccctgtccagccaccaggaagcaacagcccagaccccttgtcagatgccccccttttaccacaatgccccagaggggtccccgcccaggggaacatgccagcccccacccatggaaaggttccggtggaatggggacccaattcctcaaaataacctgggggttttaagga

SEQ ID NO: 371227 - DNA, 1100 bp, Homo Sapiens
  misc_feature (803)..(803): n is a, c, g, or t
  misc_feature (812)..(812): n is a, c, g, or t
gcctgggtggcgaattcggcacgagggtcgtcttggtcccaggagccagtagtgaaggcaacagtctgcccacctgtggacaccagatcctgggagctcctggttagcaagtgagatctctgggatgtcagtgaggctggttgaagaccagaggtaaactgcagaggtcaccacccccaccatgtcccaggtgatgtccagcccactgctggcaggaggccatgctgtcagcttggcgccttgtgatgagcccaggaggaccctgcacccagcacccagccccagcctgccaccccagtgttcttactacaccacggaaggctggggagcccaggccctgatggcccccgtgccctgcatggggccccctggccgactccagcaagccccacaggtggaggccaaagccacctgcttcctgccgtcccctggtgagaaggccttggggaccccagaggaccttgactcctacattgacttctcactggagagcctcaatcagatgatcctggaactggaccccaccttccagctgcttcccccagggactgggggctcccaggctgagctggcccagagcaccatgtcaatgagaaagaaggaggaatctgaagccttggacataaagtacatcgaggtgacctccgccagatcaaggtgccacgatggcccccagcactgctccagcccctctgtcaccccgcccttcggctcccttcgcagtggtggcctcctcctttccagagacgtcccccgagagacacgaagcagcagtgagagcctcatcttctctgggaacccangggcagggnggcaccaacgctcctctgccccccctcagaagggtctctccccctcgacccccaaaatccccccagcatctcaatccctttgcatggggaagcaagcctcagacccccccatggtttgggcttcccccgctgggtgccttctccaaaactgggaaaaacccggcttggaaggcctggccccccaagccggggcaagcaggaaatctcttgtgcttgtcaagccaaccccccagtggtctgaatggtcccctttttaatgttttggggaaacaaaaacccagttcccct

SEQ ID NO: 371228 - DNA, 1189 bp, Homo Sapiens
  misc_feature (610)..(632): n is a, c, g, or t
  misc_feature (854)..(897): n is a, c, g, or t
taaggtagcgaggcctgggtggcgaattccgcacgaggagacgctgctgcaggcaggccgcccgggcagcccgctgccgccgccggtgaagcccttatcacccgacggcgcagactcggggcccgggacgtcgtccccagaggtgcggcccggctcaggctcggagaacggcgatggcgagtccttttctggttcgcccctagctcgggcctccaaagaggcaggtggcagctgcccaggcagcgctggccctggcggcggcggcgaggaggacagcccgggctccgctagccctctgggctctgaatccggttcagaggctgacaaagaagagggtgaggccgcgccggcgccagggctgggcggaggctcgggtccacggcagcggacgccgctggatatcttgacacgcgtgttcccaggccaccggcgaagcgtcctggagctggtgttgcagggctgcggcggcgacctggtgcaggccatcgagcaggtgctgaaccaccaccgtgggggcctggcggccggcctgggccctgcggcgcccccagataaggccgccgtgggtgctgcagcagctgcagacgacgcgtggcccagccgcgtcgannnnnnnnnnnnnnnnnnnnnnnttgccgggggggcctgcagttgcaggggcatcagaatgccggaccccgaaacccggccgccgttcccgaccccggggcactcctccgtggggacccgccccccatttcacatcttccccggaacctggccgggcagcgggggcgccaacgcaccgtatgccccttcctcaaggatatcccccgggccagggccaaaaccgccgtgccgtgaacaccgaccgnnnnnnnnnnnnnnnnnnnnnnnnnnnnnnnnnnnnnnnnnnnnggtaacgcttaaagttgtgagccggcccgaggggtcctccgatagccccacccttgtgatcccccgttattttcctcgaccgacttcttctcgttgccttacaaccttatggattatggtgggccgccgacccgtgtttactcccgccccccactaggcatcgagcactcccccgacgcgttatccaccggcctcccgcccacctgtgattgcgggcgggacctcgatagtgtcgcacccctcacaggtgcgcgcggcccgcgtgtatagcccgacgccgcccgattccgtg

SEQ ID NO: 371229 - DNA, 2790 bp, Homo Sapiens
  misc_feature (338)..(338): n is a, c, g, or t
  misc_feature (418)..(428): n is a, c, g, or t
  misc_feature (667)..(681): n is a, c, g, or t
  misc_feature (789)..(797): n is a, c, g, or t
  misc_feature (1238)..(1238): n is a, c, g, or t
ggtgggggtgtgttggagagatatacgtatgcgggacgttcgcggtatgagatgtcgtgagggaagccacagtgggttgaggtagcagtgcctagggagtctctaccggagctaccattgcacgcgcgaaacatttagtgtgggcctgtgtgacacaatagaataaatcgtggggatgggggagtagccacccaaggccggaccttcgtgggtgccggtattctatccgtgacattcgatcataaatagggggggtgggaatcatagtgtgagagtcttcataaggtcgtgtgtacgttagtgggtgggtggtaaagggtggggtagaataaattaancggggggaggcgggaatataaatagaactgtgacgataggacgtggggggaaacaagagaagtataaagggggggaaacnnnnnnnnnnnggttgcatgtttggatatattcagccagactgcagtttcgggactgaatataggttggagaaaaaagggataagtgagaaagtgtggtcttcgtgcgtaaagatgacatcgtggcgaggaggttaggacgtggggtatgaagggtgcgtgggggtggagggttttattgggcgtgggtgattggtcgagtagcgcatggtggcggggagggttggaaacatatttttcgcgtaaaacannnnnnnnnnnnnnnacttatgaatgtagtgatcttgttcccccgactgttgagtgcgcggcaaaggggggttccgttttcgtctaggttctcttagtgttgacagaatagttataacttgtnnnnnnnnncgcatttgagcacgccatagcagcgtcactagctgtcaagccaagccccgacaaagataagcatgggcacagcaggtcaaacagaatctattggtgccagtgggcaactttaggctcagatggagatgccaagagctagccagaaaacagcgagtgatccgggacttggggtggaaggaggacatagaaaagtggaaaagggagcagcagatggcaccaggtgaccacacctgcagcagctgcctgaatgaaccattcatgccctcacgtcttgccagtcttgtcaccgttggcacctgtgctcagggcgtaagtccttcttgtgtccactgtctactccattcctagagcagagctggcatacagtaggcactccttggcatttcattctcaaaatacttaatacacatactggtatttttagtcatgccaacccctctntttactctccccacagcaccggcccccagtcaccttccactgaggacattatggggccgggatcagagtgaggcaagggaggcactcagggccggcatgtgcccaagagggagtgccccttcaaattatgtaccgaaggcagctcccctgcctcgcccgagtgctggccctggaggaacagcagtgatgggtgggtaatggagttatcaacaggcctaaatggagagtagaagagggcccagcttggggaaatgcacagagaagactgttgcatggtagagggacaaagagaggctgggctcctttgatggagtgagatgcccacctatagatacaggcagattacagaggttaaagcttaacatgggagggagagatgcccattttccaggcgttggccttgtgaagccttctgtcttggaatctgaacaagcaagagtgtgagcataccctttccgtatcaaaattggagacacaactcaagccctagtcccatcccttttgcttgcagcttccagagctcaggccccggaatcttctatttcctcatggcttggcagtccccttcccatggagaatctctgtgtccttaggcagccctgggtctgagtctggactggctaatgttcaataaagagggtttgcctcccctgcttgtggaagtttccatgtgtctgtgcccatggggagcacttggggacccaactgggaccctccatgcttgctggttccaattggggcctcatatttctttatacccgctgcctctgctcagggacaccttccaggccaagatctctttgtatactaaccggcaaaggagcaagcaggctaggacgtcggcagagatgagcatgtagaagacattgttccagcccgtgggggagatgagcccagccagcagaggccccagagccgcacctatggaccggtgccgtcaatgatggccgtgaccgtggacagggctttggcgttgcccttcaggctcttgtgagtccacaggtcagcagagacacccagtgatgatgagcgcgtatggcccatggaccaggcccccacagatgatcagcatcactatggagctggcaatccccgtcctgccaaatgtagttgtacaggaacatcatggggcaagccaagatgagcatgacacagcaagtggtggccctgccattggtgtagtcagagacgagccctgccacgatgccgcctatgatgccaccaacatcgaagagtgtagacaggtccccagcctccttggcactaaagtgagccacattggcgatgtagagggcagccagtagaggaaggtgtaactgaccagcttggcaaacagcagacacagagagaactcgaccacgcactgggatccggagcgccccaaagaagctgatggcagcaggctcttcgcatggccccttggagcattggccacagtctcaagcacgctctccctgatagagcagggactgttcccaggtcctcagggttgtcctggttctcactgccacaccgttgcaccgattccgctgcattggggatacacaagagt

SEQ ID NO: 371230 - DNA, 841 bp, Homo Sapiens
  misc_feature (45)..(131): n is a, c, g, or t
  misc_feature (674)..(695): n is a, c, g, or t
gcagtaactcactaacggtgttaaggtagcgaggcctgggtggcnnnnnnnnnnnnnnnnnnnnnnnnnnnnnnnnnnnnnnnnnnnnnnnnnnnnnnnnnnnnnnnnnnnnnnnnnnnnnnnnnnnnnnnttttttatttctttcttttccatggaggcctagagtccctgtgaaggctaggaaggggctgctgatcccaggagtgcccacgaggagtggggggcactgttggcccataatcaggcaaacacccatcatttcatgggggattcatgaaatcatagtcaggcaaacacccgtcatttcatggctaagcatttgcagaaggtggaggattctcccccgagtccccaaatcagcagcctgtgctagggaccagagcaccgggggcaagaagacagaaccaatgtgggagtggggatggtcactaaatctgactgtgccacacaagcccatgatgaccttggcactggtttgggctggcaggatatgaaggaagctgtaggcattacttgaaaaagatcatggttcagccaacagggtgaggctcccagacaaggccgtgcccatacttccccacctccctgtgcccagaggggatagactgtaagctccccggagggcgaggctgggggctgaacggtgccctcccacctcccccccaaggcacannnnnnnnnnnnnnnnnnnnnnctcccctgaaataataggggggaactaaggggaccccaaagggatttgaaaaaggcccttcccccccgggataaaaagaaacccccttgggaaaaaaccgggggaattttttccccttaaaaatcccccctctccccatgtgcccc

SEQ ID NO: 371231 - DNA, 1306 bp, Homo Sapiens
cctgggtggcgaaatcagaccgaggccgagacatcttcagccccaacggagctggaagcgccagaggtaccggttgagcgcccaggccgagggcctgcagttgctgccaggtctgatccacgtgcacaggcggaagatgttccaggctacaatccgctcagtggaaaacctgcaaagcagcaagtccacgagggccaccatcctggtgcgcctggacaccggaggccaggaggggctgcagtaccagccgggggaccacataggtgtctgcccgcccaaccggcccggccttgtggaggcgctgctgagccgcgtggaggacccgccggcgcccactgagcccgtggcagtagagcagctggagaaggggggttcccccaccactccatcggccatgcgcctttctaccgggtggaagggctcccgttaaccttgatggccgaatcaccaccctttccatgcgcaccgtcgtcgaccgcttgcgtacctagcctcccggaataccacctccggccacgtatatcatttccccaaattgggaccccctcacccctttcgtcgatccccccttcctataccatcaccctaagaaacgtcccctaccgccgcccagaagaccccacatcaagagcgatcccacgcagcgtcatacctataccacgaccccccccgagaccctatggaacatccaccccctggcgtacccctcgtacgctattaccccactcaccacgcccaccgcacgatgttgacccacacaacgtttaacgggtaactcgagccaacacgcccagcctaccttaaaaaccaccaagcaccgagaccgaggcgctatacaccacccctcgcccagctattgcgctccgaataacgagtatacccgatatacaccctcacctcgaccgacccgctgtcccaacaatttctcgctcccatcgaacccgcccccacggaatataagtcgagtggctactacccgttgttagagcgaccccccccacacgcgataacctataaggcgccctcgccagacgcgctctacgtgtttttacgcctctggctcaccgccttcctattctcttccctttgctccgctcatatatattcattaaccctcaccattataacgcgtaccacgcgcgcgcgagtgcgagacacacgactgtgcgcagccaacccgcaatcagcccgcccgctccaacgcggtcacgctcttattagtctctcgcaccattcttcacaccccaatacataccgctgcacggcactgcgtgttacccccgcacaccgaaagccgcacaacccc

SEQ ID NO: 371232 - DNA, 1148 bp, Homo Sapiens
  misc_feature (1021)..(1021): n is a, c, g, or t
tgacccgggcaataactctcaacggttaaaggtagcgaggcctgggtggcgaattcggcacgagggttgagcctgactctgtgctgtggttgtgaggctggaatgcggagaggccagtgaacacactggacatgggcgggcagggaggcatgtcctcgggtcagccgtctgagtcacaggcccagagatgcccagctgtgaccagtgctccgcttgcaggttcattttccagacactgaaagagcagaatggctaaataagactgtaaaacacatgtggcctttcatttgccaatttatagagaagttgtttcgagaaactatagaaccagccgtgcggggagcaaacacccaccttagcacctttagtttcacgaaggtcgacgtgggccagcagcccctcaggatcaatggtgttaaggtatacactgaaaatgtagacaaaaggcaaattattttggaccttcagattagttttgtaggaaattgtgagattgatttggagatcaaacgatatttttgtagagctggtgtgaaaagtatccagattcatggtaccatgcgggtgatcctggaaccgttgattggagatatgcccttagttggagctttgtctatcttcttccttaggaaaccacttttagaaattaactggacaggactgacgaatcttctggatgtccctggattgaatggtttatcagatactatcattttggatataatatcaaactatctggtgcttcccaatcgaatcaccgttccacttgtcagtgaagttcaaatagctcagttgcggtttcctgtaccaaagggtgttctaaggatacattttattgaagctcaggaatcttcagggggaaagacacttaccttaagggacttggcaagggaaagtccaaacccctatggaaatcattagaggtgggcaccaaatcttcccaagcagagtcatcaaggagaacctcagtccaaaagtggaaatggagtctatggaggctttagtgtatgaacatcctggnacaaaaaattaaaggattgaggctcctttgatgaagaccccagacaagggatgggacttttttttaggaaaggcttaatgattttggacccccctttggaaatttgaaaaaggaagccccccctttc

SEQ ID NO: 371233 - DNA, 1031 bp, Homo Sapiens
ctgaagataattcctctataataggtgaagggggatgtattagaaaagatccagtggtcttccttactggtattttgccaattcgctgacttgaccattaccaaggctatctgcagttgtgcccaggccttaggagatgcgagttctgatcaagaatggctgccctgcaaaggtgcttaccatctacgggaagcaacagcacgagacggtgggatgagttggcatacgcaggtgacagggcctgggctttgggcctggttcatagcagtgagaaaacctgtggatgagcatactgggcagagaggctggggaatgttcgggtatttctgtctgctctgcatgtgcaggagcggtgttggagacaggaacatgctagacttggcagggcctctgaagtccttctaaaggtgcatggacaccattacaaaggtcctaagaggtgtataggccaatgagagagggatggagaggcagcagtgggcacaggccagcatgagtgccagaggagggcagtgccatcgttcaagggctgcagagtgagttaccctaggacagctgtgcagtctgcctcccgcagcacacaggtaaatgcactgtccaggtgggccagaaaggcttgagtggttgttctgcacatcctggcccacggaccaggagggcaggacctagggatctcagaggtgccagagatagcccttcagccagaacaggtctaagagacattttgtccattgtcctccagaggtgctggtctgcccaggaaccttgagcgtccgtggcagaaggacagtgaggcctgaagctctgagacccagaaccataagtcctgctgacaacagaaaactcccagggggaatggcaggtggcctctccttcaggtgctgactttgacaagtccaggttgcctggaacactgtgacggatcctggggacacatccaagatcgctgggaaagagtgcagggttgactgctgatgtggccatggccgagtagtatagaccgacgcaggagtttgcagttctgaggcctc

SEQ ID NO: 371234 - DNA, 738 bp, Homo Sapiens
ctggattcttctcgaagaatggctgtcacagcgtcaattcttgataacgcgcatctacttttgaatactcattgctacagggctctgtagttaccccatagcgacatcatctgcacacttcggcaggtacaacgcatactccacacaattgtgaagctgcctcatgtcggaatcacgtccacgcctgtggcttcttccactggcctggcactgattgtgcacaccatcttgtgcgatacgcacgtatatcgtggggctccaggcaatgtagctgcttgcatgctttgtacatcctccaagacttgctctttgactggacggacgtctaaccgtaactcagtccaacaagatcaggacaattatgacttgagtccacaaggacacataacacctgagtatgctgggcatgcccttggcagggtctaagccaggaagtaaagaatgatctggccttagatatttaagggaactcataggaagaggcctaggttctttaaaatcctgtctctttgtcttaccataagaggctgagcctctcttcatttttttgaagggccacttcgtgttattctgttctgggaacttcattcatttttctactgggttgttgatctttgcagtaatttctaggagctgtttatgtttggaggtaattggtcctttgtccatatatatgagatgtaagtcgttattttccagttatctggcaagctgatttttgatgactttttattgtaa

SEQ ID NO: 371235 - DNA, 998 bp, Homo Sapiens
gcggaaaatatccgttttattttccgccagaaaaagggcagcccactgttcagaaataagttaggggttggaaagaggcctcccggaaaagggaagctgtggcccaaggtattcagcaacgtggtacagcttggccaaggttttcagtcctgtcctccaggggaggatctgacttctcagtccccacttcaggaatacatggtcaactgcagccattctttgatagacactctgaatcaggccatctctatctctatccagagacttgaaggcacgaaacatggcatccaggcggaccaagcagctgatgaaattgttaaaatccatatctccatcttcattagcataccggcggacaatcatttggtaaagttgttcatttagctggaagcctgcggcctgcagagctccccgcagctgagaacttcccagagacccaagaatggtccctgtcatactgcttataaacacactgccatttcttgatgttgttccacagatacttaaattcttcaaagcccagcttaccagtcgtgtcactgtccatgacagacacaatgctccggcaggtgtcaagactaaaaccgtcagtcttaagatctttgtgcttagaaaggactttgttgagaatattcatcagatcagtggcacccacctccatgtctggtccagccagctgtgtaaattgttgccgaaatcgcctaacttcctcactttctgaggcctccacactggtgaaatgctgctgagtgggaggcggttctggagtatactgagctgctgcagcctcactgataaaattcacaattcctccaactatccctccaatatttcttcctcctccttctcttctctgaccacctcctccaaagaggcctccaagagcttctccaagacctcgatctgctccttccaatagagcctttgcaagaaacatgctttcagtttaacaagcaaatgcggcagcaatcttagcctcgtgccgaattcgccaccca

SEQ ID NO: 371236 - DNA, 632 bp, Homo Sapiens
tgagattcccgggagcctggtattctctaaccaccagctcactgcagcttggtcctcatgatctgggcaagggcgggacggctgaaggcgtgcatgccctcttcgtcatgccagtatggggaaacctgaggcaccagagacttttaaggggcgtaagcacgggtaagtggcaaggtctggccctgagtacccaaggcctcccgggcccccatgcatcctggccatgatactactagggatgcaggtgggagaagcaggggtcctgggggtctgcctggagctctgggaggcattctgaacggggtctactactgatctcaggtagagctcatgccctcctcgtgaaagtcacttttctcatcagttaaatgggggcaagggtccgtggtccgaccaaggtcttggcttcacagacatcaccaggagcctgcatgcccctgatcactccttctccttcctccaggaaactccagcctggcctctgaccccagttcaatccgaccatgcccaagcccaagcgggcctttcctccagaactgctaccggggcctggctgtgtgactggagcaaggtgctaaacctctctgtgcctcgctggtctaatctgtaaaatgaaggaatggaaacagacc

SEQ ID NO: 371237 - DNA, 799 bp, Homo Sapiens
tcagggtccccatgagacggccagcacactgtgggcagaaaccaacacgaagtaccagatccctgcatctcccaggccagaaggggacgggagcccctagacctgtggctgtcgaatgcccccacagcaaggccacctgcatttcgagctacgcaccatgcaggcaagctgcacctggctagcctcgggcacaactctgacctctctcgggaaatggagccagtgactctgatcaggcgtcctattccctgcagcctggagagcaaatgcggctttcccatgagcacctgtgtggctctcgtctccaactggcctccccattccgacattcccattgctggaccagcaccaggagctgggcacagggcttccttttgctgattcatttcccccctaactcattcagagttgagccccatctgagtccccacatgctggacctgaaacggttacaaaggctgaaacccagggatggcaggccccaggatcagtgctgtggctgttggagtgtcctctcccaacagcatgacagccgcctcccaggtgctcccagcatctgttgcagtcatgggcagctcacggcaacctctgaagaaggaattatagaaccaactttttattgttgaaaatggagtcttgtagagttcagtgatgggaaactaaagtagaaaaagcacatcacaaagaaacatatatagtacagtgtgatcccaattttgtaaaaatatctgtaatatgtaagcataggtatttgtatatcttaagaaaaaaagcctagaaataaagccacaaaaatatt

SEQ ID NO: 371238 - DNA, 588 bp, Homo Sapiens
  misc_feature (294)..(463): n is a, c, g, or t
ccgtcgcctcccttcccttggctctttctctcgctctcttcgcctttcccctgctcctgatcttcctttctccgcctctcgttttcctcatcgtatctcctcttcctgtcccttcttcttgctcctgtctttcttgtctttctctacttcgtttctcttccctcctctaggcctttcatcgttctgtgttttctctctgttcttctatctctcttgcttacctctcgtgcttcctatctccctcggtgttctctgctgctcactgtgctctaatcgcctcgctgatgtacctannnnnnnnnnnnnnnnnnnnnnnnnnnnnnnnnnnnnnnnnnnnnnnnnnnnnnnnnnnnnnnnnnnnnnnnnnnnnnnnnnnnnnnnnnnnnnnnnnnnnnnnnnnnnnnnnnnnnnnnnnnnnnnnnnnnnnnnnnnnnnnnnnnnnnnnnnnnnnnnnnnnnnnnnnttattctgcttaaatttaacgtgttttttgacttcttaattaacttggtcatatactaaatgtgatctcctgtggattaccacatgcattaaaaaatttttcaagctgggcctagtggcgcacac

SEQ ID NO: 371239 - DNA, 873 bp, Homo Sapiens
  misc_feature (123)..(123): n is a, c, g, or t
  misc_feature (132)..(132): n is a, c, g, or t
  misc_feature (767)..(785): n is a, c, g, or t
gcttctcactctgaaatcatccatttggggacaaatccacattggggtctagaaacatccacgtatctcatcagccatcttgtcctgtgcatcctaacagaggaaggatccatgattctgctntggtccaantgcttcctctctgcagaggaacaaccctaaaaccagaccactccacgcaggacaggcaggagagattcttcctaaagcctcccccataaaaagggagctgtggatccacttagatcagggcggaaccatctttcacccggccaagctcctgcccagatgttgaccctcacccagcgtgagctgtcacatagtaggagcttctagatgcatgtggaagcaatgagagttgtcccttagccttataaactccccatgatctgacatgcagaaatccagccttgtccagaatcctcctggaatttcttggagacgaaagtatctgggggattgttgggtactagggagactgggtacaagggtgaaaagtagttcccataatacacatggttgactatggtgatccaccttgtgatggttaatattaggtgtctggagaaggttgcttcattggccctgggacttctctctgcaggaggagagaacgctgcctctcctctggattggtctcaggctctctgttggcctttggtcagcgtttccacatcctgctctgctgcaggagagggggctaacgggctggatccaccaaggcagctcacagcgggaaaactctgggactgaaccactgaattcannnnnnnnnnnnnnnnnnncggttctcgaggtgtgtgccagctacacgtgtgttctgtatgggtccagctgcgtttccatcactcgctaataaatcaacagaaacac

SEQ ID NO: 371240 - DNA, 1034 bp, Homo Sapiens
ggaaccgagagggggccaccccaggcggtcaccagcagatttgcccgcgcgttctctttctttccacccagttgcccttgcggccggctgtaaacctgccactaggacccggtcggtgagatctagcctcttgacctgagagccgagagtggatcgctgggctgggctaacggcgacggagagcgcgccctcgctgactccgggcgcgcccagcagtagcaccgcccgcgcccgcccctggacacttgtaagtttcgatttccgatttccgcggaaccgagtcccgcgccgcggcagagccagcacagccagcgcgccatggcggacccggaggtgtgctgcttcatcaccaaaatcctgtgcgcccacgggggccgcatggccctggacgcgctgctccaggagatcgcgctgtctgagccgcagctctgtgaggtgctgcaggtggccgggcccgaccgctttgtggtgtaggagaccggcggcgaggccgggatcacccgatcggtggtgagcaccactcgagcccgggtctgccgtccgcaagtactgccagagaccctgcgataacctgcatctctgcaaactcaacttgctgggccggtgcaactattcgcagtccgagcggaatttatgccaaatattctcatgaggttctctcagaagagaacttcaaagtcctgaaaaatcacgaactctctggacttgaacaaagaggaacttacgcagtgctcctcctccaaagtgatccttttttatgcccgagatatgccaaagttataagggagacgggtcgggcaggcagaattcggtcaccacgcacggcacaccgggttccaagaacttccaacatactggtgaccacgtcaccccgagggaaactggacgcgtgtcccaacgggcctccggacccataaacctgatggcacaacaacggggctggcccaacatgagggaaccacacggcatggacaccgaaaagtggccaaaaagaccaaggcgaatctgcagcgagcaaggcacatgcaacagat

SEQ ID NO: 371241 - DNA, 1051 bp, Homo Sapiens
  misc_feature (973)..(1010): n is a, c, g, or t
ggcctgggtggcgaattcggcacgagggaaccgagagggggccaccccaggcggtcaccagcagatttgcccgcgcgttctctttctttccacccagttgcccttgcggccggctgtaaacctgccactaggacccggttcggtgagatctagcctcttgacctgagagccgagagtggatcgctgggctgggctaacggcgacggagagcgcgccctcgctgactccgggcgcgcccagcagtagcaccgcccgcgcccgcccctggacacttgtaagtttcgatttccgatttccgcggaaccgagtcccgcgccgcggcagagccagcacagccagcgcgccatggcggacccggaggtgtgctgcttcatcaccaaaatcctgtgcgcccacgggggccgcatggccctggacgcgctgctccaggagatcgcgctgtctgagccgcagctctgtgaggtgctgcaggtggccgggcccgaccgctttgtggtgttggagaccggcggcgaggccgggatcacccgaatcgggggtggccaccactcgagcccgggtctgccggtcgcacagtactgccagagaaccctgcgataacctgcatctctgcaaactcaacttgctgggccggtgcaactattcgcagtccgagcggaatttatgcaacatattctcatgaaggttctctcagaagagaaacttcaacagtcctgaaaaatcacgaactcttctgggactgaaacaaagaggaactagcagtgctcctccctccaaggtgatccctttttttatgccccgagatatgcaaaagttataaagggaggagggtcggccagccaattttgtaacccggcacccacccggggttccagacttccccattcggtggacccttttcccccgaggggaaccggtcgtttttcccaactggccctcgggggccccttaaacctggagggaaaagaaaaannnnnnnnnnnnnnnnnnnnnnnnnnnnnnnnnnnnnntctgaaaaccccccccacgcggtgggcgcccaaaaacacta

SEQ ID NO: 371242 - DNA, 896 bp, Homo Sapiens
tatcggtaataaacatttaaggacacagcatttgggtcagcccagcatttgcagtgctggctccagcttcgggtccgcaggtcaccgcgggggcccggtgcctactgcccgccgccctccggtcagctcatgggaattctctggagaaccctgagcccatctcctgcgcctcgcccaaccttgggtccccaggcccagcctccgagccccgcttcccagcgctgccgccagagctccaggctgcgctcccccaggcaaaggcgccaccggcgttgtccagcccagccttccgtcctccaggcggcgcgtgtgagtcaatggaaatgaccgtggcgggcggagcagccacctaggacatcgcggaagcctcctgaggggacttccaccgcttgtcccaggaggttctacaacagctggcattgagagttcagttataatattttccgccagtttttcccagcccggcccccaagcgtctgattttaaagttcccgcctcaggctccggggcgcctaccctgcaagggcgccagttctccgacacctgctagggaatgaatccccatcccaggaggaaggcgtggcggggacggaagaaacaaccacacgatctgtgacagcgaccaagctttagaggccccgcgtgcctgccgggcgcctgagcccacaccgtccacgcttccctgccccggcgggaaccacctgttctccttgcaccggcgagggcgcggggtcacccccgctgggccgaccccaggcgtgagctccagaaccccctcccaatcgccccgtcttgggagcgcagggagcctggctcttccctgccaataacgaaatcatcacggacattaggaaagcggggcgaggctgggcctcgtgccgaattcgccacccagc

SEQ ID NO: 371243 - DNA, 959 bp, Homo Sapiens
  misc_feature (939)..(939): n is a, c, g, or t
tccacacccgcattgctctgctcttgatgttgagttggcccttagccgggtgttgaagcaacaccatccaggagcccttaaaacttcccttgtcagctccttacaagtgctttaaagcatgttactaaatgccaagaagtgatgctaccctccgtgccaggaccaaagccaagcggagtaaagaagaagatcctgggagagattgccgattactagttctggaacagataggaaactcacacgcctgccccgagagagcgtcgagctctaccgtccctgcaagtatgctaacagagccaggacgatcccctcagagcatgtacgaaatctctgaagactctggccagactccagacactggggacccctgtgctcgacacttttctaaccctctgcatggcacttggttcatgttgctctgagcctcaccgaaccctcggtctgaatacatgagcctgacctgacgctccactgggaacagtgatgctggggagaccagcatcccagtcagcagcctgcctctgtccatgtcccaacttggaaaagtctagggagtaggacctgggtgtaaacgggttttccctacatcccaggcttctccctctcagacccaggggctcctaagtgtccccgggacccaccgcatgagagggatcccagcagccagcgcccactctggaagggagcgggagtgacacagacacaagatgggccagggccttggccactgccgggccctgaccccgaggtacgacaggaacagctagaggatcgattctggactcggagaggaacaaagcccccggccttgagcccgccagatggtctatatggtcattgcgtggaggccccatccctctctggacctgtctccctcttctctgtgcctcagggggtgggcccacatcaccaccagccactctcactctgctaaaatcnacacccttcaggtgatcagg

SEQ ID NO: 371244 - DNA, 1001 bp, Homo Sapiens
gtagcgaggcctgggtggcgaattcggcacgaggcggagcgcgctcagctgcgcccagagccttcggccggacctgaaaaagcgagagggagagcgagcaaaaggcgcgatccagagagccaggcaagcggggcgccgacctcgggcggccccggcccgcgcccttgcccctcggccgggcggacgttcacttcttcaactgagatggacatgatataatctccattgagtcaaagaatggcatctagtcctgagcttcccaccgaagatgaacagggttcctggggcatcgacgatctccatatttcattgcaagctgaacaggaagacacccagaagaaagccttcacgtgctggataaactcacagttggccaggcacacttctccctcagttatatccgacctattcacagacattaaaaaggggcatgtcctcctggatctgctagaagtactttctgggcaacagttgcctcgggataaaggatctaataccttccagtgtagaatcaatatagaacatgccttgacattcctaagaaaccgatcaattaagctaataaatattcatgttactgatatcattgatggaaacccatccattatccttggcctaatttggacaattatcctgcactttcatattgagaagcttgcccagactctttcttgcaattacaatcagccttccctggatgatgtgagtgtggttgactcatctcctgcctcaagtcctccagctaagaaatgctctaaagtgcaagcaagatggcaaatgtctgcaagaaaggccttcttttgggggctcaggaacaatgcgcaaccaatgagtctgtcaatgtgagcgattttaagtcaagtggagaatgggaatggtttttggcattcattatgcttgggaccagactaatggaatgcgagtgtgaagatagatccaaaaagacatctgagagaggctcagaatggaacagattaaatcccaaatggtgaacagaaaat

SEQ ID NO: 371245 - DNA, 1464 bp, Homo Sapiens
  misc_feature (1214)..(1214): n is a, c, g, or t
  misc_feature (1289)..(1289): n is a, c, g, or t
  misc_feature (1311)..(1311): n is a, c, g, or t
  misc_feature (1430)..(1430): n is a, c, g, or t
gcctgggtggcgaattcggcacgagggccggaagccccgagtcgagcgcacacggcgggcgcccctggcaagtgggactcctccggccccgaggcctgaactcagcccggagaccgcgcccaccagcgccggtgtccccggaggggccccgctagttccctgaacacaggtcctgcgacttcccggaggctgttgtgttcgctccctctatattattccgttcccgcccagatgcatctttctctcccggctgatatctctcctcctgttataaaggctacttacatcaccttttccaagtatctttcttcctcccaattcatcttgcaatcattcccctcttctgactacgtacttggatacaactgccgtgattcctcccccagggtttatgttgcaccactattttcaactcattccctctatatagccattctatctctttttttattccttctacctctcccccctctccctccactgcatattcatattcctacaacaccgctcccccgtatccattccacgtttgtccttatatctgcgctccttatccaaattaatcgctgcttgacagccgatatttctcatatccccccacgcctctccccgtcgtctttctcaccccccatcacatcctacttcttcccctttgttttttgagttccaccttttctatactgctcttctacgttcatataaatatcattatattgatccatctgatttacctcattcttgcatcactttttcttctcttgctcctcatcttcctccttctcctattttatctttgaccctctccctccttcatctctcatttcatgtcttccctcctctctcgacctctgattgttgattactctcctatcgctcccgacgtctgctgatgtcccctgtctctcctgttctacctcttcgtgcattccttttcaactcgtccatttcctctattataagtgtatctcgtcctccctaatatgtcttatatctgaatgttacttacacgatatcctcattcttatctcgatcccgatacatcatctctccactcacttcttcaccccagacgcacgtatatcgcttccctactcgtgttctctcgcgttgcttcttcaccttcttcctgatcgaccatatcatattctcgactcattcttcctgttatcgttatctgtttgccacttcatttattcagacatcggtacgcgatntcaccacatcgctgctgtcctagacgtcttgctcaatgctaatctcttagtccctcgcgtcatacatacctctanttccgactgcagcactgttcgncacacgatcgctaccgccgccgctcgtacgtatcgttcagcttctacagactctctatcgtcgtttctcatctcgcgttcctcatcccattctattggtcttttgcttactctatcatntctatctatcttttattgtgctccatgctatgcg

SEQ ID NO: 371246 - DNA, 1001 bp, Homo Sapiens
  misc_feature (151)..(675): n is a, c, g, or t
  misc_feature (703)..(921): n is a, c, g, or t
ggtcttcccgagtagctgctccattcccggcatagaggatcaggagaggggacgccacctgccacacgctggatgctggggtccgcacgactgcggcttgtgtcgctgtggttggtggtggtgatggaaactgcagcgtggctggagtgcnnnnnnnnnnnnnnnnnnnnnnnnnnnnnnnnnnnnnnnnnnnnnnnnnnnnnnnnnnnnnnnnnnnnnnnnnnnnnnnnnnnnnnnnnnnnnnnnnnnnnnnnnnnnnnnnnnnnnnnnnnnnnnnnnnnnnnnnnnnnnnnnnnnnnnnnnnnnnnnnnnnnnnnnnnnnnnnnnnnnnnnnnnnnnnnnnnnnnnnnnnnnnnnnnnnnnnnnnnnnnnnnnnnnnnnnnnnnnnnnnnnnnnnnnnnnnnnnnnnnnnnnnnnnnnnnnnnnnnnnnnnnnnnnnnnnnnnnnnnnnnnnnnnnnnnnnnnnnnnnnnnnnnnnnnnnnnnnnnnnnnnnnnnnnnnnnnnnnnnnnnnnnnnnnnnnnnnnnnnnnnnnnnnnnnnnnnnnnnnnnnnnnnnnnnnnnnnnnnnnnnnnnnnnnnnnnnnnnnnnnnnnnnnnnnnnnnnnnnnnnnnnnnnnnnnnnnnnnnnnnnnnnnnnnnnnnnnnnnnnnnnnnnnnnnnnnnnnnnnnnnnnnattttacactatagaaataacagaccannnnnnnnnnnnnnnnnnnnnnnnnnnnnnnnnnnnnnnnnnnnnnnnnnnnnnnnnnnnnnnnnnnnnnnnnnnnnnnnnnnnnnnnnnnnnnnnnnnnnnnnnnnnnnnnnnnnnnnnnnnnnnnnnnnnnnnnnnnnnnnnnnnnnnnnnnnnnnnnnnnnnnnnnnnnnnnnnnnnnnnnnnnnnnnnnnnnnnnnnnnnnnnnnnnnnnnnnnnatggccatggatacagctgggcacaagcgtcaagtcatctcaacaataaaaactgcgaacaatacaaacccggaaaaaag

SEQ ID NO: 371247 - DNA, 561 bp, Homo Sapiens
gaggagctggacgacctgctggtggacctggaccaccagcgccagagcgcgtgcaacctggagaagaagcagaagaagcttgaccagctcctggcggaggagaagaccatctctgccaagtaggcagaggagcgcgaccgggctgaggcggaggcccgagagaaggagaccaaggctctgtcgctggcccgggccctggaggaagccatggagcagaaggcggagctggagcggctcaacaagcagttccgcacggagatggaggaccttatgagctccaaggatgatgtgggcaagagtgtccacgagctggagaagtccaagcgggccctagagcagcaggtggaggagatgaagacgcagctggaagagctggaggacgagctgaagggcaccgaagatgccgagctgcggcctggagggtcaagcctgcaggccgatgaaggcgccagttcgacgcgggacctgcacgggccgggacgagcagagcgaggagaacgaagcaagcagctggtcagacaggtgcgggcagatggaggcagagctggaggacgagcacga

SEQ ID NO: 371248 - DNA, 807 bp, Homo Sapiens
gccccggcggcagaaggcgctccgcatgatcctcgcggtggtgctggtcttcttcgtctgctggctgccggagaacgtcttcatcagcgtgcacctcctgcagcggacgcagcctggggccgctccctgcaagcagtctttccgccatgcccaccccctcacgggccacattgtcaacctcgccgccttctccaacagctgcctaaaccccctcatctacagctttctcggggagaccttcagggacaagctgaggctgtacattgagcagaaaacaaatttgccggccctgaaccgcttctgtcacgctgccctgaaggccgtcattccagacagcaccgagcagtcggatgtgaggttcagcagtgccgtgtagacagccttggccgcataggcccagccaggtgtgactcgggagctgcacacacctgggtggacacaaggcacggccacgtcatgtctctaaactgcggtcaaatgtggcttctggctcctcggggcctcgcgagggtcacgcttgcctggtcaccctggggctgcttaggaaacctcacgactggtcaccttgcactcctcacacagaattgctacaatcccaaagcgcttcgccccgcagggtccaaaggccagcggtgaccagcctgtcacccagctcctccccgccaaccctgcctgccgctgcacctgcctgccgctgcaggaaacatttctgacaccgtcgaccaggaaagccacacggagaggccactgtgggtgaagcgcctcagttacacaggaaccctaaagcaaatctgccaccgtgggggt

SEQ ID NO: 371249 - DNA, 1084 bp, Homo Sapiens
gtagcgaggcctgggtggcgaattcggcacgaggcgggcctggggcggcctcggagcccaggggcccaccctggtccccccactgttcccaccccaggtgcccgcacctggccatgctccaagaaccagtgcagaggggccccgaggtttgatcacttcgggttaaaaagaaagttgcagtttaccccgcctaactttttctttaacgtggaggagttcagagctcctcttctgggtggagactaaacttcccatccagccagatcagggcgcccaagactgtggcctacgtgtcaacccggaccgaggacctgcctcctaactgcagattggcacgggaccgagctggggtctgacttcccaagagctcccgggacctccatgtgcttggacgggaacatctgggttattaatcaggcgaagtttggctctgcggcccccaggctctcacccctcactcctgcccactccctggtggcccctctgcaataaaaaggaaaccaaagaaggcatccccttgggagtgacagctggcgcagggagaaggcattcctgatcggctgctctcggagaagagctggggccctgattctcctgcctggcttctttaagcccctcggggtctcctccagcaggaggcccgccagtctctgggtggtaggtgggcgtctctccctccagcttccccaggcctggcctccctgcacagcctcctgaagcctgacccacaccccttccccaagggctgcagggctaggttttttaaaaggagggaatcagaatgaattaagaacgatttgcaaaccccggggccatccccatttccctttgacacaaaacattttacccagagaaggccagacaggcctggggactccccctctcagttacatctccagaatgggccgtgaaattccccaaatgctcctttaattcctcaccattcttggaaacaggaaggtgagaaaaggcgttccccaagtttaaggtttgcccaggaatagcccctgggcaggcctcccgggagccttggggtgggataagggtccctgtgattggcctaaacttgggggggaaggaagga

SEQ ID NO: 371250 - DNA, 1065 bp, Homo Sapiens
  misc_feature (764)..(764): n is a, c, g, or t
ggcctgggtggcgaattcggcacgagggagaggaatcgagtagggatgcagagcctggtggcactgtcctgagagaggaggaggctgggcagggccccggcgctggagaggtgccctgcatatgggacctctcagaggtgcacaagagctgtgtgcccaggtacccctgtctcctctcctcctccagcccccagcctactctcctaatggtctgtgtctttcagggatgagatttactgccagatctgcaagcagctctcggagaacttcaaaacaagcagcctggcccggggctggatcctgctcagcctctgcctcggctgcttcccaccctcagagaggttcatgaagtatctactgaacttcatcggccaagggccggcgacctacggccccttctgtgccgagcgcctgagacgcacctatgccaatggggtgcgtgcggagccccccacctggctggagctgcaggctgtcaagtccaagaagcacatccccatccaagtcatcttggccactggagagagcctaaccgtccccgtggactcagcctccacatctcgggaaatgtgcatgcacatcgctcacaagcagggcctcagcgaccacctgggcttctccctccaggtcgccgtgtacgacaagttctggtccctgggcagcgggcgcgaccacatgatggatgccatcgcccggatgtgagcagatggcccaaggagaggggcgagagccagcgccagtcaccctggcgcatctacttccgngaaggattcttcaccccctggcacgactcccgggaggaccctgtcagcaccgagcttatttaccgccaagtcctccgaggagtctggtctggcgagtacagcttcgagaaaggagaagagctggttgagctgctggcccggcactgctacgtgcagctcggcgcctcagcagagagcaggctgtccaggagctgctgcccagctgcatcccccacaagctgtacaggacaaagcccccaagaaggttggggcgaagcctcggtcactggccgcctggcgcccaaggcccccattacaactc

SEQ ID NO: 371251 - DNA, 908 bp, Homo Sapiens
tttgagggccccgtgtcgtccccgtgaggccagtccgtccgtctggccagggtctgaagtcagtacaagcagtccagttggatagcgtgagccaggagagtgtgcacgggggtcacgtatgtaattgtacagtggctggcacaaccccgtcagtgcctggaggcgccagcccaggctgccagtggcagctggccctgctcagccagtgcctgcagcgccagtgcggcaatgaggtccagcgtctgccggcgctcgtggttcatgaggcacacggtgctctcgttgaccacccggtgcagtgtcaccaggcaggcgtaacggcgggctgcatctgccccaccgaagtgggcctccaggtagcgctctagggtgcgccgctgctccaccaggtctggaaagtcgatgaagaagcgggagcacatgtagcgctgcagggcgcgcacatcggtgctgggccggggccggaagccccgcaccaggaggtggcagtacttgaggaggccaccacctcggatctcctcgggactgcgcgtggcgatgacacggtgccgcaggtgctccagggcctcggtgaagtccccgtacaggctttcgcctgtgaccgttgggtggaaggcctcagacatgggagtggacgagcactggccaaagagcaacagggagtccaggatgatctggaaggagtctatgctgaattcaaactggcgtctcaccgagtccacaaacttgagctccacgttcttgccgctcttgttggacagtgagatgaggctccagcggtccgagtctgtgcacactttcaccagcttctgcacgtatgcctccttgagtgtcagtggcgtgatcttggcccggctcacaccggccggcaggaagtctagtaggcaggccagcaccactgccttggc

SEQ ID NO: 371252 - DNA, 938 bp, Homo Sapiens
ggctgggctacgatgagagccaagctggcgccctggcagcgacaggtcatcctgaagaagggggacatcgctaagtactagaggccgcagactcctgtccgcagcctcgcagctccgtggggccctccgccccagccccagccagccaggccctggtggaaaggctgggagccgcacagcccctcccctccatgcgctggaaagccctccaactgaccccgcagcctggacgcgccacggatacacaggaacgcttgggaaaaaacgtgcacgtgaagccacgctcgaccacggataggcacgaggacaagacgcgcgcgccacaggcgtggcaggaaggcgacagagcgcaaagacacagagggaccgcgggcaaccgggcaaaagcacggcaggatacgagcagtacgtccggccactgcatacggagggcaacctaatcaaagacaggaagacggccagaagacaacgcagcaccgaggccaaccgggagggacgagacagaaaaacaagagacgcgagacaagcaccgggagcacaacaaaagacaagacccaaccaacgcacaacaaaaaacacgcacggagacacgcggagagaaccacaacgagcacaacacagaacagaaacggcacacgcgccaaggaacgccccgacggaagcagcaacacaccagacgcaccaaagcgcaaacgagagcgggcacaaagagagccacagacgacaacaacggcaacgccaacagcgacgacagccagcaagaaggcaaaagaacccacgacgagagcagaccagcacaactgaggcaaaacgagaaagaacgatcacagcaaagacgcagcgccgacagaggggcacaccaagagcaccaaagcagcacaatcgacggggagccaacacaaaaaccccaaagaacccacacaaaacagccagcagag

SEQ ID NO: 371253 - DNA, 558 bp, Homo Sapiens
gaatgaaccctgtgaagggagacaggccaggaagtcccagaaatatttattcttgtgactctcacaaaatggaaaagggtctcaatttttgtttctttaaggaacttgtgttctgcgtctgtgtctacactgcctcctctcaccaaccaaattgtctagcccccctccagttacgctagaactctgctttatcttcaaggaagaaagggagtggggagaagttacctctaaaccctccagcatggccatcaattttctgaataatttggaggtcaacatgctttcggaacaagtgttctggaaaacgtttgggggtgaacacagaaaatgttgcctaactggcctttactcacggagtgaccatcatctcagctagttagtgtatgagcggcaccagcaccccggccatgggtgtctgtgctgagcctctgaaagttgacttatcctttggggagccctcggaaagacacagctggtatctatgggaatggattaggggtgtccactggcaccatacagactaactttgtgcgcttaaaacaacaccaaagaaaaaac

SEQ ID NO: 371254 - DNA, 748 bp, Homo Sapiens
aggaaagacggcatggaggagcctgtccatggctctcctccaaggcccggtcagggctgtgtggtctgaagagcccctgcccagctcacttctaggacctgcaggcaccgcgtggtccccatcaaccccaggctgcctcagctctgcaggggcagagggccggccaggtggggccgggaaaggaaacagagggtgtcgaggggatgggctgacacagagtacggagttaggactggctatgtgttagtgccgagaatcctcttctgatactaagaaaacataaataactttgtgtcaacatctgtccccaccgccccagggcccagcggcagacccagcctgggaactggtctggagaggccagccggcgtagcttttctgtgtccatgccgccaggtggggctggggacgctcagtctcctcatcactttgctctctgggatacaggtgtgtcctggacgttcattttcccagagagaagaaagagaacttgccgggccccgtcggggagcaccaagaccactggccttgctctctgggtgggtcacgggtgctgttctgccgcaggaggtgatgggaggaggtggcaggaaggagccccagggaggcgggcagagggcgtgggccccggacggtgccctcctgcacctggagctccccgcttctgcacccgtctatgtctgctgctggcagcaccaaggcagggaaggtgaggagtggatgtgcaaaatgccgccgggttccaggg

SEQ ID NO: 371255 - DNA, 693 bp, Homo Sapiens
  misc_feature (662)..(662): n is a, c, g, or t
gctcggaaggcggtgccacagagcttggagctgaaaggaataacaaaacatgctcttaaccatcatccccctccagagaagctggaggaaatttcccccaccagtgacagtcatgagaaagacacaagttcccaaagcaagtctgacatcacaagagaatcatcttttacatcagccgacactgggaattcactgtctgcttttccaagttatacaggcgcagggatatctactgaaggaagctcggacttctcctggggatatggtgaactcgatcaaaatgccactgaaaaagtccagacaatgttcacagccattgatgaactcttgtatgagcagaagttgagtgtgcataccaagagtctacaagaagagtgccaacagtggacagctagctttcctcacctcaggattctaggtaggcagataatcactccaagtgaaggttatagattgtatcctagatccccttctgctgtttccgcttcatatgaaacaaccttgtctcaagaaagagattctactatatttggtataaggggaaagaagttacatttttcatcttcttatgctcataaagcatcttccattgccaaatcctccagcttttgttctatggaaagagatgaggaagactctataatcgtctcaggaagggaatnaattggagggatacctagcctttcgattcac

SEQ ID NO: 371256 - DNA, 1075 bp, Homo Sapiens
gtagcgaggcctgggtggcgaattcggcacgaggctaaagtggacacaaacttcaggtcagagtttgtcttttctgtcccaggcccccagcggcaccatccttttggcttactgagtgtgtgatccaccagcctgggagcccgcagagcctcaagtcaggctaagggacccacttcgcagcaaggaggtgtgggagtgggccgtgaccacggggatctgctgcacatatcacaaactgtgtgcctctcactgctggcttggaggggctagagactggcctgccaaacgcacagctgtcagctgcagagggtccccttgcctgaggccccatgctttcctgggaagcctatatccaatgacagtaaacagcaaaagttaacaaagaagacacaaagtatgctgtcctctgccacctagggcacctttggcatccgtggtcaccccaccttgggcatctgcagtcgtctcaccttgtgcatccgtggtcgtccctcgtcccaccttgcacatctgcggtcgtctcaccttgcacatccgctgtcgtcccaacttgcgcagccgcggttgtcccaccttgcgcagccgcggtcgtcccaccttgtgcatccgcggtcgtctcaccttgaggttgaggaggaggagatggagaggccaaatgagagcccttgacctagctgggagctgtcagcacctctgccaaaacgcaggcctcctcaaagaggacagtggttgctgttcaggggatggagcctgggtgtggtggccccagctttcagcacacccaggaaaagctatcgccttccgctgccctaggtggcctgcccctctgggaggtctaagtgactagaaggcctggggatcctaattggaaaaagggtgtctttggggaaaaccacttgggggggccgtctcccccgggcgtgttcctcattcccggggccacggggccccccttaattgtccccttaagggggccagtctcccggcccgcccacttctggtcccccgccacgatggtccgccattcgcgggcccgccgccgataagagtctccactccggccgcgttacgcccc

SEQ ID NO: 371257 - DNA, 900 bp, Homo Sapiens
gattgagtggtaagaggtgttcccagagggcggtgatgttgtgattgcaggccatggaatcactgttattgggactgtgctccagcggcacctccccggtcttgtagagtttcttgaacttggaacggcggttctggaaccagatgggtcacctgtgtctgcgttgaggcccaactgcgcggccagctcggcgcgctcggcagcgccaggtactgggccttcctggaagcggcgctgcagggcggccagctggtagctggagtagatcgtacgcggctttcggaccttcttgggcttcccattcaccatgcgcacctctgcttccggctcctccgttaaccgacactgggtcctgggctggcagcggctgctcccgatacgccccgtattgccggtaggaggctccgtaggtatattccgacttgggcgagtaagcgcccgtgcctgcaagcccattgagattgaattggtggtggtaggtgtaggggttcaccgtctggccatagggctggcccgagtagtaatcgtgctggggagcgctgtagtagcccaggtcagtgacagaagactcgggcagggtaggcgagtccttggagcccgcatggcagctaagggagctggagatgtcggtgaggatgctgctgagcttgcgatcgaaggagccactcatcctggcgggcgctgcacctccccagggctggcctccgcagaggacaggaacggaccggagtgcgagagaggcggaagagacgaggcaggggtgtgtgtccagaaggcgaagggaggacccggccgcgtctggggggagggggaggccgagaggcgcttacaccattgcctgccgtcaggcggtcgctgcgcgcctctcctcgcgcctcgttttgaatcgccacccaggcc

SEQ ID NO: 371258 - DNA, 1114 bp, Homo Sapiens
gagaagcccggtataaaaaaagtactgaagacattttccccgcacaactgctaaagctccagagacactgagctgtgtgtggcagcaatgatgccgccagttcgggaccacctgcagctggggtgtgcagccggcgcaggaggggtcgcggggagggagtggtgagcgcaggcggcaggggtctgggaaagacgaagtcgctatttgctgtctgagcgcgctcgcagctcctggaagtgttgccgcctctcggtttcgctctcgctcgctgcgctcctagaagtgggcggcctgcctccagtgactgaccagggccaagtggcgctcggctgggcactacatggcggagtggtgaagtggtacttcgccatgtctgaggacgagctggcctgcagcccctacatccccctagtgcggcgacttcggcggcgtgacgacttcggcggcggcgacttcggccggctggcggcagcttcggtgggcattgcttggactattgcgaaagccctacggcgcactgcaaatgtgctgaacctgggagcatgtgcagcggcttgcacggcatcctgagctgagaccaattccgattcacgggctgcgtgcaaattcccacacgctcgagctgcagccgagcctgatcgtgaaggtggtgccggcggcgcctggccgaaaaacagcattggcgtccgcggacggtgcgcctcaatggatcggcacgccaagccaatgtacctgcaaccaggcacagccggcactgttcctacaaaggacctggacctcatcttcttgcgcagacctgttgccggcgaactgcgagttcagactgtcgaacgacgtccgtgctggactgccctgtcggacttcttaccccgagtggtggattaaaccagcgtgcactatcacctgatatatcacgtcgctacaggtggcagctatctgttcgccgaaagattggctaagtggttgccgtaggacctctgacccgagtaggcgagatctatatattgccgtgtcaagacacagaagtgcaagaactgtcgaaatctgacaatccgcgtgattcacgtcgggatgccgatgataaatacattatcattcttgacatacaggtaga

SEQ ID NO: 371259 - DNA, 1359 bp, Homo Sapiens
  misc_feature (764)..(943): n is a, c, g, or t
gtgattataagagggacttcccaggagaaaagcagaggccatgatctcactagtggtagaaaactaacaggttttagtttaagatcataaaacctaaatcatgaaatctaaatctcatggttggaacaaactacttaaaggttgtctagttcaaccatgccagtgttttaaatatttaggaatatccgaggtataatacaattaaaatgtttaaccatggaagagaatcacagaggcttccatcagacccttctggattaatagggccagatcatggcacacacagcttctcaagatcacatccctgctgatctctctgggccctcctgatcactgctcccccactttcacaccctgtcctgcagccaggccctactgcttgctgttcacaaattgttccatgtgatgtcacttccttagctctggtctggctggtccctgaacctgacattcccttcctccccttgtgaccctctaatgaacgccaactttcatctttgaagggttagcttctattacctccttcatgaagccttctgggataacattggccatatccttctaggcatcttctaagaatagtgtaataggctgaatagtggcccccaggagatacattcactgggaatctccacgtgtgacattattgtggaatagagtttttgcggatgaaatcaaggacctggaaatgagatgaaccatgtatgtagggtggtgccctaaatgcagagtgactagctcgttagaaaagaaggggaaatagnnnnnnnnnnnnnnnnnnnnnnnnnnnnnnnnnnnnnnnnnnnnnnnnnnnnnnnnnnnnnnnnnnnnnnnnnnnnnnnnnnnnnnnnnnnnnnnnnnnnnnnnnnnnnnnnnnnnnnnnnnnnnnnnnnnnnnnnnnnnnnnnnnnnnnnnnnnnnnnnnnnnnnnnnnnnnnnnnnnnacagagcatcgtaggccgtccaggatcgtgcagggaataacattcctgtgggttgttaagccgatgcatgccctgttggatcacttgtgagtgtaaccagggagacctttagagcaagtacttgataacatggtatcttcgatgagaaatcacacgtgctgatgaggctgtgaccgtagcgtcttcgtggctcgtgttctctctcgatacctactgacgagccggtagtatctgagataccgggagagtgctgcgcaagctttgagacgaacgggccgtgtgctgactgttcacttcagttgtctccaaggaacggatcttgcacagtacccagatttggacgaggtgccaaagtgactgcttcggtggactgaattgaagtacaaagtcaacaaataatcgatgcagcgggactg

SEQ ID NO: 371260 - DNA, 903 bp, Homo Sapiens
ggcggccgaggcggccagttgggtaccgggaggggcgaaggcgggcggcagaggcgatcagaagtttccaagggtcacttgtgtctcgtccgtgggaagaccgggggagcccagaaggccttggtgtggaattctgagagctgattcctgccttgtcttctccactgttcctggaggaatccgagaagagcagagcggagggagccccagacacggtccgcgggagagctgtggggcttggtgagtgtttcgtggcctctcgggttggtcagcacccccagccagctggcccaggacccctctacagaagtccaggagagcaggcgtcaccaagatgtccaaccccttcctgaagcaagtcttcaacaaggacaagacattccgccccaagcgcaagtttgagccaggcacccagcgcttcgagctgcacaagaaggcgcaggcgtcgctgaacgccgggctggacctgcggctggccgtgcagttgcccccgggcgaggacctgaacgactgggtggctgttcacgtggtggacttctttaaccgcgtcaacctcatctacggcaccatcagcgacggctgcacggagcagtcctgccccgtcatgtcggggggccccaagtatgagtaccgctggcaggatgagcataagttccggaagcccacggaactctccgcgcccaggtacatggacctgctgatggactggatcgaggcgcagatcaacaacgaggacctcttccccaacaacgttggcactccgattcccaagaacttcctgcagacggtgcggaagatcctgtcgcggctgttccgcgtgttcgtgcacgtctacatccaccactttgaccgcatcgcgcagatgggctccgaggcccacgtgaacacctgctacaagcactt

SEQ ID NO: 371261 - DNA, 911 bp, Homo Sapiens
cagaaaaagaatagtcaaggtgcagagaatgctgacaccccagagtggttcgacaatagtctgaaggctcgtggctgtacaccacgagcaacgcaccatgccagagcgccccgaaagcaccagatgcccagtgaggaggcacgcaagtataggaaagttgacacatgagatagaaagggcgtaagtcaggtgcccaacatagacctagagtagagtgcgcgactatcaactttgggcaagctaaagcgaatgggagctcagacaggggtgtcacccctctgggggctctgcctactgtgccctgggctctgctggctctgagctagctaagcattggagagtcttccagaactcccagagccagcgccagcccacctccccccagggtcagcatccagagcaggacagtggctgtcccttcccaggtacacgatggtggagcccagcagggccccccacagcccagagggcataggtcaccaggagccccttggccatcctctagggcaaaggtctcagaacaagtccgggtactcgcagcacagaagtctcggggtcctctgtgagactcatgcatgtcatggccccagagttatccttagaccctcaagctgcacgctcctctcttcacgctccagttgaccttcaagacatggatggttccacctccaattcccttaaggcagagacatccacggacaggctgcagtgagggacatccaacaccaagctgtcctcaaccccccacagggcttgcttgcctcaccggcccacctccgagccttccagttaggggctctgcttctgcacctgagcctgagacctgaggagcctcccaatccagggctgctctgtcccgcgggctatgaaccagagggagaaacgggagcagagggtggagcctcgtccga

SEQ ID NO: 371262 - DNA, 921 bp, Homo Sapiens
  misc_feature (784)..(784): n is a, c, g, or t
  misc_feature (834)..(834): n is a, c, g, or t
gaatcctccccgactggcaaccagcacatgaccagcagacacacactgccccaggcccgtgtcccaggcccagggtggacagcggagggctctgatagccacgggtgcacggtccctccccgctgcctcacagcattgggagcgcccctcctcagtgccaggaaggagccccagcaggggagtgggcaagagaaccaggggaagatggggttctcaggggctcctgggcagaactaggggaagatggagttctcaggggctggaggcaggtgcccagtagggtggtcaaaggggtgcagtctcatctgagatctgaaggccccccgccagcctgccctgcagttccatgtgcagctgaaggaccagacgtgcaggcctggaaacacagggcgaggtgggccagggcgctccgcattctcagggtaatggggctgcttccaggaaggtcaacagaggtcacaaagcagggcacatgtgcgcaggggagggtggggcaggggctcgcgctggtcctggaggcccagctgggcctttggctgctcagacctggaagctctgaggaatccccgggagcccttctgcccactccacaggaaggggcaagatagggcagatgataaggaccatgcttccccctcccccagggggccttcagcttagtggggctctgaggttgccccaggtgagacagggtagtacagtacaaagatgtgaacttacctgtgggcgtggggccagaaggcaggccgcggagctcctgctgcagttacagtagtactggcgntcctgccaggcagggctgaactgtgtggggcaccccagggtcaatggcanccttggggctccctagcttcgggatcagagtgtcagcaccaaacacaaccgatgtcagccaaggcaggtgagtgggcagagagtgtg

SEQ ID NO: 371263 - DNA, 774 bp, Homo Sapiens
  misc_feature (664)..(708): n is a, c, g, or t
cgtggcccagacgggtgttgggggaggggagtgcgagatggaagtagcgtgtgcgtggtgtagatcagtgtggtgaccgtcttgtctcccagccgaacagtgagagttacaggacctctgaaagtgcaggcgctgttgcagtgcggaagcctgcgtctggatgggcacacagcgccaagagggtggaaggcagccatctgtgtcaggctcgatagtgcctctgagcaggcctcatttggcaaagtattgcgagagtgtccatgctgtccgtctggaaccgtcacacctacccagaccgtcaggtccttagtggcgcatgctggaggggtgacactacagacaccccagattctcccatgagatacaccagacctcccttcctggaaagcagccttgtaaggggggaggctggcccagccccagttactcctgcacccttggagaccactggtaggaagcctgcaggactcctctgagggcctgactgcagtgatggcccccttgccctggcaccacacatttcaggaattatgagcagctcaccaaaaagcacatgttgtccttgcctatgagtaagaaacacaggagagtccttttcaccaccttatgagctgcaacaaaatagcttacctagctttttgcagtttgtggttatgctttaagnnnnnnnnnnnnnnnnnnnnnnnnnnnnnnnnnnnnnnnnnnnnntacattagacacatatatatccatttctcagaggaagaaatattgacatcacatataagcccccgt

SEQ ID NO: 371264 - DNA, 636 bp, Homo Sapiens
  misc_feature (339)..(350): n is a, c, g, or t
  misc_feature (390)..(403): n is a, c, g, or t
  misc_feature (496)..(506): n is a, c, g, or t
  misc_feature (516)..(570): n is a, c, g, or t
gctgggtggcaattccgacgaggccaacccaggaccaaaaatggagctgggacgagtgtgctagattctcaccgttcagaaaatattcctctgtacataccccagaggatgtctcaacaatcagaagtgaacacacagcatggctgggtctcgagggcatcacgctgagtgaaaaagccgctccgcagaggtcacacactggatgtttctaggtatgacagtcccaggaaggagagattcgtgggtgcagggggagcatcaggatgggggcgaaggggatgggcaaggcaccaagggggagttccccttgggggggaccttggtcctttaacctggccnnnnnnnnnnnnctttcttaaaccccgcctgtggggaaacttttgcttaaannnnnnnnnnnnnnaaaattggcctccccgggaaaacatgggggaaatttggaaaggggaattttgggggtttaaaaccccaggccccccttttttcggattgggannnnnnnnnnntatttttttnnnnnnnnnnnnnnnnnnnnnnnnnnnnnnnnnnnnnnnnnnnnnnnnnnnnnnncaccccccccccaaataaattttttctggaaaacccccggggggaaacccccccacacttcttttt

SEQ ID NO: 371265 - DNA, 1012 bp, Homo Sapiens
ggcctgggtggcgaattcgcacgaggcagaagccttcctggctgatgcaaagtggattttgcacaactgcatcatttataatgggggaaatcacaaattgacgcaaatagcgaaagtagtcatcaaaatctgtgaacatgagatgaatgaaatcgaagtatgtccagaatgttatctagctgcttgccaaaaacgagataactggttttgtgagccttgtagcaatccacatcctttggtctgggccaaactgaaggggtttccattctggcctgcaaaagctctaagggataaagacgggcaggtcgatgcccgattctttggacaacatgacagggcctgggttccaataaataattgctacctcatgtctaaagaaattcctttttctgtgaaaaagactaagagcatcttcaacagtgccatgcaagagatggaggtttacgtggagaacatccgcaggaagtttggggtttttaattactctccatttaggacaccctacacacccaacagccagtatcaaatgctgctcgatcccaccaaccccagcgccggcactgccaagatagacaagcaggagaaggtcaagctcaactttgacatgacggcatcccccaagatcctgatgagcaagcctgtgctgagtgggggcacaggccgacggatttccttgtcggatatgccgcgctcccccatgagcacaaactcttctgtgcacacgggctccgacgtggagcaggatgctgagaagaaggccacgtcgagccacttcagtgccgagcgaggagtccatggacttcctggcataagagcacagatttcaccagcctccaaccagacggaaacaaagcagggaagtttatccggcagcccaaaagcctttctctcctcaactgtcagcttccttatcacgacgaaaaacggacaaaaacttccaccccgggcagcatcctgaaatccttaaacctggatccgaacccaaaaccttgaaaaatgggattttgaaagg

SEQ ID NO: 371266 - DNA, 967 bp, Homo Sapiens
  misc_feature (610)..(610): n is a, c, g, or t
ggcccaccagtgaccatgaaggctgtgctgcttgccctgttgatggcaggcttggccctgcagccaggcactgccctgctgtgctactcctgcaaagcccaggtgagcaacgaggactgcctgcaggtggagaactgcacccagctgggggagcagtgctggaccgcgcgcatccgcgcagttggcctcctgaccgtcatcagcaaaggctgcagcttgaactgcgtggatgactcacaggactactacgtgggcaagaagaacatcacgtgctgtgacaccgacttgtgcaacgccagcggggcccatgccctgcagccggctgccgccatccttgcgctgctccctgcactcggcctgctgctctggggacccggccagctataggctctggggggccccgctgcagcccacactgggtgtggtgccccaggcctctgtgccactcctcacagacctggcccagtgggagcctgtcctggttcctgaggcacatcctaacgcaagtctgaccatgtatgtctgcacccctgtcccccagacctgaacctcccatggccctctccaggactcccacccggcaagatcagctctagtgacacaagatccngctgcagaatggccctccaaacctctctgctgctgtttccatggcccagacattctccacccttaaacctgtgctcaaggcacctcttcccccagggaagacttcccttgccaacccatctatgacttgagccaggtctggtccgtggttgtcccccgaaacccagcaggggaccaggcactcaaggagggcccagtaaaggctgagatcaagtggactgagtagaactgggaggacaaaagtcgacgtgagttctgaggagtctcccaagatgggctggacgcttggagaacgggcaggctcacatcgtggggtcctgattggcgctggcacgcgtagccctataaaccctgtggt

SEQ ID NO: 371267 - DNA, 1060 bp, Homo Sapiens
  misc_feature (949)..(949): n is a, c, g, or t
  misc_feature (1024)..(1024): n is a, c, g, or t
ggctgcattgacaataaagatgggacatgcacagtgacctacctgccgactctgccaggcgactacagcattctggtcaagtacaatgacaagcacatccctggcagccccttcacagccaagatcacagatgacagcaggcggtgctcccaggtgaagatgggctcagccgctgacttcctgctcgacatcagtgagactgacctcagcagcctgacggccagcattaaggccccatctggccgagacgagccctgtctcctgaagaggctgcccaagcaaccacattggcatctccttcatcccccgggaagtgggcgaacatctggtcagcatcaagaaaaatggcaaccatgtggccaacagccccgtgtctatcatggtggtccagtcggagattggtgacgcccgccgagccaaagtctatggccgcggcctgtcagaaggccggactttcgagatgtctgacttcatcgtggacacaagggatgcaggttatggtggcatatccttggcggtggaaggccccagcaacagtggacatccagacggaggacctggaagatggcacctgcaaagtctcctacttccctaccgtgcctggggtttatatcgtctccaccaaattcgctgacgagcacgtgcctgggagcccatttaccgtgaagatcagtggggagggaagaggcacgagagcagcatcacccgaaccagacggggaccacgtccgtggccaactgtcgggagcatttgtgacctgaacctgaaaatcccagaaatcaacagcagtgatatgtcggcccacgtcaccagcccctctggccgtgtgactgaggcagagattgtgcccatggggaagaactcacactgcgtccggtttgtgccccaggagatgggcgtgcacacggtcagcgtcaagttaccgtgggcagcacgtcaccggcagccncttccagttcaccgtggggccacttggtgaaggaggcgccacaaggtgcgggcaggaagccttggcttggaaganaggagaagcgggagtccagctgagtttcagcatttt

SEQ ID NO: 371268 - DNA, 1333 bp, Homo Sapiens
  misc_feature (41)..(41): n is a, c, g, or t
  misc_feature (1299)..(1299): n is a, c, g, or t
gggtggcgatttcggacgaggccggtgtctaggtcaccctnggagcgctcaccccaccggcacccgtgcccaagcccgcccctgcaaaggcaggcaaggccaggcgggtgctgcctgggacccagtgactcagcacccctgcccggatcaactggacttttgccccctgctccgccagcctcctgcttggatctctcctgggtctccctgctgcgcctgtccaggatgcagggagctcgggctcccagggaccagggccagtcccccggcaggatgagcgctctaggccggtcctcggtcatcttgcttacctacgtgctggacgccacagaacttacctgcctcttcatgcagttctccatcgtgccatacctgtctcggaaactgggcctgcattccattgcctacagatatatgaaaaccaccttacagttcgcacaaagatccatgtcaactatcctttccccctaacaccctgttttgtgtctatctacccacactaatctactactaatcttcgaatatagaacacgatacaagttaaaataccacccctccctcccctctaccttcatcatgctacacttttttacccatacacatacgttacacggcgaatctaacagtattattcacacttcccctcaacctccgataccctcagccttaattctctcttctcacaccgtccctacgatgctccatatccctgtcctacaatacttctcttcatacctaccgcccaccctccgatcactctgtcaactcaaatcagtcgcagcaagaatactataatcctacgacgtcaacagcgtgccaagactcacccccacgacggttccccgccccgcaccggcagcacaccatacatcattatactcacgcttaccacctaacagccttacactatgccatcaacctctgttccacataagtatgacctctacaaatctgccgccacatacctctacaatacatccaataatcgatctacatacaagaacgcaactacactatgcacacacccacaactacaaacaatactccatcaacaacattaatcattctctcaatatctgaattaatactggataatcacaacatcatgtaaccactccacaacggccaatccttcactatcactctgctcgctccctcattctctcccgcactcatacgcaacggcatcgattctaacttcttcattttctgctctctcgactattactcacccccttcccccgcctctccgtcctcgcgcacaccccagctgaccctcgctctgctagaggacacacntatagcgcactctatctaaacatatattggcgct

SEQ ID NO: 371269 - DNA, 791 bp, Homo Sapiens
ggcccacccccgcccagcccgtgcctataaggccttggcaatgcaggggcccgcactgctcccagacgacatcagagatgaggacagcattgctgctccttgcaaccctggctgtggctacagggccagcccttaccctgcgctgccacgtgtgcaccagctccagcaactgcaagcattctgtggtctgcccggccagctctcgcttctgcaagaccacgaacacagtggagcctctgagggggaatctggtgaagaaggactgtgcggagtcgtgcacacccagctacaccctgcaaggccaggtcagcagcggcaccagctccacccagtgctgccaggaggacctgtgcaatgagaagctgcacaacgctgcacccacccgcaccgccctcgcccacagtgccctcagcctggggctggccctgagcctcctggccgtcatcttagcccccagcctgtgaccttccccccagggaaggcccctcatgcctttccttccctttctctggggattccacacctctcttccccagccgcaacgggggtgccaggagccccaggctgagggcttccccgaaagtctgggaccaggtccaggtgggcatggaatgctgatgacttggagcaggccccacagagcccacagaggatgaagccagcccacagaggatgcagccccagctgcatggaaggtggacggacagaagccctgtggaatccccggatttcacactccttctgttagttgccgtttatttttggactcaaatctctacatggagattaac

SEQ ID NO: 371270 - DNA, 1449 bp, Homo Sapiens
  misc_feature (578)..(641): n is a, c, g, or t
  misc_feature (952)..(952): n is a, c, g, or t
  misc_feature (1197)..(1197): n is a, c, g, or t
tgggtggcgaattcggcacgagggaggaaatttccctgtgctgtgaatccttggtccagcgaggtagagtccttgcttctccaagggcttccaccacgagtactgccccttcacccagactgtggacgagccgttcaggctgtgtatgaggacatggatgcccgaaaggttgtggtcactcactggctggctgacttctccttctccctcccttccatccaacatgtcatcgactcaggactggagctccgaagtgtttacaatcctaggatccgagcagaattccaagtgttgaggccaatcagcaagtgtcaggcagaggcaagacgattgcgagcaagagggttcccaccagtggtcttctttcccaggtctttttcccctcaggatcctgcctctgcctgcatcctaaggccttcttacaactaaaaagtccaccatgtgcacaacccaccgtgcgtgacgacaacccagaactccctgccggacccaccccataaaacgccaccgcactgcccaccccaccgcgaagcgtcccatcccgaccaccgggacggcccccaaaacaacatatatgnnnnnnnnnnnnnnnnnnnnnnnnnnnnnnnnnnnnnnnnnnnnnnnnnnnnnnnnnnnnnnnnctgtcacctcgccaaaaaccaccactctctcctctaacttacgcagacatttagaaaatagaataccacctaccctccacatgtgacaccatcagaaccgaaagaggctgtagagtcaacaacagacgccccgcgaccaccgaactgacagcgatatggaataccacctaccacccgaaccacccccacaccacaatacgcactccacatgccggtccacacccacaccaccgacacacttcactatactctccccgcccacatctgcgcgaacaatagccatgaccactaaattcactcctatgacacanaaccactactcgctgcaccacatcccacgaccactcacacttacctccatccctgctcccccgcgtgcgcctctgctgcgcgctacaggaaacacgcaggcatcatagacacgcacgatgattcacggcctccacgcacaactactgtcacactcatcgccccacaccttcacagactccatacccacagcacaacacaagaatcaatgagctaaacgagatttgcggcacatgtcgtagcctgnatatgcgcgggccgagagccccgaccgccgctgcgcgtacctcagagcccggtcccgcagactgtactacgctcctcctcccgcaccgctaattctttgcccgacgctccgccccctcgcgctgtggagattcacgccgctcagtcactgcagcgaatccatcccactcagaactctccctcgctgatctctcccttacgacgcatagcaattttagaggcccccctcgctctacccacagtaagaacaaaa

SEQ ID NO: 371271 - DNA, 1456 bp, Homo Sapiens
  misc_feature (516)..(527): n is a, c, g, or t
  misc_feature (580)..(666): n is a, c, g, or t
  misc_feature (714)..(723): n is a, c, g, or t
  misc_feature (1276)..(1276): n is a, c, g, or t
  misc_feature (1283)..(1283): n is a, c, g, or t
tcggacgagggtggcccacggctatgtgccccacaactacctggccgagagggagacggtggagtcggaacctgcgggacacgcaggctgtgcggcactacaagatctggcggcgtgccgggggccggctgcacctgaacgaggcggtgtccttcctcagcctgcccgagcttgtgaactaccacagggcccagagcctgtcccacggcctgcggctggccgcgccctgccggaagcacgagcctgagcccctgccccattgggatgactgggagaggccgagggaggagttcacgctctgcaggaagctggggtccggctactttggggaggtcttcgaggggctctggaaagaccggccccagccgcccaccaccgcgacttcaccccacacccctcctgacccattaggtcgctgcacccctcccaacctccccacctaatatctcgcccccctatccaacgcccggcccatctacaaaaacaataaaacaccaaacccccctgtgcgctcgnnnnnnnnnnnngtcttgccacacccgcccctgccgtccactccacccccgccccgtaattcttnnnnnnnnnnnnnnnnnnnnnnnnnnnnnnnnnnnnnnnnnnnnnnnnnnnnnnnnnnnnnnnnnnnnnnnnnnnnnnnnnnnnnnnaaaccaccctttacgcccgatagtctcccactgcaccccagcctcttnnnnnnnnnntacacctcctctctcccctccaacccaaagacccaacctatcctcccccaccctattactcaccaacccctcccgtgcactccacagcgcgaccctccccatccacttgttgatataccttccgtcgctccgcctagtcagcaacatctttctctcccaacctaccaatcgccgccccactgaacattagtacccgacgttatgctctcactcctcacacgctcaccattcttaacgttttcgtcctctgccgccctccttccctcttctcatgcctaccctcaaacccttccacatatagatatatcgaccagaatgtcaactacctgccagcataagacacacatgcacgagcacatcaccccgagcgctccacgtatctgtccccgctctccccctactcactcgaccaggagatcccctaacacaacgatgaacaccccacgtcacacacccgaacccccgtcaagacacggcagtaatacacattgatctgcacttcccgagcacatatatcacgaaaactccaccacgtgatagaaaaactacggtntggtctncgccgaatcctaccgtgcaccgcgaccgcactaatagactataagcccagccatgatacgatgcctggccattcgaacaaacctccttcagcttacccatgtcgcatgctatgacgtagtatctcatcctacttgcttcacccaccccttctcgtccttcatagctccttctg

SEQ ID NO: 371272 - DNA, 1107 bp, Homo Sapiens
  misc_feature (362)..(402): n is a, c, g, or t
  misc_feature (799)..(799): n is a, c, g, or t
  misc_feature (814)..(814): n is a, c, g, or t
  misc_feature (926)..(926): n is a, c, g, or t
  misc_feature (1054)..(1063): n is a, c, g, or t
gctgggtggcgaattcaaaggaggagaaaataaggcttacttcaagtcacccccactatcaatggaagtttcttatttatacctgttcttaatgttaaatgtgatgtgtaaattcctaaatttaaatctattgcccattttggggtaaatttctttgctcaagggtaattgtcatggcggtcaccaaacaataacgtagctggcgaagttccattgcgattctccggagaaggctgggatatttacattaaatcaacatgctgtcagaagaaagcactgagtagagaatggcgcgcataacaaaacaaccgacaggttgacttttcagaataggggcagtttggtgatcgtcaccagtatannnnnnnnnnnnnnnnnnnnnnnnnnnnnnnnnnnnnnnnngataattcgttgtttatatttaaatttagagctctcagttccccttttaaaatatcctctggcaacgtgaatgtataatggcccaacatattgatatgcccgtgcatcaggggagatagccgagcgatatcttcatctataatttcttcgccattacggcgcatccagctcaacgcttcctccatatagagcgtgttccacagaaccactgcattagtaaccaggcccagcgcccccagtggatcttcctgcccttcacgataacgctttctgatctctccgcagtgtccgtaacaaatcgcacgagccacagcgtggcggccttctccctcgattaagctgcgtcaggatccgccgacgataatcttcatcatcaatataattgaggagatatagncgttttgtttacacngccctacttccataatttgcctgtgccaagtcctgatgggccgcgagctttttcagtaaaagagcgaatgagttcctgaacgcatggatttgtacccaactttcagcgaacncagcgggttcgcatcatcttcaatccccactgactctcccgctttttgaacagatcttgcactatccctccggggccaaacttaatcccaggaaactccgggtaagtttggcccgaattttatttcannnnnnnnnnagaaaacacccgcccctcaacctggacatttggggaaaagacct

SEQ ID NO: 371273 - DNA, 1146 bp, Homo Sapiens
  misc_feature (76)..(86): n is a, c, g, or t
  misc_feature (144)..(154): n is a, c, g, or t
  misc_feature (213)..(239): n is a, c, g, or t
  misc_feature (434)..(448): n is a, c, g, or t
  misc_feature (477)..(757): n is a, c, g, or t
tagtcgtccgtgtagctacacggtcatgctacgtaaatggggcggtgtgagggagaatccttggaggggaaaagtnnnnnnnnnnnaaagtaagaagataggtgggggtggggatgcagggcgtgtaggggatattcagatccnnnnnnnnnnntaaacagaagggtgggggggaaagcgggtaggggccggcgttattcggtccgcgggacnnnnnnnnnnnnnnnnnnnnnnnnnnnataatagtcgggggagaggtgagcgcgcgcaggctttgtggggtggtacatggtggcgggggtaaataggtgttagtttccacaggttcttatgctttgggggtcggaacgcatgggggtaggttatttggggtgcccgttcgcgttttaaggccagaactggtggaatgaagggagccattcctggtgtgttcnnnnnnnnnnnnnnncccccataaaattcaatgttatttatgannnnnnnnnnnnnnnnnnnnnnnnnnnnnnnnnnnnnnnnnnnnnnnnnnnnnnnnnnnnnnnnnnnnnnnnnnnnnnnnnnnnnnnnnnnnnnnnnnnnnnnnnnnnnnnnnnnnnnnnnnnnnnnnnnnnnnnnnnnnnnnnnnnnnnnnnnnnnnnnnnnnnnnnnnnnnnnnnnnnnnnnnnnnnnnnnnnnnnnnnnnnnnnnnnnnnnnnnnnnnnnnnnnnnnnnnnnnnnnnnnnnnnnnnnnnnnnnnnnnnnnnnnnnnnnnnnnnnnnnnggccaggtgcagtggctcacggcctaaactcatttcttgaatgtactcctatatcagggtatggagtccttgaaactcatttaatgaaatgtttactctgtgcagagaatactgggtaggtatctaggttcaaaatatatttcatattttaaggatgttatcatctaagacacaggaaactatatatgtgtggtctataaaaccatatatagcgttactaagaataaaactttgagggaaacaaagacatgaaggccagtttctaccaaccttccactttgaccagggaaaccaggagactgcacatagaggcctatttgactgtgttcatcaacagaaatgaacagattgcaagataagcaaaaccctcgtgccgaattcgccaccca

SEQ ID NO: 371274 - DNA, 1330 bp, Homo Sapiens
  misc_feature (782)..(791): n is a, c, g, or t
  misc_feature (1172)..(1172): n is a, c, g, or t
gcctgggtggcgaattcggcacgaggcacagggatggtagctgaccggtgatgggttcatttgtcaccttggactgtgagccacttccacttctcgccccccaggcaggagcaccctcactccaagggcttggcctggaaaggcaggctcacctgggactcaacgttccttcccccgccgccactgtgcccccccgtccctccaccccagaagccctgacctcattcgggcaccttgctgtcctctgggcttctcctctgcccaggtcaccctgtggcaggcctgggccctcaggatgtttcaaaggctccacagctccaccgctccacctggcttcactccagcaccctgtccctggagcacctctgtcctgtctgggccaacctggtctccctgccccatgccctcccctggctcttagcaacctgcccttttattcatgccatttggggtcacagatgcctagctggacacagctcccagaactggctccaccctggggccttgcccctagtaccccctggcaggagcaacccaacccacggccgaggttcccctacccctggatcccggacctgaagccattccctacagagaagcgctcccaccccctctcaggcacaaaagccggtgtccagggactcaagacctgttactggggggttgcaaggggcctcctggccttgctggatcccaaccaggaggggggccccactggccctttccggcccttaaaaatggggcttgggccccccaaaaacggcccaattgggtaaaccccnnnnnnnnnngccgccctccgccctcccgcctcatttgtgggaggaattaaagcgccgtcacaggggcaccccccggggccccccttggtgtgttgcacccgaataccacaccgcgcccccccctctacccttgtgctcgaataaaaggcgggccgcgataacccccgccttattcccgcgcccccgctgcttaccgccccattttattcccccccctacccaaatgcttccccattttctctatcacaactgagcccgccgcgcgcggtactattagcgtttccgtgcgcgtgccgatacgcgcgcgccccgataatacgcccctatactaaatatgacataccgaccgttaccacccccctattttatattagtcgcgttgcgcgcgtngattgtggccgtcgtataacacaccgcgcccgacacaatactcgaattccacgcacgcctatgacgcctagccaccaccctgcggttggttggccaccatatacccgcgcagccacgttagatgtgggggtggccgtattaacccccactcgtccgca

SEQ ID NO: 371275 - DNA, 1682 bp, Homo Sapiens
  misc_feature (514)..(574): n is a, c, g, or t
  misc_feature (615)..(652): n is a, c, g, or t
  misc_feature (873)..(873): n is a, c, g, or t
  misc_feature (1345)..(1345): n is a, c, g, or t
  misc_feature (1374)..(1374): n is a, c, g, or t
cctgggtggcgaattcggcacgaggcccgggcgtcctcgcgggggtggtctccgtggtggccgggcttggggacgccgtaggccgagaactccaccgggagaggtggtgtgggtggagcgggctcggcggccagcagacacagggccagtctgggtgccccggagacccccaagggctcagagttggggcggcgccccccacggaagcacagggccagcctggggagtatttaccaaagctcctccctcgtcccatccacccacaggtacctcctgtgcatgtccatatatcaaccgacatgtcgtgccgacctaacaggcatacccacatcgatgcgaccagatgccccacctcattagaaaatgaggcgccccatgaacagactcccaaaccgagactacccacccctacctaactccccccccaccagccacccagccgcaagacccaacacacacacagacccaaccctttacccgcgccatcacccccccaacacacacgaacccacgnnnnnnnnnnnnnnnnnnnnnnnnnnnnnnnnnnnnnnnnnnnnnnnnnnnnnnnnnnnnntccccccccgcacccaagccggaatcgtagactacaagtannnnnnnnnnnnnnnnnnnnnnnnnnnnnnnnnnnnnnaacactcggaacaccaaacaagactgtcctaccctttccgttcgtctttacatacatcccctacaccctgcctcactcccatccacccttgttgccacatacgctagcatatcaccactacctatctccacagaagcgccaccagtacccccgtccccccaccctatcagcacaccacaacccaacccccgcctccggccgcctcccgccacgtctcactntctgacaccacgcccacctcctacccactgtcgcctgcctacccacacgtcatacatacaccactcaaccaccctccttcgcgcccgaaccgcaccaccactctacggactctagtaattcgtgcagtgcatggacacaccacgcgcctcccacgcccgcctccccattctccgctacactagcgcagtatagtacaccactaatactgaggtcgatcatggtcacggcacagtctcccgcctgctcaactactccgcgcgacccggcccttagtgccgcctccttcacaccgaaaaacgaatgacaataatgccacacctggaccggccccccatgtccccactcgcgcctctcgctcggtccactcgcgccgccacaactcggcccaagctcaagacactacacactaatccctgggaccagaagcgcactcgtccgcgccccacatgattaaacacgactcccatcganaaaccactcccacacaaccagcaatacgnagtcatggactccacgacataaaccgacgtacaccacacacaccccttcccctcaaacctgcttaccctacccgaaacacatctcccaccatactatcaatggcactcctcagccgattatgaaacacccactaccaaaatcgcccaccatatctacgaccccctccacccccacccacactcctcccataactccacacttatcctacccccctcatctccgcccgaccagctacattgaatacccacccccccatctttcccatcattcacactccaaactcatcaccgcgccccgcatctcacgc

SEQ ID NO: 371276 - DNA, 1095 bp, Homo Sapiens
  misc_feature (785)..(785): n is a, c, g, or t
  misc_feature (871)..(871): n is a, c, g, or t
  misc_feature (929)..(929): n is a, c, g, or t
  misc_feature (949)..(949): n is a, c, g, or t
  misc_feature (972)..(972): n is a, c, g, or t
  misc_feature (986)..(986): n is a, c, g, or t
  misc_feature (1020)..(1020): n is a, c, g, or t
aagcgaggcctgggtggcgaattcggcacgaggaggatgccttgtttatggatttacgccactggcccaagaggccagcaggcacagacccaacgggcagagaagaatggaatgctgcctgcctcatatggcccaggagaacagaatgggactggtgggtaccagcgggcctttcctcccaggaccaaccccgaaaaacacatgccaaaggaagagcaatctggcccaggtggagcactgggcaagggcccagaaaggggatagcaggagtcttcccttggaccagacgcttcctcgccatgggtcctggccaatccctgtccttcccagaaaactaccatgactcttcccaagatgcaccctgacacccctcgggggggctcctcgccacctccccgaaacctgccaagtgactacaagtatgcgcaggaccgagccagccacctgaagatgtcgagtgaagagcgccgggcgcaccgggatggcaccgtgtggcagctctacgagtggcagcagcgccatgcagttccggcacggcagccccacagcgcccatctgccttggctccccagagttcaccgaccagggccggagcaggagcatgctaggaggtgccccgctccatctctgtgcctccatctccctcggacatccctcccccaggacccccaagggtcttcccaccccggcggccacacacaccagcagagcgagtcacagtgaagccaccggaccagaggaggagtgtggacatctcgctgggggattctcaaggagggcacggngccacgctggtcagaactcatctcatgtggaccgacgctccatgccctccatggggtacatgacccacaccgtcagcgctcccagntttacatggaaaaatcgggctgatgataccctacctcccagctgaagaaagacctggnagtaccctgggatcttaaangatggacaggcccgggaaccttncctccaaggatcgnaaagtctgaaaagcctgttgaaagaatcgcttgnagaagcggacacctggacggtcaaaactgagagcattccttctggtggaaaccaaggaaaagggtttcttcccca

SEQ ID NO: 371277 - DNA, 679 bp, Homo Sapiens
gcccccctcccgcccgccgcaggctgccacacgtggtgcgatccgattctctctggaaaggaggagagtctctcatgcatgggtgaagttgggccctgccccagaagcctagtgactcattatgttaacgtgtggatgcgggggctggacatccttgggaagccctgaggggctgctgaagcagggttcctggcctcctcggaggctgggcctcccctcgctgggggctcacagaaagtcaaacagcccgaaattcttggctgctccaggcccagggaaaattgggggaggaacaaaagtaagaaaagaaatgtttcaggcctggaggtgagatgagcctgctggttagtagggttaggggtctgaaggaaccagcacgcagggcaggcatggggcacggggtagagcacagatgctccctggaagccaccagctgctcaggcaactgagggggccctctgggcctctgatctaggcacaggcagggatggcatggactggctattggaggcgactacagctttaggttgcaggactgaggcagcaggcagggggatggttagtaggggcagatgaagcaaatatattttgctttcagtaatgtggggtaaagtcacgaggtttgcacacgtgcctgatggggtggggttaatagagggatgatgtagctgaataaatc

SEQ ID NO: 371278 - DNA, 683 bp, Homo Sapiens
gcctgcttccccattcctggagggaagacagacttagccactggtatctgtgggacttcttggaactctgaatgccagaccttgcccagtgctagaggcgacaagtgtgtgaagttgaagaggcttctcccacctgctcagctgcagtggacccgagcgggcagagagagcagagtgcagcagggggccaggctgtgctcgcaggcggggcaggtgcctggagagcatggcgcccctgggagccgctggccaggaagggcatgtgcactgcagggtgccgtggaccagtggcctcagctcagtgtgttgacgagggtcccaaggcactcacgtgtgtggggatgttagcaacacacggcgggaagccctgatgcagtttctcaccaagcgtgtagcagaccccacgcaccccacacaggtcaggcaccccacacagggcacagatcccacgcatcccacacagggcaggcagcccagacagggcacagagccacagcatcgcccagagcagggcaggagagtcccaaggacacggtccaccagatacgactaggcttcgcctaagaaagagtcaggaaatcctcatgtcctgcgttcacagtagactcactgataggggcacgaaagggtacagggaaatgcatcttctctgcgacatcttatgacatctactgtgccaagta

SEQ ID NO: 371279 - DNA, 964 bp, Homo Sapiens
gattgtctggacgttaacagctactacgtctctccatactttgcattcagttcctcttggcctgctttcgttacgctctgcttccagtgattcgtgtatacactggaatgttgtcttttcttcttcaagtgcacacgttaccgccttccatgcagagcatcagcgggcttctggagaatgggatagtcttggccagatacccagtaagacttcctctacagatgtcgccatcaatgctgagattcaacgccgacattttagagtcatgcaaccatgtgagaaaaaaagtcccagtaacctttgttggggctggaggccaggatcccgaggtcccggaggagctgctccacctcctccagccaggacagcgcgtgcctcaggacgtccagcaccaccttctggagccccgagacaggtgggctcacctggaggtgctgaagaaggtcgacctccttcttcaggtcatggctgcaacaggatattttcatgcaagcctggcagctgtccagcgacgtcctcagcttctcgatgttctcggtggtctcctcctgcttggagttgctcagctgggtctctttctggagggtccactttttctgctgaaaattgatgttgtcctcagtgacctgggtaattttctctattaactgttggtcggtgacgggcttgtcccggaacggcttcgcccgtccataggtggccttgatgacttgacttctgaaatgctccagctgacctactgccctctccaaattgattttaatgacgctctctctgttccccatttcttgcagctgaagcaatttccttctggaatcctcctgaagcttctcttcaaccttgcttttttctctcagagtcctagagatcacgctttgttcagtacaactcttcctcagctctgccctaagcttcttcatttctttctcccctcgtgccgaattcgccacccaggcctcgctcc

SEQ ID NO: 371280 - DNA, 677 bp, Homo Sapiens
gtcttgaaggtgggaacagaagagaaggcccggggtgggccggggagggggtacccaggctctgcacagtacccaaggggcttctggcagcaggaaggaagctacacatcagagttgggtgacttgtgccctggggctgcctggcatctgggggcctcctcagagccagggctctttctggttgaggctgagactcactggtgtcatcaggcccctccatgaatgagacaaacaaaacacttgttgggccttcggagctccccacagcgtctgctgtggcccctggcccaggcactggggctcgggcatggcctgtgctggataggatttgtgctgggggctgtggtcctctcgactcctcattgcacttgctgccaaatgccacctctgccgccgtataccatgccagctaccggcaccgcccactgccgtgagacaggaatggggaggcctgcccacaggtgcgctgaatgatgacggatgatcgatggcttcagtcgagcgacaacttagcattcagctctgggactggcgatgctggggacagagggtagcgagggaccacttctccactctgagcgtcccatctctagaaccctccccagtccctccatgcctgacagcttagggacacgtggttatgacatgggggccttgaacctcagggacagaggtgg

SEQ ID NO: 371281 - DNA, 715 bp, Homo Sapiens
ggccgggtcctggagacggaggaggtgtactcccacaagttctccacccaccagatgcagcaacacgccatcccccagtcgtgagagcccataaaggagccagacattgctgaatgtcctcaggggcacagtcacccctgattgagagccactgccctctctggcccttacgaagcctcagtcatataaagactgaacatcataagcccagggagaactgggggtagaagctgaccccacagaaccttccggctcctgggatggcccccatccaatgctgtgccctctagctggcagccagaggagacagggcccttgggaaatgacacttagagcctggccctgggtaagggttggtgtgggccaatggacggaaatgcgggggaagggcccccaactcaccccacaccatgaaggtggccaccatacaccccgtctaggcctggcccctgaggacagctgtggcccagtgtgcccgaacctggagcctggcgaggctcccctctacctagatactgatccttacctcctctccacaaagagccagctccaggatggacaaactacagccagtgatacatcataccgatacaatcgcttcaaatgcttccatacacagtaaaacggaagttccagaacacgaatgacctctcgcctcacctgacggccaagaaatgctaatgaacaccctgggtcctagaaaacgacattacca

SEQ ID NO: 371282 - DNA, 914 bp, Homo Sapiens
  misc_feature (743)..(856): n is a, c, g, or t
ccccagctgagtcccaggcccctgctttgtcggctgctcagagcaccattcctacggtcttcccagagtacacaccctaaatggggtccagcccgtggcatgtgggtgcaccaggagccagctgcagaccatcctctctggcctcggaccagttcctccctctgtcactcatgctcctcagagacacgggttgggagcatccagaaaggacatgtccagctctggatccagattttctcagcactgggctcagggtaaaaggaccaggacagggctaggcgaagcctccaaggcaccgaggggagtgcaggccccaatgaggctgtcaggggttggagggagcagccaagtgcctcaaggcatgggagctacctactgccaccccgggcatcctgatgtgttctcccaggtccagagccccaggctgggcaggaaaaaggtggaagcctccagtcacagctgcagggtctctggtaggtccttgtgccactctgggcctcagagttcccatctgtcaagtgcggacaaacatccctgaccactcaccacctgcctgacccccgcggcagcactgtcccaggggtcaggctggctccagggggaagggggtctctgtaaactggaggtgccaggccgggagggtgacaggatgagggagggaacgaaggactcctggaacctgacgtgggtgatattttgatttgcttgatattattttcttttctttttttgagacagagtcnnnnnnnnnnnnnnnnnnnnnnnnnnnnnnnnnnnnnnnnnnnnnnnnnnnnnnnnnnnnnnnnnnnnnnnnnnnnnnnnnnnnnnnnnnnnnnnnnnnnnnnnnnnnnnnnnngtgcacgccaccacgcccagctaatttttgtatttttagtagagacagggtttcacca

SEQ ID NO: 371283 - DNA, 1444 bp, Homo Sapiens
  misc_feature (1336)..(1336): n is a, c, g, or t
ggcctgggtggcgaattcggcacgagggccagagagggcgagaaggccccatgggacctcgtggtgaggcagggcctcctggatctggagagaaaggggaaagaggggctgctggtgaaccaggtcctcatggcccacctggtgtcccaggttctgtgggtcccaaaggttccagcggctctcctggcccacagggccctccaggtcctgtaggtctccaagggctccgaggtgaagtaggacttcctggtgtcaaaggtgacaaaggaccagtgggaccaccaggacccaaaggtgaccagggtgagaaaggacctcgaggcctcacaggcgagcctggcatgagaggtttgcctggtgctgttggtgagcccggggctaaaggagcaatgggtcctgctggcccagacggacaccaaggcccaagaggtgaacaaggtcttactgggatgcctggaatccgtggcccaccaggaccttctggagacccaggaaagccaggtctcacaggaccccagggacctcagggacttcccggtacccctggccgaccaggaataaaaggtgaaccaggagctccaggcaagatcgtgacttcggaggggtcatcgatgctcactgtcccaggccccccaggacctcctggagccatgggacccccaggacctccaggtgccccaggccctgccggcccagctggtctcccaggacatcaagaagttcttaatttacaaggtcccccaggcccacccggcccacgtgggccaccagggccttccattccaggcccaccaggaccccgaggcccaccaggggaagggtttgccaggcccaccaggcccaccaggatcgttcctgtccaactcagaaaccttcctctccggccccccaggcccacctggccccccaggtcccaagggagaccaaggtcccccaggccccagaggacaccaaggcgagcaaggcctcccaggtttctcaacctcagggtccagttctttcggactccaccttccggggacaccaggcccacctggcccccagggaccaaaaggtgacaacggtgatccgtgcgacccgctgactccgattttccgaagcgaccctttggagcggggtacatctacggtccatgtacgtgtccgtgcccgcccgccgcgccacggacacccggagactccagctcaactgcaacccaggcgatgcggttagactgcaccacaatgtggcccctgggatccccgcaagcacgcacctgtacgggttctcgcgcccctcacctacgccgcgcctctatcaaccacgcagcgccacccctcgccactcaatctccgcnacactacccagacctccgcttccctcacattactcactgcattccacgtgtcttaccgtgccggggcacgtctgattgttctcctcccccagctgtccacagcgcggt

SEQ ID NO: 371284 - DNA, 1118 bp, Homo Sapiens
  misc_feature (1015)..(1036): n is a, c, g, or t
  misc_feature (1049)..(1049): n is a, c, g, or t
aggtagcgaggcctgggtggcgaattcggcacgaggctttgacatcgaggagaagaacaaggctgtggtggtgaagtccgtccagaggggctcgctggctgaggtggctggcctgcaggtggggaggaagatctactccatcaatgaggacctggtgttcctgcggccgttttcagaggtggagtccatcctcaaccagtccttctgctcccgccgccctctgcgcctcctggtggccacgaaggccaaatagatcatcaaaatccccgaccagccggacacactgtgcttccagattcgtggagctgccccaccgtacgtctatgctgtggggagaggctctgaggccatggctgcagggctctgtgctggtcagtgcattctgaaggtcaatggcagcaacgtgatgaacgatggtgcccctgaggtcctggagcacttccaggcattccggagtcggcgcgaagaggccctgggcctgtaccagtggatctaccacacccatgaggatgcccaggaagcacgagccagtcaggaggcctccactgaggaccccagtggcgagcaggcccaggaggaagaccaggctgattcagccttcccactgctgtccctgggtccccggctgagcctgtgtgaggacagccccatggtcaccctgactgtggacaacgtgcacctggaacacggcgtggtgtatgagtatgtgagcacggcaggcgtcaggtgccatgtgctggagaagatcgtggagccccgcggctgcttcggcctcaccgccaagatcctcgaggcctttgctgccaatgacagccgtcttcgtgggagaactgcaagcggctcatggccctgagcagcgccatccgtgacatgcccccaactttgaggttccgcaacatctgttgacaccaaacctgggagagcatttggccacgagggattgccttgcttaccagggagttttgcagccccaactgaaagaacaagggtcaacccaacccctttcaaaaaaagnnnnnnnnnnnnnnnnnnnnnngtctgtgtggggnctgggaatttttgcccccaccaatttggcacttctaaaccttcatgggaaagtggccctaacccccaaa

SEQ ID NO: 371285 - DNA, 1081 bp, Homo Sapiens
ggcctgggtggcgaattcggcacgagggcccttggtacatcctccccttctccacccgcacctccgtcttccccgcaacacatatacacaaacacccggaccctaagtcccccagagcccgaaggccacgcagggggcgtccagcgacctgcactactgggtcgggaagcaggcgggtgcggaagcgcagggcgctgcggaggccttccagcagcgcctacaggacgagctggggggccagaccgtgctgcaccgcgaggcgcagggccacgagtccgactgcttctgcagctacttccgcccgggaatcatctacaggaagggaggcctagcatctgacctcaagcatgtggagaccaacttgttcaacatccagcgactgctgcacatcaaagggaggaagcacgtgtctgccactgaggtggagctctcctggaacagctttaataagggtgacatcttcctgctggacctaggcaagatgatgattcagtggaatgggcccaagaccagcatttctgagaaggctcgggggctggccttgacctacagcctccgggacagggaacgtggtggtggtcgtgcacagattggtgtggtggatgatgaggccaaagccccggacctcatgcagatcatggaagctgtgctgggcccgcagggtggggcagcctgcgtgccgccacgcccagcaagggatatccaccaagctgcagaaagcccaatgttcgccctgtaccatggtctatgaagaagggcaaagaacctgggggggccccgggaggttgggggaccccccttcactggaccccgggaacttggctggcagggaagaaggaactttcttacattcctggggacccaggggggggcttttcaaggaacttaatggggtggggcacgggaaacccctgtggcctagccctcccccggaagaagaaaaaagggctccccctttcccccccgggagttgggtgggggggtttcgaatcccgaggccccaaggggggtttccccccggaactctaaaacccccacagtcctgggggaaagtggggtgcacaacaaacataagcgtcgg

SEQ ID NO: 371286 - DNA, 773 bp, Homo Sapiens
ggccgggcacgtggcagtctccgccagcatcggctgtccggcacagaggcacagggcaggcctcctgtgcactccccactagcactggcctgtccctgaatccccgccttccctggttggaggccagctgtggcatttgcaccctcttctcacctcaccatgcacatgctaacttaaaagccttggggtctttcctgtaccccctcctcaaccctggtccaccccctctcaggatcttgtcaacgttatttttcctgtcccgtcttcctatcgctggccttcctttcccatcctaaaaacttgccgaggccctatggctccctccctttctttcccaggcagcttcttatctgggctgtctgtaccccttcctttgcaccacccaccatgccccacgtagctgaaagctgcttatcccaattgtcaactctggccttcttcagcctctgtagcaccagacactgcacctcctgaatgtcctctgcttctctgcttcagaggcccaggctcgccagttctctgacctctcccatatgtctgcttaggactctgctgcagctgtcctcaccagcctccggggaatcccactacccacagggcagggctgtgggctgggctgaaaaacatctgcatggtccacaagaagcctggcactgggtttccccatgaataacaatgaaaattaatggatgcacaacttcctggaacgtggactttcctctgggagattcatgcagaggcactggggaggtggcaggcatgcatgtgactga

SEQ ID NO: 371287 - DNA, 1147 bp, Homo Sapiens
gagcgaggcctgggtggcgaattcggcacgagggcaatatactataaaagaaaaagaactaaacaagaaccttctagccaaggatctcagagtgctttacagacatatgaactgggaagtgaaaacgtgaaagtccctatttttgaggaagatacaccctctgttatggaaattgaaatggaagagcttgataaatggatgaacagcatgaatagaaatgccgactttgaatgtttacctaccttgaaggaagagaaggaatcaaatcacaacccaagtgacagtgaatcctaaacctgaatggcgctcatgttttccaagagaagcagcccctgagggagtctgctgaggctgccaacagaggatgaagaggatacaaatttaattaatttcaaatcaacatagacacaagaaccttttgctgtttcttccaacgcccactcttcctaatgatggcatcacttgcacttggaagaatgtgcaattgagaagtactaggaaaaggcctggctgccatccatcgctgcctctgagggtggagaaggaggcgggtgatgtgctcacttctgatcaacatgtgttgcctcctctcagccaacttctagctcactgcactcactctggtcatgataaatgttcgtcacctttctgctgcattccttagggcctaaatcaggaagctgtataatcgatggttaccttttgggtcagtaaccagctttggataatttcctctgattattcaagtcgtgggacaggtaaactacattcagcaggaacttttctcgagaagtgttatgtcatggaaaagacaccaaacacagcaagtattttaatgaatacaccatcccagggggtcagtaagctctgcctgccaagaagacacagtgagaggggtccacagtcctgatgaggtggcgtatgggtaacttgtagaccctagcatggccaggtctggtcacccttaagaacttctcagagaaactaggaatcttcagtgaaagaactaatgttctcctcagctgaaattcccttgcttgtcagcaatatctgcgaagctcacacttgtatcaaccatacctcccttggatgtgacctgtaggtaggaagtatgtgcacgtgggagtcatctgtcagccttctatgt

SEQ ID NO: 371288 - DNA, 1212 bp, Homo Sapiens
  misc_feature (667)..(667): n is a, c, g, or t
  misc_feature (680)..(680): n is a, c, g, or t
  misc_feature (785)..(785): n is a, c, g, or t
  misc_feature (1109)..(1109): n is a, c, g, or t
  misc_feature (1113)..(1113): n is a, c, g, or t
ggcctgggtggcgaattcggcacgagggctggccccgccgcccgccctaccccccaagcagcggcagctgagtgaaaacgccagtgaggaagctggtgagggtgaatatgtcaatctgtattcctctggccagagcagcgaggagctggctccctctcgaggagagccaccggctgggaaagacggacatcccagagatccctcagcggtcagcggcgtccctgggaaggacagcagagacggcagtgagagggccccaaagtcaccagatgctctggagtcggctcagtcggaggaggaagtggacgagctgtccctcattgaccacaacgaaattatgtccaggctgacgctcaagcaggagggtgatgacgggccggacgtccgcggaggatctggggacatcttactggtccatgctactgagactgacaggaaagatttggtgttgtactgcgaggcattcctgaccacctacaggaccttcatctccccagaggagctcatcaagaagctgcagtacagatatgagaaattctctccctttgccgacacattcaagaagcgcgtcagcaagaacacgttcttcgtgctggtacgggtgggtggatgagctctgcctggtggagttgacagaagagatcctgaagctgctgatggaactggntcttccgcctggntgtgcaatggggagctgagcctggcccgtgtgctccggaagaacatcctggacaaggtggaccagaaaaagctactccagtgtggccactccagccagccctggnaaccccggggggtaccaacccagccgggggaccttgcacgactttccagcatgggaaaaggggggcacctaaccctgctggaaggctgaacccctctataaaataaaaattcctcgagggttttgctttgggcccaaaaacgccaatggggggaaaacggcccccccttgaccccagtttacggggcccctttaaaactgggctctaatgggggtcgggcccccacccatggtgtccgcggaaaaggcccttacacgggggacgcgtttcttttccgggttccccccgccctttgcgcgcttttgtgaaaaatgcgacatattnttanatttcgggtgcggctctcctctcccgcgcccgtgtactgcgggtcaccctcttccgggtgggaggcgccgcgcccgttttatccccctcctaagtcccc

SEQ ID NO: 371289 - DNA, 1145 bp, Homo Sapiens
  misc_feature (976)..(976): n is a, c, g, or t
  misc_feature (1006)..(1027): n is a, c, g, or t
  misc_feature (1034)..(1048): n is a, c, g, or t
tagcgaggcctgggtggcgattcggacgaggatcaaccccgaccacttgtcttatttcactttgtggggcggatcatggggctggctgtgttccatggacactacatcaacgggggcttcacagtgcccttctacaagcagctgctggggaagcccatccagctctcagatctggaatctgtggacccagagctgcataagagcttggtgtggatcctagagaacgacatcacgcctgtactggaccacaccttctgcgtggaacacaacgccttcgggcggatcctgcagcatgaactgaaacccaatggcagaaatgtgccagtcacagaggagaataagaaagaatacgtccggttgtatgtaaactggaggtttatgagaggaatcgaagcccagttcttagctctgcagaaggggttcaatgagctcatccctcaacatctgctgaagccttttgaccagaaggaactggagctgatcataggcggcctggataaaatagacttgaacgactggaagtcgaacacgcggctgaagcactgtgtggccgacagcaacatcgtgcggtggttctggcaagcggtggagacgttcgatgaagaaaggagggccaggctcctgcagtttgtgactgggtccacgcgagtcccgctccaaggcttcaaggctttgcaaggttctacaggcgcggcagggccccggctgttcaccatccacctgatagacgcgaacacagacaaccttccgaaggcccatacctgcttttaaccgggatcgacattccaccatatgagtcctatgagaagctctacgagaagctgctgaccagccgtggaggagaccctgcgggtttgctgtggagtgaaaagcaccaaaaggcacagagtctagctcatggccaccagacaaaagcatccagcttctgtgcacctcctgcaaagctggcaaaggccctggaatcagaacacccccnagggggggaaaggttgctccctcttcggtnnnnnnnnnnnnnnnnnnnnnnaaaattnnnnnnnnnnnnnnnggggcgcccacacccaaaaataatccccctcttaccaaaaaagaccctccccccctatttttgatttttccccttttaaaagataaaagcgcccccc

SEQ ID NO: 371290 - DNA, 1073 bp, Homo Sapiens
  misc_feature (851)..(860): n is a, c, g, or t
ggagcgaggcctgggtggcgaattcggcacgaggtcacccaccacaggccgggcctttgtgggcagcgacagcggcagcagctccaccggggatgcggctcgtcagggggtgtacgagaacttccggcgggagctggagatgagcaccaccaacagcgagagcctggaggaggccggctcggcgcacagcgatgagcagagcagcggcaccctgagctctccgggccagtcggacatcctgctgaccgccgcacagggcacggtgcgcaaggccggcgccctggccgtcaagaacttcctggtgcacaagaagaacaagaaggtggagtcagccacccggaggaagtggaagcactactgggtgtccctgaaaggatgcacgctatttttctacgagagcgacggcaggtctgggatagaccacaacagcatccccaaacacgccgtctgggtggagaacagcattgtgcaggcggtgcctgagcaccccaagaaggactttgtcttctgcctcagcaattccctgggtgatgccttcctttttcagaccactagccagacggagcttgaaaactggatcaccgccatccactctgcctgcgccactgcggtcgcgaggcaccaccacaaggaagacacgctccgactcctgaaatcagagatcaaaaaactggaacagaagattgacatggatgaaaagatgaagaaaatgggtgaaatgcagctgtcttcagtccctgactccaagaaaacgaaaacatattagatccgatctttggtctgggagcaaaatctccagcagttccaaatggacctggttccgtttccgctgttatttagccaaccctccnnnnnnnnnnagctgccaacccccaaaagggttcccgcttttgccaggtccacccacggaagggggccatggggccggccttggaaaccctttccgggataccccgttccctgcccctggggggcaaccgcccctggttggaacactgggagtgagaaaaacctactccaggccttgtccccaatcccctaaccagcggagaggacaggtgtttcttctttct

SEQ ID NO: 371291 - DNA, 1315 bp, Homo Sapiens
  misc_feature (211)..(227): n is a, c, g, or t
  misc_feature (574)..(668): n is a, c, g, or t
cacagtgtgtcctgctgcggtcgagagtatgtgagaaagtgtatttagagagcgattatgggggcgtcccccatgccgacgtgagagaaatcttgtgctcgctcatatggtcgctgggtcgttgagcgcccgctctactcacatgctgtgatcatgtcccattcatcgaatgtctcgggagtggcggcgcccgcccggacgcggccgcgcnnnnnnnnnnnnnnnnntagacgctgcagtgagccgcacagtgattttgaccgcgattggggtgatagggggtgcagggtgcgagctagagaggttctaggagtggtgtggaggcctgcccagaatggccgcccgaggatgaggtacatgaagtgggggaacgcaggggtacgtatccccgctttggcgccagatggagcccgagccctctgcgctgtaaaatgcgcgaaagcgcggacgccgaagaacgcgacttttggtttccctcgggcgcattccttttcggggaaattctttttgggcgcccataaacgaagggggcgtgggactcagaagcgcaaggagtttgggggtgttccccccnnnnnnnnnnnnnnnnnnnnnnnnnnnnnnnnnnnnnnnnnnnnnnnnnnnnnnnnnnnnnnnnnnnnnnnnnnnnnnnnnnnnnnnnnnnnnnnctggaggtggaggagtctcagcatcttctttcctgcgctcattcccagcaggagcaggccatgctgcctgggtcccctctggaagaccctcgcctaccccggcgccaggtgctggctgcactaagtagatgacatcttcaggctcggagggactggaggtgctctcctccagagacggggagcagaggcagcacactcctccatcgcacagcactggctcctcaaagtcctcgtctagggagtcaatcgtctcttcaaaaaacaggagcacatccttttcctcatgggtgaggtacttcaggctctcatcatccaaagtgaagcttctggagcaagagatgctgcttcgactctccaggctgccgcctctgctgaaggctcggagcctgcagctgggggacgtgtctgagttcatgtcagatgcgtctgatttccggtgggttacaggcatctccacagagtcctcagggccggctcgatcacaggaagcagggcaggagccagcagcccattctgcggcaacagctcactcctcgcgggagacccataccccgggactcaggtgtccacgccgccagcgacccggagccctcagggcaccgcccgtctggcgcacccttttgaaaatcgccacccaggcctcgcta

SEQ ID NO: 371292 - DNA, 1169 bp, Homo Sapiens
  misc_feature (847)..(847): n is a, c, g, or t
  misc_feature (929)..(929): n is a, c, g, or t
  misc_feature (933)..(933): n is a, c, g, or t
  misc_feature (937)..(956): n is a, c, g, or t
  misc_feature (962)..(962): n is a, c, g, or t
  misc_feature (973)..(973): n is a, c, g, or t
gagcgaggcctgggtggcgaattcggcacgagggggacctgaagccccagaacctgctcatcaacgagaggggggagctgaagctggccgactttggactggccagggccaagtcagtgcccacaaagacttactccaatgaggtggtgaccctgtggtacaggccccccgatgtgctgctgggatccacagagtactccacccccattgatatgtggggcgtgggctgcatccactacgagatggccacagggaggcccctcttcccgggctccacagtcaaggaggagctgcacctcatctttcgcctcctcgggacccccacagaagagacgtggcccggcgtgaccgccttctctgagttccgcacctacagcttcccctgctacctcccgcagccgctcatcaaccacgcgcccaggttggatacggatggcatccacctcctgagcagcctgctcctgtatgaatccaagagtcgcatgtcaacagaggctgccctgagtcactcctacttccggtctctgggagagcgtgtgcaccagcttgaagacactgcctccatcttctccctgaaggagatccagctccagaaggacccaggctaccgaggcttggccttccagcagccaggacgagggaaaaacaggcggcagagcatcttctgagccacgcccaccttgctgtggccaaggggacaagagatcacatggagcacaaattccggtaagatggagcctgtgtggccctcggaggactgaagaacgagggctgacagccagcctggaagaccgcttggcagcccttctgtgccacggctggtttctcctttgtgcttcccgtgtgncctccccagtagccctcacctgcataccaacccctccttttacccacggttgggggctggcataagctgcttcctgaagganattnaaannnnnnnnnnnnnnnnnnnntgggancctttccacanggtgggtgttttgggacccggcgtgggggatggacccggatgtacaaaacaagggggcccagagatggggcacctcccccctgtgaaaaaggttttttcccttcttctccccaggacacttttctatagggcccctttttgggtaaccccccctttttctgggcccccttgtgaaccccaacaccacgtttttttg

SEQ ID NO: 371293 - DNA, 415 bp, Homo Sapiens
gaaagatgaggtgcagctcctccttgactgtggagcccgggaagaggggcctccctgtggccatctcgtagtggatgcagcccacgccccacatatcaatgggggtggagtactctgtggatcccagcagcacatcggggggcctgtaccacagggtcaccacctcattggagtaagtctttgtgggcactgacttggccctggccagtccaaagtcggccagcttcagctcccccctctcgttgatgagcaggttctgaggcttcaggtcccggtgcaggatcttgcggtggtgacagtaggcgaggccccggagcagctggaacatgaaaatcttgacgttgtgcatgctcatgaggttcccacagtgggccagatactgcttcaggtcactgtccaggtactcaaacaccag

SEQ ID NO: 371294 - DNA, 1085 bp, Homo Sapiens
  misc_feature (46)..(76): n is a, c, g, or t
taggtagcgaggcctgggtggcgaattcggcaacgaggggaggagnnnnnnnnnnnnnnnnnnnnnnnnnnnnnnnagtcacacaatgctgtgagatgcctggtggtataagcctaacacagttttccccaagcttcttagtgtttgcctagaggaagaacaaaagatttatactctatcttctttcaaagtgagcatatttaaaagcacaaatggatactcagcatctgaaccaagaactcaggcctttctgaatagactgctgcctgcattgtccacacccatggcagctgggggctgagtgcgtgttcctatcctgtatctgtcacacccatttctgcagccctccagacactctgaggagctctcagtagccccctcgcctcttactacagtgattgattaccctgcctgccagtagttaacacctctgccattgctgaggaggagaaagtgacagagctggccttgctcacagtgactatggactgcttgggggccacgaaggcactgtgtgtgggggtgtgagttgtccctcgacactgggacttggcgctggatagtgaggtgctttcaaggttcacagaggacacagtcctagcccgtgagttggtagttaggcttttctgtctcagctcagcctcagatttgctactgtcctccctccccaggagtccctgtagggcccactgtttgtacagcattgcacaacatgcaggcgcaccacaaaagatccaaaggggggtgacttccgaacctgacttgctacttaacattggcttgggaacacccgcactttgttaataatgccacagagaggtcccctgcaaagccgtaggtaaaacagattctgaattccccccaccccacctaagggccgcagcttgaattctcctgtgtaccggccaaaaggccccttgcatcctgggcagggggggaattttccccacccaaaggctttcctaatccccaacgggcgaaaccccccgcgctagtttaagggggcccgcctcttccccatatgcccacggcgtgggggcactactggataccaggtataggggccccgagctattattacccag

SEQ ID NO: 371295 - DNA, 1566 bp, Homo Sapiens
  misc_feature (296)..(310): n is a, c, g, or t
  misc_feature (351)..(351): n is a, c, g, or t
  misc_feature (357)..(357): n is a, c, g, or t
  misc_feature (812)..(812): n is a, c, g, or t
  misc_feature (993)..(993): n is a, c, g, or t
  misc_feature (1007)..(1007): n is a, c, g, or t
  misc_feature (1014)..(1014): n is a, c, g, or t
  misc_feature (1101)..(1101): n is a, c, g, or t
  misc_feature (1120)..(1120): n is a, c, g, or t
  misc_feature (1350)..(1350): n is a, c, g, or t
  misc_feature (1407)..(1407): n is a, c, g, or t
  misc_feature (1495)..(1495): n is a, c, g, or t
  misc_feature (1549)..(1549): n is a, c, g, or t
gctgagtggcgaatttcgcacgagggctccccgagccgggacagtcacttactctacaggcagtggggcccgacacagacagcgccgcccccgccagccagcctcgcacgccctcggaagcgcaggctcccggcgctgcgctggagggttccccggcaccccagcctcccgtccccagcccgctgcacctccgggccccccttacccttgagaggcaccgggagttgtcgcgggggggcctcgggaaattccccggacccctgtgccaggaggtgcccggttcgcccgctcttcannnnnnnnnnnnnnngagggcggtgcccgggggtgctgccccatggagcggggagngagaanatcggtggagccaccatagagagtgggcactgcttagaacaatgatgctgccaaggtggacgccctaactactagagcacctggacgagcatgaacagacaatgacgcccacatctggaagccaaaaccagagcgcccgcaatcaagagggaagtactagcttaaaacgggtcccaaccagaagagcatagtaaaatacaaaggacacgcgggcccccgaaccgaggaagccggcgcctccactctgaggggaacaaacacactgacggggagggcacaaggtgtttgtcatcatggagttagcgtcccagacaccggaaagagcgccagcagtgcaggaacacctgtgtcgaagaaattgggtatagccgacgagcgtcacccggcggaggtgagaggaaacacatagagatgtgcgcggcatcatctcctgcgtgacacagttgacgagtaanaggctcgagagcgaagatagaatgattatatccgcacaatcctagataaatgggcacctataggaaatacatacaaacatacatcacctacatactctataagaaaccagcgcgtcatacgacagacgctctccgtgagtcacacacgctccacagtaacatacgctactacgatcctcgntcggacaagaatgnccaatantagagacatcagcagacagagcatgctagagatgagcgtgatgaccactctgccgcactcgagagagctacggctccgaggcatgcnggacggctcgcggcgagcncgagcacatctcacgcatacatcaacaggcactagggacgacacaagacgagatgacactaggcagagcgaccgacagaggatataatcataattatcaaccgctagagaacatcttctccgataggacacatatagacaactacgagcgagcgactgccgacgtggtaggggggggaccctcacggaacggttgcgcgcgactcatgtgctatcgcacgcatgtgagtnaagggtccctccctcgctccgtcgccacccactgtgatgatagaagaacgcctcgantaccagaatcacgctacgttgcgttggactgggttcggatagtgatgacgcgtatactgcccgcttctcacagctcaacataccaccncactgatcaccaagaacaggacactcgggcacatactactatacgaaagatttntatgattagatctgcaa

SEQ ID NO: 371296 - DNA, 1037 bp, Homo Sapiens
  misc_feature (91)..(181): n is a, c, g, or t
  misc_feature (195)..(204): n is a, c, g, or t
  misc_feature (574)..(594): n is a, c, g, or t
  misc_feature (597)..(682): n is a, c, g, or t
  misc_feature (760)..(760): n is a, c, g, or t
ggcctgggtggcttcttcggcacgaggagcctgcacagcagctgtgctggcaacgtttctcccggtataaatgagaagcagcctttgtggnnnnnnnnnnnnnnnnnnnnnnnnnnnnnnnnnnnnnnnnnnnnnnnnnnnnnnnnnnnnnnnnnnnnnnnnnnnnnnnnnnnnnnnnnnngtagtttcgtgggnnnnnnnnnnaagcataaggggttaaatattatgtaattaagtaataaggcagttgtgaggatgcaactgccaaaagtttgaaaaaagctgcccagatggaaatctgcttgcatttgtgcaagcagataggtgagggatttttactgtactgccgtgtcccctacctgccccagctttattgagttataattgacaagcaaaaattgtttatatttaaagtgtacaatgtgatgtggcctttttgttttgttttgagacataatcttatcacccaggctggagtgaagtggcgcagtttaaactgcgcaggctcatcatcctccttcctcagcctcctcagtagctagaaccacaggtgtgagccaccatgcctggctcnnnnnnnnnnnnnnnnnnnnnaannnnnnnnnnnnnnnnnnnnnnnnnnnnnnnnnnnnnnnnnnnnnnnnnnnnnnnnnnnnnnnnnnnnnnnnnnnnnnnnnnnnnntggtacaggcatgagctactgtgcctggccagaaatggtaaattatatttaagggcttctgtaagtccggctggcccncgggcgaagacgacaaaacaacccgggcatctattgtccgtgggccgacacaaaggtaaagcaaaaggcacctgggcatgagctgttttccggaaccccactttctctggaaaaagagggtaaactcactcccggtcatcacaataaaagacgccggattatatcttggaataaagcccggactaaccgctcgacttaaatgaatcggacttaaaaaatacccccgggaaattttcaaccccgccctatagtgagggcgagactttttttctattac

SEQ ID NO: 371297 - DNA, 1086 bp, Homo Sapiens
  misc_feature (746)..(746): n is a, c, g, or t
  misc_feature (766)..(766): n is a, c, g, or t
  misc_feature (831)..(831): n is a, c, g, or t
  misc_feature (891)..(891): n is a, c, g, or t
gtccaaatacagtctcttaatggtgaacacctgcacatccgggagttccaccgggtcaaagtgggagacatcgccactggcatcagcagccagatcccagctgcagccttcagcttggtgaccaaagacgggcagcctgttcgctacgacatggaggtgccagactcgggcatcgacctgcagtgcacactggcccctgatggcagcttcgcctggagctggagggtcaagcatggccagctggagaacaggccctaaccctgccctccaccgccggctccacactgccggaagcagccttcctgcttcggtgcacgatgcttgcccttgaaacacaggctcagccgttcccagggatctgccagcccccggctcagcagtgggaccagggcctcgcagcagcaaggtgggggcaagcagaatgcctcccaggatttcacacctgagccctgccccaccctgctgagaaaacactccgccacgtgaagagacagaggaggatggcaggagttacctcgggaaacaaacaggatcttctctgccctgctccagtcgagttggcctgacccgcttggatcagtgaccatttgctggcagacaggggagagcagcttccagcctgggtcagaaggggtgggcgagcccctcggcccctcaccctccaggctgctgtgagagtgtcaagtgtgtaagggcccaaactcaggttcagtgcagaaccaggtcagcaggtatgcccgcccgtnaggttaagggggccctctanaccccttgcctggcctcacctggccagctcacccctttttgggtgtagggggaaaagaatgcctngaccctgggaagggctccctggtagaatacaccacacctttttcaggttgttgcaacacnaggtcctgaggttgaccctctggttcagccaagggacccaagaaaaagtgtggttaaagggaaagtgggttctccagtcccccacgaacatgtgccccccttttgctggctgggctaaccaccttctttcccccagaaaacaagcaaggaccccccgaaacccccctttcagggccccaaacaaatgggccccct

SEQ ID NO: 371298 - DNA, 1180 bp, Homo Sapiens
  misc_feature (674)..(676): n is a, c, g, or t
  misc_feature (678)..(722): n is a, c, g, or t
  misc_feature (869)..(928): n is a, c, g, or t
  misc_feature (940)..(966): n is a, c, g, or t
ggcctgggtggcgaattcggcacgagggaggctgaccgcgactccatgagctgtggcctggattcggagggtgccacacccccaccagtggggctgcgggcatccttccctgtccagatcctgcccaacctctatctgggcagtgcccgggattccgccaatttggagagcctggccaaactgggcatccgctacatcctcaatgtcacccccaacctcccaaacttcttcgagaagaatggtgactttcactacaagcagatccccatctccgaccactggagccagaacctgtcgcggttctttccggaggccattgagttcattgatgaggccttgtcccagaactgcggggtgctcgtccactgcttggcgggggtcagccgttctgtcaccgtcactgtggcctacctcatgcagaagctccacctctctctcaacgatgcctatgacctggtcaagaggaagaagtctaacatctcccccaacttcaacttcatggggcagttgctggactttgagcgcagcttgcggctggaggagcgccactcgcaggagcagggcagtggggggcaggcatctgcggcctccaacccgccctccttcttcaccacccccaccagtgatggcgccttcgagctggcccccacctagggccccgtggcccggcaggnnngnnnnnnnnnnnnnnnnnnnnnnnnnnnnnnnnnnnnnnnnnnnnntacctccacagccaagaccaacaccccatcaccgacctccaccctccaccccgatcattacgctgttaaaatccgcactcacctctcatggccccccacacttcgttttctttttcagattcccacgtctgcgacaccctatatcgnnnnnnnnnnnnnnnnnnnnnnnnnnnnnnnnnnnnnnnnnnnnnnnnnnnnnnnnnnnntgccttaggatnnnnnnnnnnnnnnnnnnnnnnnnnnntcgtcgtacacctttcctccagcagagaacagtcattacattatcgttacactcccgatcaccatcctatcactcgctcttctgtgtgatcccaccctaccctttgatacattatatacgagccaccacttgtcctcccacgcttctccctataccgctgcactattccatgtcacctaccacgattacaccacacctatactgcgcactctcc

SEQ ID NO: 371299 - DNA, 1068 bp, Homo Sapiens
  misc_feature (391)..(392): n is a, c, g, or t
  misc_feature (453)..(453): n is a, c, g, or t
tagcgaggcctgggtggcgaattcggcacgagggcaagatgtggggaaggtggatgctgcctgggagccatccaaaaacacgttaataatgggacttggtacccagggggcagagaagaagagtgcagcatctattgcctgtttcttggcagccaatggtgctgacctgagcattcgaaataagaagggtcaatcgccacttgatctctgtcctgatccgaatctctgcaaagcactggcaaagtgtcataaggaaaaagtcagtggtcaagtgggttctcggagtccttctatgattagtaatgattctgaaaccttacaagagtgtatggtgtgctcagatatgaagagagatactctttttggtccatgtggacatattgctacctgnnttctttatgttctccacgtgtcaagaaatgcctcatctgtaaagaacaggttcaatccagngacaaagattgaagaatgtgtggtatgctctgacaagaaagcaactgtcctttttcaaccctgtgcccacatgggggcttgggaaaactgtcctaacctgaagaaaaagtgtgtgcagtgtcgagcagtagttgaacgaagagtgcctttcattatgtgctgtggagggaaaagttcagaagatgccactgatgatatctcaagtgggaatattccagtattacaaaaggacaaggataataccaatgtcaatgcagatgtgcaaaagttgcagcaacagttacaagacattaaagagccgacaatgtgcccctgtgtgtctagatccgctgaaaaatatgattttccttttgtggccacggaaacctggcaaactctgtgggaaaccgcatgagtgaaatgtccctatccggtcgccaggcgtattgaaacgaagggattcttttttgtattacctaaaaaccccttggggccattttggcttaacctaaagggtatcctaagcccatggaagatccttaaatagggcttttttggaacctaaggttgggcaagatttcttggaatgaagatcaaaattttttcaaaaaaatcccataggcttttcccttttac

SEQ ID NO: 371300 - DNA, 1162 bp, Homo Sapiens
  misc_feature (113)..(113): n is a, c, g, or t
  misc_feature (463)..(463): n is a, c, g, or t
  misc_feature (554)..(563): n is a, c, g, or t
  misc_feature (836)..(1058): n is a, c, g, or t
  misc_feature (1086)..(1122): n is a, c, g, or t
agtgtgatgtatagaggttgaagacagttgagtggaagggtgcgtgggaggtgatgtcgtgtagtgtgtgcgtaagtgagtatatgatatatcgtcttggtgggagtagcaangatcgcagatattcaggtacataatgatacgtggtagagtagaactgggatatgggtggtgtcagactaagtggtgacaatggttatggatttattaacactgaatggcggagacgttcgcgtatggcgctgcgtactaaggcttgtggtatatgggtgtatgcgtgagtagtcgttctagcgtgctgagtgatttggtgtgttggttaaggggtggcgtttaaggtgaagcgctgtggtgggagggagtagggtaatgggggttattcggtaagtgagacgatagtgttgtatcttagctcgtttcgcatgctgcggtttattttgataacgcgattcatactcagagnactagcggctgttagttgttttgcctagctccagaattggtggtggtgtgcgtgattgtaaggtggtgttcagtgtgagcggcttcgcgcnnnnnnnnnnaagtgttgggtgctgggcgcgcatggttggcgggctagcgaaggggggggctgcgggatgaggtggtaagcgagtggtccagaaggggtgggaaagtagccaacctacgagacaggtccagggtgggcgtgagttttagtggggggcaaggatttgaaatgtttacctgagtacggtgttctgctgggggggtgataggtatgacaaaagcccaatccccaccagtacgcaatatacacaaacacgcacatgtggctgggcgcagtggctcannnnnnnnnnnnnnnnnnnnnnnnnnnnnnnnnnnnnnnnnnnnnnnnnnnnnnnnnnnnnnnnnnnnnnnnnnnnnnnnnnnnnnnnnnnnnnnnnnnnnnnnnnnnnnnnnnnnnnnnnnnnnnnnnnnnnnnnnnnnnnnnnnnnnnnnnnnnnnnnnnnnnnnnnnnnnnnnnnnnnnnnnnnnnnnnnnnnnnnnnnnnnnnnnnnnnnnnnnnnnnnctgggcgacagagtgagactccatctcnnnnnnnnnnnnnnnnnnnnnnnnnnnnnnnnnnnnntaacatgctcatgcctcgtgccgaattcgccacccaggcc

SEQ ID NO: 371301 - DNA, 1019 bp, Homo Sapiens
  misc_feature (43)..(43): n is a, c, g, or t
  misc_feature (693)..(734): n is a, c, g, or t
  misc_feature (749)..(854): n is a, c, g, or t
tgggtggcgaattcggcacgaggaatggccaccctctattccncagtcttccaacaaatcctgaaacttaagagagtggactcttacaataattatatttcacatgttaaaaaatatgactccgaaggaataagccagcactgctcatttagctagtttcacttaactagttgggaggaagtttagacaatgaaggtactgtactctcatcgttagatttctctggcaggcttgcagaactgctatggcacaccagacctccagccaagtgaaagaacctaactgaaagagtgccaaatgaccaggttttcttcatgttaagtatgcctgcctcccttcgtatccacttttttccctttacagtttcatttcttacactggtttgctcacatccaggttagatgctgcacaagatcaactaaggaaaaagctcagtcactgttaacatagggttccccatagccagtgagggaaaaatggcttccctgctttgcagcagactattcctagccttcaccatgccctggcactcttgctttcctcaggttgtattttgacaagtatgtaagataacaaaaggtggcagaacaggtagaaagaaggagagagatgctatcagaattgccagctccactccatcactggcttgctgtgtgacctaatggaactattcctcatttcctgtttccttcnnnnnnnnnnnnnnnnnnnnnnnnnnnnnnnnnnnnnnnnnncaagacagggtctgnnnnnnnnnnnnnnnnnnnnnnnnnnnnnnnnnnnnnnnnnnnnnnnnnnnnnnnnnnnnnnnnnnnnnnnnnnnnnnnnnnnnnnnnnnnnnnnnnnnnnnnnnngactatagggcatacacccaccaaacccccgctaaatttttggaattggtttggggggaaacggggggtttttgcccatgggtggccccaagttctttggtctcccaacctcccctgggggctttcggggggaattctggccccggcccctcggggccctggccg

SEQ ID NO: 371302 - DNA, 1694 bp, Homo Sapiens
  misc_feature (821)..(884): n is a, c, g, or t
  misc_feature (900)..(916): n is a, c, g, or t
  misc_feature (985)..(995): n is a, c, g, or t
  misc_feature (1020)..(1020): n is a, c, g, or t
  misc_feature (1045)..(1057): n is a, c, g, or t
  misc_feature (1068)..(1068): n is a, c, g, or t
  misc_feature (1106)..(1106): n is a, c, g, or t
  misc_feature (1113)..(1113): n is a, c, g, or t
  misc_feature (1162)..(1162): n is a, c, g, or t
  misc_feature (1173)..(1184): n is a, c, g, or t
  misc_feature (1190)..(1190): n is a, c, g, or t
  misc_feature (1324)..(1324): n is a, c, g, or t
  misc_feature (1331)..(1331): n is a, c, g, or t
  misc_feature (1349)..(1358): n is a, c, g, or t
  misc_feature (1428)..(1428): n is a, c, g, or t
  misc_feature (1543)..(1543): n is a, c, g, or t
ctagcagcgaggcctgggtggcgaatccggcacgagggttcaacgatgtcctggtcgcgaccaagaagaagagcgaggagagctacatggtccaggactacgcccagatgaaccacatccaggtagagaagatagagccgtctgagctccctctgcccgggggcggcaaccgtagctcctccgtgccccaccccttccaggtgaccctgcttcgcaacagcgagggccgccaggagcagctcctgctctcctcggactccgcgagtgaccgggcacggtggatcgtggcgctcacacacagtgagagacagtggcagggcctctccagcaaaggagacctgccccaggtggagatcaccaaggccttcttcgcgaagcaagcagacgaggtcacactgcagcaggcggacgtggtcctggttctgcagcaggaggatgggtggctctatggcgagaggctccgggacggagagacgggatggttccccgaggactttgcccgcttcatcaccagccgtgtggccgtggagggcaatgtccgcaggatggagcgtctgcgggtggagacggacgtgtaacccctggcgaggcccagccgggcggcagcacagccctgtccccaatcagcaagtgggtcatgcctgggctctagagagcgggggggagcctgggtctcaaggaaccccagccttgggttccccctggggcgcctttcccaaaagaagcccctgggggggctgtggggtcgcccggggacttccccagaaccactttttcaaccgggggaaagggggaacgggactcccccccgttgggctcgnnnnnnnnnnnnnnnnnnnnnnnnnnnnnnnnnnnnnnnnnnnnnnnnnnnnnnnnnnnnnnnnctcttccccctaagannnnnnnnnnnnnnnnnccctccccaaggaccatccccccccggggtactgagggggtgtttacaccccatccccactagagagannnnnnnnnnncctcccaaaagtagccccccccccnacccccgccacaccatgatctgttnnnnnnnnnnnnnggcgtcaaaanacaatatatttttccgcaccacccctcccgcggcacgngtttttntttgtgtcggagcgggcgcccccgctcacgctgggcgggggcggggtanccttttggttnnnnnnnnnnnntgggcntcacccccaaccccccctattcgctccgtcttctataacacgagggctgtgcatttttcgcggggcaccctttcggtttgggggagggggaggcgtacaaaggaaccccgaacgaaaacacctatttttatcgnggggacnagggaggaccgatgtgtnnnnnnnnnncggaggcccgccccacaaggttggagggggggccgaaaaacaccacaaagacctctttgttcccccggcnaaaacatcttggaggggaaaaactatcttgggggaaatgggggcgcgggcccccaccgccccaatggggggtaggaggcgggggaaaaccccccccgtaagcgattttcggcctnggcggcgagcaagtctgccccctggcttgaggtgaggggggggcccaaaaaatgggctcactaaagggggggacccaatacaccgaggtgccgtgaagtgggacgccccctattctccgctaaacaaccccccattgaaaaggggagtggc

SEQ ID NO: 371303 - DNA, 1860 bp, Homo Sapiens
  misc_feature (1159)..(1159): n is a, c, g, or t
  misc_feature (1574)..(1574): n is a, c, g, or t
  misc_feature (1663)..(1663): n is a, c, g, or t
  misc_feature (1711)..(1711): n is a, c, g, or t
gcctgtcctcgtggagcttcttctccgatgcctctgacgaggcagccctgtatgcagcctgcgacgaggtggagtctgagctaaatgaggcggcctcccgctttggcctgggctccccgctgccctcgccccgggcctcccctcggccatggacccccgaagatccctggagcctgtatggtccaagccccggaggccgagggcaggaggatagctggctactcctcagtgctcctgggcccaccccagcctccccgcggcctgcctctccatgtggcaagcggcgctattccagctcgggaaccccatcttcagcctccccagctctgtcccgccgtggcagcctgggggaagaggggtctgagccacctccaccacccccattgcctctggcccgggacccggttcccctggtccctttgactatgtgggggccccaccagctgagagcatccctcagaagacacggcggacttccagcgagcaggcagtggctctgcttcggtctgaggagcctgcctcatgcaatgggaagctgcccttgggagcagaggagtctgtggctcctccaggaggttcccggaaggaggtggctggcatggactacctgggcagtgccctccccactcgcttggtccaaggcccggattgggggacacagccctatcttcaggacctctgccctacccccactggaatggcctctgcccagccaatatggagcagctggagctgaggatcgaggtacagcctagagcccaccaccgggcccactatgagacagaaggcagccgtggagctgtcaaagctgcccctggcggtcaccccgtagtcaagctcctatgctacagtgagaacccggtgaccctagatatgttacttccctcctgtcgcatcaaacggccctgcggtgctcatgaccttcctatcgagtccggccgctagtcgtcgagtcgtgcatgtgtgttcgaaacaatagctgtttccgtgcgcgggctggccaacacccccgcccgagttgcggcccatcagccgcgccggtggtgcggccgacctcccccctcgccgcgccacaccgccctgtgcatatcccgggggaccatcctctcgcgtactcgtacgagtccggtccgcgcctcatccgctacattcccgcggncctgagccggataacgcccagtcgcgccaatggaacactagacccccgcatcatactggctgtgtcgcggtccgcatatgatgtgccgtatgtcctctagctccgctgagtcgtatccgcaccatcatatctatcgcgttgcgagtagcggccccaaccacgcagacggccgtacaatacaccatccctcgcgccgacccctcacatcaacgccgacgtactctattcttgtccataatgacgtggcgacggctctgagtgacaagtacgatgacagtcaggcgcatagatcgccgccacgagtagaaatgcctgctcccgtttagtacgcgcgcgacggtcggggggcctgcccactggtgagcagacacacccgtaacgacgtctcgatatcacaggagcgcacagtattccntactttacattcacacaccatatgtgccgttcgcaacccgcgcgaaacccccccgagtgcatgttgtgttagtagatccgagcccgctncgtgacatatacacaaatggacgcaccgtgtgcgcttccaccaccgcnacctgtctgacctaccagcacttagacgttctgcactcgctcttctctcgtgcctgcctgtgcgtcgcgcatccaagcccaagcacaacgatcgtcccaacataattacaacgctatgtcgacttacccccgcaccacgtcgtgtaacc

SEQ ID NO: 371304 - DNA, 1009 bp, Homo Sapiens
  misc_feature (45)..(45): n is a, c, g, or t
gagcgaggcctgggtggcgaattcggcacgaggggatcagggaangccactttgggacaggtccataaagtgaactgatcttaccgagtcaggacctcagccagctctcaagaggttctgctcagccttaacttctcaactttgccttagcacagggtttctgtagggagtgggggctgctagaggggattagttccggagactgagactgttggctccacctccaagctgagctagggtggagggcagggtgggcaggaagtgacaggaagttaagctgttcctctccctggctgctgctctggatggccagagaacaagatgctcccttgctgagctcctgggagcgtggaaggagatgctaggccctggcacagtgttatgtggactgggccacgatagggtggagtgagctagtgaagaaggcagagggagacttggcttctggtctcagctatgcctgttttgtgaccttgattgagttgcttgggctttacttctgcctacaaatcaggggtaaaaatacctgttgggaggagaaatgagaacatagaggaaagcctcttggaggaaaggtgcttggaccaagtctcaggtgtgtctgcctgtggctgcacaggctctctaaccgaaacctcactttcagagagatgtgggtcctttgtctccaggatccacaccctagattttaacactgcattctcactataacatgccctataatggctgcatcccttttgagcaacctccaaaatctacatttacacagtaggtaaattagggatgactgcattatcaaaatactctcagggttcctataaatggcagctctcctgttgtattcaggtgttgtttacagactaacaaatgtgttggcaaatcccctggttagatgcactttcctggtgtttgagatgaacacgtccaattttttcacacatcgatgaagcccatgctctgccatgaccaatatttaatgtggattccgaaccctaacttttttccccta

SEQ ID NO: 371305 - DNA, 1057 bp, Homo Sapiens
ggcctgggtggcgaattcggcacgagggtgactctggttatctgcatttgctttataaaagaccactggatcccaagagtgaagctcagcttcaggaaattcggcgccttcatcagtatgtgaaatttgctgtccaagatgtgaatgatgttctagacttggagtgggatcagcatctggaacaaaagaaaaaacaaaggcacctgcttgtgccagagcgagagacactgtttaacaccctagccaacaatcgggaaatcatcaaccaacagaggaagaggctgaatcacctggtggatagtcttcagcagctccgcctttacaaacagacttccctgtggagcctgtcctcggctgttccttcccagagcagcattcacagttttgacagtgacctggaaagcctgtgcaatgctttgttgaaaaacaccatagaatctcacaccaaatccttgcccaaagtaccagccaaactgtcccccatgaaacaggcacaactgagaaacttcttggccaagaggaagaccccaccagtgagatccactgctccagccagcctgtctcgatcagcctttctgtctcagagatattatgaagacttggatgaagtcagctcaacgtcatctgtctcccagtctctggagagtgaagatgcacggacgtcctgtaaagatgacgaggcagtggttcaggcccctcggcacgcccccgtggttcgcactccttccatccagcccagtctcttgccccatgcagcaccttttgctaaatctcacctggttcatggttcttcacctggtgtgatgggaacttcagtggctacatctgctagcaaaattattcctcaaggggccgatagcacaatgcttgccacgaaaaccgtgaaacatggtgcacctagtccattcccaccccatctacagccccgcaggcagctgccgcagcagcactcaggcggcagatggccagtcaggcaccagacggtaaacgctatgatctgtatcaacgttgaagaatgtccctcaagtggtaaatgtgcaggaattgaagaataacg

SEQ ID NO: 371306 - DNA, 920 bp, Homo Sapiens
ggcctgggtggcgaattcggcacgaggggatgaggtcaagtgccgggttttgctttgtgaccctgaagccaagaagctgatgatgaccctgaaaaaaaccctgattgagtccaaactacctgtcattacctgctatgccgatgccaagcctggtctgcagacacatggcttcatcatcagggtcaaggactatggctgcattgtgaagttctacaacaatgtgcagggactggtgcccaagcatgagctcagtactgagtatatccctgacccggagagagttttttacactggccaggtggtgaaggttgtcgtattgaactgtgagccatccaaagagaggatgctcttatccttcaagctgtcgagtgatccagagccaaagaaagagcctgcaggacacagtcagaagaaaggaaaagccattaacattgggcagttggtagatgtgaaggttttagagaagaccaaagatgggctggaggtggctgtcctgccccacaacatccgtgctttcctccccacatctcatctgtcggaccacgttgccaacggcccattgttacatcattggctccaggcaggtgacatccttcaccgagtcctgtgtctgagccagagcgaggggcgtgttcttctttgcaggaagccagccttggtctccacagtagaaggtggccaggatcccaagaacttctcagaaatccatcctggaatgctgctcattggttttgtgaagagcatcaaggactatggcgtgttcatccagttcccctcagggtcttagcggactggcccccaaaagctatcatgaaatgacaaaatttgtgaccctccacagtggacccacttttgtttgagggccagaacaggtaaccggcaaaaggtggacccaaatggtgggaattgagggaagaaat

SEQ ID NO: 371307 - DNA, 912 bp, Homo Sapiens
  misc_feature (603)..(701): n is a, c, g, or t
  misc_feature (731)..(787): n is a, c, g, or t
  misc_feature (859)..(870): n is a, c, g, or t
gagcgaggcctgggtggcgaattcggcacgagggagccaaaggcagggctcctgggacagcagggatgttgtcctctctacctcacctaagctcctggctacagccactgccaacgggcatgggctgaaggggaacgacgagagcgctggcctcgacaggaggggctccagcagctccagcccagagcactcggccagcagcgactccaccaaggccccccagacccccaggagtggagcggcccatctctgcgattctcaggaaacgaactgttccaccgctggccactccaaaacgccgccaagtggagcagattctaagacggtgaagctgaagtcccctgtcctgagcaacaccaccactgagccctgcaagcaccatgtctcccccacccagccaaaaaactggccccttctgccaagaaggccagcaccctgtggaggggcgaccggcaatgacctccgtccacctccccccctcaccatcctccgaactcacccaccccatgaaaaactctcaccccgtcggtgccttccacttggcccggccctaaacccaggggctgggtaaccggtccccaaattttcgggcggccgggaaannnnnnnnnnnnnnnnnnnnnnnnnnnnnnnnnnnnnnnnnnnnnnnnnnnnnnnnnnnnnnnnnnnnnnnnnnnnnnnnnnnnnnnnnnnnnnnnnnntgttcttaggggaaaaagagagactttggnnnnnnnnnnnnnnnnnnnnnnnnnnnnnnnnnnnnnnnnnnnnnnnnnnnnnnnnntgaagaaaaaagaaacctcttttttggggggaagaaaacccccaaaagggggggtggtttaaaaaaaaaaannnnnnnnnnnnacaaaaataggagggggggggccgcgcgctcccccccccccc

SEQ ID NO: 371308 - DNA, 1279 bp, Homo Sapiens
  misc_feature (59)..(59): n is a, c, g, or t
  misc_feature (81)..(89): n is a, c, g, or t
  misc_feature (301)..(301): n is a, c, g, or t
gccccattaagccccagtttttgttggaaccacccaggtttcaagccaggcttccttcncgaatggggctttggtggaaannnnnnnnnaagatttccttttcccccacaacccggagattgaccacccttgggccttgtgtccttgctgaaggcctgtgcctccagatgttttctgggagttctgcttcggctgatcaactataccagcaattgcaccaagcaggctgatgcccagccgggacaggccctgtcgaagcccctcgcccaggctctcggggagctgccgccgccactcctcntgccggttgtagtgctcctcatccagtgagagccggtccatgttccgggccaggcttgtggcgaggttggtgatggatgtgagggtacctttggagatgtgctttacaaacgatgtggtccctctggagacgccactcacgaaggctccagggccccgggtcagcccctcatacggaagcctgaagaagtcggcgaccccgttcccgatgcttctcaccaggcttgcagggctgccaagaatatccagagacccaactacccagcctgctctaaaaagggccccagcggcatagtgcattgccagggcgtgcacaagctgcctcgcagtggtgaagatgggtcctctttcaaacaccgagaaggagagaggagtgtggtctgaggctatgtacagcttgagggaagcgtggatgctgacgagcaaatttactggctggatcaccagtttccgtaacttcacaggattcaccaaggccctggcgtgcctgtgtgacctgcatgggcaacacctgtttacccccggagaggtgtgtggagtgaccagccaacctgctgttaggaaggtaggtgtcaaacaaagtcttgatgtagtatacaaatgtgtcttccacgtataaccgagcaggttttaattcaaagctgaactcattaatatcacagaggatgctcttgccttcatttaaggtgatgcaaagtttgataaaacatttttccttgtattcttccaactctttgttggatatgaggagactctgcattttggaacactgaatgggttctgctttttctccctggcagactaagacagcaaagtggaaattggacttgttataaagctggttgtctagctgcaggtccccacagcagatctccacacagtaaagttcaaacaacgcagccacaggctcttccctagggaggggaccagctcccggggccacacagagaaaaatgttgtccagtgtgagtctcagaag

SEQ ID NO: 371309 - DNA, 606 bp, Homo Sapiens
gctgggtggcgatcaaagcacgagggtcacttgttgggcctggcggcagaccaggggtctttcccagtgcatgagaagagatgggtgaggtgggaccagagtgggcgacagtggctggacaccagctgcctgagccccgccttacctctttgagggtggatttcattgtgtctatcatgaacgacagggactccttgtcagagtaattctctcttggatcaaaatatccgtggactgctctggaaagtgaggagttgggggttgttggggttcatcttagaacctgcctcccagcggtgcccccatcctgccctgggttcaggcctctgaggagaaaccaaagcctgggctaccccaactcccacagctgggtcccttgaccctgggttggatttgaggctcagttaatctcagctcacgctcagctggcacaagccaggcgcaagcaagtgctgaaggcacagccttgctggggcgcaggggagtcaggacttggtcacagtcagccctgaacagcagagctgggatctgacaggcgctggagcccacacttgctctgagagagatttatggcctcacaatcctcccattgaaagtctacaatcc

SEQ ID NO: 371310 - DNA, 1299 bp, Homo Sapiens
  misc_feature (94)..(94): n is a, c, g, or t
  misc_feature (273)..(273): n is a, c, g, or t
  misc_feature (431)..(431): n is a, c, g, or t
  misc_feature (616)..(616): n is a, c, g, or t
gcccgttctcctgggcagccctcgtgcgcaggtgggagggggcgttttttcagagaagggggacaagttgggcccttcgtgcgaagaaggcgcncatacttggcgggcaccgagccagagggggttcctgcataaacctccgcccaaaagctcccgagagggtttacgccccagaggggggccaagcaagccccgaaagggatggttggttttccgatcaggggcaggagcccccttcctgggggcccgggcgtggcaaacccacgtttcacntgggtggggggtcccaccaaaggaagccccaagaaacttttctttgaggccaagttctttggtgggcccgctgggttccaaggtcgcttcttgggcacaggttgcgggacgggtgctcacccagcacaataaggcgccacttcgcttcccttggcttnttggtgatggagggacacgggccacccccgggcgaatgccctctcgccgaaggggccttgctgatctcagaggccctgcgcgttgtagggcgtgaggacgggcgatgtccctggggctctacggtcctccccaggggtcagctgcttggtgatacggaccaccctcagcccacctcctccagggntgcccttggagttctcattcccttcgtccggggacaccagcaggctccgctcgtggccctgcacgtggccaaagatgacagggcagctctccttgccagcgtggcccaggacactgggcggcctcctcaggccctgccacgtcttcagcttgctcttgtagaacgccacagaggggaaggcacagatgccctcatgcatgcggtactgagtgtccagcatatgtgcgtcctcgtggtaccgctcgaacagagaccggtccagacccaggttttgcagccgctcattcttgaccacaggccgcagctgcttgtggtctccgagaagaaccaccttctcggcctgtgggaactgcaccagggggatgagggtttcaggttccgtggccatgcctgcctcgtcaacaaggatctgcctcacgtccaggattttgaggctggcagaggctgcacaggagcaggtgcagaggatgacctcatgccggtccagctcgaacttccgagcctcccacaagaccttcttgtaccagaccaggtcctccctggagaagagctcccctctctgcagccgggtgtcaaaggccttgatttccgacgagtaagggttgggggcctgccggatccggtggtgcagggtgatgctcatgaggctctggttcggcctcgtgctggaatcgccacccagg

SEQ ID NO: 371311 - DNA, 1504 bp, Homo Sapiens
  misc_feature (433)..(479): n is a, c, g, or t
  misc_feature (866)..(914): n is a, c, g, or t
  misc_feature (1005)..(1005): n is a, c, g, or t
  misc_feature (1233)..(1233): n is a, c, g, or t
  misc_feature (1292)..(1292): n is a, c, g, or t
  misc_feature (1371)..(1371): n is a, c, g, or t
  misc_feature (1381)..(1381): n is a, c, g, or t
  misc_feature (1418)..(1418): n is a, c, g, or t
  misc_feature (1474)..(1475): n is a, c, g, or t
gctgggtggcgaattccgcacgagggtctctgtggctcgcctccgctctgaaattccggctttcaaggtggccccaggccttcgacaggggcttccggcgctgggagtgcggcaaggcgccgcgcaggcccgggacggtggccccagggaagtcgctcctagaggggaaggccgccgaagggacgagagacaccgcgggcccccggaaccgcaggcagccggtgtttacctcgctcggtcccaccccaggcggccgcgggcccgcccggagcgcgcggcgcgattgggcgagtggcctgccagtctccggggactttcccaggggtgggtttgcgcccccctcttcatgtccgcagactccccgtccctagcccgatcccccgtttctatcccaacccgcccgtcgcgccccccaccttccattatacctcgnnnnnnnnnnnnnnnnnnnnnnnnnnnnnnnnnnnnnnnnnnnnnnntttatccgatccaacccttccatgcctatatccgctctttatccacccccggtcaagcccgattggccagaatcaaaggggtatcgccccccacccccgttttattagcccccgtaaatgtcccccacatacgcctagcgccccgcggcatcctactccacccctatgctgtattgtgtccattcgccctggcggccttttactttttatgcgccccctccttttttcgcccccgcccgcgttatgtacagtgccggtgcccccccatttcctatatccattcccgtaccattccccccgcttttcgccccgtattttcatcccccactgccgtgttaccccgtttgtgcccccccaatccccctttgccgccggccctgtcccacnnnnnnnnnnnnnnnnnnnnnnnnnnnnnnnnnnnnnnnnnnnnnnnnngtttcgcccgtttcacatcaccatctcctttatgcccgcccggctggctccgcatgcgcgggtcctactccgcccagccgaaccggtgggncgcttaccatcccacaccacccactatttcgcgggggcccgcggatatacactaccaccaatcccgcggctttatcttatacaccccacatatgcgcggttttccctcgccatcacaccactgtcgtggtgtgttttcctctctgctcgtcactcctccctcttggtcgggctggtttcctgccacccgctcccacacacctgcggtcgccgcctcttatccctctantaccgccccatccacctgcgttcttatctcccccgccccctttgtgtgtcaccgccgtnatatgtatccgcggtcgcccctcgctgtagccacctcggttttttttaggcccccccacggccctcctgccccctatancccaccccantcggctttttgtaggcaaggaaacatctggtatcccngcgctattctatttcgcgcgccggcgtcggtttgtatgacgccgcgccccgtagtnncctacgacccccgtacccgcggcagatgt

SEQ ID NO: 371312 - DNA, 812 bp, Homo Sapiens
gctgggtggcgttctcggacgagggaaattctgggagagagactataacacaaaacgagtggatcattcaaataccagattggcttcccagcttgatagaaatccaggatcagatgacaacaatctgaattccatcttttatgagcatttaactagatccctacagcacagcctctgtggtgatttgctactaggacggtggggaaactacagtacaggggactgtttcatccttgcctctgactatctcaatgcattagtacaccttatagagataggcaatggtctggtcacttttcagctgcggggacttgaattcagaggtacctactgtcaacaacgggaagtggaggccattactgaaggtgtagaggaagatgaaggattttgctgttgtgaacctggccatattcctcacatgctttcatttaatgctgcatttaacccagcgatggctagcttgggaagtgatagtcacaaagtacatttctgggagggttatagcatcactgataacagtgctgcttctatgcttcaagtctttgatcttcggaaagtactcaccacttactatgtcaagggtatcatttattatgttacgacctcgtctaagctagaggagtggctagctaatgagacaatgcaggaaggacttcgtctgtgtgctgatcgcaattatgtcgatgtggacccgacctttaatccaaacattgatgaagactatgaccaccgactggcaggcatatctaaggagagtttctgtgtgatttacctcaactggatagagtactgctcttcccgaagagcaaagc

SEQ ID NO: 371313 - DNA, 1343 bp, Homo Sapiens
  misc_feature (67)..(76): n is a, c, g, or t
  misc_feature (721)..(746): n is a, c, g, or t
ccccagcgtggaaggggcccaattttcctttggggagaggtcaccccccgggaaccccagaggaatnnnnnnnnnngcggttatgggaagggccccaagccagggccccaaccctggaatggtgcccgtgacttttgccaggaaccccttttccccgaaattggcaattattttccacagggttagaaacctggggttcccacacgaagttggttaaaaaattgcccagctcctttttccccgaaccccaaagccccctagtggttttctccaagtatatttgtagggccgcaaagaaattgggtcatcaggcattgttgggttaaatgtgcaatgtcaggccatgtttttcagatcaattattggcaatggttcagttggggtcattcccggcaatagttggttaggtgttcatttccaatttcattctcagaggataatttgcatgtcaggtttgggagtgcctctcttctttgatcttgcagcaacaggtgctcttcctggcccgacggtggaaatccatgcctccctcataatagttaccgtaagtcttgaatagaattccgaacatttagactacaaggtgtgtcaaggaagagtcctactagctcccttccaccttggtgatcggagaggataggcaggggaagccttttctagtcctcttcctaacagttcttaagtcaatatccagaaacttaattgtaacaaggagacacannnnnnnnnnnnnnnnnnnnnnnnnntgtagggtggtggaggaagaactgataaggcaagagacaggcaaagctcaaggaggaaggtggtgcctgaacacagcgcctgcaggtgtggctccagtaagcctccctgacaccaacaacagtgggctcagtccccagagcatcttctcagatctaatcttgctctctgctcctttctgttcactgaaggccttagtaactctacctttctgttctccctgcttcgtattaccactggctactccatcgtttggaggattcttctctcccccaagttacccatggcgtggaagaggtttcaggctaaaagtacatgtattattattacctgttaattaagaccagtaaatgtgaacagaggaaataatgatgatgtttttcctgtacctacaaagctatcaatatacttcctggcactgccctagaatgaaaacgaacctgcatatgtgacaggaagacttcctttccccacctcactgacaccatttacaacctttcctagctaatacgcaccagagtcagatgcagtattacttatttccaagatgacttaaggccaaaagacttatttttgtaaactgtaaccctcttgtgaga

SEQ ID NO: 371314 - DNA, 1103 bp, Homo Sapiens
  misc_feature (980)..(980): n is a, c, g, or t
ggcctgggtggcgaatcggcacgagggttgacctcagagctgctagtcatgagcaggcagcagctgcattgaaaaatgctggccaggctgtcacaattgttgcacaatatcgacctgaagatacagtcgttttgaagctaaaatacatgatttacgggagcagatgatgaatagtagtattagttcagggtcaggttctcttcgaactagccagaagcgatccctctatgtcagagccctttttgattatgacaagactaaagacagtgggcttcccagtcagggactgaacttcaaatttggagatatcctccatgttattaatgcttctgatgatgaatggtggcaagccaggcaggttacaccagatggtgagagcgatgaggtcggagtgattcccagtaaacgcagagttgagaagaaagaacgagcccgattaaaaacagtgaaattcaattctaaaacgagagataaaggggagatccctgacgacatgggatcaaaaggcctgaagcatgtaacttctaatgccagcgatagtgaaagtagttaccgtggtcaagaagaatacgtcttatcttatgaaccagtgaatcaacaagaagttaattatactcgaccagtgatcatattgggacctatgaaagacaggataaatgatgacttgatctcagaatttcctgacaaatttggatcctgtgttcctcatacaactagaccaaaacgagattatgaggtagatggaagagattatcattttgtgactttcagagagcagatggaaaaagatatccaggaacataaattcattgaagctggccagtataacaatcatctatatggaacaagtgttcagtctgtacaagaaataccagaaaaagggcaaacactggtatcctttgatgttgtctgggaaatgcccataaagagaattacggattgccccaggcctttacccctatcctccattttttatttanaaccccaaatcccatgtgaaaaatatccatggggaaaaggaatttaagccggtcttacaagggaaagaaaccaaggccccggaaaaaaaccatttttggagaaaaaagcccccttggaaaaat

SEQ ID NO: 371315 - DNA, 607 bp, Homo Sapiens
  misc_feature (304)..(304): n is a, c, g, or t
  misc_feature (322)..(322): n is a, c, g, or t
  misc_feature (343)..(343): n is a, c, g, or t
  misc_feature (354)..(354): n is a, c, g, or t
  misc_feature (368)..(368): n is a, c, g, or t
  misc_feature (377)..(377): n is a, c, g, or t
  misc_feature (398)..(410): n is a, c, g, or t
  misc_feature (419)..(419): n is a, c, g, or t
  misc_feature (507)..(507): n is a, c, g, or t
  misc_feature (578)..(578): n is a, c, g, or t
  misc_feature (596)..(596): n is a, c, g, or t
acatcccgtcattaaaatgggcatctatttgtttaaatatagtttgtcccctttgccagttaacgctgtttcaaaaactgaaatagtgccaacagtattttctcctttgagtactcatgtctacatttggactaattcagggtcacttagccctttttgtcatattctacttgctatttataatagatttgttcataaactgtgttgtacaaaaataaggcattgtccttaattacaggagttttcctttgctaatatatatttattatttgaaaaacttaaacgtttcaaagaaaaagaaaantgcatgctgttaaaaaantattttgttatatatggcttnatatcctcaanaattcattttggantgatttgcnttttaaactccatgaccctgnnnnnnnnnnnnncattgtccntgcaatttcagagcatgtaacttctaaatgccagcgatagtgaaagtagttaccgtggtcaagaagaatacgtcttatccttatgaanccagtgaatcaaccaagaagttaaattaatactcggcccaggtggatccataattggggacctatgaaagnccaggataaaatggatgnccttggatcct

SEQ ID NO: 371316 - DNA, 808 bp, Homo Sapiens
ggcctgggtggcgaattcggcacgaggaaactcactactgagtacgattcagtatgttcctgtggatgtctgctgtgactaatataaatttcttgcagaatcagctacacttaattatgttgctgatagacaagcatccacgcttcagctggcactaagtgttttcattgtaggatcagcagcaggttaaagactgaacggttagtgaagacaaatgtcttaagaggctgcgatgtctaggttgggcttgtgacttcttagtggcctagccttcttgatggcaccttgaaagtgaacttctagaaatctacatttaaaaggcaaagctttaaaagcagagctagtctattctagttactgatgcaactaaaattctgtatttcttaagatggagccactgacgagatgtcacagtatagagcctgcagtctcaactcattgtgatcctaatggtctgggtgattggatggtttgagttgttagggattttgagtttttcattttattgcatatctgggttggatgttagactaaaggaaacccaggaatatttacctggtgttacatttaatatttaatgtaactggtctagcaacattaagggggatttctgaagccaactccggaggctgtgggctgcacattttgcactgtttttatatacttgtattcatatcctcttatcacctcagactcagacacaaggccttttacatggaaattttacaaattacttccatttatgtaaaaataacgtccctgtgaccaagttgttttaaatggaaaaataaagtgcttttctttaagg

SEQ ID NO: 371317 - DNA, 498 bp, Homo Sapiens
  misc_feature (55)..(55): n is a, c, g, or t
  misc_feature (63)..(63): n is a, c, g, or t
  misc_feature (68)..(68): n is a, c, g, or t
  misc_feature (83)..(83): n is a, c, g, or t
aaaaagcggacccagcccaacccgagttaccgaagccaacctaaaacccgtaatnccctaaanaaggnagcccaccggacganaaggtccacagtaaaagaaccctgcagccctcaacctcattgtgacccctaatggtctgggtgaattggatggtttgagttgttagggaatttgagtttttcattttattgcatatctgggttggatgttagactaaaggaaaccccaggaatatttacctggtgttacatttaatatttaatgtaactggtctagcaacattaagggggatttctgaagccaactccggaggctgtgggctgcacattttgcactgtttttatatacttgtattcatatcctcttatcacctcagactcagacacaaggccttttacatggaaattttacaaattacttccatttatgtaaaataacgtcctgtgaccaagttgtttaaatggaaaataaagtgctttctttaaggaaaaaaaa

SEQ ID NO: 371318 - DNA, 615 bp, Homo Sapiens
tgggtggcgaattcggcacgaggcagctttacaaggagcagctggccaagctgatggctacgctgaggaacacgaaccccaactttgtccgctgcatcatccccaaccacgagaagaaggccggcaagctggacccgcatctcgtgctggaccagctgcgctgcaacggtgttctcgagggcatccgtatctgccgccagggcttccccaacagggtggtcttccaggagtttcggcagagatatgagatcctgactccaaactccattcccaagggtttcatggacgggaagcaggcgtgcgtgctcatgataaaagccctggagctcgacagcaatctgtaccgcattggccagagcaaagtcttcttccgtgccggtgtgctggcccacctggaggaggagcgagacctgaagatcaccgacgtcatcatagggttccaggcctgctgcaggggctacctggccaggaaagcatttgccaagcggcagcagcagcttaccgccatgaaggtcctccagcggaactgcgctgcctacctgaagctgcggaactggcagtggtggcggctcttcaccaaggtcaagccgctgctcagtgagccgggcagagaga

SEQ ID NO: 371319 - DNA, 1300 bp, Homo Sapiens
  misc_feature (379)..(409): n is a, c, g, or t
  misc_feature (527)..(557): n is a, c, g, or t
  misc_feature (745)..(797): n is a, c, g, or t
aggagggggtgccctattagccgcgacgaacggcgattctaggctgagcaattcggcgcatcgggggtgcgggcgggcgcggtgggcgtagagcggtctctcgggtactctcacatcatgacttccggacacattggaggtggcgcgtgagatttgctgtaggcggtccatgagggccgcgacgcgcggcagcgcgccggggcttatacgtgcgcctctaggcgtgccgaggtggctgggcgttcaggcgggcgtggggtgatcgcggtcggcggctggcggagccctaccccgggtgctgtggcgtgggaggcgctccggcggggcgtgaatccggtgggcgtgggggtgcatttgcgtctgtgttccggggggcggnnnnnnnnnnnnnnnnnnnnnnnnnnnnnnntattgtctcccgtctgccggcgtcactggcggtgctttcaccgcgagggcgggctgggttcgtcgtcccggtgggcgttggcgtatccgcccccatcctctctccgcgagcccccgtnnnnnnnnnnnnnnnnnnnnnnnnnnnnnnnaggccgctgtccgggcgagggatccgccggcacagtggccggctctggcgccgcgacgtattctcgcgggttgtgcctaccttcgccgttgcgtgggccgggcgggggtgacgcgaccgggggccgcggggagggcctcggcccgctcccggcccgatcggccggcccttgtgtttgcgggataggtnnnnnnnnnnnnnnnnnnnnnnnnnnnnnnnnnnnnnnnnnnnnnnnnnnnnngcccttcgtctggcaggggatgggggtgggcagggcgtgccctagcactgggtggaacagccccggcagctcagggtcctcaggctagccgagactgggcacagcccgaacacccagcaggacccctgcactcaccgcccagtgtgccttgtggcccttcctctgacacggctcatggttgaagtcctcgtcgtaggggatgagcaggggatgtccagtgaccaggtgctgcaggacgaggtctctgttgggaccgcccaggccaccagagagcagcttggcctggcagcccagcacctcctgggccagcctgcccatatcggccactgagaacatctctccctgggccgtgtagcctctttccgtggccacccgtatgagtctctccagggggacgccactggggggcgacaggagagtacctgccatccacaaggccaccagcccgcattgagggccttcttggatgagggacggcagcctcgtgccgaattcgccaccca

SEQ ID NO: 371320 - DNA, 1228 bp, Homo Sapiens
  misc_feature (29)..(29): n is a, c, g, or t
cgtgcaggtggcgtcgaggtgtctgatantgtatagtcggctcgcgacgcatgtgcagcgtttcaatttaggcatttcggtgtgccacggtctaattatatcgatgggagtgcccgaggtatatttctaggtataatcgagacacggccggcttatacaatcgttcgcattgcgtataccgtgtgttggttgctcgttctctgagcatggtcgtcggctcacatgttaattctttctagtcgttcattctatcatattatcattggagtcttagtgctttgctcttgtttcactatatattttagctgtagtatgtattatattatatattgattattgtctaagagttaggtaatatacctttcctcttcacgtgagtgaatctttacgtatctatcttattcaattttgtatttctactttatttacgtaccggcaacaagtcacatagtctccttcatcctgcacatccaccctgtgcttgggatatttcagcttatagcgctgcatagtgatgtgatttgtatatttgtgtaatttggttgatagtcttattgcatgcgctgttgccttttttttcttatatgttgtctggtcctgcgttctgctcaagtcgcgcttcctggttattattaggagaataggcggcgatttttcctttgctgggggtgtccgtcggtgcgcctggggggtgtttaactcagtggtcagggttctgctgcctatagcagcccaggtttgagcgaagggggaagaaggggcccagatcctggagtgggggatcaaaacccagagataaaggctgagagacagacagagagggacagtgagagcagaggcctagagaggtggaaatgtacaagtagaaagaagaggcccagagtgaggcagaaggagagatgggaacctaacagaagcaaggaggctctgagtgtgagacacagcgcagacataaacagagagggggagacagacagcacgggaggcagctgcgctggggcctaggggtcagcaccggaaccaaactggccacttccagccacgaaaggccctgccagctggcctccggcaaggggaggactttcaccttgggccctgcggtggagacagagcctaaggcagagagagagggggagaaagggagagacagccagccagagcactggaaagagggagcgggggtagggagagagacagaaagacagaaagagacagaaagaagcccagc

SEQ ID NO: 371321 - DNA, 1226 bp, Homo Sapiens
  misc_feature (25)..(25): n is a, c, g, or t
  misc_feature (77)..(77): n is a, c, g, or t
  misc_feature (680)..(680): n is a, c, g, or t
gcccgactcagtgactgggtctatntcggtgggcgtgcgggtggacgttcatgttcgtccgggcgtgtgacggctgncttgtcttgttgtacaagtggtagaggggttagggtgggtgggttctccgtcgtggctgatgctcagcgttctctcgcagggtcatgataggctcgtcaagtttgctcgttgtgggcttcgacgactggcagcgacgagttggagcgtggttgcgctgacggcgattggtcgtgttccgtgcgaccagtcggggtgaagactcgtctcctccagggtaccatgagtggtttcgcgcgtctggggaggtatatatgggggtggacgggtgttgaggttgaggggcctgtgtggggtggtggtggaaccgtattttgttggcgggcgtgtttccctcccgttcagttcgtatctctgcgtacaccctgaaggtgcgggcctaggtccctccaccttgagggacccgagcttggggggtggggtgcgctgcaggcttggtttcttcgcgcgcaggggtgtttctttctacggggtttctagggtgaagttagtgggttcatttgtgcctttggggaagacccctgcttgcccttccccactgaggcctcaggaggcaagtgggtgggggggtccgggtgccctagagttcctgaatgtgctattcnctgccctgggcctgtcatctctggttccaggggcaggagctggcgtgggaacagaggggaagagagcaggcgagcgagggagctagctgttggctgagcagagtcagcagccctgacagccgaggatgggacatgggacagagcaagtcagcgactgcaggagccaggcaggggtggagggcttcccagctctgccttctcctgcctcccaccccagcctgctgaggctgctgccagcggctgcacctccagggccagggtgacagtccccatggagccccagtcctgcccggccaggctgctcggggtgggtgggtaggaagcacgcacagcacattaggaagcttacgcttggaaaaagaaaatgcatctccatcagaaaaggtcataggtgacacacagttggaaagaaaaaaataataagttaccttcagaagaccccctttgctcaaaaaaacccttgatttccctctgtgggctttactttcctttttaaaatacgttgctctttccgggaagctgccctcgtgccgaattcgccaccca

SEQ ID NO: 371322 - DNA, 1148 bp, Homo Sapiens
  misc_feature (1112)..(1112): n is a, c, g, or t
ggcctgggtggcgaattcggcacgagggtcccctcacctctggggaagatcttttccccttagtcaactgcttccccaataggtctttacctggattttcccaagttctccagtgctttccattcggctggccacattgacagtgtttccccagatgtcatactgaggttttcgggccccaatcactccagcaatcacaggcccatggtttatgcctgaagatgatgtttacagttacccaagcgtgcaggcaaagcctcaagcttctgcccttagaggaggccagagaatccataccccagcacaggatgcggggacaaaacaactagagtgaaggctgggttgcttcccagagtcactgcgttgcagtcgggcttggggtatgaggagggcattccccggccagctctttttcagactcagaagtctgggtttgatgttaacacttgtatctgctaatctctcttttaacaaagaatactttgttaaaagtattaacaaaggcctggctttgagcgcaggcccgcaactatttaggtttagtaactttgcttccttctctatattttaaggtcacctgtttacagacaataattttggttctccattttctgtagttacccattattaaaactctccatggtaactatatgctaactatatgcaaaccctcagaacaattgtccaactgctgagcttgtagaacagaagggatttctaaaaccctttccaaatacatggcccagtggcacctgtgtccacccaaactgggtggactggccctaaaaggcacgggtttcccaaccccactcccttatcccgggtttacccaaatcttgaagccgctaaggaccctcaaagagatggctgggtgatggccgctccacctttactcatccggggggatatgtgaaccccccccatgaacatcattggccgtgcctgcctccctcattcaccacccctatgcggaatacagtcgatagcagcacataatcaccggccccctttcaaaatacccccctaacccgttatttcgccgcccccggatagttcaccttttaccgcgcgcgcactctcccccactagaattcatccccgtccgcccccanctataatacactccctgaggggcctcttcgacacca

SEQ ID NO: 371323 - DNA, 1302 bp, Homo Sapiens
  misc_feature (165)..(177): n is a, c, g, or t
  misc_feature (215)..(276): n is a, c, g, or t
  misc_feature (486)..(495): n is a, c, g, or t
  misc_feature (648)..(688): n is a, c, g, or t
  misc_feature (784)..(873): n is a, c, g, or t
ttctcagcggtacgtgacgattggtgtgattataatatcttattgggagggttggatggtagtgttgttgttagtcgggttgtagtggtgtgcgttgggtatttgtagtgcatatagggcacgtggggcgtatttgttgtgtggtagtgggaataaatatacatnnnnnnnnnnnnnttgttcgagatatgccgtgtcgctaaataaggatggtnnnnnnnnnnnnnnnnnnnnnnnnnnnnnnnnnnnnnnnnnnnnnnnnnnnnnnnnnnnnnnaaaattatatggaggagtttcaactggcaattgtcggtggtggtagggacgataattttattacgtggggtatatataaggtgtggtgcttgtctagggcaatgtaagggactggtggggcggggggaagcttgagtataggggtacagagcggaggggcggaagggggaaaagagggggtaagatacgggagcgatggtagcgaatatnnnnnnnnnnttttaggttacgtgtttgggggggttttggtgcgggtggttcaggggtggtgttttctttgcagtctcagggggtcttgggtggcagtttcgggggatggggttgaggcgggtacaatatagggggtaggcctggcgggcgcgtctttattcnnnnnnnnnnnnnnnnnnnnnnnnnnnnnnnnnnnnnnnnnatgcgcgccgaggttagcgggagagttcacggtattttatccgcgcacgtcgtatttgtcatattcaccggggggtaatattggttacgggaggannnnnnnnnnnnnnnnnnnnnnnnnnnnnnnnnnnnnnnnnnnnnnnnnnnnnnnnnnnnnnnnnnnnnnnnnnnnnnnnnnnnnnnnnnataaattatgggattattggggtttttcgcggtgtagtgagggattggggtactcggtcttggtgtcgtggggtgcttgtggtgactgggatgtactgggggttggtggcgaccgtcgcgaaaacgaaggcgatgcttactccttcgtcgagtgttcgaaccggctgcggcaaggcccctccggaccggagggcgacaggggcggcggtggccgcggagccatggagcgggagcccagcggaggggagcgagtcgcaggcggctggggccgggccctggcccgggcgcgctctcctgcccttcctggcggctccctgtgcctggagacgcagcgccggagcccgcgatgtgtggctaggcgcagcacctccgctgtccacgtgcggccgagccgcgtttgtttcctcgtccgaattcgccacccaggcc

SEQ ID NO: 371324 - DNA, 1132 bp, Homo Sapiens
  misc_feature (714)..(746): n is a, c, g, or t
  misc_feature (809)..(892): n is a, c, g, or t
  misc_feature (1044)..(1056): n is a, c, g, or t
  misc_feature (1076)..(1086): n is a, c, g, or t
gctgggtggcgaattcggcacgaggaaagaacttcatgaatagaattactttctaagtgaaaggaacaaaactgatttttattaaaaattattttgagatgcttgtgacaaattttgaagtaagtgaagattttcctggagcttctacaaaatcctggctgagaatccctgctttctggacagttgagaaggaaatacacttagtacagctgttagagagatatagttgcaaccactgagtgcttattatctgccaacttaaatatattgcccaagggaataacaaatattctagtgttcttgttaagtatattgtctaaggtcacacagctcttaaacaacagcttcaggatttgaacctggaatctatctgactcctaagtccagatgctgttcaccacattaggttgaagcatggccagtgttcataacatacaactatgtctccatatcttttgctaaccaatgttcttgtatgtgcataccttacagggcagccattcaccacaagcccaactagatggcttcctgtaataagggtagaacagtagcactctccttttgaaaagttatttgtaatctctggtggggggtcgacatcttggccccggttcttccgccccccgaagggtaccccataccctacaccccgccacttgatgctctatcccccgtgactgcgaatggcttggtcctatcgcgacgcgctaccgnnnnnnnnnnnnnnnnnnnnnnnnnnnnnnnnntcttatcggaccacattcttttctcccctcctactcccgcgggcattcccatcacgtagcgannnnnnnnnnnnnnnnnnnnnnnnnnnnnnnnnnnnnnnnnnnnnnnnnnnnnnnnnnnnnnnnnnnnnnnnnnnnnnnnnnnngcggtgctcgcccccgggctgccaccaccctacccaaacatacccgaccctcctaatcacgcactcgaaccacacatacgcccacgcctgacctctcaccccaaccacagctcaaaatccgtaccagtgccacgcccatcccctaacttttnnnnnnnnnnnnnacatcaccaaatagacatannnnnnnnnnntccgcatacgcctaccacctcccgcccgccccgtcggacgcgacgg

SEQ ID NO: 371325 - DNA, 1608 bp, Homo Sapiens
ggcctgggtggcgaattcggcacgaggagaatctggggtgtctgtagtgtcacccctccagcagcgccacaaggactgaggttgggtaggtgtgaggttccagaggacagcaggacactctcgcatactttgccaaatgaggcctgctcagaggagtaggagctgaaagatggtgccttccaccctcttgggctgtgtgcccatcagagcaggctcagcctgcaaaggccctgcattcagaggtcttgtaatctacttgttgcaggagaaagaaggcaaaaaatgatttttttaagaaaagctattttattgcagctctttcccaagagctgatctgggaatggctggtcttcatattcccagtggagaggggaacaagtggggctgggcatatacctattccggcttctagtgggatggagttggggtatagaaattaaccaggaagatgtttccaccaagcctgctgtgagtcaattgagggagtgtttggggtcccaggagacttggacggggggagtttgggtagactaggaaaggaaagtgccatatcagggtaccggtaccggcaagctcacatctcagccaggggccatgccccacttcccctgaccccagctgtcttgtctccactctgtgaaacccacaggggatgtgataaacagggctattaggggtatcagccacgtcgagcccccagactctgtgcacttcagaccagcagcagcaggagggctcccgagggccttatgagaaaacctgtgtggacatcccttggtgtacactaagacagagcagagcccagcgctcccaagccttcctccttccagcttctacctccatgctagcattgctggtgttagagaggaattaacttcctggtctgtgcccttctctagaagaatataagatgctcctcctcctcaccccttctcagcctcctcccaagtcttcctcttctgcaccacccccgagtccaaacccacctcttgccccagcattcaggctggaaaacactgatgtggactcagtatgacaactgagatgggggaagccagacatgtgaggacgctgtcctccgagaggtgtccccggctgttagccagctgtgctgtggtgctgtgggtctgtcataccctcccttgcttctggtcacactgggaggcccactccctggctcacctctccctctcagggacccacgtgggaacctggatccctggactggcctgggcataaggtttcagggggccccctttgttggcatcagaacccagaggaattcttctcctaaaaaatacgtatggcataccaatcttgtgcgggggcagtggtcctaagcacttagactacatcaggggaagaacacagaaccacatcccctgtcctcatggcggcttattggttttctggaagggaaaagtgggagacacaagtcccttgggctttagggcttcccccccggctgggggggctttgtccaaaccccggctcaaggggggcggagaaggggaaaaatacccacccctttgccttgttggaaaccctttacccagccccccagggggcgagaaggcccccttttctccattttatacaacataaaca

SEQ ID NO: 371326 - DNA, 419 bp, Homo Sapiens
acagtaggggtagagatgccaccagactacaggtgaccagattgacctgaaacatggtgtccagtaaaaacggggaggaataagtccatgactgccggagagcttggtggtaggaggagggtgaaggagggtgagggggcctctcatgggtcagaaacctccagggacatccctcagctggtaactctgctgttgtccggagggtttcaggcttggtgtgccttcttctgtttgtctgacttttggctcctatggttcatctcctgccctgcccaccacagaaaaggatgctgctgcacagcttctccaatgtaccagtcattgaggccagcgcgcagcacttttaatgtttttagtgctagtaactgtgttttaactctccaggaataagctgggaggttagaaaacaagaaaaaaaa

SEQ ID NO: 371327 - DNA, 1054 bp, Homo Sapiens
  misc_feature (669)..(787): n is a, c, g, or t
  misc_feature (811)..(811): n is a, c, g, or t
ggcctgggtggcgaattccgcacgaggcttggatggtggcatctgtaccccaaatgggcattcagtcttttcttctgctgtgaggtaagagtaattcagacctaatgaatgagaagagggagcactttgatccacagactttggattaacactgtacccactcttagcaaaaggggacttctctaacaagctagcattgtgttaacctgtcattaacccagcattagagacaggtcactgggatgttcattctggctctcagcctgctgttatttccccactctcacctgtgctagttcgctttctccagaagaggagctgaggtggtcttatcctcagataggacatgagaaattggaatttggcaagcaagggcttcagcatcctttagtttctaaagcaagatcccttcagagaagtctagcaggaagaagccaggagaatgtagaatggaaaagagctcttactccaaattttagagaagtttcagctctacttctcatcttttctctcctggtcttacttgaatgcatgttggtaatctgtatacattactatgactgtgtctatcacaagtcctacaaaataaaaatggacttaaaagtactctctgctgaggctgtaagttttgttttgtgagaaataggtaaagacattagcatttaatcnnnnnnnnnnnnnnnnnnnnnnnnnnnnnnnnnnnnnnnnnnnnnnnnnnnnnnnnnnnnnnnnnnnnnnnnnnnnnnnnnnnnnnnnnnnnnnnnnnnnnnnnnnnnnnnnnnnnnnngtttttataaatttacttgtctanagtggggaaaagggaaattatcctggttttcttattcctgcttccagactatgacagatttgaaagagaaatcctaaagcagaatttagagaaccctgcttctcctctttatctcctaatcccccaaaattggaatttagctcctaataccggaatggttggtttgggttttgggaaaagggaataattttttacattggaggtttttaaaggtagaaattaagaaaaagcttcctaaaaaac

SEQ ID NO: 371328 - DNA, 1060 bp, Homo Sapiens
  misc_feature (1017)..(1017): n is a, c, g, or t
gctgggtggcgaattcggcacgaggcagcaaattaaaacgtcacattcgctctcatactggagagcgtccgtttcagtgcagtttgtgcagttatgccagcagggacacatacaagctgaaaaggcacatgagaacccattcaggggaaaagccttatgaatgttatatttgtcatgctcggtttacccaaagtggtaccatgaagatgcacattttacagaagcacacagaaaatgtggccaaatttcactgtccccactgtgacacagtcatagcccgaaaaagtgatttgggtgtccacttgcgaaagcagcattcctatattgagcaaggcaagaaatgccgttactgtgatgctgtgtttcatgagcgctatgccctcatccagcatcagaagtcacacaagaatgagaagcgctttaagtgtgaccagtgtgattacgcttgtagacaggagaggcacatgatcatgcacaagcgcacccacaccggggagaagccttacgcctgcagccactgcgataagaccttccgccagaagcagcttctcgacatgcacttcaagcgctatcacgaccccaacttcgtccctgcggcttttgtctgttctaagtgtgggaaaacatttacacgtcggaataccatggcaagacatgctgataattgtgctggcccagatggcgtagagggggaaaatggaggagaaacgaagaagagtaaacgtggaagaaaaagaaagatgcgctctaagaaagaagattcctctgacagtgaaaatgctgaaccagatctggacgacaatgaggatgaggagggagcctgccgtagaaattgaaccctgaacccagagcctcagcctggtgaccccaggccccaccacccgccaaagaagcgggagaggacgaccccctgggcagaaccaaccagcccaaacagaaccagccaacagctattcatttcaggtttgaaggaccaggattacaggtgcaatttgagaacattattagtttgaagtnaaaaaagaggccagatgttgagcccgcagagggaggagggaag

SEQ ID NO: 371329 - DNA, 1037 bp, Homo Sapiens
  misc_feature (110)..(110): n is a, c, g, or t
  misc_feature (116)..(201): n is a, c, g, or t
aaaggaagacggcgagcggagtgcggaaagtcggaagaattgaggtcttttactttagatgaagtgcttgggtgtgtgaattatagttaaacggcggtatcgaaatggcnccgacnnnnnnnnnnnnnnnnnnnnnnnnnnnnnnnnnnnnnnnnnnnnnnnnnnnnnnnnnnnnnnnnnnnnnnnnnnnnnnnnnnnnnntgcgggcgcgtagcgtggcggtcgccgctctgggacgtcaactatggaaccacaaatctgtagttttggcgtaagccggggcgtcctgttggcagaaaggaaaatctatgagtggcgggatgtggcaccatggagccgcattagcaaaccttgtgaagccatagtacagctcatagtttgttggcagggaacctggtctccaaatgcactttgcagagggggccacaccacagtagagtccttcatgccactttccaaacagccggtacaccgccttcccctcctgatctatcaccaccccctggacttcattcatgttagaattccaataattcaccttgacaaatgtgagtttgcaaatgcaaacactgctttgggtatttctgatggttacttctccataatgttctatccatcttctcccactgaggatgttgtgtatgcaagtggtgactttattccacacatagtaatctccatactttggaagcatgacattcagtgttccaacaggcaggatttccatcgacttcccccagaacttgtttttccatctgatatcttgccaaaacacaaaattctttgattcacagtgacaggcagaaatgggtggatgatggctaacctgttctgagaaaaagcggaatcccttgtcttctctaatgcattcataagtctccccaaggactgggttgaatggcttacttcctgctctgaaataggtggagcagtatcctgaaactgcaaatgcggcaacgagaaccatgcgctcatatggatcatcagtttccgaagccttgtccaggagctcgctcctcgtgccgaattcgccaccc

SEQ ID NO: 371330 - DNA, 481 bp, Homo Sapiens
gactgtttccacagggggggtgatcagatctgtttgtaccatatccggaaaagttgtagctttccaaggaagaactgtaggaatagtcacagcttgacaaccgaacacaacctgagtgtgctgagaactcatggcgttgaccacctgagctataatgagctatgccaactcttgtttcagaacgacccctggcttttgccagaaaaatttggaatgtggagcagaaggagcagtgaagttcaagggccagctttgccaacaacccagttccacaaacatcacacagatgccatggatagctgtgcgactagggctgattctttaacttctctgagcctctcagtgtgctccattgagaaatgaaagggtggtatttggccttctctaagatgctttaagccctcagagcctctttgactttgaattgtagaaaagagagctcagagaaaactggggcttggggaagggagagttgatgagt

SEQ ID NO: 371331 - DNA, 1213 bp, Homo Sapiens
  misc_feature (844)..(862): n is a, c, g, or t
  misc_feature (1122)..(1131): n is a, c, g, or t
ggcaattcggcacgaggctcagaccctggactgtaaggagatgaggggccgtgaaggggaacccaggaaactgagtcctgaaagcaaggaggaacttccagaatgaagggcgccgacactccttcctgcctttgctcaagcggttccttcaccccgatcaagttccttcccatttctccatctgggggatcctgaacgtgcacatcctcagagaagccctcctggggttctccaattctagtttattgccccctcctatcgatcccccagcgcgctcatcgggcctgtggacaaggacaggtttgaagagaggattccctggatcgcggaagggctgcaggaatggcacagccccttccgaggatgccaaaggagcccgggcaaaggaaagtggccgtgcccgggcctgcctaccactagatccccacccacctatgactgctcagtcccgctctcctaccacacccacctttcccggcccaagccagcgcaccccgctgactccctgcccagtccaaactccaagggctgggcaaggcactgatccactggtgggaccgatcccggggcagtctcctgggtggaacctcaccggtggccccccggcccccctaaccgcacaacccgcgaacccggcacatgggtgtacgaaccgaacttccgggcgccgccatgcattccccgatggcactggttcccccctcccctgcctttcccgttccccttgccccacccatcaaaaaaacgaaaccctccatgtaaatgtcgggcacaaaatttcttcgcccccacctcggtgtttgtggggcaatcctcccccaccgcggcccacctttgagctatnnnnnnnnnnnnnnnnnnngtcgcgcccgccgccaccccctccgctggcgccatcgggccgcggtacaatgtattccgccgtggctataaccccgcccacccagcaaatcggctgtggccggaagcacacgccaagtgatgaagccacagcacacgcattatcaagtggagtagtgtgccgcagttagcagcgtacccgaggtgaccgttgcacacatactagaacccaaggataagtgtatacaatcgcgctttcatactaacttatctttcacagtnnnnnnnnnntccacattaacatcagagcccctcctcggagaacgcaacgaccggcaaaccccaagcaatgcggatagccaaaccctttgag

SEQ ID NO: 371332 - DNA, 1248 bp, Homo Sapiens
  misc_feature (402)..(402): n is a, c, g, or t
  misc_feature (482)..(547): n is a, c, g, or t
agcggagagtgcatcgtgttgctggctggaggtggtgccgtgacacggcgcgagggtggtggtatacccgctgcgcacacgattctgatttactggagtcttcgtgtgtcgcccgtctctagttgcgtgctcttggtgtatgtcaggttgttttgtgcggtgggtatatgacggtgtgggacataaggcgcgtcggggataggttggggaacgctgtagtggggtgtaataacgctcagttaggtggtatccgcgtggcgtacggtctgtggtgtgtcgctagaccgctgctgtgacgattgggggtatgtcccgcgtgacctcatagggtggtgcaggggagtcccggcgtgtcgtcgtgctggcgcaatatgtgttagtcacgtcttgatgtgcgaagtntgccggtatttggaggtatgtcgggggagtaggccgcggggggcgcaatatcccgctgaggcggtgtgggaagttgagcnnnnnnnnnnnnnnnnnnnnnnnnnnnnnnnnnnnnnnnnnnnnnnnnnnnnnnnnnnnnnnnnnnagaccgtgagggcccgtggggtgtgcgtatgccctgcgcgccgcccgcggcgcgtgcggctgcccatcttcaccgttcatttgcccatataaagccccgtacgctgggacgattgcgagcgttacctaaggggaatggggtgccaggcgcgcaaagggggcctatgtgggaggacatttcgtggggcgcttcgggccgggcgacttttccagcagctgctcccgttctggctgatgtctcagctgttcatccctctgggcaagtgcctgctgcagctgctgcacatcctcctggtatcggagatcctggtcctggatctcaccttcttgtatcctcagagcctcctccagctgccgactgtgtgcctggcaggcatccagggaggcttgcagggttgcagtgctggcctccagactgcggctcaattctgcctgctcgaggagatgctgctctttcccctgcagggcagcatgagccttgccaagggcctcctgcagagcctcagcccgggcccgggcagcctcctcctgatgccgggaggactgacttttctgcccgcagagcttccagctcctggtcccgttccttgagcacttgcctgggcctgcagccagctgtcctgcagggccctggtctccacctcatgctcctgtgcctgcgtcagcacactgctgctggagggccaacaaagctttcgcctg

SEQ ID NO: 371333 - DNA, 1567 bp, Homo Sapiens
  misc_feature (342)..(360): n is a, c, g, or t
cgcgtggggggtctgtgttttaggagtggaatggagatgggtggggaatgggaagtggagggtgttgtggggtatagggtatgtggtctaatatgtgagtcatactcgggcttcggagggcggaggcgggcagagcggaagatgtgtcagaaggaggagaaagatagagggtggctataatgttggcggttgtgtcagggtaaggagttgggggggtaggtaggggttgtctgcgggcgtgggctggctgcggatgctcgtggattatgtgtgggcgttgttgtgtgggcgtgagtgcgtaacgaaggtggggggtgatgggacgacgtgaggaagcttgtnnnnnnnnnnnnnnnnnnnagaaggtcgggcgcatgtacgatagtgcgcgatagtagctatgggaggctcagcgaatgtgttggggggtgtgtgggccgggcgggaagggggtagcggggaagggaacatcgacaaaggcgtgggggagggtggtcgatggcgcgggtggtacgtgtagggagcgggtgtgggccatgaagcaactaagcagcgggggggattgtgggaaccaatccaagcagagtggatgggggagggcaggagcttttgtgagggcagcagggcacaccattatgaaagctggcccagcttgtcatgttgggaggcacatggatgtttccactattaaggtgtactgttgtgttccgaggaggggcacacccagtcagattcaatttaggaataggcaatggctctgttggaacaggatggtacgaaaacaaggtaaacattcctcgtcctacaggaagagccatagttcgctgacacaattggagcaatctgttttccttttcctcgatgaactcgtggtcactgagctctgggtactgcactacattgacacggacaggatgcgcactctgaagaagccttcgcacatcctgcacccttaaatcttcactccatattaatgacatgacctcgtgattcatgtcattcatgccgtcatcttcctcctcagtttctgttcctgaaggaacatctgatgagagcacagacttccctttgggtaagtttccttcgcaggcctgcttggaaagatcctgacgtccaatcaagagacagacagcttctggccagtctgaggcaggctgctcacgacagtgataaattgcatctctgatgggaagagcaattccaaagggaagagtttccaaatctcttaaagtgaatcctacattagtcatccagacaaccaatctttcagctagactagaaacagatgtagaatgcctgaaactaaacctgttttcctcttgttctacttgcaacttctggggggctatagttattctggttaaatactgtgaggattcatcagaaaccaagctctcatcaccaagtatgtacagtgcaatactcaagactacaagtctgcttctttcacagattccagggaggtaaggataaggtggcattccttcacccttcagacaagaactcacccactgataaatacttggtggctcagacgtaaaaaatgatggatgatgcataaatcctg

SEQ ID NO: 371334 - DNA, 1203 bp, Homo Sapiens
gctgggtggcgaattcggcacgagggtctgcctgtgcatcccggcttccactacgatgcttcccacaagaagtgtgaggatcacgatgagtgccaggacctggcctgtgagaatggcgagtgcgtcaacacggagggctccttccactgcttctgcagccccccgctcaccctggacctcagccagcagcgctgcatgaacagcaccagcagcacggaggacctccctgaccacgacatccacatggacatctgctggaaaaaagtcaccaatgatgtgtgcagagaacccctgcgtgggcaccgcaccacctacacggaatgctgctgccaggacggcgaggcctggagccagcagtgtgctctgtgtcccccgaggagctctgaggtctatgctcagctgtgcaacgtggctcgcattgaggcagagcgggaggccggggtccacttccggccaggctatgagtatggccccgggccctaagacactgcaatcacacatcacatggccccacacggcgacaccgacgcagaagaacctacacacccccaaatacgcacaaccccaattacatcggacaccagactcaaaaccaattctaaccccctaccgcacccctctcaaccaacccacccccatctcatcaccaaaccaaacacgccacacacgacactacaaaccccttatctaccaaaacaccacccctccaccccacgccactaataactcagcaccaggctacacttcggtcacgagtcccccacctcattcactccccccccaccagaacataatctaatccaacgccacgattacccacagcacaataaacaacaaagcctcatggtctggatttctgattggcaattcaatgcgctaaaccagacagctagcagattagaccacgccatgatctgaccaacactccttgcatataacaacatcacaccctaatacctattatatatacaatgcacgaccaccgtatctcagccctccgcccaccgaatgaccgcccaccctacccacgacctcctttcaccaacacctcttctccctaatataacagaccacccatcccacgctcaaccgtctcaagtcactacatacactctagccactcacacactttctcaccaccactttccaacgctaaccctccctacttcaactgtcgcagcacagcttgtctctctcagcccc

SEQ ID NO: 371335 - DNA, 594 bp, Homo Sapiens
caactgcaaaccgtaaatgttctattaactgtctacctcttaatctatccatggtgcaaatttcccaatgctaaactctctttcatttccttatccctgaaaatttcagtgcctctaatagaacactgctaaataaactgcattccacttactcattaatatcaagaacctgcagctctgtcatataatgaaaccaaacaaatagagcaaacatttcaaacagacttttggttaccattctttaataaggactaataagatgtaaatgtggtgattaatttagcatgtttcctcatctgtaaaactggtggcttaaaatattctttaaattatctcccaactccaaaagtctacaattctgtcttaaagtcttaatttattcaatctactatcaatcctacccagagcattttcctaaattccaaaaactcagaaatcacagatttctaagtcctaggtaaggttgtcatacgccaaaggaaaacccagttaagtgtgaaattcctactaaataacttccataaataaacaaacaaaacctaccttgcaaggaattcgagtaactaaaatgaacactaggcaaacaactataaa

SEQ ID NO: 371336 - DNA, 814 bp, Homo Sapiens
  misc_feature (119)..(119): n is a, c, g, or t
  misc_feature (191)..(247): n is a, c, g, or t
  misc_feature (262)..(262): n is a, c, g, or t
  misc_feature (274)..(299): n is a, c, g, or t
  misc_feature (483)..(491): n is a, c, g, or t
cccaagggcgcccttgtgagggttccatctgtctcacaggaggttctgaccgacagctgtgggctccagattgtaccgcactcccatctcagctctgggccagcctggctccactcagntcatccaggctaccttcccttgctcaaaacccacctcgtggatgtgggaaggtcctcttcttcgagagagtnnnnnnnnnnnnnnnnnnnnnnnnnnnnnnnnnnnnnnnnnnnnnnnnnnnnnnnnncaatgcttccctcanggaataaagttnnnnnnnnnnnnnnnnnnnnnnnnnnggtgagtgggctccggggagtgtttatgtctacatttctaaaagcagaaagaatgcatttagcaaaaggaagtttatccctgagaatcttaagcaacgtaagccgtattttatgccaaatatataacaaaatctggaagatatacatcttcttctaaatattaacacaactgcttctgtaactnnnnnnnnntgacccatgacataaacacaatcaaagcaaaatcctaaaaaaataattaagtggaagaaaaggttcgtgccaatctggacaacaggcgataagttaccaatctgataaactaaaatgtcatttccaatctggaattaaataatcttttagtggctgctacggggaggggaagctgaagggatgctcttctcagccaacagaggtccagccacctttcccccactacagaaagggctcaggaactccgtgccgcccgtgggccttcttcaagtactccgactgacttcggaacacaagactgggatgcaatgcttgtcattttt

SEQ ID NO: 371337 - DNA, 530 bp, Homo Sapiens
tcccccaactgcaagcgcgatccatgtactaagtaaaatcatcatgcaggagcagtggaagcacatagttcagtcatctgtgtctccagttgtccactcagggatgcttctgaacatcttggctttactgctctttctaaaatttcctcgtctttctgcagactgcattgtgctacagctcatagacttgaaataataagaatccctcttgaggggtgccagtgtgataacgaggtattgggactccctttcattcactttttatgaattgtcctgatgcattgtgctacagctcatagacttgaaataataaggatccctcttgaggggtgccagtgtgataacgaggtattgggactccctttcattcactttttatgaattgtcctgtgcagcctctctaagattattccaccaggctctgcaggtgaatatgtgtattagtttgctgccataacaaattaccacagagtgggtggcttaaacaacagaaatttattttctgacagttctgcaagttggaagtctaa

SEQ ID NO: 371338 - DNA, 375 bp, Homo Sapiens
caaagcgcggccaatctcatcagtggactacgaggggcagtgaggacccagtggggaaccggctccctgaaaaccctgcacagaacccactgtatttgggaaacaccgctctagacgggggcaggggagggaaggcctgacattctaacaccctcagtaagcaaaaaagaccttcaatatttaggtaggagtcagagttcctgcccttactttattacatctcttaagacgaactgacatttgcatcagtcctttctaagcgtgtttgcgggtaatttcacgagagcgccctctcatgtgacgcagttagcacgcgcttggtttctcaacccgactgtgacaccttcattacacagacgggtccaagagacccag

SEQ ID NO: 371339 - DNA, 681 bp, Homo Sapiens
  misc_feature (241)..(241): n is a, c, g, or t
  misc_feature (485)..(505): n is a, c, g, or t
  misc_feature (520)..(520): n is a, c, g, or t
  misc_feature (586)..(586): n is a, c, g, or t
tgactggcttcagtagccaggtggaggggctgccagacacagtcagggtggcacacagtgtccaggcccagggatactgtcaccatcgctcacctcattctaaaccttgtcaggtccctgatggcaaaagcattgggccagtaggactggaggctactctttaaacatggctttcctgcaaagctgaagctggtgtcccccagcaccaagctgcggctcacacagatcagccacggaacgntgtatccgcttacctcactgcctacagaagccctactgccaaactgggcctggaaaattcccagttttaggtgttttgagtccacagtgatgaacgttaaggccaccaggttggctgataggagctgtagggggataggaccgcgctcacccagcgacatttggggaaagcctttctctggcaaaactggaataatagatctgaccaaagtttctgttttgctttggagttctgttgcctatgnnnnnnnnnnnnnnnnnnnnngtctgtacataaatnttcaaacactagacttggagatagtggaagagttggccctgtgtctttgtcatgggcacaaaggtntgcactgcgtgacaatgacccaagccagtgtgtgctagtgaggggacagagaagacccacatgcccagaggaccctgggccttgtgctggttttt

SEQ ID NO: 371340 - DNA, 368 bp, Homo Sapiens
aactgcaaagcgcgttaacaatcttgtgcccctctaaagtctggtggttgatttgagagacagtggacacctccctgaacctgagtagaagtagaagaaaaccaaagttgcaaagaagctcctgggcggggaaaccacaaaataacattgaaaaacagattaactgtagtattaagggaatgatgccaatggaataatgggtgaactttttcttttcaaatctttctttaaaagtataacatcttcaaataaaactgagaagaaataaattaattcatgcaagaatctacttctcaagagagaaaggcactaattgaatattagagtcttcctttcaaaaacagttttgtgtttagaggttggttttg

SEQ ID NO: 371341 - DNA, 448 bp, Homo Sapiens
ggagttgacaaccactggtacaggcgatgatgaactacagaatatctggagggtaaacagggatggggaaggggggtggttaggcagagatgttgctggagggatgcatagaaggcatatgcagaaaaactttgtatattatgagaaaagttttggatcttatctggagaataatgaagagccattacattattatattatgaatacgaaacacacaataataactatttaaaaatatatgtgatcataaagatactcctttatatcattccagatatttaaaaactcattcctgtgcagaaaagttttggattttatctggagaataatggatgaaccatgtacatgtattatattattaactacatacacacttaataactatttataaatatatgctaatcataaagatatttcttgtatatcatgtccagagatctatactcta

SEQ ID NO: 371342 - DNA, 512 bp, Homo Sapiens
gatccccttgggtagctgcgcatctacacttcctttcaataccaagcctagagttaagtgtaaacaaatggtatagaaagacagaggacagacaaataaaatcaaggctggcacaacgtaaggaaacacaaagtccaaagaaaggattctgaaggaggtctaaactactaacttctctgacaagaaaccaaagtagcacagtaatgcaatccagattttctcatgagaacccacactattattcctgatacatatctccgaaacatgaaatcatagatttcaggaactgtatcatttcaactcaatttttgctaccaaagaacaaatgatgtaacataaaatgaaaatatctatacaaacaaaacatccaaaagacaggaaacagcccgaacaattcagatgtacaacctaaccctcaaggtcactgtattctcattagttcaacagaaaatgatcacattaactaaacatcaagttcaaatgtgagcctccttcttgtgtcagggagaaga

SEQ ID NO: 371343 - DNA, 203 bp, Homo Sapiens
tctcatttctagtctactcccagagtttagccgaaaggattccaccattgtgctcgaatccaacggatttgacctcgtgttccccatggtcgtgccgcagcaactggggcacgctattctgcagcagctgttggtgtaccacatctactccaaaatatcgccgggcccgagatgatgtgatatgcggacttgatcatgaccgg

SEQ ID NO: 371344 - DNA, 235 bp, Homo Sapiens
  misc_feature (146)..(184): n is a, c, g, or t
ctactgcaacggccttcagacttaataattaaagcactttttggttactgaaatgatattatttattgtattatctctccagtgagtttcaggagagcaggcccttgtccgtctatttgccaccacatcccctggccgagattggnnnnnnnnnnnnnnnnnnnnnnnnnnnnnnnnnnnnnnnactgggaaaacaacacaccagaaatggagcattccttcgcgctttgcagta

SEQ ID NO: 371345 - DNA, 336 bp, Homo Sapiens
aagcgcgtattgtaattagtgttcttactgttagacactaggaagatatgaatatgccctgggtactgcacagcctatcttagctccagcttttactcctctgacttaagtctgcgacggtgaccttttgttacatcttctatttatttccttttcgtggccactcttgtggatgtaaatcacaaaccatccttttcttcaatcccagttttgtagaaagttctccaaagcttttttcttttgcctgactcttgcttagttttcagtgctgaaggagatattccccctatactacttattgccataatgactaaaagtcttctcggtttgcagttg

SEQ ID NO: 371346 - DNA, 273 bp, Homo Sapiens
caactcaaagcgcggaaacaagatggagacctgtagccgactttgccactgaccgctttgctggactggcttgaacagcaggcttatggggtcctgggcctgcatcctaacctaagattccctttctttgacagaaccatacagaaagacatgcaaagcacacaagattgtctacagcttaaggccagccttacaaatcctttttcattaattatacatttacagagaacatcaacagtgatccttattatcccttttaccggtttgcagttg

SEQ ID NO: 371347 - DNA, 252 bp, Homo Sapiens
ccggttcattaaatgctgcttactccacatctggtaatcagtgcctgtgaaattgatctgggatggaaggggcttcccaattcattaacattaggataaagagggatgtttccatgtaggtttagaaaatttgggggacggaaaatgtacagcctcgtcccatccaggaagggagaaccttaaaaactttgcggcttacggcgctacagatgaattctttccacctgtctccaagcctagcagcatgaggca

SEQ ID NO: 371348 - DNA, 325 bp, Homo Sapiens
ccactgtcgcggtgtcatgaattgtactgcacgtcacactttcctcagagtcaacaacgggtttatcaccgatacaagagaccagcaggagcctgaagcaagctgatacctctgacatgagcattctggtcaactactgctgatttcaaagtctttctataactagccatgtaaaaggaaggcagagccacacaactggtctgcatgcaaagaaaagaatgatccaggaaacagatgcttgagcttgatcattagagtctgaactatcagtctttgctttttcactttctacagtgttgccccgggaagttccggggatcctcta

SEQ ID NO: 371349 - DNA, 247 bp, Homo Sapiens
gagctcggcccattgtaggaggcactaagctggtcatcaagctggtgaatggaaccgaacccctactgtattctgctctttctactgaacagttctctgtttctaggacttccagtctccggaaaagtcagaacagaatgccgggaaattttattagttatctatttatctattttgtgggccagattccatggtaattggcttccccagctaggttttctggagagaatgaggtattagtgaaaag

SEQ ID NO: 371350 - DNA, 704 bp, Homo Sapiens
aagatcctgtttataaattccatacgccagtgcaactgcagtagtttcattcatcaaccttaaacaatttaagcctgcaacctgggctgcagccatcacagatcttctctcggcatcagtaaaaaagctaggaattgaaatcacacagtcagccactggtttcttcaaagcattttctgaagtctctttaagcttggctaacagcattccagtaacttgctcaattgcaaaaggtctctcttcctctaagtaccgcaccttaactcctgcacttccattaggcattttctgcagttcatagggaagcctgatcctttcagtttgcacaatgggatcatcaaatgatcgcccatgaagctttttgaagccatgaattgtatttcttacgttcgtgactatctggctctttgctgcatttccaatggctcgagttcttgatcccaatgatatacaggccggggtacacctgtcgctgtactcattggcgatggtctcgatgccgccacttctcgcgacagcaatgtagcagttgagaaagccgaggtcaatgccaaccacagacatcccgccgcgtgatggtcgggctgctggtactgaacccttcggtacgggaaccgtgtcctcttctgggctattgctgctgggattgcgactcctaccagaagcaaacgagaggggaccccaagtcgctaagcagaaaatct

SEQ ID NO: 371351 - DNA, 588 bp, Homo Sapiens
gccgcgcaatgtgaaacacgaactggttttataggtactcagtacatactggtttgcacgatggtcaagttgaaaaactgtaagtcacggaccacggggacactctatgtacatttagaactaatctaagttcactttcaaatgacactataccacttaacaagtagtacaattactttataacagaatattcccaattcctttgtcctcttccttattgctgtcattcattttacttatccataagctgtaatcactgacacattgttgctattatttgttttgaacaaactgttgtctgtcagttaggaataagaaaaagattttattttgccttcatttattccttctgtaatgtgctttctttccttatgtaggtccaaatttctgactgaaatcattttctttctctctaaagattatctgttatcatttctagcaagacaaactttctggtgaagaattctctcaatttttgtttgagaaagtctttatttctgtttcatttttgaaagataattttactggatacagaagtctaggttcatgttatttttctttcaacacgtaaaatatttcacatttgcg

SEQ ID NO: 371352 - DNA, 468 bp, Homo Sapiens
tgcgctaatgtgaaaggaaaaagaggtacatggttccataagagaatgcagtctggcaattcagcctgagaggtgagggcaggcatcccaatggatgttatagccaggctgaaatctgaagtactagccagaatttaccacagagaggggaagagacgagggccattccaggtaaaggcatggcatgtgttacgctgagaggccagtgagatggcacagcatcttagggactagcagaaggcgggcatgatcacagcacagagggtgaggaaggagcttgggcaagcaggtgctggagaaggggtgagaggctggttgctgtccccgacctcatctcccggtcactttattattaatattgaaaaccattggttttcaccatctgaccataaccagagaaaagccccttgctgtccctcagtatgcttctcagaggaggtaaagaggatgttgatttcacgagcatta

SEQ ID NO: 371353 - DNA, 408 bp, Homo Sapiens
  misc_feature (24)..(24): n is a, c, g, or t
taacccacctgcctttaaaagccnggcctgtgaaaggttaaaaagaaagaatggtcctgtaccccatttttccctgccttgccgccccctttaattgtaacccccaggccctccctagaggactcccgccagattcctattgttgggtgggaaatagtgttggaatgtgtttgccacagtccttatgatattccagtcctcagtcctgcctataggtatttgttattccttggatactacacacctgctcagactgagtaaacatttgtggtgctgtcaacctgatttcttgactctcaaatgatttttgtatttccaatatgaatttgtgtgttatgaatttctgatttctccaatagtatatgccactatataaatttgtattaataaatgacagtcttgttggtt

SEQ ID NO: 371354 - DNA, 358 bp, Homo Sapiens
tggccagtctgtgagctatagttcccaacacctggtctagactcttctgcccttgctctgcagcttctttcctgttgattgggcattcagggaaggagtttaaaaagtgacactcatggctcatgacaaatgagatactttgggagtgtggaaacatggcttgatatttgccttcagatatttttgcttatataagttctaaatggaagtgataagttcattcttagggtccaagttgaaaggcagtggctcttttgtgaacaccactaactacattcgaaaagcctctccaattccacattccaagtctataacagctttggaaatgagtaacaatgacctctcatgtagtagatta

SEQ ID NO: 371355 - DNA, 479 bp, Homo Sapiens
ggagatatagatatttgctgtccaaaatccaggaaatgttggagtttcttttatcaggcctcaaagcagaagaataattctccgtggttcttggctctaccctctagactcttggttttgtcttctgagtcttcctttttcatcaaagctagagtgtgtttttacctcgagttcttttctcagcgctgcttctttccagtagaattttaggggaactagtggtctctattttgtactgttgtctgtccttcttgatccaagatggcagtgtttctactgatacagaagattttgtgggcctcctgtgattctccttgaggataaaatccattagacaaaagccacactcataagtatcttctttatgagacctaagcttcttacagactctgtttttcggttgaaaggatctgtgaaacataatcttctgaacagccttttgtatgactgaatagcacaatcagccctccgtatccaca

SEQ ID NO: 371356 - DNA, 216 bp, Homo Sapiens
gtgtaactattgaataagctcctaaaagtagaactgttgggttaaaagatgtgtgcatttaaaaaagttgattagtattgactgactgttcagataacagctcaaattgtctctcattggagaaacagaggcccccagaggccaagtcccctccagtcctccctatgtcacatatcccaatgttccacaggactcactgctttttcatataagtct

SEQ ID NO: 371357 - DNA, 247 bp, Homo Sapiens
gccttgacatatgtgttcctgcagatccttgggagaacgttgcaaaaaaaatgtaccacgaacatataggaaaacattatacatttatagtaattcaattagtgtagcagtgacactggcacatgtaattgggatgaacagtctagcaaccaaaatagatatgggagtttagatagatcaatgaggctatatagagaaatggagacagattattcaagaaattctggctgggtgtggtggctcacac

SEQ ID NO: 371358 - DNA, 413 bp, Homo Sapiens
actcaatgtgaaatagttgaagatgggggatagcctatgggtcttcagaaagcctctgggtttctagagagtcgttctggtaacaggttagcgaggatgagtcaagtttagaatggaagaggatagatgacagcttgcacttggtacctaaaaaccaaggatgaatgtgtgaggcatgattatttgtcacaagtttccaggtgacactctggcactcagtccttgttgaattaagcaagctttcttactgttttacttggctgtgttaaagtagagtaacaggaaattagacttcccataatgtctcaatagagctgtttaagtttctagccataattggtatgggaatatagctctaaaccttcaaggctgctaccatttctcactttcctatatctagaaactgtagccag

SEQ ID NO: 371359 - DNA, 397 bp, Homo Sapiens
gaccccgagaactctcgcgctccgatgcaggggattaaaaagaaagagagagtacagggactctggtgatcaagctgcagcagttttcctgctgtggaggtggctgctgtgagaagggagcaggactgagaacaatgcagagatggcttttaagagcagccagtgaggctaaagtatcttattcttgtagaatgtgatcttttcctaactgacactgtcaactcatggtggatccagaattcaagtctcattataagttaaaactagtgctagcacactgaggacattcaatagatacttaatgaaatcatatcaatatgtgttagattatcaaaaaccatgaaatgtctgagattttattctattgacaaactaacaagttagcctgccgcggttt

SEQ ID NO: 371360 - DNA, 334 bp, Homo Sapiens
tccctatgcgcggccataacatttaggtctgtcgggtaaatgatctagtccagtcaccttattttaaagtgaaaagctatagtctggagaggttaacagttagtggtgagctggagtagagaataactttggccccagaaagagctgtgttacaatcctggctctgtcctttgtgagctgtgtgactacagaccagtgactcaatgtctctagacttgttaatatagaatgggaaggatgatcacttagtctcatgggaacatacctgattaaagtatgtgtgtaacctacacttctgctcaacattcggcatgccaaaccatctcagccggac

SEQ ID NO: 371361 - DNA, 333 bp, Homo Sapiens
tccatatagacatctatcttacacaaaaagtataacttatcagagtaccctaaactcttgagatttgtactctatagtaatttttagttttatctttcaatattggagtgagagacagttttctttaatggaggtttacatgtgaggtaggaagaagtaactgggaagaggggagctgaagtttgggaattataaacctcatgttctagaggaagaagatggaaagggagtactgtagcctttaaaattgatgttacctcattttgctttcttcagacaacaagaaacgggactagcccatgataacttcgtacacagccatttagtaacacc

SEQ ID NO: 371362 - DNA, 615 bp, Homo Sapiens
cctctggatgcaaagtgtctaaaggtgggcattagcagtcggcatctcactgctatcactgtggatgtgtggacactccatgctgaactgcatgagggcctcttccagagccaactgctgtgccagggcccaagcctagcatctaagcctgttccctgttcagaggtgacagaaaacttagttgagccaactctgcctggcctattccttctccagcagctgccagaccaggtcaaggttaagatggagaacacaagcgtggtattgtccatgaatagtcaaaagaggcacctgacttggactctgaagctgctgcagttcctgtaccaccgtgatgaggatcagctgccccttcgaagcttcacagcaaactctgatatggcacagatgagcactgaactgctgctggaagatgggttgttgttgtcccagagtcgccaacgcattgtctgcctcaactccctcaaggctagtgtgcaggtgaccaccattgacctctcagcctccctagttctggacacttgcatcattcactaccggcaccaggaattctctcactggctgcacctgctagcactggaaacccaagggtctagttcacctgttctaaaaaaa

SEQ ID NO: 371363 - DNA, 398 bp, Homo Sapiens
tttcggcttactggagaagaattgcatgtggaagtgttggagaatgttccacttacaacacacaactttgtacgaaaaacgtttttcaccttagcattttgtgacttttgtcgaaagctgcttttccagggtttccgctgtcaaacatgtggttataaatttcaccagcgttgtagtacagaagttccactgatgtgtgttaattatgaccaacttgatttgctgtttgtctccaagttctttgaacaccacccaataccacaggaagaggcgtccttagcagagactgccctaacatctggatcatccccttccgcacccgcctcggactctattgggccccaaattctcaccatcgtctccttcaaaatccattccaattccacacgtaaacggag

SEQ ID NO: 371364 - DNA, 422 bp, Homo Sapiens
atgtgccagatactgattctttacagcatgtgattctaatgagacattaatggaatttacctttttagtgtagtgagattatcaagatcaaatggtgatatttgtaagaaaagaaagtggagggtgtagaggaacaaggaatgccagggaggtgtagaagagtgattgtttttttaaatagggtgataagggacacctcagcaaaatgatggttgaaaaacaaacaaatagttggacaggcagaccagtgactatctgaggcaaaataacaaaggatatcaataagggcaaaggcccttgtaaaacgcatgcctgatatgctcagcagacagtaaggggccagagatttggagaaaagagagtgacagggaggatagcagaaacaaatgagtttaggaaagacaacgaagggggatgtacac

SEQ ID NO: 371365 - DNA, 853 bp, Homo Sapiens
cgagtggctgctcagactgcgtgttcagcaaagtgttttgggagtgctgcttcctctgcctggcacgggatgacctcacactctccctgcccctaagtccctttgcagttgctgcgcgaatactctgaagatacctaggaagagtgacgttctcgttttctctgttaatgcggcaaagaacaggactgcaccctcttggggggatctacagtctctggagatgctgagaagtgttatgaattgggtttgtatacagcagagaagacatatttttaagggtggtggaatgatcccatctcatcatatgtgtggcaggtggctcaaccttatgccttatgtatgaagagcaggcagaacagctccatgatatttgtgtactgagaggtggatcatgccactgtactaacaggcagaccagcaacagatgatattgagacttaagactaggtgaaccaataccatatctttcttccactgggaagacatatgcctgttactgtattgaggatagacagaactacactattgtacttgggacatcatccatcaacattacattaagagaacaacattgttccattgtactacagacaggcagaccaataacatgtcatctttactgacaggtgagccaacattatagcattgtattcatcagtggttcaacctaatgccactgtactgaggaatggccaacaacaccatgctgttggactaaaagcaggcaggacaatgccaggtcatcaaacgaggacaggaaaaccacaccagaaatacaccagaaccactcaggatgcacacaaatacttattgcttttgtctgtactggctgcatcctgagtggcatcgaata

SEQ ID NO: 371366 - DNA, 180 bp, Homo Sapiens
ggagctcggtaccgctaggtgctagaagtagaagaaaggatacaaatattaaggatgatgccatgttgctatacaaatgtagccctcaaaatgtccatgttttaaccctaataaaagtctgtcttacatcagatatattttcagaaaaggaaagttctctggtctccagcaggctcatct

SEQ ID NO: 371367 - DNA, 385 bp, Homo Sapiens
cgagtgggtccctgacataatctagctgcaaatacaaatctgagtaccaacaatctttataaaatgtgatatcaagtgttagttcagaaattcttaaatatgcatgctgtacttgcattatatagatatttcaccaaagtgaaagaggcattatgtgtgcagacacagagagggcaacagtagagacacatgattctacatatgaaacaattttaaattatcactcagtgtgaagcaacctgtaagtaaggaagaaaaccatgatccagtactctcttttcctaagaaaaggcacgtaaaataggtaattctaatatatagcagcataaatatgtaacaatttagagtttactcatttgaaataatgtcccaaagtacccaccac

SEQ ID NO: 371368 - DNA, 527 bp, Homo Sapiens
agggaaggattaaaccttggataaaagatttgcagatgccccagtggttagtagaggtgaaaatggaggtttcagggaaactgctggggccttttgcctttgtcctcatccaaagcattttgtgcctctctttcttctcctctggctgaatatccactggagattgaattctccgaaactccctgtgtgggtgaagtgggaagctgtgcccaggaaggggagtaactgtgcaaagttttatgcagtcagtgccagaattggattacatcacctgggggaggcgccttcaggaccaggaaatggtacatggagctttgaggtgaaaactcatcttagaaacccacaaaaagtcattcccccagcctgacatcagggacagaccacacccatggggcagaaaccgggcttggttgttgcagtgggaagagaaggcacgactctggtgcaccgagcactttttcctcgtggctgtttccagggcactgggctggatgtccttcagaaaccccctgttccccctgcccact

SEQ ID NO: 371369 - DNA, 286 bp, Homo Sapiens
ctatgaagtatctgtattcagatggtgcataattattgtctaacagaattctgctcagccaaacaagctgcatttcaataaacaaaaggcattctgctccaagatctttaatctccttttaaacaaataagtaattaggaacagaaaagcaagtgtcaaatttagtcattatctatttgtacgtggttgttaaatattatacaaatactaacagagtttacttcaactctgtaaagttaaaaatatatatttaaaagctccagataggccgagcatcatggctcat

SEQ ID NO: 371370 - DNA, 389 bp, Homo Sapiens
cgagtggtccctgcaaatatctgcctaccatctggggcttatcttttaagattgtttttggtgtccatgtgtcctgcatatagttttattcctaactataattcatgaaatacttgcaatcaaccccatttgatagatgagaaaactgatcctgtgtgctacgttaacccagctgtaatggaaaagaggcacaatctacgagcccaggtctctataacccttgcttcctccaagttctcttctaggccatcctctctcttaggtgagaggtaggaaagcatgtctgtaccagcaggtggcaccaggaatggcatgaaaggaaccaagcaagggctattgctagagaaaaagcaagacaaaggcctggagtggtggttcatacctgcaat

SEQ ID NO: 371371 - DNA, 329 bp, Homo Sapiens
cgagtggtccctgctctgtgggttaggactggaacatataatttggtggtggtatatttttattataagtcaaacccaagtaaagatgtggggtaagattgtgtttaccaagcacaaagaaatggaaatttggggatgtgtaactctggagagcacagatcactaatctatttaatagtagggctccaggggatttgatgaggcctgtgaatacttccactatattattgcctctcttttccaatgacgccccttcagaacaaaaatggactatccatgaacaggtgcagccaaagaggacaggcccgccatgtgtccactagatacag

SEQ ID NO: 371372 - DNA, 397 bp, Homo Sapiens
tgctcccctgcacctcccattcttctccatagcttagccttcccaaggccccttgccactgctccctccccacctcgtgcctaccatgccttgactcggggacacaggagagaacggaccagacatagtgtctcctggaatcctcaatgtgattaggcttcgatgtgctttgtacagagtttggctccatgtaaaaatttgggcagggaaattgatacccattctcaggatactttcccatgagctaaggaagggtttcatgcatccatgtattatttttacccctgtgacctctcagaggtcacagaacattgacggaaaaatgtgagtagtccaaaatcaagagctcactccagaaacagcaggggcaggacaaggaaccgcaggacccatcggg

SEQ ID NO: 371373 - DNA, 418 bp, Homo Sapiens
cgtagtgggtccctgcagtgggattgactaaatcagtggctaaaatcaagtcatcaaataccaaggagtctttatcatctttccatagaattagcttgagtgtgataactatgtcttttcctcactagttttaagatagttgaagcttgtttctggcaatgaagggtgtttccttctatgtatcattttttattaaggaggaaattctttctctgagggactcatttccatgtcaatgagccatttatttgccttaactggtttaggtccattatgaccaagccatctgaatgatggggaatcggaaatcggggatgggaagccttcactgtataaacaaaaatggagcctctgctggcaaaaaggaaaatgagagtatagctgttggttaacaactaaaaaaatctaccttgaattg

SEQ ID NO: 371374 - DNA, 397 bp, Homo Sapiens
tcttctccctgacaatcatcaacttagatatgaaaattagtacctgggaaactgacctcagtgtaaatatgagttagagagatggtgtctgacactcactgtcactttattaaatacaactaaaagtacatacagatcatttgcaaaattggaaaattgacaagtagctatatatctatacatacaacagagggaaaacaataccgcagggtgaaagcaacatcctttatccctgatgaataaaaggtcaatacaggtctataaaataggcaggtgaaaaatagaaaaacaattccacgctaccagatggctcaagagtaaaagatactacacttgagggtaagttccctaccacaagaatgaaagatagttagaaaacataactcagcctgcatga

SEQ ID NO: 371375 - DNA, 540 bp, Homo Sapiens
tccacccaccccagggagagacaggttaagaggccattgccatagttcaggcaaggaatgatgacctgaactagggcggaaacaaagggaatggagaggaatagccatgtctgagaaatgttttgagaacttggtgaccaaactggatatggaaggtgaggaagatacaggagagaaggggacaggatgaatagagaggacaacatctaaggtagggagcagtagcaggcttggtggggtggcaggagtagagaaaaggagttcaatgttgaccttaagcttaaagagtctataagataccccaggaaagacagatgttccagtgaacattggagtatggtttagagctcatgaaagatggtcaggactggagatttgaatctcattagcacaagggtgcaaactaaaggcttatagtatgtcgtatcatattgcccagaaagagcagacaggtcaagtgaagggaggagaattgaaatcctgtgccaaaccaacatttagccacaataggaaccagtgaggaggcgagagggtggtagg

SEQ ID NO: 371376 - DNA, 194 bp, Homo Sapiens
gaaaaactatacaacactacttcaaatgtgaagtatcactgtaaatcctctcatacagataattaaaagattctggccaatctagaagcaaaatgatttccatttttaatacattattctttaaaaaagaaaatctgagctatggttccaccagcaatgatcacaactgcctccttcatttgtcagggagaaga

SEQ ID NO: 371377 - DNA, 545 bp, Homo Sapiens
  misc_feature (17)..(17): n is a, c, g, or t
  misc_feature (82)..(82): n is a, c, g, or t
  misc_feature (85)..(93): n is a, c, g, or t
ttccaaacctccagccnggtttggtggggtgattttttcccctactggttaccgtttgtgggagtagggaaaaacctagaanggnnnnnnnnntccccaaaggttgaaaaactgtatcccaaatggaaaaagaatatattcccagacaaaagaagggaaaatacaataggaccccactcccgcttcaagctaaagagtgtacaaaatgcccactcacttgcatgaagaagaattaaacagaacattcactttcggaagaaaatatttctagacctaacagatattgacggtattttctctcacagtttctaaataaaagaaacataaaaggtcaaatattttaaattactttctcaaccagacagttcttgtgacttgaatgatatctgctgagaagagaagaaacacaagattctacaaagcgccagggaagtttacaaagctaaaagctgagggtgtcaggcctgcgtcctgtctgagatggcagccaagccagcttcagagtcacctgctggacccacatgttcctgggattccattggggg

SEQ ID NO: 371378 - DNA, 588 bp, Homo Sapiens
tcttcaccctgacaaattaaatataaggataacatcaagacacttgaaacaaatcaggaaattctggatgacacagctaaaaatcttcgtgttatgctagaatctagagagagaacagaatgtcaagaatcaggacttgatatcagaaaacaagaaatctatagagaagttaaaggatgttatttcaatgcaatgcctccagcaattttcagaggttcagcattgccactaaatgcaagctaaagctatagtgaagcagcaaggtgaagtctagaatgcccatcggcgttcaagcaagcaaaatgctcaggctataagcaagaaaccaaagcagcagttgcagcaaggaaatcgaagactggagtaaattacatgctgagctcagtgagcaaatcaaatcatttgagaagtctcagaaagatttggaagtagctcttactcacaaggatgataaaattaatgctttgactaactgcattacacagttgaatctagttagagtgtgaatctgaatctgagggtcaaaataaaggtggaaatgattcagatgaagtagcctggagtaaatggcgggatcctctaagcacc

SEQ ID NO: 371379 - DNA, 470 bp, Homo Sapiens
  misc_feature (50)..(58): n is a, c, g, or t
  misc_feature (359)..(414): n is a, c, g, or t
gtctttggttgaaaggaacaatactacctaaggacaaaatactattattnnnnnnnnngtcttctagtgtatattgtgtaacacatttctggagctggtaggaataaccatttttatttttctgtagtgccatctatacaaacttttactgtttgaaaactgagatttaagttgcaaactttggtttcttgaactctgacatataaaaaagtctattaacgttatcaatgatcatttttgcttattcccaattgccatattcaaaggctatctctatgttagtatatattgactacataaatagtagagtgttatcccatagacgggcagagagacagagtgggtgagcaaaagattannnnnnnnnnnnnnnnnnnnnnnnnnnnnnnnnnnnnnnnnnnnnnnnnnnnnnnnatagcaaattgaaacccttctgtctgggattcccaaaccatttatgcaaaagggtg

SEQ ID NO: 371380 - DNA, 612 bp, Homo Sapiens
cctcttctccgtgagggccccaagactgggttacgccatacacaagatgtctgtttctaaagagacttcactgatttccctaaaatgatttaacatttctttgcaagtgaagctctgatgttgcctaatgttattttcagagtagcctgctgcaggatgcctaatttgagtttttatttccctgctataaatatgacaatctgagtatgttttcattcaaaccaccttgaacatggtggctgaggcttcaccacaaatgtccagaaaatagcactggagtctgtctgagtcctgagatggtcaaacctcagagaaatccagctctgggcccggaaaggaaagtgccatctcttaacctttcctcaggaaaattattttattgatttttttgccttattttcatgccttttaagtcaaaggaagataaatggaaagtctctttttggtcattcactaattctctagggcaagtcacataattctctaggacaaaggcctccatgatgttaggatgaatgccatagaagaggtatggggggtgatggctgcattttagactaatcataggcatatcctttgctttctctatgtcagggagaagaggggatcctt

SEQ ID NO: 371381 - DNA, 523 bp, Homo Sapiens
  misc_feature (496)..(496): n is a, c, g, or t
tcttctcctgacactttgcttctccagacatgggcagcaggcttgggtggattgcctgagtgttggataattttcacaatacttgactggaaaccaaggtggccctcccctccttgaggagggatctgcccccagttttctcgagaataagcccacaaagaaatgcagcccttcggtgtttgctctacataacgatgctattggatgtcagtgacacaaaacagaagtgctcccagtagcactggcccagtgccccaaatgagagcatctagcagaggctccgcacactgaacacagcacagcttgtccagcaagacccaacaccacacgtgtcatggcacagcatgcccgctatcaaagtgcccaccagggcctgacagacaagcccgtcttcttgacgcaattcaggtccatgacatgtgatgtggtggaatgattaggagcaaaacagctgtaaacaaaagcctgatctgtccatcaaaactcatccgatcgntttatggaaatagctgataccaatcaa

SEQ ID NO: 371382 - DNA, 765 bp, Homo Sapiens
ttctcccctgacataaaataattagcatacctctttaacctatcacaatatagtcctttcacgacaacagcctggtttgaataccgttattttgttaccttaacaatactgtacagtggcattatgtaaccctactgccaggtaggcaacattttcgaccagctcagcctctgcttaaagtttgcatattcccatgggctcagcctcttggcaaatttagtgttgtcatctctccaatggtaaaagcaaactcactgctgaagatcttccatttccaccggtctgagtcattatggtttttgtccccatcagctgtactagaatctggcatccttgtaaacccagaaagggacctttctctactcctaacctttaatcagtaactcctacctccacagagaagatgccagaatgaattctattacacgtcctacaacagtgaatctcagtgcaaagttggtgttgattttaacctcctggtcaatcaactataacagatcccccttccagtgcgcctgggttcccactagtccagcgtcaaatttaatgcttttgaaataaaagccttggtttagaaaagaccaaagcaggagcttttcaaatgataaattggtgaaaactgtcccttcagcctctattgcatttattctcttgggcggataccagatgaatctgaacagccaggttctatcctgaaaagttttccctctcggtgatgaaacctacctgaatgtttttttcacagtctgtttgctgtgaagggag

SEQ ID NO: 371383 - DNA, 227 bp, Homo Sapiens
tacttctcctgacaggaaagtactaattaacatcgtaattttacagatgaaataactcagagcttaagtaaggccttcccagttttgccacagcatactagtatggtagaaagggttataagtgtgccaagatgttgatcctttttaaccctttaacctcaagtagtctcttgtataaatagttaacagtttgtgtgccaccatgtgaaagaagtttagcaagctga

SEQ ID NO: 371384 - DNA, 636 bp, Homo Sapiens
cacctgtccataaagaccaagataggcaggttaaatttgtgaaagaaaaatggaggattctgaatgtgcagcagaactttactacttgctattgcccaaagcaaagattctagtcacatcctcagaaaactctgcaacaggagacagacctgacctattttggagtcaggcaaacctcccctttttttcttccttttctgctgatcttcaacaatttacttaactcagtttcctcacttgtaaaatacaaatgatatgcctatctgcagagtcactgggagaaataaatgaaatgacttaaagtatatgtatgctatctggcatgtagtagcagtttaataaattatagtttacatacaccagaagagtacttgcctcgcttttccttgtatggtactttttaatcttattattaaactaacccctgtggtggtgtggctacattctttgagtttagaaaacgagataaagaattgctcatatcttcccaaattgtgtagtataaaaagaatgctgtcctggttgttttttgtagaatatggaagtccctgcagtaagtaggcaacatgctacccttctattcaaaaccagcactagaacaaggcaagtgggacctttgtcgacacatgattcgat

SEQ ID NO: 371385 - DNA, 385 bp, Homo Sapiens
ggcattggctctcagggtagagaaaaaaaatgtacctgagaatttgtaactataggccatacctcaaggaggtttggaatttgaaactatgctgtgtagtttgtgaaacctcaagcataaaatgtcctaaaagtgatcttgggttggtggtgccttaggattcctggtagtagtggaaatgtaaatttgctttagagaaactaagtcatcaagaatgagaagaacacaaattgcagaattagataccagagacttcatatctaaggtgttttcagtctaggaaacggcaacaggcaattaaacacaatatgataacattctacaataagattgtgaagagattcctagagggaaggactaaacccaaactgaaatatcgagtaag

SEQ ID NO: 371386 - DNA, 425 bp, Homo Sapiens
tccgcgtgctcatagagtgagagggagtgaagaccctgatctcttgagaaagagaagaatgatgggtgctacaatcccagttcgattttccaagagtggaggctgccatcatttccttacaaaacacggaaggcaaacactttgaaacagcaaatatgacttcatttatttatctttaagagaacacaatttcacatgagaaaagcatttttctcccatcagcatgactttgaccctactcatttcaaagtaataaccttggcatcactgtctaggaagcatgtgattctgtcttctgtctgagtcctgaacaagtggaattcttcccaaataaattcttttcaaatatgactgacatatagtcccatgataggtcaggaaagatggttatactacaaatcacctcaataaacttatgtattcca

SEQ ID NO: 371387 - DNA, 554 bp, Homo Sapiens
aggttggagatccaagagcagggatgaatttaactccccctccctctagcgtgctgtataccgaaacagagtgaaagtgatccataaacttacgtagtttattcgatcaacatgattggcccgccagccccgggtaagttgaccctaaggacattttaagagtaatttctttccattttacatatgggtatccttggtgccagattatatgagtcgtatttcacaaggtcacaattaaagtgtttgagactttttttatagtttagagattttatttgctgtttccactggatcgtccagatttttatttcaagaatcgcgtacattttaacagaaataatgaaacctagaaaatgccttccccccaccccatgtacacactttaaaagctggccttaataatttaatttgcatgatgtggtaagcctcagtgaaggttgtgagcttgaagggcggccctagttccagtgtatcacaccttgattagattgacctgggttcagtcctgtctgggtgcactcgaagcttcttgccaacgtctgggcatctttcct

SEQ ID NO: 371388 - DNA, 827 bp, Homo Sapiens
cgattgcttcacagtaaatgggagcgtcgactataatcagctctgaccagtgcactaactgtcttttctcagaactcaccctgggagctctcgtctgcggggactgaggtctcactcagcacttgaaagtacctttgagaatgaagaaactacaacagctttccaggaccctgtgtgcagtttcttccattctgtcctgaagggtcagtggccctacctagggatctgcattggctcttgtgcaagtggtggccttcattgggctgcttaccaatgtttattgagtgtgtccatttacacactatgcatagacacagccaccattagcacagacattgaacttcagctctgggatcacaccctaaggaatgtcatcaaatcaaggcttcaggaagcacaaataggcccccttcatcgtggaagggtgggaaacaggagaatcctccctttttaggatatatggaggagattttctgctccttctcccatgaacttctcactaatacagcccttagggttgtcccacttgatgaagtctcctgggataagtgtgctttcaaatatctttttcgctggcataattgcatgactgataaaagtttgcctctaattagtaattccacaagaaaatcaaggcaatcaatagctaatgctacaaaatttttcatagcaaacaggacaggtgtaggaaagcttgagtacttataatgcactgaaaatccacaaaactgagtttggtcaatactctcatgatccttcctcattacttaaatttcttttaaagtgctcgctggctaagattcagtacgggtggcatcgaataaaca

SEQ ID NO: 371389 - DNA, 415 bp, Homo Sapiens
gactgtggtaacaacataccaatgaagcaaaaattggctatccatcaaacacatactagatgttaattattacactaggccttgaagacaaagcagtaaaaagtacagtcaaggcatctgataaaccgttaatgtttctttctccctataagggaaaaatatcaaaaaagtcagtctatttagccttttggaaccatatttccaaattctgctatgtactcatcttggacaaatgaaaagcattatttcagtaagtcaaagcttttaaagaaggtatcatcattgtgacttaaaacaatttctaaaggatggattttttgggttttgttgctaccttgacatcatgccgaaggctgtaattcactcagtagataaacacccagtctacctaaatgtgagcacatcggggccaggt

SEQ ID NO: 371390 - DNA, 116 bp, Homo Sapiens
cagtattccacggtagcaggagttagccttgtatgtgaattgttttatcctttactttttcttagtaaatggagattgatggccagcattaggctgcttacgactcagtaatgtga

SEQ ID NO: 371391 - DNA, 488 bp, Homo Sapiens
tgtgagcctctacttatcatcaacccaaagacggggtttgcaagaaccctaatttgaagcaagtcagtcagacgttccaagaggcctggacttgtgactggtaggaagaaggatacaatcttttgggactaagccctcaatctgtagtttctgagtctacctccaggtagagagtgtcagaattgaatttgtagacactgattcaattgcttgatgatttcaagaagtgattgcttgcttggtgtatgaagagaaacccccaaacatctggctacagaagtcttgtgttgactattgtttaataagaaaaattttaaaagcgtcctgagtttgtgtagttttctaccccacacgcaatccctatcctcaaaccagactcatttattcatgttcttcctatagcctcctcttcctacaaatctaagttttgaggaaagaaggaaataaaagcctcactaaccaactaagatgtggaactgatagcaagt

SEQ ID NO: 371392 - DNA, 512 bp, Homo Sapiens
cctttgtactacaatatgaaatcacagatcaaactgtagtctcctcctggaaaccactgccttcattgcagctaggtcccagtgatcacagctacgcgtctcaggcaggaggaaaaagaggcctggtagcacaatacttgtttttaatgggaaggacagagaaaccacataaggtgttcagaaagtccaaatgaattagaacactggttcttcacttggtcttcaaactgttaatatttatcacctgaccacttctgtaactcccacatctgtgccaagcacaatccttattcattaagttatacaactggagacaggtcctggctcaaatgtccacccctcagagagtcctcattcactgcagagatgaggtggcttgttcaggaatctacttagagggtttatttttatttgagacagggtcttgctctgttgcccaggctgtatgtagtccaatagcacaatcaggtctcactacagcctccaataaactcctggactcaggtggtgta

SEQ ID NO: 371393 - DNA, 501 bp, Homo Sapiens
acttccacgtgcagtgatgaggatgaagccacagggtggttcccctacctttgccttccacgtgcctaacattatgccaatggagaaacagtcatagagacaaatccctggatgaaaaccacccacccctggggattaaagttggtctgttcacccatagctgttaaagagcaagggctctggactcagactgaccctggattcaaatcccaggatccagatctttctagccaagtcagctgggacaagtcaattatcattttagggggtcaatttcctcacccacaaaatgggaatgatcttacccccctcaaaggattactgtgagggttaaagaatgtaatgtatgtgaagcctgcacagtgtctatagatagcaagtgctcaaaagtggaaaactatgattaagaactttcaaaaatattttcacgatagtcagatcaaaaggaaaaatattctttcaagacaccggtgctttcaagagaatggattgtctaatttt

SEQ ID NO: 371394 - DNA, 472 bp, Homo Sapiens
ggaccagtcggttctacatctgcactctcttccttccctcagttgagctcatcccctttcacacctagcttcatcccaatgcaacttctggtcccttcctctgtgtcccgtgggacctttttctactgctgtgatatgtccttgtattcttagcattctcttagaaagtatcctttattgccccaccataaaggactttttccatgtactgtatcaggtatccttccaaggttgcaagcagcgtagaaaactctggagaagttgagcaaaggggaacttagtggaaggagagtgggagctcagagaatcactaggcaggctatagcaccagtgctaaaaatgggcatggggaatgtttcccaaaaaaagtccttctgtcttagagatgcatactgaaatatttatgactaaaatgatgctttttctagaagttgctccattgtagggtgggggtagataggattataaaaga

SEQ ID NO: 371395 - DNA, 636 bp, Homo Sapiens
tttatggtggatgcccgaggtggtgctatgcgaggatgcagacacaatgggctccgaatcattattccacctcggaaatgtactgctccaacgcgagtcacctgccgactggtcatagcgccacagactggcaactatgcctccaatggtggaaggagaaggcctggccagtcgcctgatcgaagttggaccttctggtgctcagcttccttggggcctgtgatcgtggagatccctcactttgcggcccttcgaggaaaggaaagggaatctggtggtcctgcgcagtgagaatggggacagctggaaagagcatttctgtgactacactgaagatgaattgaatgaaattcttaacggcatggatgaagtactggatagcccagaagacctagaaaagaaacgaatctgccgcatcatcacccgagacttcccacagtacctttgcagtggtgtctcgtatcaaacaggacagcaatctgataggcccagaaggaggtgtactgagcagcacagtggtgccccaggtgcaggccgtcttcccagagggggcactcaccaagcggatccgcgtaggcctgcaggctcaacctatgcacagtgagctggttaagaaggtccaggtatgccggggat

SEQ ID NO: 371396 - DNA, 775 bp, Homo Sapiens
  misc_feature (115)..(115): n is a, c, g, or t
tcagtaaaccactgggagtccggcagcatggaggcagcgcgccctcccccgtacggcaggaaagttcgtggtggtcggcggcggcatcgcgggcgtcacttgtgccggagcagtntggctactcactttccatcggaagatattctcttggtaacagcttctcctgttattaaagcagttacaaatttcaagcagatttctaaaatattggaagaattcgatgttgaagaacaatcaagtaccatgttaggaaaacgctttcccaacattaaggttatagaatctggcgtaaagcaactgaagagtgaagaacactgcattgtaacagaagatggcaatcagcacgtatataagaaactctgtctgtgtgctggagctaaaccaaagttgatatgtgaaggaaatccttatgtattaggaatccgtgatacagacagtgctcaggaatttcagaaacagcttactaaagctaagagaataatgatcatagggaacggtggtattgcacttgagttagtgtatgaaattgaaggctgtgaagtgatttgggccattaaagataaagctatagggaatactttcttcgatgcaggagcagctgaattcttgacttcaaagctcattgctgaaaaatcagaggctaaaattgcacataaaagaaccagatacaactgaaggaaggaaaaaggaagctagaagcaaatctaaagcagataatgtaggaagtgcattgggaccagattggcatgaaggcttgaaatcttaaaggaacaaa

SEQ ID NO: 371397 - DNA, 591 bp, Homo Sapiens
ggcaatgacagaacatctgttcctccactcccaggatgagcttcctgaagtgatttgacttagcaaatgtcttctaactttaacacttcagtactggatgggaaatggcattcatttttatcttcatcttttggtggtactgatacagaattctgcattatgatgtactggacttgaatagtatctttccttttactgttcttgcatgaagtttgtggttaattccatcaaaatgttcagaagataagatgtgcgtactttcttcaacatacattcctatagttctccagtctgtgtccagaagaatgtggcaatgacagaacatctgttcctccactcccaggatgagcttcctgaagtgatttgacttagcaaatgtcttctaactttaacacttcagtactggatgggaaatggcattcatttttatcttcatcttttggtggtactgatacagaattctgcattatgatgtactggacttgaatagtatctttccttttactgttcttgcatgaagtttgtggttaattccatcaaaatgttcagaagataagatgtgcgtactttcttcaacatacattcgacatc

SEQ ID NO: 371398 - DNA, 412 bp, Homo Sapiens
tcggtccttgatcacgaatgtacagcatgacacatatagaacatggatgcacacccacactggctgataatacctgtgtctatgccttgagatttcaccagctggaagacaaacttggtcaggaatacagtaaggatgtgctgacctgctggttttctctctcctttgagaccaggaggtacttactgatatgtattactgaccctcaagacactgtgttcagaggaaagccgaggaggatcatatgacattcagtatttccccacagaaagtttccagtggtgtcagtatcacctttcctactcacactctgtgacagacaagtcataaataaaataataaattttatgaacatttaatggattaactcaaacctgagcttcagcagttgccataaagcttcttctctctc

SEQ ID NO: 371399 - DNA, 512 bp, Homo Sapiens
atgacgaatgtaccaagtcagcgagcgcagctgtcgttcatcatttatccgccggcggagttcaccgacaagaccttcaaggagcacctgggggaggagtttttattcgtgcatgaaggccaggttgaggtggatttcatgaacgagcgcgtgctgttggcgcgcggtgatgcgctgcatttcaacgcgcagaaaccccaccggattcgctcggtgggagaggtgcaggcgcagttgctggtggtggtgcacagcgctgaggagtgagactgagcccgacttgaaatgcattcaatgtgggagctggcttgcctgcgatagcggtttatcggtgcccaatctgtcgctgacccaccgccatcgcaggcaagccagatcccacattttgctcagcgttctacagggacggacaatgccggattgaccagtgggtgcgtacgcgcggtaaagaacctcagtcacattaggagcgcctcgaacagctccacattcgtaatcaagtcgactgatta

SEQ ID NO: 371400 - DNA, 407 bp, Homo Sapiens
tacctggcccacgtatgtcagattatccctgtttttgtgaccaagagagagccattagtctccacgagttcccggtggaacagatgacaaggtctctagcatctccagcaggactccaggatggttcagcccagcaccatccaaagggtgggagcacatctgccctgaaagaaaacgccactggccatgtggaatccatggcctggaccaccccagatcccacatcccctgacgaagcttgtccagatggcaggaaggagaacggatgcttgtctggccatgatctggagagcatcaggcccgcaggactgcacaactctgccaggggtgaggttcttggcctcagctcctccctggggaaggaactagtctttctccaagaagaactcgacttgtctgaaatccac

SEQ ID NO: 371401 - DNA, 756 bp, Homo Sapiens
  misc_feature (623)..(675): n is a, c, g, or t
tccagaggagtcaacggtagcaaatgtgatcacaaaggggggcagagagatggtttggggaaaaggagaggtgctgatcaggctttttaagacaccacaaagacttcggcttttgctctgaaaggatctggagccaagggctgatatatgctttgaaaatattactctggctcctaataatgaaggggcaatagctgatgcaaggagaccgttaaaaggctactgaaatataatcctgataagagaaggtgggttgaatcagagtagaagtggtcaagtcctgaatttattttggagttagagtcaacaggatttgcaaatggattggatatagaaggtgagagaaaaataagataaatggtgtgagttttccttatttctaatggtgatatacagtatctatcagttttaaatacaccttccttttgacttagtaattcttcgagaaatttatctcattgatatacttacatatatgcataaataaatatgtataaggatatttatttctgcttcaaaagaatgaggcagctctatgagtactcctatgggttgtaaaataaggactaaaaaatccagtacactatgcaaccatttgtatttttaaaaaaagcctgaggctnnnnnnnnnnnnnnnnnnnnnnnnnnnnnnnnnnnnnnnnnnnnnnnnnnnnnaaaccgcttgagtttgggaccagcgtgagcaacatgtgaaatcctgtctctacaaaaaacaacacaacaaaaattcgtcgg

SEQ ID NO: 371402 - DNA, 427 bp, Homo Sapiens
cgggggacgaaagggagtatacataccataggcctcacacagtctctcctagaattgtgctggactttcttcttttctctgaatgacctcagaaacctagttaacgtttgtggcctgccgggttcccctctttaatccttccaagagagcttccctgtatcggtttagcctttgcatatcctctctttcatttgggtcctaaagggggggattcccatgaggctgtcctcagaagggaaggctgtgcaggaggtcgtgcctccagcctccttaaccacagccctccagcctgtgctgaggacccggcttgtatggcctgcggtggtggtgtgtagctagcacacctctgtctcagggctccagccctcctgctggggctcagaggaatgcctgttgccaggtgtctgttactctgtgtgtgttctac

SEQ ID NO: 371403 - DNA, 689 bp, Homo Sapiens
ttgtaaaaggatcagacaccagagagggttggactggatgaccttcagttcccctcctgggtgaccacagctcttcaaagcccctcactgctgcccgcttctgcaggattcaggattgaatgtcagaagtctgctggaatgctgtcgattgaggcacggtgacctggccaagcctttcctggtggctgctctggtatctggaatgagctatgggtgagggccgtcctctgagtgaccgtgcccccctcacagctgaggttcccctcggcctggatcagcgtgggttctgagaaagcctgcttgccctgactggaggcacctggaggtggttttcaaagtgtcactgtcaccgtgacccagacatgcttgagccccaggctgggaaagctttttttctttgctttaaaaaagcagaaacagtgaagcaagcataaatttgcctttgaaataagaggctgaatgtctgccaaatgcaaatggattgaaacggccggtggtctgaccttgggatgttccattggtagtttcagaggggctctgagcccccaggccggctgtaacagtggacatgctggcgctggccagtttgatccccttgaaagcccccgatattcacctccaagagagaaggcctggcaggtctccagcatgcggatgaggcgctgcctgtgaggcacgctctgtggagg

SEQ ID NO: 371404 - DNA, 408 bp, Homo Sapiens
cgggggacgaaaggccagaaaaggcctccctgactgatcaacaggctgcgacctggagataagggatctgtggccgggcaggttctccaggcacagagaacagcacacgtgaaggcactgaggtgctggaagcttggcgtgtctacaaggctgggttataatgaatgtgacattgtgctgggtacctggcacacggcagcccctcagaaaaggttgcatggcctcacttattctttgtggaaggagctttgttcctcttgggcatgggccctgattgagacaggcccaagacagcacagcgccagcctaggccagacacttcagaatgcattgctcaaaggggcatttcttctaaggagaaccagtcggctataggcagaaatccagcaacatcaagagcaccgagga

SEQ ID NO: 371405 - DNA, 634 bp, Homo Sapiens
  misc_feature (508)..(508): n is a, c, g, or t
aaaattcccatcaaggaaataaatcagcctgattttaacattttacatattacattgcctttaagcactatgattggatggctttttttctatttgtttaataatccttggctaaattcacatgtatctaaagtaaaatagctgagttactgaattctataaggggaagaaaaagcatttattttcacatgattaactgaaatggaaaagtaagacatttagcagaataattcatttaaaaataattttaaaaaatcagacatatttaaaaatctaggttgtctatccagtatgtgaatgcttaattataattgttacatgttgaatgggtattaagagtaagtcaccaggtacacaaaactgccatcatagcaaaatgagacagtgttgaaaagacaaaatattttctggaatgaaaatatattcaagttgatccatattcagatgttttctgtttaatacttcagattggtcctttgtccacatttgtttaaaacttattgtaacngttaatttatacttttggattgtgcctttgtcatgagttgagaaaagtagtcctacaaataatgtgaaagttgttaccaccacagcatgaatgtataattgtattaaaattgatcatccacagaaa

SEQ ID NO: 371406 - DNA, 625 bp, Homo Sapiens
tgtagggagaacatgtcaaaattactatatttcacatgacttcaccctttaagacattcggttcctatcaccctgcccttgtaaatatcatctctcgcacctagtgaagactacaaagataagaaatggtgcccaattccaatgtgattccactccctaaataagaaggacagctacacggtcagtatagaaaacatagaaggttatgtaccagagacgtacagagtgagtgaggaagacaatattagggtaccctcggccctggggtggaaagaggatcaaatgaaatgtatggaggagctggcatgtcagactgaaaacaagctgaatttacacatatagaaatacaaataaaggaccgagagaagtcaaaggtatcagtgtgaacaagacaagatatggaatccaatgaagagattcagtcccgtttggttagaagaaagaaaggaaataagttggggcatattatgtaatgttactctgagaaatcagtaacaacattagagtagcaaggttagagcagcatagctctcctcaaggtacatgtacctggcattaacgggcaggatggttaggaagggtaaatacttgtgggctacgagaccacatggtagagtatacgatt

SEQ ID NO: 371407 - DNA, 658 bp, Homo Sapiens
  misc_feature (522)..(539): n is a, c, g, or t
tatctctaacattaatgttccccttctctatggaaactcgggtttataatctttcacataactcatggtatctctaacattacagtaattatttatcttaaataatttaaaacactactggaataatgggaacagaaatctaaacactatcagcttaccctacaaaggatataagaacctccaaaatgtactaacttattttattaacatttgccaccactgaactcttgggaatactacaattttaaagtaagagagaaagtagggaaacagaaacatgagtttggggggtatgttgtctaatgttagagataccaaaaattttccatgtggttgtttttagcagagctactatatgcaaactgcacgtgaaggatataagttataaaggaatagagcttctagaaggagaaatgtgagttaacttttttctaccatttaatcattctttcctcacctcttagtgtgtgtttcaataatgttagagatacgtatctctaacattatcttaaaacaactagnnnnnnnnnnnnnnnnnnaaaccttaaaaaagagagagaaacatacacactctctgaagaatctctgaaactgtttacaaggaatctcgaaaaacagggatgtctaactgatgccggctctgtttttctgtaaataa

SEQ ID NO: 371408 - DNA, 258 bp, Homo Sapiens
atgctgctgaacatgtgattgggatgcataaatacactaaattgccatgccactggagtgccatgcttcctagatatgtgaaattattttgtcttagattactctgccaagaagagaatgctatccagtgttactgatgacaatgaaaaatagatggtcagtcttaactgacccaagtgaagaacctactgagtgcgaaattactgggacctcacacaggatgctgccgggcctgctcgctgagctatccaatatggc

SEQ ID NO: 371409 - DNA, 364 bp, Homo Sapiens
gaggcagtgcacggtgctgctgaggcgatcttgaggatcccgtatctctaacattatgtcagtcattcatctgcatgtgaacatcacccacgaaattatagagttcagcttcatctagcatttgttatagtacataagaatatatagtgcagtattctaatgttacattagatctcaaataatcatggctgcagtcaagaggatagcacacaatatggtactttaaattatttcccattgaaaagcaaaaattaatgactaacagatattaaagttaaatttctgaatagaaagaacccaaggcttgtcattttaatttttattgttaatgttagagatacgggttacggggctcgaatccgta

SEQ ID NO: 371410 - DNA, 444 bp, Homo Sapiens
  misc_feature (166)..(176): n is a, c, g, or t
gtcaaccatacagctaaaccttcacgttctggcttctgtataccggcctccccttaaagaatgaaaccaacctatcattttctgacccgaaattaactcctaagaaaaggagacttgactattaaagatgtagaaagggtatctctaaccttacacttaatggttnnnnnnnnnnncctggttacttttcctcagagtatcgatcaagactatttttcacaactaagattcatgtttcccacataaaaaataatatgcatttcactctctaaactttttcattttaggttatcctttccaagtgttacttgaaaccattctaacattatcatgcaaaataaatgcaaatctaactttggctggatatattacaccttacgttgtagacttagactgtaaacttgagagtatgatgtgattttgtcttctgataatgtctaggtg

SEQ ID NO: 371411 - DNA, 335 bp, Homo Sapiens
  misc_feature (280)..(291): n is a, c, g, or t
ttcgagcagcaagagaagtcagtgccacatctgcccaacacttattatgcccgtcagtctgttaaatttagctattctggcgggtggtatctctaacattatcacatagtggtatacaaacatccatcaatccttcttactgctacatattactaggagatgaactatgtatttgccacagatataaatttacaaaatattaaattcctacccatatggtttacattttacatgcccagaagcaacgtatgattttccataattccgaacatgttgcccnnnnnnnnnnnntgttgtcaaacttctggactcttgctagtctaatgttagagata

SEQ ID NO: 371412 - DNA, 622 bp, Homo Sapiens
  misc_feature (530)..(558): n is a, c, g, or t
ttttaataagtgtaagtggccttcgttatcctaggttcctaggacacactggcatttccttaagaaaaagaaaataataaaatacatcactatcaacaagaaatgttggaaggctaaagagaaatctgcattaattttagtactgcatacagaggccaatttatgagcacaaagtactaatgccctcaattggcactggcaagcaattatctctaaagcacctaaaaaatggattgaaatgcccagttggaatagtcttatatattgcaatttaaaagattgaaatatccagtttttttaaaaaaaagattaaacaataagactaatacctactctaaattttaaaaagcttttgtatcttttgtcattacagccacataaatacaaatgtattcaaaaggcattagaaaagcatttattgctaagaacataataataccagcccctgttcaaatctactattatatctctcgaaggtcaaatatgcagcaatgccgaagtagctaagtttacctgctcacagaaaaatnnnnnnnnnnnnnnnnnnnnnnnnnnnnntctttctgggaccagattccgcttgatgacctggtttctagtaagttactaattaatcatattg

SEQ ID NO: 371413 - DNA, 434 bp, Homo Sapiens
cgcgaatggaatccaagcagagtagtagtttcactgaactgaagacacggaggctggagttgacagagacacataaccacaaaggaaggtatcctgcagaacaaaagtttcagaaatcttcatgagatctccaagacggtggttggatacagagccacacttgagtaggatgagactgcaaggctaacaagagcactctcaaatacataaagcaagctgcaaacagagtgaaagtgagtattcctcgacatgtaatagatgtgatgattccttgtgtcaggaatcatccctacacgaaatttacaagtagaactatacttaaacagaaagacgactgtagttcaaacaactccttattagtgtaatgcaacaaatatgcactgaggctgaggcctcctctctacgagggattccattggggggggtaccgagct

SEQ ID NO: 371414 - DNA, 552 bp, Homo Sapiens
caaatgcatcactggacttagcaaataggaagtggtggcagtggagaaacggtggtgagtagtttcttgcgaggggtagaggtacaagccagatagtaatggatttattataagtagaaagctgctgaagaacagaacataggtcacttttcctagaaactaggctgtgtatgcaagaagggaaggggacaagtagagcagaatacaagtcgaaggatgcctccatcagggagatttaccagagtgctgggcccatggcatgagtgtatgcatgcattccttcattaattggttcaaaaaataattatggagggcctaatacttgccagatattgttctaagatcaggtaactgagaagtgagcaagataaaagtcattgctcacatctccagtggtggaagataaatagagccaataatacacaaacatacaaaatattagcgaaaaatagtatgcaaacaattaaaatagttatatgaatgagaatcactagtgatgacttagattgactttttgggggaagcctcaactaggaaggattccattggggg

SEQ ID NO: 371415 - DNA, 335 bp, Homo Sapiens
catcatctccaggcatcatctgcattaactatactagagattatcctaccaaggtgtcaacactgaaagaaaacacaggttagaagcaggatcactacaggaaataaaaggagagataaagcagaaagcaagttaaactgatgcacattacgcatacaccatgaaacaaaagtatattgagtacattacagatccacttgcagaatcagaacagatgaggtccagtcagagtgaaaactcttggtgagatatcagcagttgtttacatgacaaaaaggaatgagtatgacaatttgaggttaaaaaggaattccaaatacattaacttcatatct

SEQ ID NO: 371416 - DNA, 585 bp, Homo Sapiens
tacgatcgagctcgtacccccccaaatggatccaacaggataattctaacttggtcatgactattacacgtatcagtagaaacagcatataaatctagggaacagatactcctttgacttttgaccaaacacttttgatggtttttagcataatgatgacagtgaaagccaggggctacatattgcctcagagggaaggcatacacagaaaagagaaaggtatctagcacagaactctgtaaatcacaatatttataagactcatcaaagaagcccaagaataagctataagttggatagaaaaaataacgtggtagtaagaaatccaaaagaagaaagtgttttaagaaggatatagtactgacctgtgaaaaacaccactaagatgtctagcagcataagatcaaagaaataaccataaaatttggcagccagagtcactgctgattacaaaactcagaaaaagtctggtgatcccagaaaatgaatcgaagttgatttgaaaagaacgtaaccaactagcagctataaagattctttcaagggaaaagaagcagggagacaggaataggaaaatatgggatc

SEQ ID NO: 371417 - DNA, 254 bp, Homo Sapiens
caagtgtcacggcgtaggagcataaaaggtgtgatattaacatatcactactgtgttcctctgtattctgggatttccttgccgattctccgtgttatctgggctaatatgtgagcttggcatttcctatttaagctctgtaatgcccaccttaaggaagatatattcattgttaatgtttgttgaagctattgagtgggtatggctggcatcaaaaactagttggttccttttaacctggcttatcttaaata

SEQ ID NO: 371418 - DNA, 462 bp, Homo Sapiens
caaggtccaagctggagctgcagtgcccctatgaaaccgtcacagaagcccccaaatttaacagatcccactacttctgctcccgaaatgtaacagcattctatgtgtacttctatgcaacaatttccaaacttcattatatcaaccataatccatgcttcttgtcctcaccaggccatgaataactcaagggaaaaaactgaagttggtttaatctctatatccctaggctgagctggtacacacctggtaattagccaaggttcactgactaaggcagcctgggttagcagaaaaaacacaggacctgaaaggatcctgaagaatcagccagttttatttttataaaataaacacctttattttatgggaacctggaacctatagggttatgcaatttacctaagatcactaaatgaaagagtgataaaaacattactagcttctgatggattccattgg

SEQ ID NO: 371419 - DNA, 641 bp, Homo Sapiens
gtcttgacagatggtataaattccagtgttctgctggcattccgtattgtagtttttggacagaccaataagttgttcacatagacatccaaacgttgaagtgtggaaaagaaaattcctactagaacagccttgttatgatcaacattaagcaacatcagtcgaagattctgaggactggtgccagtgaagtaaacttcataagatttgttcagagccacaatgctgtgaaacagggacagccttctctggcatgtatatccagcacaccagccatgatcctgtgggccattaataagatcaacataaccgttgcccattatagccactggggaaagtcttcgagtttctgtgtcaggatccagactttcaataaccatcattgcatattccatcccaaagcactgatagctctgccactctggaaggtacttacaggttgaatctctaataattcctttatgaggtgctttctcagtgacaggaattctacttccattcaagaatgtgagcatcgccttaggaattctgtagtctcccattcctacttggctgtttccgtcccattcatattctgcttgaggtatcacagaaccagcatttcccagcaaggagccatctatgtctctaagcaagagtga

SEQ ID NO: 371420 - DNA, 206 bp, Homo Sapiens
gcaggtacccccaaatgaatccaatccccagaaacctgagcaaagtcataggaaggaaatatgtccttcatccccaaatgctcttgccgataaacagacttgaaccaagaatatttccgctccctcagtatagccctaaagagctattgttaataagttctaccatctagacatgaagagaatataagcacagtatctatagaggc

SEQ ID NO: 371421 - DNA, 346 bp, Homo Sapiens
gcaaaaagcagtggagaaaaaagagattgcgttatcatagaaagctcacgaagagagagtagaccggagtgtatttcaggaaggactagataaccttggagtaactggtgacctttcaaagtgcagttacactgggatggctaaaactcaaagattcctgaaacttgaggatgaagaatggtgagcaaatgcaaggagaagatgaaaaaagttgttaagaattattacatggaaaggaggggacaggaatcagagtaaccatcaggaagataataaacctctctattctccctctgaaatttaggaaatatatttgcatgttcaaagtcagatagaacaaagacta

SEQ ID NO: 371422 - DNA, 843 bp, Homo Sapiens
ctgtatgaggttggctaaacaactttcaacagtttctgcggccgcccgtttcagctccagcttggtcccccctccgaacgtgtacggataaccactccactcctggcagtaataagtggcagcatcctcagcctccattcggttgattgtgagagaataagaggtcccagacccactgccactgaagcgaaaagggactccaggagccacgttggatgtgtcataaatcaggagtctgggggaggatccaggcttctgttggtaccaatatatgtaacgtatacttgagctggcactgcaggtcatggtgaccctctcccctggagatgcagacatgattgctggagactgggtgagctcaatgtcagatccgccaccgccagagccacctccgcctgaaccgcctccacatgaggagacggtgagcgtggtcccttggccccacaagtcaaagtagcgcctatagtagtcccctctagcacagaaatagacagcagagtcctcagatgtcagcctagtgagctccatataggctgtgctggaggacttgtctacactcagtgtggccctgcccttgaacttctcattgtattcagtactcccctctccaggaaaaatccatccaatccactcaagtccctgttcaggcgtctgcctcacccagtctatatcataacttgtgaagatgtagccagaagccttgcaggacaacttcactgaagccccaggctttaccacttcagttccttactgctgcagcttcacctgggccatggccggctggccgcataaaaggaacaactaaaggaattgcgaataataagggatcgtctagagtcacct

SEQ ID NO: 371423 - DNA, 614 bp, Homo Sapiens
aatgtgtgctctaagctcttaaaacagctctgtctcaggaaagactgtccagggcataggaagcccacacacagggtgggatgacaagtttgcatctggcactgctgggagacctgggggcctctgcccttttggccacgttgtctcctgcctcttagggtggtgggattctgggctctcattgcagcaggtggattcacttagctctcctccccttttagcattactgtcttctgtaataaacctctcactttgacctgccaggctgtcaaatgctttgattgccctctctgttttgttccaatggttcatcaatccaaatatccacaacacaaggacagattttagtctcttcatacagtgggatatttcacagctattaaaacaaatcaaataaatgcttgtgtattgatatgcaaagttgtcctgcatcaataacttttaaacacattttatgatcccacatctatatctatacataatgtttgccactgcttaaacaaaacaaaatctaagctttagaccccaaatggaattacaggggaatcttgatgtctgtgttctgcagttctgtcatgtttgaaattgtcaaataaacatggtgcctttccagt

SEQ ID NO: 371424 - DNA, 156 bp, Homo Sapiens
agtaagtattgaagaagcctgagagaaagccccaggtgtaacagatgttcttcgcagtgcagccaagttttatcgaagaaaagatgagccagacaaagcgattgaactgcttaaaaaggctttagaatacataccaaacaatgcctacatgcgtca

SEQ ID NO: 371425 - DNA, 257 bp, Homo Sapiens
gaaggtaaagtaaaatattcttataaagaagataaacacttacaggtactgggaagggtgaggtattggcagctgtccatggacgttgggtttctcatgatgtactgggtccctgaagatactccgctctacgagagggacctttctgctgtgtacctctgcgaaaaaaggaggaaagttgaaacatcataaagaaccccaaatgtaggatcttccactgaactgtaaagttactggttattcacaataaaccagcg

SEQ ID NO: 371426 - DNA, 260 bp, Homo Sapiens
agtgatgcaagtagatgcatatgtacataaaaatactaccacacattttatgtagtgctttattttttaaggcacacattaatttatatgtattatagtcgtgcttaactttttattcaaatgacactcaggaacctgtgttgcaatctaagacctaataccataacaattagaagataatatcagtaaaactcttctagacattggcttaggcaaagagttcaagaccaagaacccagaatagccaatgcaacaaacac

SEQ ID NO: 371427 - DNA, 330 bp, Homo Sapiens
agtgatgcatgtaggttgtatgcaaatattataaaccattttatgtgagagaattgagcatccgtggattttattttttaatccatgaggggagaggtcctagaaccatttcttcacagatagcaagtgacaacaatttatgttggtgtgagctcaaaattgataatgttggatgttacaaagactggaatagacaaatgaatagagcaggttatatcaattgaaataataactttatatcagtatgatcaatgaaagattgtacttcagttacatgagtgggtacgtgcttgtataaattgtagtatgtcactatatagtcgaggatcc

SEQ ID NO: 371428 - DNA, 550 bp, Homo Sapiens
tgatgcatgtagacactcaaattcgtcacctgtagctgttctctccttaatttattccagcgtcatcaatgttgctgatgttatttgctcaagatccaatcccttatttgattgaaagaaatcaaccactgcattgacagttttctataagaaaatttttttaacataaccaagttacacatggttctttccatattgtaaacttcaaagtttcacctcaattctatacagctgtagctttgaactgtggaactcctaagatattctgtcctactacatctccctttggagtaaaagagaacctggagaaaggaagagcctaagcaagcttactggagaggcaacaaatgtgcacatatcattaaggtgtaaagtatgttctacagcgtcatatggatgtagcagcagacattaattgctagatttagcctccaaatagtcagaagatgaaacagtacttctctagcctgtaattgagattcccttgcactttgaagtttagaaaattaagaggagaaaccatccagctcttacttacacgcatcatctc

SEQ ID NO: 371429 - DNA, 139 bp, Homo Sapiens
cggtgtacatgtatccatccgtataatatatacaaggactttgaaatataggtttagtttgtacgtcagagggaggaacgaataaattatatgagaattaactttcttccttattacaatgtattacttccatggccag

SEQ ID NO: 371430 - DNA, 499 bp, Homo Sapiens
taacctgtcactgatcattgatctgaaactcatgagtgatgtgctatttcgcatgaaacagaaaaaaagtcaaggttgtttctacaataagattaattccagtcgcttaaattcacattgccttcctaagtaggaaagacagggatggggttatgtggagtgcactgggaattttgcataacacaaggtcatcttatctatgacggatgggagcatgagaacatcacgggctgcacataaacaaggctgtcaagctgggtgatgtcaaaacttcttcccagtctaacatgctggctcactggccactggcttgccagcctcatggttctatcacctccagttccttgactggggattcttcgttttcacaccaacctcagcatgactattgacgtttgcaggaagaggtatccatcacaggattgtctagaacatctctctccacctttaagaatctctctctacagcatcactcgggatcctcgtagatcaaccacac

SEQ ID NO: 371431 - DNA, 291 bp, Homo Sapiens
  misc_feature (188)..(248): n is a, c, g, or t
accccatgtagggatcggctccctgtgttgtccatgtcttcttttaggtggagttggctaggcagggaacctggcaccatttccttctcagagcagagaaacagagtcggcgtttgtgagcgtgcattgtccaaacctgcatttggaaggggtcaaagtaggctgggctttgtttttactttttcttnnnnnnnnnnnnnnnnnnnnnnnnnnnnnnnnnnnnnnnnnnnnnnnnnnnnnnnnnnnnngatcgatgcagacattaactacatgctacatgcatcatcttct

SEQ ID NO: 371432 - DNA, 358 bp, Homo Sapiens
ggctgtctagaggatccgagtgatgcatgtgggactgtccaggcagataccatctgcaatgcagttatgactgagacctcagctcatcctgtagggagttaggagctgggatgctctttggaattgtcacaaattaaggcaaagggggccaccctttgtgtctttgtatcagccagctattagctacttggcttcatcctggagggggctgtgtaacattgggtaagagtctggcctagtgagaggtacagctgtaaatagttagcaacaagaatgcccagcagctggggcaataagagcctcagccctgaaaaggggacatgggtggagcacaatagtatccactacatgcatcact

SEQ ID NO: 371433 - DNA, 477 bp, Homo Sapiens
aatgatgcaagtagttccagctaaccaggaggctggttgaagtgggagtatcacttgtgcccaaattcaaattcagcctaggcaacatagtgagaccccatctcattaaaaataactaaaaatacctctttgtaactctattgaatgcctgttgtcattctcctagatgtgaactcttccacaccttttgcccatactcataaaaacatatagggtttgattggggtgaaacacatatgattatttaattaaaatgtcacggtctttaagtccttacaaagtttttaccaataggtaaacaaaccaaatcagtttttaataaggaagtctattggttcatatagctggaagtctgaataggactgatttcaggcttaactttgttttcctctggttcttatcggctctgctcttttgacttttcttaagagaactgattacttcaaagattctttatctgacagaatctaagtactc

SEQ ID NO: 371434 - DNA, 385 bp, Homo Sapiens
  misc_feature (273)..(325): n is a, c, g, or t
agtgatgcatgtaggaatgactgttcagaaacagcaaggctttctttgagaaaggagaagggcaagattgaaaagaaatggaaccatcttgacattgtcatttgttatctgaagaaggaaatttcatattgggatacttattataattcccatatgcctaaaagcatttcttctggcaagaaaacacctagtcctaagtaaaactgttagtgttcttttcatgaaaagaaagctaagatctttgcacaactcagatgctgaaaatatgctagnnnnnnnnnnnnnnnnnnnnnnnnnnnnnnnnnnnnnnnnnnnnnnnnnnnnntcatgcatattctgaatacaggtcatattaatagttgatgaaagtaagcatgtttttttc

SEQ ID NO: 371435 - DNA, 330 bp, Homo Sapiens
cgggaaaaagacaaggattggatagcagaaggggagacatgtcaagaagagtgtggccaagagaacatgacaatagaacaggaagtgagaagcagcacagacaagacactgcttctccagaccactgcctctgtctgaaaagccttctctctcaatcttgccagagatctttgtcattagctaatattggcttttttaataagttaaaagtatattttttctaacagtcctagtaatttaggggatcttttgtttgtgtggcagggcactattttaagatacaaagctgtgcaattttgtctccacacgtgttcatcctttcgctacatg

SEQ ID NO: 371436 - DNA, 366 bp, Homo Sapiens
ctgatcttgatccttaggtatgagtgttatggcaaagaggcattagaaatgtccagaacaacctaccaagtaccatcagtgtgtagtggatttagtctgtaacagctggggctataagagcaataactaaactcacttggcgctaattcactgttagcttcctgctcttactagccttttttcactggccttgcagggcttttgtgttgagatatagcatctcttcctacccctggtacctttgagtcctttatcgaagctgtggcttccctttgtccttctggaatcctatgctgtttctgtcggaccacccaggacaagagacatggctttggagagagaatttacatgtctcattagcatttc

SEQ ID NO: 371437 - DNA, 317 bp, Homo Sapiens
ttagatgatgcagtgtaagtgtaaactagtacataagagggaaataaagattacttctgtccacattatcttttaacatgcaaggctttcccttcaactacctgaaactatcacacggtcaggaaagaggcaccaaatggtacagaatgacaacacttgtataagggtaatggaaactaaccaagccacttgacaatgctctacccatgtgttccaaaagtcaccaaaatagaagtgcttactaaaattcagcactaatgttaagataatacacaccaaacattactagataaaaaatttctcccacatgcatcact

SEQ ID NO: 371438 - DNA, 495 bp, Homo Sapiens
tgtacattgagggcagtccaatctaacggtgaactcataagggacagccagtaaattcaaaacagcctactgataatagattacttgtgctactctatctaaaatagccacaaacacaaaactagtctacactctttctctccccattattggccctaacccaaaaatagtgggagtaaatgatttcaataatttattttcatgctctattttgtacttaagttaaaattactgtaggttggtgcccctcctttagcttctgctaaagactttacataatgaaagctcatgaagtgtctggattactaacagttacttatccaaaaagatgagacatggtacattgatttgattctattagttctctcttgaagatatttctctcctccctctgtgaaaaaacatttctttctgtgtcatacaagaggagtcattttagtagttttaattccctcttgagtcctacaataatactaaaatactcagggtaccgag

SEQ ID NO: 371439 - DNA, 430 bp, Homo Sapiens
acagttgtccatgctggactcaactcatttgctcaagcaatccctgtgcctcagcctcccaagtagctggggctatagcttgtgccatcatgctcagctattcaccttacattgctgtccaaaatgtttccatttgaggcaacctgggatagtaaaagtacttctaattaaacactctctgccattagtatctagctgtgtagccataaataagttatttgatatttcttgagtctcaattaatacctactattagcagagatttagtgaagaatagtcttaatgtatttaaagctttaatggcacttattaagaaggtcctcaggaaatggtataattataccaaggtcattctagattgacttattcacctaaatagacttgatcttgagccgttgtagatttctcatgggtgatccttcactgctta

SEQ ID NO: 371440 - DNA, 554 bp, Homo Sapiens
  misc_feature (94)..(185): n is a, c, g, or t
gtgtggaagtttggaaaattcacagactagtcatgtggcagagaaggaaaaagcactttgaggagaggtatacaagcaggctgcaggaatacannnnnnnnnnnnnnnnnnnnnnnnnnnnnnnnnnnnnnnnnnnnnnnnnnnnnnnnnnnnnnnnnnnnnnnnnnnnnnnnnnnnnnnnnnnnagctattcaccttacattgctgtccaaaatgttttcatttgaggcaacctgggatagtaaaagtacttctaattaaacactcctgccattagtatctagctgtgtagccataaataagttatttgatatttcttgagtctcaattaatacctactattagcagagattttgtgaagaatagtcttaatgtatctaaagctttaatggcacttatttagaaggtcctcaggaaatggtattattattccaaggtctttctagattgccttattcacctaaagagacttgatcttgagcctttgtagattttctcattggtgattccttcactgcttagaatgtcatgattccccagacaggtactctcat

SEQ ID NO: 371441 - DNA, 390 bp, Homo Sapiens
  misc_feature (118)..(126): n is a, c, g, or t
cgaatgcatttaaagatgtggcttgcatatgtaaagagatgcgtatcgaaatagatttggtataatttaggtctggcaatgaatatttacaatattaaaacaaatcaagtgggcttannnnnnnnnccttgacaggacataaaaggttttacatatttttatctattttttactagttccatttactaaggccaactttcagttttaccagtcagctgctatcagtgtctttagataatatttttctgataacagattgaaaaaactatcgagcttcttaaccctcaattaaatagcttactccaattggtgggaactggccaggctctggtccaactgttgggtacattcctacaaaactcagtcatcagattcttgaagatgaaaggt

SEQ ID NO: 371442 - DNA, 520 bp, Homo Sapiens
aagggtggatcttaataactaaactaaactaaagtaaagaccgttagtgagtgcgtcgttatatgagcacagagatcgaatgaattaggtgcttttgctatcttcatacaaatcaggaggaatcaaacacctaaaacatgggggcaacctgaccaaagtcacacagcaagtggctgagaacaaggacgaaatcatggtcctttcccttaaacataacacacactaacttggaaagggaaatcggaaaagatgtgcattgaaatagggaaatcttttcgctccctcctcacttcgttcacttagaagcagttaaaaggacagaccatgaagtcagacatctgggcttgaaagcgatctcagaaaattggggtaaggcactttaaactcgctaatggctaattaatgaaatggcaggctagcagtccctatattatagtgttaaaatgactaaatgagataatgccatctgacgctcccctccacctcaccaccctattctctggaaaccacatgcatcact

SEQ ID NO: 371443 - DNA, 701 bp, Homo Sapiens
  misc_feature (213)..(213): n is a, c, g, or t
cttttccacagggaatgcgagaggccatgtaaggtgacgtatgaaagaaacttcaaaaagctgtttttgtcttcagatagctcccaaatgcagtcccttcactgtcaaccttggatactctaatgcattaaagagacttaaagtaatgacaaacaaaaattgagaaacaagcattggtgatatgtaggatacggatctagaatctgaacccangattccagcatcatgcttcagtctattcaactgtgaactgttgaacactcttccaataatgaaggcacacatacattacagagctacattagatgaaacactattaccaaaaacttcctcttctccttccactgggcagtgtatttgcatcacaactctggagttctgtgtgtctctcacattccactctatggtttagacataaattcattagactctttgggtaaccctttccctgtattctcatataaatcactaccttattctttcagaattttcagttcataaaacacattgcgggactgttctgacaggccatgatatacaaactcttccttacagtacaagatactaaataatgcatctaagcaataacagatttttttctaatcaacactgattcagataaaagtcacctgtgcatattaaacctactatgtggaagtttgatgaaaaatagaatactgtatgagttccaaattaattat

SEQ ID NO: 371444 - DNA, 397 bp, Homo Sapiens
tcctgatgcatgtagagcacttagcacagaattaggttctgtataagtaattagttctaacaattgcaaaggaatgatgtgagatacagatttggtgggccatctcttgaacacttcactgttaaagtggagaaattaagacagcacaggaacaattcccagacttacacttgagcattgtttatgtgtaaaggacattcttttgtcctgagtgtatcacagactcaattgactatctctacgctaagttttctgtaaaaggatatcagagaaaagttgaagtcttgtacttggtggaaccagtcaaaaacctgatgtttttaatgttatagaggctacaataatctctatcaacaaaactgaattggcagtgactcgttctaagcattgatcgagg

SEQ ID NO: 371445 - DNA, 294 bp, Homo Sapiens
actgatgcatgtgagtttctcatatcagctatatcacctggctacgacacttcttcaaataaaattcctttcctcttggctaattctctttacagataataccaatcacttcctgttactaaatcacttattcaagcacacagacaaattcacaacctaatcacccaacttaattaggcagaattttacttcattttcaattaagtatccattctcatgtgcttgacacagaaatgaatatagcttagcacagggaagccggtcatttatcataacgggagatctcaatgagcg

SEQ ID NO: 371446 - DNA, 397 bp, Homo Sapiens
caggacgtgtcaggtggacactcgaggaactatatataagggagtatgtgtttgctctcccctcatctttccatgactaccttctttcctaatataagaggtggtccgtaaagttactggaaggcggcatctcatcactgtcattgtttgcagtgctttctacaagaattttaatatctgggccaagagtgtttcactcaggattcaccacaaggaaaccttaaggtgtgaagaaggtttcatgtacctgagagtcctctagaaactgagatgaggagaatggggatcacccattctgtttcacatttagttatctgggcaccaaagcagtttgttgatatggcaccaatatcactcaaaatccctcacaaaaacatgttacacccctacatgcata

SEQ ID NO: 371447 - DNA, 264 bp, Homo Sapiens
cgtgtctggggtgggtgaatcgtggtaccatttactgcgacaggaaatggaaaggagcaggatttcaggagtagatgagtgggaaaatatgaggcctgttgcacacatgtcattacttctaatgacaatttatacatcacactcccataatgaatgtataatgtttaagtctacatcaaaaaagatctaaagggtgtcggcagataggtacctcccaagaatgtataccagatgtgaaaataatgtttccctacatgcatcact

SEQ ID NO: 371448 - DNA, 516 bp, Homo Sapiens
cctgcacagagtaagtgcaccataaatggtagctgctgttcattattgaacccaggtcttctgactccaagcccagcgctgtttcctactattatctttccaaagtatacctctgataggtgctgagcaaccttcagttgctccctattgccttcctgttaagtctaggcttcttagcctgacattcaaagatctttctgattctggcccaacttaccatggtagccatacctcctgtgagtctcctttaccctatccaccctgggttctatggtcaaactgaatattgcactggtaaatacctgtggttgtctccctttccttttctctgtcatttcctgaccctgagccacttccctcataatcatggaagcctttagcgcctgattcccttcttgctttcttgagcaatatctgtttcatttggatgactcatctgacactctacagctcctcaactccagtgactttcattctccattacactcagcaacccatttccatcattcggagcta

SEQ ID NO: 371449 - DNA, 229 bp, Homo Sapiens
atgtgagccaggtagcttcataatgcatactgatgtcaatattcagacaatgcagtaaagtgttaccaaaaataaaagtaaacttatttgcatatgtattctttcaatctttattaaaaaacagggtaaaactatgcatattctttcatagccagtgtttttctcttcttagtagagacagggtttcactgtgtaggccaggatggtcttgatctcctgacctcatgat

SEQ ID NO: 371450 - DNA, 191 bp, Homo Sapiens
agtgatgcatgtggagatagagattcctgtatgtgtgtgactatagactttgatttgcaaatttccttctataaaatatcaaggttaagaagacaggttattggtttgaatcaaagaaacaaatgattaggcatttgtgatttgtttcctctgttgcagctaatttgataatcactacttcttccatcagg

SEQ ID NO: 371451 - DNA, 237 bp, Homo Sapiens
cgagtgatgcatgtaactactatataaaaacaggtactatcagtagtctcacttaacataggacagaaaatatctctgtcacgataatacttagcaattgcgaagaggaactagaattcagatccaggcagtctagctctgtaagtcccatttttaacacctccagcatctactgcctgaactcaacttgctttggtgtggatgatgcaggttcgtggcctgcacaagctgatcact

SEQ ID NO: 371452 - DNA, 430 bp, Homo Sapiens
gcaatgatgcatgtagactggttctgggtattgcaaatgtatcgtggaccggaagtggagtggctagtcaagtttttctttattagctaaaggacaggaatagacaggaaataatacaattaatggagaagagtgaagcatgtaagtagggaaagacaaaaatgtggtctcagcttctggaaacacagtcttctctgtagaaatctagatgactgtaggttgagacttttaagtttactacagggtctctaagagtcagttattagaagttaacattgactgggtgccattaaatatctcatctcatctgatgtttatagctgtccgatcatgtagccattataaatggcagcgagtggaagcagcttgtccccggtgctctatgtgagtgagggcctggggttgtctgattcctgagatgacacaccaa

SEQ ID NO: 371453 - DNA, 303 bp, Homo Sapiens
cgagctcggtacccagtgatgcatgtagagagatgctgttttcctgttcataatcagtaaccacagaaccacctgaaaactgcccaggaatgtctgattttatcacatctaaataagggattagatgtgaaactttagcagagagaaactgcaggccacatttgcaagtgttttgagacatgaatgtaactgtaaatgttaagggtctattaaaaagtcaacgaatcaattagagataaaattgtttcattaagataaattcttatatgatggattgcgaaccgaccacatgcatcactcggg

SEQ ID NO: 371454 - DNA, 550 bp, Homo Sapiens
  misc_feature (58)..(96): n is a, c, g, or t
gatgtgcagtgtaaatccagcacaaagtcgtcacttactaaagaacgtatgagatttnnnnnnnnnnnnnnnnnnnnnnnnnnnnnnnnnnnnnnntttttagctcatcagttatcgtgagtgtattttatgtgtggcccaagacaattctttttctaccaatgtggcccagggaagccaagagattggacacccctgctttagaaagtggcagatttaagaaaaaccctcagcatttattgctcctcaggaaagcatggtaatgtcttctcagggtggctagatgtgggaaaacaattatgtgtcaactagcaatagaaagtccccatggttcagcagaacggtaccccctatactccttaggattatgatcaattaccctttatggagtgattttccaggagtcagtgaaggcctagtgatagtatagatgtcactagcctcccttaccattccccatgctcacaaagctacaaaaggaattaggagtatcctttaagcttgggcaggtgattagctgaaagattcaatggagacaggcagtctctct

SEQ ID NO: 371455 - DNA, 353 bp, Homo Sapiens
agcatgtaggctgtatttcattcataaggatatcatgaaaaatttgattcatacattaaccaagatatgcattgtaggacctattttatataaattaaaaataacaaaaagcttagtgaaactctatactttcaaatttttgtaaaacaaataacaagtaaataaaaaattgataacctatcttattttccaagtgatttatagcagtacagaaaaactatggatttagaaaatgttggtaatcaagattttactaataaagatttataaggtatacacaggcaaaacaaattaccatatgcatacatactacatgcatgaagctttctttgtggatgctgcaattacattat

SEQ ID NO: 371456 - DNA, 410 bp, Homo Sapiens
tgcatgtagctcaacaatagcattaacagtataatcagtgttaactgcaaacagcaaggatgtatttgcccagatcctgtataagcacaggcttgatattttacatgctccttagagtctgtctagtcgggcctttacatcttactcttatataaggtaagtgctgatcttgtaaatcatcttactcatatataaggtaaatgttaatcttgtaatccttccttgtaactcaaggaaggaaagcatacctctagaagcacataaaaggacttgctattggtttactctgtaaaccaggaacctgacatagttgctgcttactgagtaaccacagcagtacaacaaatgaaaggaaataaatctagttttgattttcaaaatgcaggcctattccagccacacccatcact

SEQ ID NO: 371457 - DNA, 462 bp, Homo Sapiens
atgagaatgtccctggatgatgatgtgtcaacaaaagttgggaataactgtggtaacaggaaatattacactacaactgttctctagaaatctccaccatccccatccttcctcagcaaatgaaggtgggtgctttggatcctttctctgttcttagaaaggggaatggatgcttcgtatagagagctatgattcagacgcccatcagagtgccaagctccatgctgacaggcacatttggctacattcaacaaccctatatgagatacataaacggcacatgccattttcttctcctttgaaacgagtctccaacgcaaaggctttcacttttcattctctattttaactttaaataccaatgaaccccctggtgaaacctctcctctacaaacattcactcagacagtgatcacgccaaccgcaccacatctaaaaattacaaaggagaactttgtacca

SEQ ID NO: 371458 - DNA, 178 bp, Homo Sapiens
ctagaggatcccaaataaaatgtgaggactgaaactgcagtggtttctatttaccctgtggagagtgccacatctatcacagccactatttgctacacaattatttcagagcttgagtcccggtttaaaaatgatttgccatgaaagcgaataggagaaaaacaattcctttcagagg

SEQ ID NO: 371459 - DNA, 261 bp, Homo Sapiens
agtgtaagagtgtgcatgtagtctgaccctactcaaaacccaagagaagctaagtaattaaaaggtacgactcccaacaagtgtccacttgactagtacctctagtcctaatcttacagatttgagtggaataagaaactgatggaacagacatctttctgctaagagactcactgaacaaggtagagcaggctgagctctcacaaaaccttgctgctaaaggttaaagctgcagaagctacatgcatcactggtaccgcc

SEQ ID NO: 371460 - DNA, 341 bp, Homo Sapiens
gcgaatgtggtgatctgccttccatgcagaaatgcagagataagtggaccgaatgaggattgctgcatatttatactaatgtctgtgtttaaagcttatgagacagggaatcgctgagagatgtccattagcaatatatacagactgcaattatttctttatggtgtgtggtttgactgcagaatactttatttcaatagaagtagtgggcttggcctactgtgttttcttatgtgcccaaataaatcaataagaacagtaaagaagtgaaaagaggcaagaataaaaggactgtgaccttttaggattctgagagccttgaatacgctacatgcatcact

SEQ ID NO: 371461 - DNA, 654 bp, Homo Sapiens
aggatgacagaactgagaggtccaggttcctctgaagactgcaatgtcgcgctagaaaatacaaggactggtggaaagtctatagcagccctaaacacctcccccactaggagcctagcatctcagccacctagctgcttcatcctgacagaaggctggaggctcaatctcgaagctgcaccacacaccaggccgcatgacgagcagtcgaaatatgaaagtgggagaaggcacctagaaacagagggattacataccagctctgcatcctgaaagaaagtaaatcttcaaattcatttccttcatttcctactcctcaattccatatttagtctgctgttttctgttaactcattttaaaaagctcttctacctaagcactttcttttttcgccacctttatctccagaaggaacttcaacttcagcaaggtatgcagccattaaattgttcctcaattatcatccttatatatcatattcttcatgctgcagttacaactactccaaatcaaatcaatgcactttccttgcagtctccctcttgacaggcgacttacagtcacacaggccactctggctgctgcaataaacatactattctcttcctttggctcagaccttcagtcgctgctctctcctctttcttctcatc

SEQ ID NO: 371462 - DNA, 311 bp, Homo Sapiens
agtgatagcatgtagtaaattccttcaggtatactttatacctttttccattatgattaatacatatgatctacacatgtacatagtagatataattttttcttttataaagatcaaatgttttgtcctgtcttgtaattaatataaacatcctttttaattatatgttttatctgaggtactctcagattcacatctgaaatggagttcccagacccagtaaactagcaatctaatttcaggattcatgaggtgaggttgcaacgggaaaacctccccgtgccccttcatcctattgttgcactttggtc

SEQ ID NO: 371463 - DNA, 155 bp, Homo Sapiens
gcagatgaaggtagtcggcctagacaggtttcgaatgctcttatacttcctttgtggagcgtaagtaagtaattcctatagtattgagatcatgtacatatttgtcactcagtcacagcacacacaactcagcaacttaaccacactcatcatct

SEQ ID NO: 371464 - DNA, 370 bp, Homo Sapiens
aatgctattgaaggaaacccggtaggagaaatatccacaattcagttaagatcaaacatgttacaattttctgggaagtgccaagttttacaacacctaaactatatcctcttcctctctgaaaccccaaacatcccaaagtctccttcaagccagacatcctcgtggtctactgtgcatggtgtctgcacggtcctcaagtttgcctcagggaaagtgcctgttgccatcagaaagaaagaatgcagcaggtactgatttatctcaggcaaaggagctcttgtggtgggtttcaacaagatatgaaaattgtaggttcttgaacactccttttcatcttccttacatggtcttgtacactcgatcatac

SEQ ID NO: 371465 - DNA, 377 bp, Homo Sapiens
atgtttggataatgaaaagtaacagaaattggtaattaaagctgggtgggccctgatgaaggaagagacagacagatcaatgagccagaacagaatccggaaggaaattcaattacatcataaatgagtaactgccctgattcaatgaaggggttgcacacagaaaactttttattttccctcaacattaatatataaaatgaaaataagtgggtgcagtttctagtaactacccagagagctagggggaagcagcagaaagcatgcagggcaaagactgttccttaggcttgagttcacagccaggtgtttcactaatagctgtgttaccttcagcaatttatataatcactttgaaacttacttaaaaatattta

SEQ ID NO: 371466 - DNA, 324 bp, Homo Sapiens
tccacaagcaaacctcaagatgcctcttgtctgccagcgttgaaagtttccgatattgaacccaccatacctgtcacggagttggacgtggtcctgacaggtcactgtgaacgctacgcttttcccagctggagatatccctgttcagtactgcgcccagcccaccaatggcatggtgtatttccgggccttctccagcctgaacacactccccgaggagctgaggccctatgtgcccctcttctgcagcgtcctcaccaagtacgagtcgcaacatacccttgtgtgtcttattaatgtctgctttgtgtgcatatctgtatt

SEQ ID NO: 371467 - DNA, 480 bp, Homo Sapiens
tatctggatctgcagtttactccagttatcctcgttcatctgtggaacctatagtctactgaactgtgtgcttataacaattgctcgtggacaacctggctgatgctgtgagcctcgcaatctgcccaaaaggaggaggaagaggataaggagagaaagaagctggccaggactgccagcccagagaagaaacaagagttggtggagaagccggcagtgggggaatccaaggaggagaagattgagctgaaatccatcacggctgacggagagtctccacccgccaccaagatcaacatggatgacctccagcccaatgaaaatgaggatcagagcccctaccccaacccagaaactacaggagaagaggatgaggaggagccagagatgcctgtcggccctcgaccaagaccactctctgagcttcaccttaaggaaaaggcagtgcccatgccagaagccagcgcgtttttcatcttc

SEQ ID NO: 371468 - DNA, 488 bp, Homo Sapiens
gcgtatgaccagctactctcacagtgacaaatttttttaagcaggaaggagaccgcttaagtgatgaagatctctacaaattccttgctgatatgagaaggccatcttctgtcttacggcgactaagacctattacagctcagctcaagatagacatttctcccgcacctgaaaatccccattattgcctaactccggagctgcttcaagtgaagctttaccctgacagtagagttagacctaccagagaaatcttagagtttcccgcaagatggtttatgttccaaacactacttacagaaatcttctctacatataccctcagagtcttaattttgccaatcgtcaaggttctgctaggaaatataacagtgaaagtccagtttatgtatgggagagggatccaaggcaatgccatgccgaggccccagctggcacccttcctattacccgacagttaggacctttccctctttggggggctaccc

SEQ ID NO: 371469 - DNA, 164 bp, Homo Sapiens
cgtcagaggatcccagtgatgcatgtaggagtgagcactcatgacgtcagctgtctgatctgtgacagatttttctgagttacaactagaattgaccttatatcttcgctcttaagagacaggtataggtaaatgcttctagggacttaagttgcagcatcttt

SEQ ID NO: 371470 - DNA, 332 bp, Homo Sapiens
tagttatgaaataatttagctattcttatcacacgcagtcattaagatctacacacaggcaaagtcagtctgtagtaagacctgaattgctcagccatgtcactaggcaagctacaatagaaacagaccaggctacacatgtcacagggagccttagtaacactggattctgtaaaagttcttctgaggaattgtgaaaactcatctcatcttttcttgagatatagattaaataaacttgtcgaaatgtagtaactccaactgagtctcgtgtgagttttcatgtaaaccaaatataactatacttcaaacaaaaagtgctacatgcatca

SEQ ID NO: 371471 - DNA, 414 bp, Homo Sapiens
tcgcagtcttcacagatttcgtgagaagtacttgctcctcttggtcacgaacctcagagttgagtacccaaagaacactgattgagctgacttgtattatccaacgactaatcatcttcctctgattcaatccactcttcacaggttccaagtgtttcttcctcacagagttgctttctgtatatactcctattgcacttgcctttaattctttgttcatttctttacttagggttcctttactagaacattcagaaacagagtcccctgaactataatcccctaactgacagctctcaagaaacatcacaacctctgatgtggaaagtctatccagctcagaaaaagtacttatgttaaaatcttgcagagctgacgtcaaataacctacctctaaggaaggtctcacctcgg

SEQ ID NO: 371472 - DNA, 170 bp, Homo Sapiens
aactcaaggaggctctgttaagaagcagaatgcatgtcttttagtgaaagacttgccaggacagggctgcaatgacagcaaatcaactctaaccattccattgtctttgcttcactcaatctagatttaagatcttggtcagaagcatctaatataccagcgggatcctc

SEQ ID NO: 371473 - DNA, 296 bp, Homo Sapiens
tgatgcatgtggcatgtagacacaaagaatagaggcaagtcctagggtgtctacggtataacccttgttttgaggaagaagaaagatatgatgaatagccatttggtatttatacagctgttctaaaaaactaaactgtaattactgaaatgaggcttttcatctctgaactttagtaagccaagttgtgtctagccatgagttcagctctccccttattctcaactctcagatgccccttactggattgctattctggaggaacaagcccctgaggatccagagttgctctagat

SEQ ID NO: 371474 - DNA, 397 bp, Homo Sapiens
atgtgatgcatgtggtaagtgttatggaaggggtatgagtgaagcactgggggacaatagacaaaggcaactagtaatgctgcagtgggaagataaggtcagtttatcctaatgatcagtgcatataattcaataagtagaacaaatacactaccttaaggcaatgctgcttaattcaggactcttaacagggacacaaaatacagaaggtatagaaattcagacaacatatatttcatccaacatttttctcttaatccaattacgtttgacaagttactgacctgcttggatgggttctcaagaaaaggcctctttacgatggatgttactctattacaaaccatgtgccagtctattttatcataaaacatattttctctctacatgcatcact

SEQ ID NO: 371475 - DNA, 624 bp, Homo Sapiens
cgccagaggatcccgtgatgctgtagatatataggatagggaaaaatcaagttttttactacttcgtctacaaaataactacaatgatatcgacccaaatgaaagcagcaaaatcataagtgaaagcaacaaagccacactgcatgagatccagcaggggagggactgtgtatgggtatagcagcagtaaattaccttgatttatcaactaaaggaccaagattaatccaccatcacgtttaacttaggagcacaagaggtggtgttctgtgtttgaagtgttgtggagttagatcaggcaacatttgaaattgacactggaaggatattgagagatgagcccacatctcagaaatcgagatgtctgtaagtaggtgtgatagaacaagtggaataataccacatattctgtgatttagaatacagcagagagaatcaccgtggtgttgcaaaactatagattctcaactgctagcaaacttgatcataggcaaatacattgcacttgaagactgggttctcatttgttagattcataacctaatccttgcagtgggaggtgctcctgaatttccaagcacaaaggaagagccgtagacccttttgttagtgacagtgaaaaga

SEQ ID NO: 371476 - DNA, 239 bp, Homo Sapiens
agtgatgcatgtagtaggaaaatggaattggaacttacaatggttggaaatatttggggtttactttgaattttaagtgttaagatatgtcttcctactggttatttagtagagaaagcacttcaggctattacacatatcatgacagcagaaccagttagcattggcagccagtcttaaacatttaacacttcttgagagtcttgtaagagagcatacccctcaggtcctatgtttat

SEQ ID NO: 371477 - DNA, 248 bp, Homo Sapiens
gtggatgtgcatttgatgatatttgtataagaaacagtattaaataaaaactctgtagttgctgttagtataagtgagcaattagcataagtcctcactagaatcaagcttgtttacagtaaaattcacaaagaaattactatcctaataatctattatacttcaaacaactcagaatttctatcaagccctttccagttgcttttacttaagttgctacatgcatcactgggatcctctagatcacc

SEQ ID NO: 371478 - DNA, 408 bp, Homo Sapiens
atcccttagatgcatgtggggcttaggggtagattaagagagatgaaggtgtaggctaaaacatagccaagccatgtcttggagatgtactggtgctgtgaagagaacactaaactgacaaacaggcgacatggccttcagcatgtcacctaggctctttgtacctcaaatttttccgctttaaaattaaagagttgtacaaattaacctctaagttcctcctacctataaagttctatgaccttaagaaaacaaaagggcttttcagttgcccacagagtctgaaaaatcaacatgctttattttgcaaaggttatcgataacacgtagtcttacagcatctaaagaagctactttttaagatacaaaaaatctgtcataacagggaagctgtccacaggaggtcta

SEQ ID NO: 371479 - DNA, 285 bp, Homo Sapiens
tcactgagccagagtccagggtcacacagacagcaatcttgccttagaactaaggggtggagaccacggaaagatggaaaccagcagagctgactgtgaagacaggactggtcacctgagaattgctggatccatgactttaggactaagcatgctaaaaaccaagtttggggccataacagacatgactccctttctccactaagcttagagaggccacagaatctctcagaagcactgcaaatcagcaaatgtctacatgcatcatctcgggatcctctagat

SEQ ID NO: 371480 - DNA, 1315 bp, Homo Sapiens
ttacccagtgaattcgactcgggtactggagtgatccgtcatagaagtgacaggctccagcttaactgatatttggaggtcatgcactggtgctcactgtgtcgacggaacgttgtacatgtggaggcatgcaccgcagtgggtgaatacacgtcgaccaggctccagcttaacgatatttggaggtcagcacggtgctcacgtgtcgacggaacttgtacagggaggcatgcaccgcagtggtgaatacacgtcgaccaggctccagcttaacgatatttggaggtcagcacggtgctcacgtgtcgacggaacttgtacagggaggcatgcaccgcagtggtgaatacacgtcgaccaggctccagcttaacgatatttggaggtcagcacggtgctcacgtgtcgacggaacttgtacagggaggcatgcaccgcagtggtgaatacacgtcgaccaggctccagcttaacgatatttggaggtcagcacggtgctcacgtgtcgacggaacttgtacagggaggcatgcaccgcagtggtgaatacacgtcgaccaggctccagcttaacgatatttggaggtcagcacggtgctcacgtgtcgacggaacttgtacagggaggcatgcaccgcagtggtgaatacacgtcgaccaggctccagcttaacgatatttggaggtcagcacggtgctcacgtgtcgacggaacttgtccagggaggcatgcaccgcagtggtgaatacacgtcgaccaggctccagcttaacgatatttggaggtcagcacggtgctcacgtgtcgacggaacttgtccagggaggcatgcaccgcagtggtgaatacacgtcgaccaggctccagcttaacgatatttggaggtcagcacggtgctcacgtgtcgacggaacttgtacagggaggcatgcaccgcagtggtgaatacacgtcgaccaggctccagcttaacgatatttggaggtcagcacggtgctcacgtgtcgacggaacttgtccagggaggcatgcaccgcagtggtgaatacacgtcgaccaggctccagcttaacgatatttggaggtcagcacggtgctcacgtgtcgacggaacttgtacagggaggcatgcaccgcagtggtgaatacacgtcgaccaggctccagcttaacgatatttggaggtcagcacggtgctcacgtgtcgacggaacttgtacagggaggcatgcaccgcagtggtgaatacacgtcgacctgcaggcatgcatgcatgcttgggtcatgtcgggatcctctagatgactagcctac

SEQ ID NO: 371481 - DNA, 472 bp, Homo Sapiens
tccagtacccgagcatgcttgactggttgcaggtcgacgtgtattcacctactgcggtgcatgcctccctggacaagttccgtcgacacgtgagcaaccgtgctgagctccaaatatcgttaagctggagcctggtcgacgtgtattcaccactgcggtgcatgcctccctgtacaagttccgtcgacacgtgagcaccgtgctgacctccaaatatcgttaagctggagcctggtcgacgtgtatacaccactgcggtgcattgcctccctggacaagttccgtcgacacgtgagcaccgtgctgacctccaaatatcgttaagctggagcctggtcggacgtgtattcaccactgcggtgcatgcctcccgtgtaccaagttccgtccgaacacgtgagcaccgtgctgacctccaaatatcgttaagctggagctgtcgactctagacgaatcaggttttcccacgtca

SEQ ID NO: 371482 - DNA, 235 bp, Homo Sapiens
tccagtacccgagcatgcagtcatgtcctcacatgctcgacgtgtattcaccacggccgtgcacaccttcctagtacaagctccttgaatacatgagatccgcgctcaccacccaagcacgcatacatggagcctggtcgacgtgtattcaccactgcggtgcatgcctcccctgtactagttccgtcgacacgtgagcaccgtgctgacctccaaatatcgttaactggagcct

SEQ ID NO: 371483 - DNA, 534 bp, Homo Sapiens
agttaataactgatatcatgatcataaacggacgagtgagatgataccggaagcataattgtaacagtcacaatgcataggtaacaggatgaatagctctaggtcaaggctcctgcagagatgatcacttcacgtaaggcatgctcctcctgtacaaagattcaaaatgctaccaaacacatatccaatttatattcattttatgcatctgtcaacagcatgtatcagtaaagtgaggcaacttgagctggttcttagctgccaaagacagcaggtgaaaacacaagagcttcactcagtttacactgccctcttcatctgccatcacagtgtcagtaaccagttcagcaaagtgcactgataattagagggccacagataaggaaaaaagcagcagaagacaggagctagggatgtacaagtctatttatgaatattctcccaagcgtgacctaaagagcttgtgatatgacagtggaaggcctgtgagaccccaaagcctgaccactggagcacaccctctgggtttgatcg

SEQ ID NO: 371484 - DNA, 420 bp, Homo Sapiens
  misc_feature (353)..(375): n is a, c, g, or t
catacaaaaaagatgatagtataagaggaattgcttcatacaaatttgagtggagttgaaaagaccagtcaatgactggtatactactactaagtctagtaacaatttacaatggcttgtctcaaagaaataaagcatgtaaaatctatttctatttattttctttgtaagtagaaaaggaaacatcccatctcagtttgctgttggaatgtttgcttcaacccctcatctagtcttgtgcatgaccatagttctaagccctgtaaaaattaattactgagtctgtaggaaagctgatgggaatgtgtatcaatacagtggcaccagacttcgagcaacgtagttatcaccannnnnnnnnnnnnnnnnnnnnnnatataaaggttataatcaaacaaagagaaaccgacactcaaaatc

SEQ ID NO: 371485 - DNA, 716 bp, Homo Sapiens
tctagaggatctcagtactcgatcaaacctggaagctgaagaaaatggctgtgatacttgtgatatggaatggaactatcaggactgcttattatgcaaagtggggtgccaacatctaagttggccttcagcatacagagtctcttaattgtcacatttccctgttatggaacctgagttgaccttatttttccatgctaaggattgtttatccctcacttaagtcagatgaaagttgaagccacactatgcattgtgctgcctgtctatacccaaagcatacctccttgctaaaataattgattcagaaatttgcccgtaagagtcacaactttattttgtgcatgttagtatattaaccagagattccattcacagctggaaaattcagctgaagtgcctctagcttattgcatctgcctccacctggaaatgttgactagaagcagcctatatttttaacatacatctacctactttataatgctaggaaaaaagggcccaagaggaaggggcatggatgccactttgcatgctatggtttaactctaatcaatttgtttgccatccggtacagtagttacgatgcttggcaggctaaccttgtatatatatttggcctcggaacttatcaggataacatttcccactaggagctctattccctaaactctcagacaccatagatgccgaggaatctttctttcacaaacatt

SEQ ID NO: 371486 - DNA, 506 bp, Homo Sapiens
ggtatgaacagttatcttcagggcagtattgcacgtgtagcacttagtaaacatggagtagctaccatattaccatcacacaatcacttccctttccatctactcccaaaatgttttctatccaaaaagaattttatttttatcttcacatatttggaggcttgattgacatcctaagacacaattagagttaccttgtcgcgctgcaaatatagggatggttaactgcttaaccagaagttagttgacactggccagcctccaggaggtgctacaggaagctgaggcaaagagaagtaactaaagcagttaccaagaggactgtgaaagcacgatctcgtaccagctgtgtagtaatgataccttctcctccataagtggagccgccttaccagaaggtgtaatcaaaaaagagatggggtcaggcagggtgtctcacacccgtaatccatacactctaggagaccaaggcgggtggatcactagaaggtcaggagtaccagacc

SEQ ID NO: 371487 - DNA, 604 bp, Homo Sapiens
aagtgtatctgcatctcttaaaagaaggctatatcatactcatagcggtgtacctgctccataaaaaggattttaatattcaactttgttaactgtgatatcatgtcttaatggggatggtgccatcaaaatcattcattttgaaattttgtataaatggaaggatattaatatgaggttagggacattcagcctccatatatagaatctggaactgaggatgaactttgcaccattctatcaataagcaggtgataaatatcagctatttttgcttaaattactctgcacccagcttttgcctttcggtcgtattgcaatcaggagatatttattccagcttgtgatagtgtaggaatgggtagtaattttaagcacagtaccggctctttaggagcttacgattctgccattatttttcacttaaaaaattctttgagaccttcctattctttgcatctggggggttctgagaagctaaggaatttatgatattaactggcactttggaaggaaagggagccttggaatcttgcctatagaacctgttccatacacctgaagaatagcatttattctactaattatgcagcataccctataa

SEQ ID NO: 371488 - DNA, 569 bp, Homo Sapiens
  misc_feature (473)..(520): n is a, c, g, or t
aacatgtagaccatgggccatgcccagagtttggtgaagactagcaatttggtactgagcaaagtttctcatctacaaaagaagtgcactggctctttgtagctataaagttaactgaccttataaattagcccttttctgcttccctttagctatttgtgccaaaccttttggaggaagaagagtgaatgtgtctcatcatattctctcctagcagctggggtgtgaacatatggcaggtggcagccacacagccgcttctttactcagtgccaagtagctgggtgagcaaacatggcagctgaggttctcagcatttttcttccccctcccaaagatttcatttgataagatttacaataaccatataaataggtccttgattagtcagatttagtgaataaaattttatgccatgaaaatacaaaaatggctgattctattaatgcattgctattagaatctcctgggtnnnnnnnnnnnnnnnnnnnnnnnnnnnnnnnnnnnnnnnnnnnnnnnncgagacttcgtcacaaaacataattaaattaacttagctaatgtctcaa

SEQ ID NO: 371489 - DNA, 603 bp, Homo Sapiens
acatatgtatgggaaagttatagttgacacacaaaaaaatatcaaaaactagaggaagtaaactcctcttatcattagccactactaatccactttttgccctctaaggaggagcacagttacattctaacagagcccatgaataatgagcaaccaattggaacaattcatttgagaatttgtgacttcctagagtgttacaagtgtgaactggaaaaaaagaatgaatacgttcttgagactcagtgaatgattttcataagaatgcagtaaggtaaaaagtatgggctatgcaaaagcttcttaagcagataaccaacgtcagcacagtcccaggatacaaaatcgatgtacgaaaattgccagcattcctatacactctacaggcaagccaacagccaaatcatgaatgaacgcccattcacaatggccacaaaaagaagaaaatacctgggaagacagctaaccagggaggtgggggatctctataatgagatactataaaactctgctcaaagaaatcagagataagcaccaacaaatggagaacgttccatgctcatggataggaagagccaatatgattttaatgtcattttgctc

SEQ ID NO: 371490 - DNA, 669 bp, Homo Sapiens
gctcgatcaacccatatcccttccttgtaccccaggtaactattctatgtgtgataaaggtctaccaaaatatatgtaaagtacaggatgttacctatatacatgattttaatttacctaaaggacattgtgctacagatataattctgtttctgctttcaactaacgctgctttaaggaattgttcgtattgttaggtatctgcccacttcattgtttctaattgctgcattcacaaaatttcattatccattctgttttgttgcatctccaggtttcttctaatttcccactgtgtgagaatccagcattcataccaccacacaatacttacttatgtgccttaggatatatgcatgcacaatttcattaagtactgccaggaatattctaaaatatccgaccagtttatattctcaacactggttcagagcagttccagtttccccacctgttccccagtccttggtatccttcagttttctaattcttgctaacctaattggcataaagtagtgtttcattgtccttgttactaacagcttcgatcctaactctttacttccacctgtccacgagataggcgactgtggcatcagagactggaaccaggacacacaccgactgggattgctgaaataacttgctgatcgagctacgggtacgagc

SEQ ID NO: 371491 - DNA, 355 bp, Homo Sapiens
  misc_feature (274)..(284): n is a, c, g, or t
tatagctcgatcaactgactacctaaggctttagttaggtgtagctatacttccctgagacttctcagtgtgtacatggataggcttgtgatatccagtatgaaattcctggtctatacctcagctatcctccaacatgggggtagtggtggggcctatgttgggggtatttgtatgattcttatgtttctataagtctgtgttttgtttccttgcaaggggtaattgctagttgtcttccatccatattttcatctacaatcatacctaacannnnnnnnnnncgggtttcacatcctttcctaatttctagtgctagtgaagcatttctctttttctcttatgtttgatcgag

SEQ ID NO: 371492 - DNA, 305 bp, Homo Sapiens
gatagctcgatccaactacatcttccccactagttcaccagggagcagcaccacattagctggttctatggcggttattaataaaatgatgctaggcttcccctttggctactattatttgtatagaatttccttgataagactccagtgaaaaaagaggtgagtgctagaatttagataccagagttctagcctgaaccccttaccattatatcctctaacattttcttgtccatattaacaagttttatctattttgatgcacattccaattgggtttattacattctttaaatgtactttca

SEQ ID NO: 371493 - DNA, 589 bp, Homo Sapiens
gtattaaccaattgatgaacataaatagacacataattatcgtccaaactagattgtagtccgtcaggtgacactcttgggatcgcacattactatgggtacggatataatatatagtgacatgtatccacccttctgtctacctacaaacatagtcgcactgtcttaaaaatcctctagcactctgcctatatatccctccttaccctcaacccctgacaaccactgatctaataatgtctccatagttttgcctataaccagaatgtcatatagtaggaatcatatgattggcttctttcacttagaaatatgcatttcagttacctccatgtcctttcatgtattgatagctcatttctttacagtgctgaataatattccatagtctaggtgcgccataatctattctctcacctactgaagagatatgtgggttgcttccaagtccgggaaattatgaataaagctgctataaatatcagagtgcaggttacagaacagatatatgtaacgaactcattttgtacataccaaggaactggatggctgaatcatatggtcagagtatgtttaattatatcagaaa

SEQ ID NO: 371494 - DNA, 449 bp, Homo Sapiens
  misc_feature (414)..(414): n is a, c, g, or t
cttcctggcaacatgaaaacttcctgcttcaatgttgggaattcaaagtgcgatggaatgaatggttgggaggtggctggagatcatatccagagtggggctggaggttctgacaatgattacctgatcttaaacttgcatatcccaggatttaaaccaccaacatctatgactggagccacgggttctgaactaggaagaataacatttgtctttgagaccctctgttcagctgactgtgttttgtacttcatggtggatattaatagaaaaagtacaaatgtggtagaatcgtggggtggaaccaaagaaaaacaagcttacacccatatcatcttcaagaatgcaacttttacatttacatggggcattcccagagaactaattcagggtccaagataatagacggttccnccattgacatgtttgaaggatttattcctattcac

SEQ ID NO: 371495 - DNA, 222 bp, Homo Sapiens
agccacaacttaggaaaagttgtgtcagatttacaggccaggcagtcatgccttacggtagcaaatcatggtcgaaagatctcacccaagtgataaaccttaatttaagtaaatttctgatactcattagaaaatatgacatatggacaatttcttaaactcaaagtgcttctgaaaattattagtaaatataaattaattacagccatttaggtagtgggg

SEQ ID NO: 371496 - DNA, 406 bp, Homo Sapiens
cacctaaatggctgtatccttgaatccctccccttctctttcccatccaaatgatcaccaagtattggtaacactgcaccatcatgcactgagcacacagaccctatgctaaaacacccaatattcagcattttagaaacctgacatccttcccatcctgatggagcttagagtctggtgatgagctgtggttggtgctctgtaagaagaagttatacgtgcaatcttgaggtggggagtggaaggaagtgagttggacaggaagcaaggccagctctatgtgtttgcccaggaagaaaaagacatggatgaacttaggtgggtgccgagaggtgtggaggcactcagcctgttgttcttcattcccacccccactttcctgtttgaaagcatgatcagacatgag

SEQ ID NO: 371497 - DNA, 323 bp, Homo Sapiens
aaggtaagctggctcgggcttgaagcccagtctgaatagttcaccacgtggagaaaggagaaggaaggatagattatgttaagctgcggcaagagcagaggggccccatagagaggaggatggttgcaaacctatgattgcttttcatttctgattaacatgggacatgctgaaattgaataagtggccagtaaggaggcacatttagcatcatctctaataacagccttggcagatgaactcattaggtgtatgcatgcttgtgtccccccccaggaattccctttaatagagtattaattaaagtttgattgctgctcagg

SEQ ID NO: 371498 - DNA, 216 bp, Homo Sapiens
ttagccaccgtgcccggccacacctaggtgattttaaagttcttctagtagagacaggtctcactatgtcgggtcgccgtgtttgatgtcagttttccctgccagaatctacaatctccttgatcaccattatagtcccaacgaagagctcagtacctggtacaaagcacatttgatcaagtacttgctgaatagaagaaataaaaatgaagaggc

SEQ ID NO: 371499 - DNA, 320 bp, Homo Sapiens
  misc_feature (115)..(123): n is a, c, g, or t
tactggtatcgtgagtttaaaaatcagatgagaatggttcttaaaaaaaggagaaaatgactaagtggatctgtacaaatcaatatatgggaccttagcaaggaaagtataaaannnnnnnnnagtaagcagtttttcattagttagaaggaaacggaattctgaatttcaccttatatgtttggtcctcttatctttcctggacaaaacagtcctaaccgttttaacaaatctcaattaaagtaatctaataatgtagaattcaggacaacctaccatctgtgcatctacaatatcctgaaagtcttgctcagttaatg

SEQ ID NO: 371500 - DNA, 433 bp, Homo Sapiens
ttacaccaattccttgcttgcagtcgctcttttatgcagtagcagtttataagtaaaacatagtacactaggctactccatacattacaggcccccagtcaaaggccttcccgacagagcagtcctagtcattgctctctccccacaccacaagtaatggtaatctaatcagcctctagctttacttcagagctgttaactgctctctgtcatagtgctcctcgcctcaagtctgccttccttgctacaatgcaaaggacagtgaggtcaagggaatcattccctagagccaagcacccaggaggggcataatcaatatcttaataaaaatccatcgaattaaataattaatttaccaaagacaccataagtctgcaaagaggaatcccttgtggaatcccaggacccccagacctaaggggcacgaagatca

SEQ ID NO: 371501 - DNA, 168 bp, Homo Sapiens
tagaaaatagatataaccattatactatgtaattctggttctgagtgccaccgtgaccacctctcccagcctctggttggttatcttgtacaagggtggatgtggactcacttgatcactgatactatcccagcttctacaatggtagaccgactgtccgagctgacg

SEQ ID NO: 371502 - DNA, 444 bp, Homo Sapiens
tgaatcgagctcggcccagtctgttctaccatatcaacagtcatttggccactctcggttttctccccaacacattttttaaatctttatatgcccaggctgtgaattttccaaatctttacattctgcttctcttttaattataaattttatctttaagtcatttctctcctcttgcattttaatagaagcagttaagagaagcactacaactctttcaatattttgctgcttagtgttctctgagccaggtggatgcctctcttcctccatgcatcctttctccacctcccaggaatggccaggtgtccccactggctcctgggccaggaggcatccaaggttctgtgaagctgctgaaggagcctgtctttgtttgtgctgctatgatataaaatttattttctctcagttctggaggctgggaagttcaagatcaaggtg

SEQ ID NO: 371503 - DNA, 441 bp, Homo Sapiens
tcgagctcggtcccagtctgttctaccatgtgaagaaacatattttcagaaaaaggaataaagccagtatgcacagagtataagtacggaaaggtcccaactatgggaaagttcccaccctagctcttcatggccatccttattcatacaatgcctattatatggtcatatgaaccaataactttttcccctacaggctacttcaagctgtatttctgttacttgaacaccaaaaagtcctaactaataaaatagagaaaccaaattgataaaaattagacatcaaaggattttttcattcaggctataaaagggcctggtatgccttctctggcttagaaaactttcatctatcaaatataatgtccctttcctctctgtattagataaaccccaaaattactatttcattctctttcaatacactctatgcaaatcaca

SEQ ID NO: 371504 - DNA, 495 bp, Homo Sapiens
tccagtcggtctacatgtagttataatacaaggtaaagatgtgtgaaaggcacagtgagtaaaggagcgtgattttttttgtcgcatcagtatatttaatagtcatgtaaatgactaggaaaattaaggagattttccttgcaaggctcgaagaatgtgaacggcgtagatgaaaataatttagaaaacagagagctatgctgtttctaatgcaatttttataggctttgttcttaatacgcagtggtgatctgatgtaagtgcatcatttcctttggtggaggttgtcaatgcaattaggttacggaatctgctttatggactatctagcagcagatcacaagcacataacataaagtccttttacacatgaatattcaaaatactaggaaataccctcaaatctccaccccctcccccttcacaaatacacatccacttttgtggcttggcaaggagcatagcgtttttcatgatggtagaaccgactggtcc

SEQ ID NO: 371505 - DNA, 443 bp, Homo Sapiens
agatcgagctcggtaccagtcggttctaccatggacaggataaaaattttgccatgtgaagaacaaaattagtaagctaacacaaacacagaacaaaggatttttgcttgcctttattaatagagtgtactaatgaattaagttaattagtcacacgcaaggatatttaaatgagtagcatgaaggtacatttctttattatggcatcagctacagtctgtgttataattttggaagaaaaaaatcaagaaaaaacaatatgaaaattctattacttgaggtccagaaaaattcagaaaattgtttctgaataaaacaccagtgtatataaagctaatgagcagtaccacaaccaatgttcccacgaatagagaataacttttgataccttttgaaattatatcatatactagtttacattatttgacgtggactgtgttatt

SEQ ID NO: 371506 - DNA, 541 bp, Homo Sapiens
ttgcctgctgtcgctatgaggttgctacaactaaaagcttcacatgaccaagaatatctttgtaacataggggaccttgagcttcctgtagaaaggcaacagaatcaacacaaaattgttgatttggaagctacgatgaaaggaaatgggctcccacagaatgtggatcctccaagtgcgaagaaaagtattccatcttcagaatgcagtggctgctcaaattcagaaacatttatggaaatcgatacagctcaacagtccctagttactttgcttaattcaacaggcaggcagaatgccaatgtcaagaacattggtgcattggatctcactttagataatcccttgatggaagtagaaacatcaaaatgtaacccttcatctgaaatttagaatgattccatttccactcaggatttacagcccccagaaactaatgttgaaatacctggaacaaataaagaatatggacattactcctctccaagtctctgtggcagttgtcagccttctgtggagtcagcagaagattcttgcccgt

SEQ ID NO: 371507 - DNA, 592 bp, Homo Sapiens
tgcgtttgtcgctacaaaacaaaacaaaaccaaaaggtacgggactgggatgttaggggcatgatatcaaaggaagtaatcagcaactatggagcttggtgataaacacataggaaacagcaagtaggtcttagggtattctcattattaggtgatcaggaagtcagatattgtaaatggccagacaagattagtgttaaattctgaagaatgcaggcttactatctgctaatagaacaaacacacatctgtcaaatacaaggatgtctatctaagcaaatgggtgaacctgaaagcaataaagactacattttgtaacaattcaagacttggagatgggggaatgaatcattgctagtagtagactctttaattgtttttcttcaacccctcccccccaaatgaaagacacacactcatatatgcacacgtgccacatatgtgcatgcacacacaaacacacacagttttatccattaactgacagcttctgaagttaggtgctggggacatgaacaatgagccctcagagcagtaactataatacaatgaaagctccctagactgatactactgatgtgtgaatatagat

SEQ ID NO: 371508 - DNA, 675 bp, Homo Sapiens
tgcctgctgtcgctatggaagtcttccagaaaggattctaaatgcctgtcctgcctgtatgatgtattctggcctcatgggaagaggtggactctatttctccttcctctgaagctgggctgtccttgtgccctgctctgacctacacaaagggcagaagtcactctgcaccagttccaagccaaactcttaggaggactgggggtcctgcctctcccctcttggacgtggccgtggctgtagaaactcagacaacctggaggagctcaaggcatcacagaggcagcgtggggaccctgctcagcagcccctgtgaacactccagccccagcacacgccacggagcagaaccgtctggatgagcctagcgcagacgacagcatcgtgaggagtgatggaccatgctgacagaagccactgagctggcggtggctcctggctccaggatggtgtgaggtagtgacacatcctggtgatgatggggacagtttgatggcatctctctgtgagataagagcatgagcaggtgctgcacagccttgctgcagggccagggtgaggatagagcatgacccatggctggttatgcaagcaagagaaggaacggcacactgcctgcccgcccagcctccagtcccgctgtgtccagagcagacctgtcggctagtcggggga

SEQ ID NO: 371509 - DNA, 802 bp, Homo Sapiens
agtcggttctaccatggtacctggggaagccttcaggaaacttgtgaatctgaagtaagtggtacacagaaggtttcattcagtggtcaacctcaaaatattaccactgaaatgactggaccaaataacactactaactttatgacctctagtttaccaaactccggttcagtgcagaataatgagctgcctagtagtaacacaggggcctggcgtgtgagcacaatgaatcatcctcagatgcaggctccatcaggtatgaatggcacttccctttctcaccttagcaatggagagtcaaaaagtggaggctcttatggtactacatggggtgcctatggttctaattactctggagacaaatgttcaggccctaatggccaagctaatggtgacactgtgaatgcaactctaatgcagcctggcgtaaatggtcctatgggcactaactttcaagttaacacaaacaaaggaggtggtgtgtgggaatctggtgcagcaaactcccagagtacatcatggggaagtggaaatggcgcaaattctggaggaagtcgaagaggatggggaacccctgcacaaaacactggcactaatttacccagcgttgagtggaacaaactgcctagcaatcagcattccaatgatagtgcaaatggcaatggtaagacgtttacaaatggatggaaatctactgaggaagaggatcagggttctgccacatctcagacaaatgagcaaagcagtgtgtgggccaaaacaggaggtacagtggagagcgatggtagtactagtaagcact

SEQ ID NO: 371510 - DNA, 399 bp, Homo Sapiens
tgcatgttgtcgctactggctggaagctgctgttgttactgagcactccctggagagaaaggcccagtgtaatcctgctgataatgtgacacaccgccaaggccagagtgctgtgcttgaaaactggcccacatgaccctcactcccatactgattgccaaagctgctcccctgggggggtccatagctctgcacaggcccagaaggccttcgctgagaaggctgtggagttcctgtagtcacggggtctttgttgcctgccatgtagtaaaaatctccagcctctttcctgaaaccctggtaaccttgatggccagaggtctcgctagccatcgctgccgcagcagctgaagctcctcgtcgtacaccaccactgccactgccactgatgccactact

SEQ ID NO: 371511 - DNA, 344 bp, Homo Sapiens
tgcctgctgtcgctaatttatatgactttacatgtaccactcctgccaagagaaaggaagctttgtgattgtgacccgtcatagttaattgtacaaatcaattaaaaatggtatgtaagcatctggctcacacagcagctctgaattctgaatgaaaagataacccatgctaatgtatatgttgcatgaacaagtagatgggtgttggaaagaaaacactgatagtcactctgggtgaagggggaggcctggccaatggatttgtatgctgagaaacattttgagattatttatatgtcttctgactgccctttgcttgtatcgacacagcagggatcctctat

SEQ ID NO: 371512 - DNA, 638 bp, Homo Sapiens
tatgatgagagggagccccatgggcattctcataattacaattttaagaatacatgcaagagaatataggactccagtgacatttttagttctgattatatatagagtcactataggtccttattaaattaagaaccagagaagggtcatgcctgatacggaagtcttttctgtagttcacaacgagtctaatacacaggttcaagtatttctccttattactacggcacagttacacatcattctgtggctattatttctttttcttttaatatctgtgatcaggaaaagaaagaaacacttcagaaatgaaagattagtttcctaaatcataaagatgagctttgtaatcatcttcctttaagcaaggaattaagggataataaaagccctaactaaggaccttgttagccccactagattttcatatgccaaacacagttatgaagtgctgctacagaatgaatggagatgcctcctgtccacagcaaaccccaagggaagcattcttgccagggcttttcttttgcttcttctgtctttctgtccatgaggggtcactccgtttctgcatgagcaccaattctcttcacctggccatgattccttcttctcatttggtgcatcgataaacagcc

SEQ ID NO: 371513 - DNA, 976 bp, Homo Sapiens
  misc_feature (896)..(896): n is a, c, g, or t
tgcgctaccacagtaccttttgattatgctacactctgtttaaacctatgaccacctccctcactctatctttgcctacagagtaaataaaccccaagctccatagtctggccttcaggacttttcataatctagctctagctgacctttccaatgctgtacatagataaggacatattttggccaaactggactgcttaatttcctcaaacctgccctgagctttcctgcttctgaacatttgtaccatttaagccgaaattcatttcaggccatcaatgctcattgagtgatttctgtagaaaactataggatctagcaggttgaaaaagtctttctttaggtttttctaatataggaagctgaaaggaaatgggccacctcactgttcttctaccccacgactgttctctgtttatgtccctctagcactgcctacttaactctgctgtagcactcatcattttggctgggaactctgggtttattattgaactcccaggtctcagctcaatgcctggtacataacaggcattcacattcattaaatgttttttgttgaatatatccagtcagggaatagaaaggtgtatacatgaataaactacatgtcacatgagagatataagtgtagtcaataggattcactagtaagacacactgtatctagttcagggaattacaataaaactttacatttgtatagtgctttttactttgcaccacacttaaacatttttctttaatcctcacaaccatactctgaggtatgtattattatcactactttttagaatgggaaattgacactgtaggaggttaggtgaattaggtttcatagctggcaagtggtgtgcctaagatctggactttgatctgggactccccagagtagnagtagggacccagtggaaattatctgcataagaagtgaaaggtaaaactgtagaaaaggatgagatccccaaaggacaga

SEQ ID NO: 371514 - DNA, 456 bp, Homo Sapiens
tctccatttaacaattcctattcaagagtcaccaccaaaactggacagctgcctctacaagaccgtgtccagtagtggtgtcccagatagtttaagtgccactcctcattagaggctatacttcagtaatacttgccattttaagtctgtgctttaagagggacccacaggcatgtggcaccacgcagtctaaagttggtgaagcagactgcactttttgtttagtcacccacacgttctctagcgagatacagaattgcatttatactcttttcttctacatgaatgatccctctgatctcgcaagaggtgggggagaaagagagctgcatcggtacaagggcacaatttttttggtcaaaagttgacaccttttaaattccctctcccacccctccctggaaaaaagttacttccttaattaggttttcgatatagagctgtggcgctggggtg

SEQ ID NO: 371515 - DNA, 476 bp, Homo Sapiens
  misc_feature (398)..(398): n is a, c, g, or t
  misc_feature (409)..(409): n is a, c, g, or t
  misc_feature (455)..(455): n is a, c, g, or t
agtcggttctaccatttaagcagatcatctgccaaacattatattactaataaaacttaaccaacacttacaattcagtcatcaaagtaagtaaaaattagatgctacagctagctaactgtatccctagaaatgatgaataatttgccatttggacagttaacatccaggtgttacaaagtcagtgttaattctaaagatgatcatttctgccctttagaatggcttgtcccatcagcagatgaatgtgttaagcacaaagcatcttccttaaagcacaaagagagggactaactgatggctggcatctaggaaaacacctttaagttgcctttcctctttgtagttaggcgttcagggcagggtgacgtgttgggaaagtctagggggttccattnctgggccatcncgagcccagctccttacccaacgttcggtaaactttcgaggcagtnccctgttggctgggccaggag

SEQ ID NO: 371516 - DNA, 337 bp, Homo Sapiens
agtcggttctaccatagcaggtgagtgaaacaaatgaagaacagcgaatgttagttgccagtaagtgctctaaaagtttttttccccttaagttgtctctgttaaggctcaccatgataaacttctgtgataggaactcatggtaggagatggtaaacaagagatttgaaagcctcattcttgcttaacatgagcagggccactcctaacccttaggacatttttatgtgaattttaaatatgtgaatccccttctagatcaacgtagcccctatctgcccctccacagaatgaagttgatttttttgcccttgagtagtatacgcactttagcatg

SEQ ID NO: 371517 - DNA, 384 bp, Homo Sapiens
cacaacacactcacttcctcaagaccccaccttcaatacctgcttaaaatatgtaacatggattctcctatgtctatataagataaagacccaaatccttatcactgactgaaagcccttatgtggctacactatgcctagtctagccctatctgccctcaggtgggcctcatctgatcacatgctctcaggtattctctccactacagctgcatagatctttcgttcctggaatacaacatgcctcctgccaccaagggctgctgtcctttctgctataaaatattgtcattcctctcttcatctacttcaagtatattctactttcagatctcagttcaaatgccactttatcaggtaaaccacttttctggtcaggcgcag

SEQ ID NO: 371518 - DNA, 706 bp, Homo Sapiens
ggagccaccagccagtcctcagatttcagagactgcggaaggggcttggcagacggtcttagccaagggctgtggtggcattggctgagggtcttcgggtgcttcccagcacaagctgcccttgctgtcctgtgcagtgaagggagaggccctgggtgggggacactcagagtgggagcacatccccagcagtgcccatgtagcaggagcacagtggatggccttgtgtccctcgggcatgacaggcagaaacgagggctgctcccaggagaagggcctcctgctggccagagcaaggaaggctgagcagcttggttctcccctctggcccctggagagaagggggagcattcctagacccctgggtgcttgtctgcacagagctctggtctgtgccaccttggccaggctggctgtgggagggtctggtcccacgccgcctctgctcagaccactgtgtgggaggtgcacagcacagcctgcgggtaaagtgtgagagcttgccatccagctcacgaagacagagttattaaaccattcaaatctctgtggtcagtggcatccatttgattccaggttgcctgcggcttccagccttggcagtggtgaccctctgcgggtcctcctggcctctcctctcacagacccctccccacggggtgctagcgcctgcctgcttctctagctagccaggcgtgtgttctct

SEQ ID NO: 371519 - DNA, 378 bp, Homo Sapiens
ccagtcgtttctaccatctctggccttataaactcacagataagttatcgccagtgttgggaggtgccaacaaaactctatacaaagctaaaaactagattttaagacctctctttcattaatacctcattgcttttcaactggtcctaatagcctctttttcaggagagaaaagtaaagtgtgggggtatagcttggccaggatagattaatccagtttagagctcttaacacaagtttgcataccaagtttgcaaagtgttaatttcttaggaaaatgacatctcgccattaatagtttatgcatcaattgctaaccatgagcctatcccagtacattttatcactgggtaaaacaaagtcatggtagaaccgact

SEQ ID NO: 371520 - DNA, 638 bp, Homo Sapiens
agtcggttctaccatgcgatggcaggccattgctaaactttgctgtgttgtggcagtacagtttctgtcccttttatcttgttaactgtcagtactccaaacaagcgagtagaacaattgccatccgttcagcatgaagaaccccatggaagggatctagagggagatgtcacaccatagatgtactgagtgagatggtatcatggtggccattcctcaaaatatcagcactgccctccagaatccacccagatgacattgatcaagcatctactgtaagccagacacttggagaggtgctgggaatacagagatgagaaagacagggtatttgcttcttgggtggttcattccataatgatagcaacaacttatatagaacctgttctatgccaggcattgttttaaatgcttcatgtatgttagcttgtgtgatcttcagaacaaccccatgaggtgggaactattcttaccatccctgttttatagacagggaaactgaaacacagagaatctgggtaacttgccctagttacatagctagtgaggagcagaaccagaatccaaacctaagcagtcagctccagagttgggctccccactggcacattctgcttgtactctccttttctctgata

SEQ ID NO: 371521 - DNA, 337 bp, Homo Sapiens
ctaccatagataaggacttcatctgcagttgggttttagtttgctggttgaaaaggtggtggtgactctgtttcaattgggtgcagtggtatagtcttcatgaagatacttacatactttattcaatagtcagcacataactgtaagcatctcagtggcataggctgtacacatttgtgacagtggtggccagaaattcataatactcaaaaagagtactgcttaagtgcaaaaatattttgtgatcacctgatcttatcaaaataaaattcaaccactttaaaaactcagacgctaccacttacaggcatcaaaatcaaataatgtagtacttttt

SEQ ID NO: 371522 - DNA, 547 bp, Homo Sapiens
  misc_feature (12)..(12): n is a, c, g, or t
  misc_feature (30)..(30): n is a, c, g, or t
  misc_feature (41)..(41): n is a, c, g, or t
  misc_feature (69)..(69): n is a, c, g, or t
  misc_feature (79)..(79): n is a, c, g, or t
  misc_feature (96)..(96): n is a, c, g, or t
  misc_feature (111)..(111): n is a, c, g, or t
  misc_feature (132)..(132): n is a, c, g, or t
aagggggaaaantattcctgtgcaaaaggngcctaaaacgnagcgggaatggccattccttttatcggnacaaaacggnctttaggggcaacggcncttaaaaaggacaangggggacattataatatgatnaaaaagccttgtccaacgggaaaatatcataatccctaaatgtatatgcaccctaacactgaagctctgaaatttataaaacaattacctactagacctaagaaatgatatagacggcaacacagtaatagcgggggactttgatactccactgacagcactagacaggtcctcaagacagaaagtcaacaaagaaggaatgaacttaaactataccctacaacaaatggacttaacaggtatttacagagcattctacccaacaactgcagaatatacattctattcatcagcacatggaacattctctaagatggaccatatgataggccacaaaacaagtctcaggaaatttaaaaaaatcctaaatttggagtcttgcagtgaagccgagatcgggccactgacactccag

SEQ ID NO: 371523 - DNA, 721 bp, Homo Sapiens
tcggttctaccatccagtaagattgaaatggccgtcctatacatactggaatatgttctttaagttttctcatagtttttaaagggactatgaattttattccaacacattgtcttccacagcatggactctgaacacatcatacttcatcaacatatgaaaaagtgtattaattttatacaatttacttataggccaccttaataatcacttgaagacgttatgttgcccaaacataagtggctcctttggcaatttctatatttgtggaaatttggaaaggcatagtttcaacatgcaagaatgtaattatattgcttcatctaataatatctcacatatctgtctatcttcagattttagattttctttattaaaaaaaccatcatggtagctccatctcgtttgtaacttctccctctcaaatactcagaagaatgaagaggccaaattcagaaaatcatggcttcactgggaaatgttttaaatctacatgtagctaggatatgtgatttcatattttttaaaaatgtggtgtaaataagtgtaaaaaattaccacttgcaaagtggttttattacagcgttaaagaaaatgactagaattctgatagattgtgctgatgaacctggttgtgggcaattgaattcttgtcttcccactaccatttcatgctgtcgtctgaacactattcaacaccattaaatataaactctgatat

SEQ ID NO: 371524 - DNA, 371 bp, Homo Sapiens
acaggcgaacaactgtgtggatatggagagaccgctaatgtttacccatatcaattcacccttccttccttagaaacaaaaccaagattttattcaagggtccaaagcattaaccatgagaatacatttccctgtttccctgggtacagatatggtcaatgagagacaagtggataggtagtatcttctaggaagactccttaaaggcgaccgaaccaactcagcaatgtgctcccttcagcctccctgattccccttctgtttgaagatttagtgatcagtttgcaccatgaaatgacactgagaatgaaagtcccctgctgaggatggtagagcagaacgataaaggaatcccagttctctactgaccc

SEQ ID NO: 371525 - DNA, 518 bp, Homo Sapiens
tagaggatcccctcgcggtatcataaggattaaatgattagcaggtaaaagcaatccggaactgttaactatagctagtaagtcagaattcggtgagcatagaccataaaatatttcaggtctagaatagaacttagaagagctctgttaaaaatcattttgagatacttggttttctaaaggttgcaagcactacattccacagtgttacagaagtatgacaacctcaattatttagctccttcaagttatgaagaaaagttgtttggctagggatgtcggggtgagagaatttagaaaggagtacactggaagcttctgaggttctggcagtgttctctatcttaatttgtatagtagttttgtgaatgtatattttgcaacagtgtactaagctgtacatttctgtatgtttttccatatgtattgtacctctggttgtttagaagcatttctgatattggggtatgtgaaatctgtacagctaatgttgtattgtctgttgctcctctgatcac

SEQ ID NO: 371526 - DNA, 242 bp, Homo Sapiens
ccttcgtgaatcataagattacaatgcactatttgacgtgtatctttttaatgtttagatacatagtatgttactattgttttacacttgtcatagtattcgagtacaagtaacatactgtacaggcttgtaccgtatgagtatagacacatatatatacacatatatctcaaaccatcctttgctggcattaaactctccagctgtaagttcttcaccttgtcaagtgcagtgggagcact

SEQ ID NO: 371527 - DNA, 432 bp, Homo Sapiens
ccgaaaatagactgcagcaatgttacgggttgaattaactgcatagttcctttccctcacatttgtcagagagctcaggaattgacacagaatagtttggggtcgacataggcctgcactgagatctggaaagggaagacaggaggatgagaatggatgagggtgggagaagctgacagaaaggacaggcctgttaatgtggttgggaccttgaaagtggctgttttaaaaaattaccattctggcttgagtttgcacatcaataatttagtataatttttttctcaaactttaaatgcaatgatcagcttgccatggattaatccaaatttaccatatcggtttgccagaacaaaaggaaaacgagataaataaaacaagtacattacttccctttcaatatagtgataatcttacctaccagttatgaat

SEQ ID NO: 371528 - DNA, 204 bp, Homo Sapiens
cctctcggattacagattcattctcatagaagggcatcagaggaagataaagaaggatcctcaatgtcagacatctgagcccaagctaagccatcataatccctgtgacgtgcacatatacatgccccactccaactaatcaatcgaccttgtgacattcctctcctggacaatgaatttcatgatctcccctcccgatatcag

SEQ ID NO: 371529 - DNA, 426 bp, Homo Sapiens
actctagcacgatccccctgtttcccggggagacaggaatgaaaggtgtgctgccaggagaaggggtagagcaaggccaccaccgctgtgtggagcatgctggagagggtactgatcggcagacagagtagacagagtacctgagccctaggcccaggaacttagagctcgctggaggctcaggacagcctttgatcgtaaacctcccagtgcaactaaaaatgctaatgggtgttcagggaccctgcagactggtaaagtccccgctttcccactgcgtagcgcctcaaggacaacaatgctactctcttagggaaatgtacctgcaaacagccaggaaggtatgcagcaacccgcaggacagtcatctgacaaagatctggaaaagggctgtctcgggtttggggggcacatcagtgggcccgt

SEQ ID NO: 371530 - DNA, 401 bp, Homo Sapiens
ccccgccgtacagccagagtccatgctctattttctaaaggcaaaatcaggtctgttttcacaagtgacagtgaggccagaagattttgaaatcgcttgtgaaaatacgagaagacaaactttcccaattctgaaaattgaccttgtagaatagatatgcatctgtaatgcttgtgttttatgaatttaatttcaaaggaaatgtattctaatggtccaaaaaaccagaaggtatagaaagctatgaaatgaacacatctgtcctctttctgatacccacaccaccagtatcactgctgctctttttatatatccttccagtttctttttgcatatccaagtaaataaaatttggatttttaccaccatcatcctccccgggatacaggggtaccgagctc

SEQ ID NO: 371531 - DNA, 204 bp, Homo Sapiens
tatctaaattcatcagagaaacactggcaagctggcgtgggagaaatcttacaagaccattcaggttgatgccccatgttcctcaaaacccaggttatctctggggtcagacaaatacaatccttcctagccctgaagattttcctccaactggggcaaaagtcaaattagatccaaaagacagtcactctccccgggatacag

SEQ ID NO: 371532 - DNA, 562 bp, Homo Sapiens
cgctgcatacttcttttctgctgtggctttcctttctgttggactggttcccagagggtcctcttgtattagtccttgaccctcgcgtgtttatatctagttcagtgttttctcttctgtcatactatccttcccagcgctgtttctccaccccctcctgctgcactcacaacagcttcccctctcctgtttagaggttgaagcatgtaagaatgcgtttgaaggggatacttgcccaaaagacagcatattcaacatctggtatcaacaaggtaatgtttaacctttagactagccaaactagtgatgacctgcttccatgctgcatctgctgctttttgtgttgatgggactcagaaatcatgagaaaggtcttcagtgatccatgactgcaacaaattcttttcctaattgtgccgtatattatgcccctcaatacaacttactaatctctgcctcagtttctccatctgtgaaagtggtgtaatacttatctacctcccttgaatgttgtgaagattagtatatgttggtaaagcacttttaaaataaagaatgatat

SEQ ID NO: 371533 - DNA, 243 bp, Homo Sapiens
gaaggagtcaaccggcggatccgcaatgagaaatggcgagatataacaggagcggctggacaaggtgtggcccaagctgagtggtgctggccctggtcgtctcccaccgagcaatgcacacactggtcaaagggattatcgacagcaccactggtgagcagcggcaggtgtgtgtgctgtgacaggggatggcaccaacgatgggccggccctcaagaaggcggacgtgggcttcgccatggg

SEQ ID NO: 371534 - DNA, 760 bp, Homo Sapiens
  misc_feature (566)..(566): n is a, c, g, or t
ctgagactaaaggtgttatcttctggtgtgctcctggaagtgtctaccctacatttgtgtcagctcagggttgcagtgttgcccagatgcattttacatcactgtaaagagattacttttgtggttactacctggcttggctggccttgcggttcaccagattaatttacaaactcccccactttattttgtgctatgtagatctggccatacttgcattagtgactgtcttgccttaaccacacttaagcaacccacaaatttcttctcagatttgtttcctagattacttatgatactcatcccatgtctcaataagagtgtcttttctttctggatgtgttctcttactccctcttaccaccatactttttgctctcttctcctgcaagcgtagtcttcacagggagtggcttcctgacatttttttcagttatgtgaatgaatggaaaccaacagctgctgcaaacactgtttttccaagaaggctacactcagaacctaaccattgccaaccatttcagtattgataaaaagctgaatttactttagcattacttattttnttttccatttgatggttcttactttgtaaaaatttaaataaatgaatgtctatactttttataaagaaaagtgaaaataccatgacactgaaaagatgatgctatcagatgctgtttagaaagcatttatcttgcatttctttattctttctaattatctaaaattcaataaaattttattcatataaaaaaaa

SEQ ID NO: 371535 - DNA, 560 bp, Homo Sapiens
ggctctacaggaaagaagagatgcaggacaaaatggttgcatcctggactcaagtagcagaagaaaaagtccagaaacatatccctgaatagaagagaaaacagagtgaggggagctaaggagggtgccctatagaaaaagatgcagagaagacatacagcaggataaggacatcaaaggctcctgacttccagttctcctctaagttgaagacagcatgcaaacatacacttctgatgtcgccacagaaaaaagatcatgactggcagaaccatcagagccacatataacacaacatgtggacttggtcagagatgggtcactgagactacatcctcttgctcccccttgtgataggaatatagttattctttgtggtcacttacatagacatggatggaaaatctaaggaaataggatataaaacaagagagatgaaaatgcttggatggctaactcagtctcccactataaatctttctcattctgtctacaaatttggaagtagccaaggtacaggtgggaaagaataaggagagaaataagtggccctcaacatc

SEQ ID NO: 371536 - DNA, 198 bp, Homo Sapiens
gtccgccctgtattcccggggagctgtatcccgggggaagggaggactggggaatgactgcttctgctcttaagggttagtgccagagctaggaggaatgtggagtcagtgccaagtcgaggagccttataatcttatgtctttctcttatcgttttcctacctctctcctctgcctccatcctccccggatacagga

SEQ ID NO: 371537 - DNA, 302 bp, Homo Sapiens
ctgtatcccggggagcccggggaggaaggacttggacccctctcaacaaatagggttgagagtgcgaggacaggacaaaaaaatggagtcaagacacaacctgcaacgccgcattgaaaagacaaaaggacaaggaaagtcgccatattgaagcaggcaagaaaaaaattcctattaacgacacaaatctttaagaaagctagcattcaattgacactaaatggctaataaaattatactcctaaattccacatttcccaacctttccaccctctatttaactgtacctccccgggatacag

SEQ ID NO: 371538 - DNA, 291 bp, Homo Sapiens
aatctattctgatgagcttctggacagcccagtcttggccacatcgggtttccagacatttgtgccaccatcgctgaacaggagaaaccaccaagggcagctgtaggagctctggctccagcacttgacaggacaaagacaggagatgggagagaagggctcagaccacagcctttatttcacacgcagaaaataggaaagctagtctgtaatcatccagaggtagagggggaaacacgaggctatgtcccttcctcgccactggcagaagtccagatgcgggccggccaa

SEQ ID NO: 371539 - DNA, 847 bp, Homo Sapiens
agaacatgttgggaactacgaagaaggtgaaggagttccttagtactaagtctcacactcatcgcctggatgcttctgaaaataggttgggaaagccgaaatatcctttaattcctgacaaagggagcagcattccatccagctccttccacactagtgtccaccaccagtccattcacactcctgcgtctggaccactttctgtttggcaacattagccacaatccaaagatggcgcagcgcaagaactgaaccaatgccaagtctccatgccaaaaagctgcggcccaccgagacagccagcaccatgacccaggatcgccttggtcaggaggggttcggctctatgtcatcaccaagaaagggtgaccgaagagctgacggagaccactgtgcttcggtgacagattcggctccagagagggagctttctccctaaatctctttgccttccccagttccccctttgtcacctatacattccaaccagcaaactcttccccggacgcaaggaagcagcaaggttcatggcagcagcaataacagtaaaggctattgcccagccaaatctcccaaggacctagcagtgaaagtccatgataaagagacccctcaagacagtttggtggcccctgcccagccgccttctcaaacatttccacctccctccctcccctcaaaaagtgttgcaatgcagcagaagcccacggcttatgtccggcccatggatggtcaagatcaggcccctagtgaatcccctgaactgaaaccactgccggaggactatcgacagcagacctttgaaaaaacagacttgaaagtgcctgccaaagccaagctcaccaaa

SEQ ID NO: 371540 - DNA, 498 bp, Homo Sapiens
tcggtacttcatcccgagaaaagggtgggagggaagctctctctagctctctcctgtccccttttcccatctacttccattcctgcttccccaaccttccatgaccctcccttcctctttcttcacctctctcggactgactgtggagcaaagctgtctcactctctgattctttgcagatcgacgtaattaacacattccagacgggagcctcttttaagggagtcctaaggcgacagaacatgggtcaacaccttgatgtaaaacttgttcctagttcatcctatgtagcagttgcaccagtcaaatcttcccccaccacttctgttcctgctgtttcatctcctcctatgggcagtgagtgatagtctattatgatgcatgatttgctaaaatgaccacaagagagcacgtggcatccactttaaccaaccatggttatcttttccttttggtttttccctttgatattttgacttaagggaagaaaaagacaaa

SEQ ID NO: 371541 - DNA, 558 bp, Homo Sapiens
  misc_feature (60)..(80): n is a, c, g, or t
  misc_feature (234)..(254): n is a, c, g, or t
  misc_feature (338)..(381): n is a, c, g, or t
  misc_feature (404)..(430): n is a, c, g, or t
ggggccggggtttccatgagcccgggttattcccgggtaccaggggggaaccccttttcnnnnnnnnnnnnnnnnnnnnnttcactagcaagacaaggtaaaaaaaatttgtggtgttggctgggcacggtggctcacgcctgtatacctagcactttgggaggccaccaaggtgggaggattgctgggaaccacggagtcaagactcacctgggcaacaacttatctttaccnnnnnnnnnnnnnnnnnnnnnttagccagtcacagtggcaagcacctgtggtcccggctactcgggaggctggggtgggaggatggcttgggcccaagaatttcnnnnnnnnnnnnnnnnnnnnnnnnnnnnnnnnnnnnnnnnnnnntgatggagtgagacttcataatnnnnnnnnnnnnnnnnnnnnnnnnnnntacctaaattttctcatctcctactataaatgtatggaactggaacagattcacatattactaaaataattaatatatttccgagaatgaccagttatttatctctaccattgctaatgaaggccggt

SEQ ID NO: 371542 - DNA, 849 bp, Homo Sapiens
ttgcctgcaggggagcagttggcataagcaacatttagaagttcctttgcgctgacaaggattccactgttagagcccttaccgcctgcttatcctacccaatgactacattggctgttggttatttgcttgagtgagcccttgaaaaatgaactgcccttcagcatctaatgggagttgtgaatgtaactggttaatgatacacattccaccttcaggaacactctttttaatgggaggttatgctttggcaatcagcgtctccctgggaagagagtcaagacttggagacatgtgcttctcattatgtggttagaaattggtgcctcagccctatctagactggggaaaaattgaggatctctgtttttcctggggcaaacagaaagaaatctgcatgagttgcttttgtaccctttaaatcatttgccaaacattgcagcaaacaagtgtgcgtatgtaacaagcttcactgtttttatagaaggtgaaccattagtataaatggtaataagttgttccctaaccctccacatacatttgcctatcacacgtaaaattaatatttactctagtgaagtggtttgagcactaaccttgtacacattgttaagaggcttagattggtattcatacttatttaccatacaaaagtatggtaccttaaagcttttgctctatgttctttactgtttcactggaaagtgtcaatagagttgcctaagaataaaaattgaaatggtgttaatctgaaaattaatgattctctgtaagcactgtagttgaaaagagagtagcaattaggatgatcattttgtgtaaaattcattaaaatagaaggctgctatt

SEQ ID NO: 371543 - DNA, 615 bp, Homo Sapiens
  misc_feature (265)..(382): n is a, c, g, or t
  misc_feature (525)..(561): n is a, c, g, or t
tgagccggtaccttcatttaggcaatacagttatatagagagtatataaaacagcaagggcatgcaaaggcacagataatgtcaaaaaaccctctgaattagatgaagggaacaaaagaggtatctttggttggaatgtttattaatttgtggttaaagttaataagcttttttgagactgtttcattgtgtaacactgatgatagttttgaggaaaaagatgcagcataagaaatgaatgtgtaggccgggcacggtggctcannnnnnnnnnnnnnnnnnnnnnnnnnnnnnnnnnnnnnnnnnnnnnnnnnnnnnnnnnnnnnnnnnnnnnnnnnnnnnnnnnnnnnnnnnnnnnnnnnnnnnnnnnnnnnnnnnnnnnctgggcgtggtggctgatgcctgtaatcccagctactttgaaggttgaggagaatcacttgaacgtgggaggcagaggttgcagtgaggtgagatcatgccattacactttagccttggcaataagagtgaatctctgttttnnnnnnnnnnnnnnnnnnnnnnnnnnnnnnnnnnnnnggaatgtgtaaggtgaagttgtttattttatagtgttatacggatgattgctgg

SEQ ID NO: 371544 - DNA, 469 bp, Homo Sapiens
  misc_feature (143)..(278): n is a, c, g, or t
aagacagagattcactcttattgccaaggctagagtgtaatggcatgatctcacctcactgcaacctctgcctcccacgttcaagtgattctcctcaaccttcaaagtagctgggattacaggcatcagccaccacgcccagnnnnnnnnnnnnnnnnnnnnnnnnnnnnnnnnnnnnnnnnnnnnnnnnnnnnnnnnnnnnnnnnnnnnnnnnnnnnnnnnnnnnnnnnnnnnnnnnnnnnnnnnnnnnnnnnnnnnnnnnnnnnnnnnnnnnnnnnctacacattcatttcttatgctgcatctttttcctcaaaactatcatcagtgttacacaatgaaacagtctcaaaaaagcttattaactttaaccacaatttattaaactttccaaccaaagatacctctttggtccccttcatctaattcagagggtttctggacattatctgtgcctttgcatgccctt

SEQ ID NO: 371545 - DNA, 535 bp, Homo Sapiens
tttaggcaaatgtcatcagagcaaatcttgcttcagtgtctggttcacattcctatgacttagctttctcagatttttgcttctaaagtttcctaattttcttgccagttcaacgtattttgaaatgtttattttagtcacacatttaattatttttatggtaggacaatccaccatcttgcaggaaatggaagcttgttcattatttttgtcttttgttagtgttgtaaagtacagatggaaggaaaatgaaaaaaggaagttacttcttaatatggaagctctttttttcgagggaggtggtgaacagtgcttcacattactgatgagcaaaatctacactttgaaaaaaattaaaaagcagtaagactgaatgatagactagaataacttaactagtttgagtgaaaatatggccttgctttctattaacatatattaagtgcatctatgcacaaagctatttgtgtacacaaatggaaataagagcatgaaatactaatagcccagacttttcttagatttgcctatacag

SEQ ID NO: 371546 - DNA, 631 bp, Homo Sapiens
cgtcccttcatttaggcaatcagaaacaagaccaaatataattagtagaacaaactgaaaaagaaacactcatgcaaaaactggcaaattggcagatgtcctttacatacagcacgtgcaagctaaatcagtaagaacccagagaaaccaaagaacaggcaggtcatagactgccctatatcactcacacgcgatgacaaggaccatttcactggtcatcaacgtttttgtttttcgtccatcaaaatcagcatgccttaacaacactggagaaggtgtggggtgaagggtcattaagggcacgcagtagccataatgccacaccctttgtgccagccactgcgcttctggaaacctaccccacagcggtcaaccaaaagacagcaaaggcttctggcactaagctggtcacaaacgcattactaattattgtgcacatgtggaacctaccatctaagcctcctttctaaggcgaaaattcccactactacatcttgccacccttctttaacttacacactttaggaaaaggatgatttttcagaaactagcactgctcattcaaagtaacttcatacttcaatgaaaaataagcctccaatgccagtggcctccaacagggcttccctgc

SEQ ID NO: 371547 - DNA, 551 bp, Homo Sapiens
aatgttaaacatataattaccatcttactcagcaaaactattcctgagtatttccccactggaaatgaaaacatgctcacatgaagacttgtaattcactgttcagagcaactttattcacattagctgaaaactggaaacccaaatttccaacagtaatgtgaatggataaactgtggtatatctaaaaaatggaagaccgttcaataataaattaggaagaactaacctgatacatgcaacaatatgcatgaatctccaaaacattaggcaagagaaaaaagtcatatacccagccatgtgaataatcactgatgccagactccattgataggtaattctagaaaaggcaaactattgtgacagaaagtaaatcagtgtttgctaatggcctatggtaggaggaagggattgactgcacaggggtatgtgggaatttgggggtgatggaaatgttttgtattatgaatgtgatagttgctagaagactatatagttatcaaaactcatgattggatacttaaaatgggtgatttgctaaatgaagggcg

SEQ ID NO: 371548 - DNA, 538 bp, Homo Sapiens
tttagcaaatataagtgattgaagttaacaactaatggaaagagtgctgtaagaaaacacaaaccttttaatgacatgtagagatttccagttcatgtgtgggtgaacagtactatgttaactaaggaaggtaacatggagcaggaagtttgggtgaggaggtgataccaaaagggagaatatgatcatgattttacttagagctattttatatctgaagttacttatatcatatctaaacctcagaacccaggaataagatctgggctaaggtgaaaaatttgggaatgcatttgtgtcagaataagaaaattcggaactgtaaagggaagtgttagaatttaaaagttccaacatataccaatttctccttcctacagattaaattaattgtcaagatctgcacaccatttgtctctcatcacacttcaaatcctttacctggtaattctatcatgtacagttgacccttgttattcctatgaatcaactgttgttccacacctgtgaatttacctacttgccaaaatttattgga

SEQ ID NO: 371549 - DNA, 630 bp, Homo Sapiens
  misc_feature (25)..(25): n is a, c, g, or t
  misc_feature (315)..(344): n is a, c, g, or t
ttcatttaggcaatgagaatgttangttaagcataggaaaataggttcacaatacaaataacagaagcctaaagtatttctgaaaatatataagcaataattctgtgatttaatacattaaaaaaaatctagaaagcaactctacaaaaaagagagctgagataaatttgcaagaaaacagagcacatgggatgagctttgcacatgagaaggtggaaaaatggtcaacatgatcatgcagtgatgcctgtgaagaaaagtaatctgactagtggaacaatgggaagagagggacggtatcattttaacaagaannnnnnnnnnnnnnnnnnnnnnnnnnnnnngtattatactctaaattctgggatacatttgcagaatgtacaggtttgttacacaggtttacatgtgccatggtggtttactgcacttaacgagcatttctaattacaggtgattacactaggtaaatataggtcatccagattttaaaatgaaaatcacagcttatctactgaagaatttgtgtgagtttcatctctgaggctcatttttagaagctgagtatctcaaatatagtatctcagattcatataactgagattgcctaatgaagggaccggctcgatc

SEQ ID NO: 371550 - DNA, 473 bp, Homo Sapiens
tttaggcaaatcgaacaagaggggagaaaacgtgggtagcttaaactgtctttatagaaactatgtaattaattgaatgcatgtgaaatctatagacatggttgtaatttaagtatagatgttaaaaataatgtaggatctcaaactttaaaactttgaattcaaataatacataagcacatagaaaagttgaaaataaaactggcttgaaaaaatcatactaagtaaaattaaaatgtgtgtttattgcatttataagaacctcagttatgaccaaatatttcagaaatagtggttagctttcttgaaagaataaaggaaaattaatttaaatgtatggggtaaatatgttggtatttattttaaattgtgctgtggcctgggcttctcaaaggaagaaaaaaacagtgaaatatgaagtcaaagtaatgaagttcaagatggtaggtttagcatatgcatttgctatagaa

SEQ ID NO: 371551 - DNA, 459 bp, Homo Sapiens
catttaggcaaatagtcaaaatgctgaaaaatacctaaatgaaacacttctggtcccaagcatttcagataaggaatactcaacctgaacctagcaaatatcatttgaaaaaataatatcttaatctgtctcttcaagtaaaagtattatttaaatagtgagtgagaaaggaactacttcttttcttagaaagaaatgtgcaatggtagagcgttttcctcgttggaattttttttacatgtaatcattataagctataacttacatattataaaattctcctttttaaaatgtacagttctgtggttttttgtatatgcatagagttgtgcagcttttgccactgtctagtttaagaacatttcatcaccccaaaagagaccctgcacccattagcctcacttcccattctctcctccctccagtccctggcaactactaatcttcctgtttctttgg

SEQ ID NO: 371552 - DNA, 350 bp, Homo Sapiens
accccatttgcaatagtacaaaatctgaaaaatacctaaatctgaaacacttctggtcccaagcatttcagataaggaatactcaacctgaacctagcaaatatcatttgaaaaaataatatcttaatctgtctcttcaagtaaaagtattatttaaatagtgagtgagaaaggaactacttcttttcttagaaagaaatgcgcaatggtagagcgttttcctcgttggaattttttttacatgtaatcattataagctataacttacatattataaaattctcctttttaaaatgtacagttctgtggttttttgtatatgcatagagttgtgcagcttttgccactgt

SEQ ID NO: 371553 - DNA, 625 bp, Homo Sapiens
caatagtgcatgaaatcatgcagagcctcctctttgcattgtctcaggagaaaggagttaacttagatactttgctgttgacatcttgatattttaaatagttctagtggaatatgtttttcatgccatgccctcagctgacctccttattactctaaaaaatgacttctctatggcctcacttattttccctggaagctttccttgaccatctctcctgtcatctggctgccatactgctgattcattatattgccatcgtacacactcccttgctcataaagctgtgaactttctgagacctctatccctgtacctgatgcgggtactggcatgtagtttgaccttcaattgattattgaatggatttgtacattatagtcacttaaaaattctattataaaaaatggaaaagggtatttgtaagactcatccaatcattagcagaagttgggagttagcctttgattcaaaattacaagtacagtagtttgaaaataaatacatttcccaatgtaattttcaaactatatttcccattcctatttttctcagtctgtcatgaacatctttttcctttacactacagaacttatgatatgtctatatttaatttataataatc

SEQ ID NO: 371554 - DNA, 365 bp, Homo Sapiens
atcccttcatttaggcaatggacacagtttcgtacattatggaacatgaaaaagctgtattactactgaagagtttccagaacacagtagacctagttattcaacgtgagcttactgactaaatattttttataaatagtgaagatacgtctagccagacctaatgttcaaaaataaatttatacatagaaacaaattttgccaattgctggaccaatggcaaacattagtgccaaatgtataatactatatgttagcactgaccatccttaaaaaatgttaactctataaatatgatgttcatgtggttatgtattagttttaactgtcagcctctggctgtgcattggtgcagttttgtttct

SEQ ID NO: 371555 - DNA, 323 bp, Homo Sapiens
  misc_feature (194)..(240): n is a, c, g, or t
aatcaaataagtttcttctcaaaatggatttcatataatttcggagcacggaagcacacacaagctctttatgaattctgctctccatcagaaacactgcctcaaagttgtatatgcctttatatagaaaatacaaatataaagaattgtaattcccataaaatatttctagcaccaggtatatgttggcatannnnnnnnnnnnnnnnnnnnnnnnnnnnnnnnnnnnnnnnnnnnnnntctcagatagagaaaaaatatatcttaaaataagactttactatatatcttttgtcaataaaaattacatgattgcctaatga

SEQ ID NO: 371556 - DNA, 352 bp, Homo Sapiens
  misc_feature (34)..(34): n is a, c, g, or t
tcccatttggcaatggctctctgggaaatttganactaatttgaattctcaaaatttcctcacacttctgctcacatcagacatcatcacactttatctgtattgccctaacagaaaatgatacgccattgtcatttcaatttcatatttctttgattactagtaaggcagagcaactcttcaaacagtctcagcttacttgttatatttttcatggattgcctaattcacactttctcctattttaattggtatgctcatcattttcttactgatttgtaagaattctttataaattaatgattctgcctctttgttcattatatacaacgcaagtatttgttagatgtat

SEQ ID NO: 371557 - DNA, 497 bp, Homo Sapiens
  misc_feature (16)..(16): n is a, c, g, or t
attcagcccataaagngaaatgagggactgattacatgctaaagccatggatgagcccttgagcgcatttttgcccaagtgaaagaaggcagacacaaaaggcaacgtattgcatgagtgcatttatatgaaatatccaaaataggcaaatccatggagacagaaagcagataaatggttgtaagaagctgagagaaaggagtggggagagattgctaaaaaggagtttccttctagggtgatgaaaatgttctggaactacttattggggatgattgcacaacatggtgaaggtactcaatgtcactaatggtaaatttcacatacactttaccataatttttaaaaagctttattagctacattatgttatgatacttaaatgtcataacaatagcattctgtacgcttcactaggataaaaacttcggatttatatgcatctggaagagaaatttttcactgtaatttgcaaataaatgaatttctaaaaatct

SEQ ID NO: 371558 - DNA, 557 bp, Homo Sapiens
gagctcggtaccttcatttagcaatgtaaatgacatacaagggtgaatccagggataggagaatagaggggcaaaatgagggaagtaaagtgtgtaaaaaataagtgtaacggagatgatgaagatttgaggctacgtgactgggagaatgaaaatgcccatagctgtgaattgagatgaatggaacatgaaaggatgaagtggtgaatggtctggaagaaatattaaaagtttgctctgaacatatataatctgaggcatctgaggagccatgtcaattaggagatgccccttgctcacaatcagaaaaggaatgccggagtcaggcagacattcaggattcaacatggaaattttggagtcaccgtcacataagaacaggtaaggacagttcaagcggtgggatcagtaaggtcaaagggatactacaggatgaaaaaattaaaagcaaggcagatattggagaaatacattaagttagtagagtctagaaaagcctttgagggagagacaactaaaggtgagaaagtaaagaaaacaagcaagggaaagtgttc

SEQ ID NO: 371559 - DNA, 360 bp, Homo Sapiens
ttcattaggcaaatcatcacttgaggtcgcataagcccctgactatggcagtgccaattataacaagcatggcttgctgacctcctaattgtatgaaaccaattacattatgcttgttgttcattcaacaataagcagcttttgtgcccactaaattgaggcatactactaaatttggtgagtgtaacttggcaatacttctccaactcattaactgcctaaagctttttcaataaagaatacctttgtgcctcttgccttcagagaatgttactttcttgtgtgtattttcctgcccatttcattatatcttacttatgatctttctgcgcaatgtttctccatatgcctcagggccct

SEQ ID NO: 371560 - DNA, 357 bp, Homo Sapiens
ttacattagcaaattccatagaggcagtaaccacaattggctcctctttgtacacctgggacctcagaagatgcctggaccacagcaggtactcaatactcaataagatattcaataaactaaatatctataattaagacaaaacctatgaataaacccaaccttcagcttgcatgtttatgtgtggaatttcactttgtgtaacaaattagaaaagtaaaataagaaagaaaaaaatgctgcaaatttccaggcctttaacaaggatgaaaagttgagaaagtagaattgtacttttctaatctttgcaaaactaaaacagttttgaaagttcctttcttaccatttgctatgaag

SEQ ID NO: 371561 - DNA, 521 bp, Homo Sapiens
ttcataggcaaattccttagaagacataaactgacaaagtggacgttaaaatacagaaagtatgaataggactaaagtacattaaagaaattatatttttaattaaaaattccttgacaatacactttacaagttcaacatcaggcctagaaggatttatcggcatattctaccaaaaacataagaaataatgccaattctacacattttttaagaaattagaacactcattttatgagacaaaactaaataaataggaaagtggttggttaaatcttaattttatcaataattatgttaactataagtgggcaaaatactgtagttagaagtcgaatttgtcagacggcataaaaagcaatatccaaatatatgctatcaataagaaaaaaaacactttaaatacaaaaagcaggaaagttaaaagattggaaaaagatataccatgtttactaccagaggcagaaaaatacaatgtatcccttccatttcctattaacggcccccatttgctaaatgaa

SEQ ID NO: 371562 - DNA, 348 bp, Homo Sapiens
tcattagcaaatagggaggtatggtcactttactctgactctagaaaactgctagaagaatctgtatcagcaaagttacagtcccagagcaaactactgccagagattagaccttaagagttaccccagtcagtactattagatgtgactgctttatgaaactggccaagttttattcttattcatctgttttgcctgtgggaaatttttttaataacacctttttgaaatccatttcatacagcataaaattatctctgttaaaatatacaatttattgatttagaatattcacagaggtttacagtcatcaccactatctatttccagaacatttttatcactcca

SEQ ID NO: 371563 - DNA, 278 bp, Homo Sapiens
catttaggcaaatatagaacaattgtgagtatgcaagctcctatggtctaacaagttacctgtcaatgtcagaccgaaattattagttgtcatagcagcagtacacaacactgcctgctcagattagtcataagcagttgagctctttgttttacattataaatatacaactaattattataaaaactatcttccaagtattaggaaatcactactttctcaaaccagagggatttataaccaaagtcataatcttgacttggagaaaagcacccatt

SEQ ID NO: 371564 - DNA, 471 bp, Homo Sapiens
aatgtagttggacgacacggcaataggagagtagactagtgatatttgagatagtagtttagtagaaaacaggtaagaggatttgaacccagaaaagaaattataacaaacacaaacttaatcttcaaagcatttaaaaatttttttcacttggaaaggaaacctgaaaccagtttatacacatacatggtcacacaactgcaaaacagcctttcatgtaggaaatctcagatcatgtatgactgctgacacacacactaatttctatatgtatgtacatcaatgttataactgctactcaaaatgtcatttttaaaatttctcatttcctgagtttatttcttttagaacttacaaaaataacatacctttttagaaaggccaaggtcccccttcttgggcataaatccagggtctaaatcattggattcaagaagtttcttagttggttttcttttcgtccaaccatat

SEQ ID NO: 371565 - DNA, 340 bp, Homo Sapiens
taaaatgcccacttcaatgctgtctatagacctccccatcattccaaacataaattagcaacaaatcacttgaagaaaatataatgacagagataataggcttcatatgtaaaaatcaattattatgaaacatttgggggctactttatataaatgcctcataaaattggttttatttattgatatttcaggaaaacaactatgtatttgagatgccaattatattgttgaaaaatattattaattgcctggtgtaaaataggatcatcatctcacatgatataaatcatggaaagtattttaaaactgtaaagtgctacacatatagtagctcgtccaa

SEQ ID NO: 371566 - DNA, 347 bp, Homo Sapiens
atattggtgacgacctagatggtgcaggcatatatgaattcaccgaaatttgactcaactcccttggttaatttaaataaaataaaagtaaataaggggaaattgcatactcctatctggactgttttcttatggttttggaatctctggcaggtagaagtaattatttctgtaactcttaggcagggcttaggaattatctcccttaggtttgacttctttctttcttgagaataagcgctgtgtttcgcaagagtaaagaagtggcatttattctgttgtcacagcattactgagctcgagtggatggctctttatttccttctcgtccaccaatatggtgccgc

SEQ ID NO: 371567 - DNA, 373 bp, Homo Sapiens
ggtccatattggttggacgaagaacaagacaattaaaaccgtcatgtcattctaagttcctgcttaaaaggctgattatagatttgaatacttggattttgccattaaaacctttggaggctagttttactgggaggaattatcctgtaacttaaaaacgatggaaaaagacaccagaataataatagtcttatttgtagaggacccacatatatggctcaagtaaatctatctttaaaagctatttgtgctatagtcagaaccaaaattatgatagcactgctactatctcacattcggaaagtactttgtggttttcagagagtatgttatgtaactggactctgatcgtccaaccaaaatggtaccggcc

SEQ ID NO: 371568 - DNA, 124 bp, Homo Sapiens
gccaggccccagtcctcgtggagccctgggctagcactcaggggacgtttgctgaatgaatgaacaatgaaggctcatactggggccaattaaatggaaaatatggaacaatgtgtgtgcagcg

SEQ ID NO: 371569 - DNA, 375 bp, Homo Sapiens
  misc_feature (21)..(21): n is a, c, g, or t
tatggttggacgagttcagcnctttgtccagattaaagggcccacatttggacactgaattatttacatgaccgtcctgaatactaatagctcacatttatcaaaggcatgcttgaacattgctcaaaatacttcacatgtactaccacatttcatcttcacagcctaggagggaagtgctatcatgacccccattttatttattttagattcactggttacatgggcaggtttgttacaagggtatattcatgatgctaaggtttgggtttccattgatcctctcacccaggtggtgcacacagtacccaagaggatgtttttcagcccctccccacctccttctctccccacttttggagtacccagtgtctg

SEQ ID NO: 371570 - DNA, 536 bp, Homo Sapiens
gacgactatctggtgatgattttttcaccacatttgaaaaataaattgaataattaattaacgccaatagaatatcattaactaacagagttactgtagtgttttcaagggtaatttgattataaataacatttgccttctgtaatgtttttagaaacactgatagtcttcctaaggtatacccccattgtacatgtacaactttattcccatacacacactgtatgagttacaaaattgttgcaaaggtgactctcaacaacatggaatccagaactaacacaggcaccttgttttccccccatttttagggtgccaaatgtacccaagtccaccggacagtcctgtctctttatttcctatttcttctttatttcccagatcagtaccttcccccggtacagtaaagtagaaaagactatatgtatagatgtgtttccagagacttatatcaaactctggttgttccagtgggcccaccttggaacaaatggtgtactaacgtttgaggataaacattttctcgtccaaccata

SEQ ID NO: 371571 - DNA, 418 bp, Homo Sapiens
tgagccgctaccatttggttggacgagaatgagcgagctagaagtttgagaaggttagggtacacctggaatgttagagaccaggcttctaggcagtagttagggctggctgagctgagctcaacagagctgtatataaatcatttgttcttaaggagctccttctccaatgaaaggaaacagattgccacctctgaaattatcagtggaatcacacaactccacatccacactctgcttctcttccaacttgtttgccaaatgccctcacagcaactgttcttaaactttaccatgtgcctccagtgttctgactcctccatttttatctccatctatcagactccactttcctcgctttccaaattagaaatgatatcccaacattttaatgtcgtccaaccctaaatggtagccg

SEQ ID NO: 371572 - DNA, 398 bp, Homo Sapiens
gtaccattttggttggacgacaggacaggaggaagcaaacacttagaataggcagttttggaagggagaagtaagtgaagtaatataattactagctaacattctcaccaatcacatgcctattatttccttaaatatcatcaccaaccccaaaaagtaggactccagatgagaaagttaaacccatgggacttaaataactatcctggacacatggttactatacctggaaataaactgaggtctgtgaatccactaccttcatgtgaaccccagtaacgatggaactgacatcagatgacactaagtgacacctggaagcgccatcttcaaatttgaaaagcaatgctctagacaagtaaaacatcaacaacaaaatcttcgtccaaccaaatatg

SEQ ID NO: 371573 - DNA, 412 bp, Homo Sapiens
tgatgagccggctaccatttggtggacgacaggacaggaggaagcaaacacttagaataggcagttttggaagggagaagtaagtgaagtaatataattactagctaacattctcaccaatcacatgcctattatttccttaaatatcatcaccaaccccaaaaagtaggactccagatgagaaagttaaacccatgggacttaaataactatcctggacacatggttactatacctggaaataaactgaggtctgtgaatccactaccttcatgtgaaccccagtaacgatggaactgacatcagatgacactaagtgacacctggaagcgccatcttcaaatttgaaaagcaatgctctagacaagtaacatcaacaacaaatcttcgtccaaccaataggtaccgagcc

SEQ ID NO: 371574 - DNA, 345 bp, Homo Sapiens
catcaaaaagtcacacagacaggaattccaggccaagtgtaaagcttcattctcttggctgctggaaagagaaccaggacccagggttaaatgctaatggagacagatgcagctccgtgccagggaggaccttataccagaagggctggtgacaccatagagtcaggcagggggtggtgcggccctgtgatgaaggcataatccagatgagggcttgagttctttccctggtcccagctgtgtacagaaatacctgggagcttgaaaacaaggatttccaggccctttcttcagagatttagatccactgggtctaagcatcagtcctcctcgtccaaccataat

SEQ ID NO: 371575 - DNA, 233 bp, Homo Sapiens
  misc_feature (123)..(133): n is a, c, g, or t
ttgtacaatcctatgaaaaaaaagttgaatggtacactttaaatgggatacgtaatcatatatgatatacagtcacatcatgtaacttacatgatatgtacattgtatataaataaagccttnnnnnnnnnnnctctagaccaaattagattacctccaagatctctttctagatacaacagtctctgagacactgaaaaaaagtctcagcaccatgcacagtggctcatgcc

SEQ ID NO: 371576 - DNA, 478 bp, Homo Sapiens
attggttggacgaacatgaacaaaaccaaaagaccgtttcaagttcagcagatagtaggagctaatcttttctgtggtttggtttggtcgcctgccttaggttggcttactagtctgtgactttctgagttgctttatcttgtgctaacttctatcagatacaatctccatattgattcctgtttattcttgcctggatgatctattccatttagatagctagaacattcagtagctctcttgagggaatcccacctgtgggttgcagaagggtaacctacagatgcccgattgtcctttttccctggattaaaaagaaaccatttgccatttttctggcttcttagaaaaataaatgatatatgaaatgtttgcagcagcagaactttttcctgcccaaaggtttaagattccatggacacatctcctggtctagcatgctattgctctttctcatcaactttccatctctcctcac

SEQ ID NO: 371577 - DNA, 435 bp, Homo Sapiens
aggatccccatatgttggacgaggaaaggggagaggatacatcaggcagaggaaatacagagcaaaagctcagagcaggatgggaatggcaaggttccaaaacaggtggacatagagggaggtgaatctggcagcagcaatgaacaagactggaggcagggatgtagatgggggcactgcgggagcccgggcaggggcgcgggaagcctgcattgaggtgtggacgatacagatgagatcagggtaaaaaccagcgccaaattgaaagggagaatcacaaaagaatcaaaagtacaaagggaatcaaagaccaacagatcacagagaataataaataaaagataatgacagaggaagtggtaattttctatgaatcctcggaggcatagattctttctgtgccctagagaccaacaaaccttgtccagccaatat

SEQ ID NO: 371578 - DNA, 400 bp, Homo Sapiens
gttggacgaggatggggtaagtattaggcaggagaagaaacacctgttcccctaaggcaggaagagatgcaagaatatatgtgtatgtggcacaaaagaagaaagtctgaaacttatgctctttcttgcctgatgatctcacttgtattttgtctttaaaatagtggatgaagctgggcacagtggctcatgcctataatcccaacacgttgcaaggtcgaggcagcagaatcacttcaggtcaggagttcaagaccatgctgggcaacatagcaagaccccatctgtacaaaattaaatatatatatatgggcatggtggtgggtgcctttaatttcagctacttgggaggctgaagaaggagtttgagtttgtcgtccaaccatatggtagccggctc

SEQ ID NO: 371579 - DNA, 392 bp, Homo Sapiens
ccatatggttggacgatcagcacagttcttccttttcctgtctcaattcaatgattatagatttgcttcttgcccatttcttcccttttctgttttcttcccccacaaacctgagatcaggttgctgtctgagaagaagccgacgcagcatcccctccttggcagcatcccctccttttgcggggctctttggagtcttctcaggatggtgcctccacttcttcctcagcggctctcagtttgctttcacagttcctgttcttccacaccagcttcctggtctcctcctctctgaaagccatcgttgactggatgtctcaggtatctgccgttacttggccacatgttacgaaaccccttgttttatgtctcctttcctcgccaaccaatat

SEQ ID NO: 371580 - DNA, 346 bp, Homo Sapiens
tccatattgtgttgacgaatgaatgcatgaatgacatgacattcacagtgaggaccctgttgtgaggaatacatttgagcacaaaggggaaattatggctagcccttttacaggggatactgtttctagcatatgctgtccacatgagctattggttgtaaatgggatagttgaactggtaagggccaaagagagaaatggaatgttttgaacttcactttttttccctagtaagtgccacactcacctagcacgttgtccctgacgctagttctgggataactgtcctcaggaaatcaaatcttggtggactttgtgcctcatatatccctgtcgtccaaccaat

SEQ ID NO: 371581 - DNA, 309 bp, Homo Sapiens
attgttcattttaaaaggttaattttatgttatatggatttcacctcaatttttaaaaactcttatagcaacaacaaaatcatacctcattgtgagatccaccagaaaagctaaaatgaaaaaagacatacaatatcaagtgttgtcagggtgtggagcaacagaaatcctcatgaactaactggtggatgtataaattggttacaattacttgggaagactggcaacatttaccagacgtaaaccatatgcataccaagcataatgcttggttaggtgctcaataaatatttattgattgactcgtcc

SEQ ID NO: 371582 - DNA, 735 bp, Homo Sapiens
gttcctgacctcccggccctggaggaccatcaggataaggaaggaaatcagtagcagtgaagcaagggagaagtctcactggcttttcctaagcatatggagatcctgggcttggcttcactttactcgttctgagccttagtttttttcattggttaaatgagaacaagaccttccctgcgcttggcagaatggacgagtgagtaagggcacaagctggggaatcaggcagcccatggcctgaattctagctctacgacttgctagctaggagacccgagagtagaccctggacatatctggggctgtgtttcctaggctgtaaaagagaaatagcattcacacctttgtacagttattgtcaaaagtgaatgtgatcatgtttgcaaggggcttagtcagcgtctgaaactttgtgacccactcggtaaataataactgctgtgttactgttaccatcaacctcattcatatcatcagtgatgacgtgttaccatcatcatcattccctcaccagctttctctatctctccatcattctgggtcctagcttccctcaacatgtgaatcctgcttctctgcctatgaagactttgtccggtgcctttacctcatagctattctcctttttctaatgcaggttctcaacctgttttatgccatagactctttgatagtctggtgaaacctacagactcttctcaaaaggtttttatttctttatttttctctcca

SEQ ID NO: 371583 - DNA, 686 bp, Homo Sapiens
atttactgccttaccctttggtcatcagataggggaactacaactcagacccaggtgttctggttctgataacataatggtagaatggttattacagaaatttatctgaatatggactactttgtgactaatattcacttgattttgtgtccccaatgcttccttcatattcaatcttactcgtgcctatactaatcatcaacagtttagcttgagagctgcagcagttgactagttttccaacagctaaacagaagattctggctatttatatgagcattctcttaatgctttactatattatgaactgaccctaagggctaaatattatttacaaatccaagaatacaaattcataaattctagctatttttatgtcaacgtggactgccaatttgctttgaattatattaaaagttcaaaaactttaaagttctttacccccccgattccccaacttcaaaacgtattagctgttacaattcatacatggactagcattctaaagatgtgacagttccctttgaaagataatgtttggaagtctcaagacttgaattccagtgtcatctttgctctatgatgctggataagtaacttaaactctctgggttttatttaattcctctggaaatttaaacataatttctatgagaatggacttttctcgtccaacaaatatggtc

SEQ ID NO: 371584 - DNA, 514 bp, Homo Sapiens
gtttggacgacggtagtactgcaaaccagaactgtgagaagtcatagatctgagcctgcacagattatttctacattaacacatgcagctcgcatgttgcctgtggtttctatgcagacatctacactcaaatttttaaatactgtgtattatgttttttaaattgctgcagcacaaatgaccacaaattcagtggcttcaacagcatccgtttatgagctcatagttctgtacgctgtaagtctgagcagggcacggctggcttttctgcttagggcagcacaaggctgcaatcaaaatgttgactggtgggttctcatctggtgcttgggatctgcattcccgttgtttccttacggctgcaggactgaggtcctgtgtccctgctggctgtcagccagggactgcgttcagctcctgggggcaacatgtagtccttgccacatgacctcttccattgtgaaagccggcaatgattggccaggcacggtggctcacgcctgtaatcccagca

SEQ ID NO: 371585 - DNA, 283 bp, Homo Sapiens
atgcttcctttctaaatttttggccatgaatgaatggaatatatttcctctattatgtttctgttcattgtttgtaaattttaaaatactaacctttgtggtatagaaatatgtcataaaagcttctgcaaatctaatatattggatagatagctgaaatctgcatatttcaaataactgaatatacagatattctacaaattgtctttaaaatgattacaacttatgttgaaattggtgacgaggcatttccaaattaatctcataaatagtatcgtttact

SEQ ID NO: 371586 - DNA, 530 bp, Homo Sapiens
aggaacgaaggaacgaaggaacgaaggaacgaaggaagggctatacaaatgtaggagaattaagctatatgtgtgggggagtgtgctctgccattaattagacattaccttagaaaacctactctacctctctaacatgcctcagagggttggtgtgatgattaaatgggaacatgtaaagtagcacactcatttgccaatcgagaccttcacagaatctcaggaataaaagtgaccttcgagtgcatgtaatccaactcattccacccaaggagattctgaagttcaattcccagtgttcatacaagcctctaggtgtcacttccaagaatcatctttggagagtccttaaaactgcttctctattaattagaactgccttcaaaagcagcaaaagacaactgtcccctgacccaataagagatctgaaaacagacagaagacaacaaagcaaagacaaattcttctttttggagttctcctacaactatacacagctctacttcctatgatgcttctatcgtccgacc

SEQ ID NO: 371587 - DNA, 551 bp, Homo Sapiens
ctgatcacgaatacggggttgtgtgccataccttttcgccgtggtaaaaaggtcctttgcgaccactcactaagcacagggctgagaatgatttcacaatcacatagcaaatgggttaaggaacaggcttggagaaatttaagccaggagacaggaagaagagaaggtataggttcctagtgaccccaaggaaggctgagcagagaccagggtgttctgctaaacatgccaagggtggggtatcacaggacataggccacacaaactgttactcttacttttcataggatgagcataagagtagccttgatagtgggggattaaacaagaatcttgacatgaggcagtgtagagtgtagatactagctctttactgaggtgctctacaaaggccagctgcctcacacctggaaatctttgggacggtggaaatttactatgcctgctgctggtgccagggagccactggtcccttgaagctgagttcaagtgcggcttcttctacttagggtgaagggtgagggctctggtcctagctcgtccaaccatat

SEQ ID NO: 371588 - DNA, 648 bp, Homo Sapiens
ctctatgtgattgcatctgatattccattacccaaatccaagttttctctttctgagcaggttgactttaacaaacacaaacagaaactgattgttggtctcgcttttaagtaatttgtgaaagacgacctgctgataagaataacattaacataatgttatctgtttaaagtgaaattcttattccctttgggaaaacagacatagataccctaaaatggtaaaatttccttgcttatgttgataggccacacctgacaggtgtgcttacattgacaagccatacatcttatcaaaagtggtcattttgttggctgaactaaagagcatttcatcattttccctgatattaactctttgactatgagatgcaactgtcagtgtgaaacttggcatttgcccagctcttctgataggaatggctgttctctcaccttgtgggatattgttacaatcttgactctcttttccaatatcactttcacatatagtgctggtaggccaagggaagacttctcctctccactgtacagattcttgggcccagcatcttttctggaatccccaaaatagtccctcaccagctcaatccttgtgtctttgagtactggtaccaaggtgtcccttttcccttcgtccaaccaaatg

SEQ ID NO: 371589 - DNA, 825 bp, Homo Sapiens
  misc_feature (21)..(21): n is a, c, g, or t
accccaagcaactcctcaccngttaccctgaggtttcccctgtttggataacaaggccatagaaatccacagcaaccctcacaccctgtacccatctgggagtgcaggagaatggaccccattagaatgagcctttgacccaatgagatatgggagcaggggataaattcttcccgttttctcaccgaaagagacattcctgagacattttttacatggcttcattgaagataactctgtgatatcaaacaatccgttgtccttagtggtagccagttcaatacacttccttgtacctgtattggttttatctccttttctgtctcacgttatttatccttctctcccgatccttaatgtatgctccctaacaaaatcgtggcacgtaaacccttgcctcagactctactttctgaagaaaccagctaaggaaaaaatgtctctaaagaaagaaaaatagagtaatgtaaaaaatgaaaatatgggattacaggcgtgagccaccatgcctggcccactctccccttttgtgttaaaaatacattagcatgctatactttacttcataatatattgtttttaaatagaaaattattcaaatcagcaattaagtcacttgatatgtctcaacccccagatctttgagataaaagttgtattgcaggaaaatgggcttgtttgtcccttggctaccagtacctgacacatgactatgtattgtcaacggggcagtactgtgctctggtttgagaaacagcctcatggaaacgagtagtgattccaacagaaatgtggtcttgtgtctgtggggagaaagatgcatcg

SEQ ID NO: 371590 - DNA, 464 bp, Homo Sapiens
  misc_feature (319)..(319): n is a, c, g, or t
attatttggtcgacgacagccgccatgtactgacagcagccactactgggttttcgcctatttaacaataatactatgctagaatcttaaaaagctcttgccttccgagctctaagtaatgctgcaatgattggctaaccacacgagtgttttccaggctaatggcaggccctgagaagtatttttcaaccactttaacatcatcttctgcaaagactgagaagctaaagaaagcccctaagtaagagagtctctgcagctcccgcccacagccaggacttaaggatttcgccaaccacaaccgcaatagaagcaaccnaattgcacactgggtgtggtcttcccaaacttggtttcacagagctcacctagtgccatgagggggtatttaaagtagtcactgtcgagggagcactctttggcagcaagagccaggccttgtaaaatggggattaatatttgct

SEQ ID NO: 371591 - DNA, 591 bp, Homo Sapiens
actattggtgacgagttggtactgggaacaaacgtcctggtgatccaaaacatagtagccagacaagcaacttagcacataaaacctatagcttgtctagttctttttcctcttccagttctactcgtaaaaggggaccctctgaagagactggaggggctgtgtttgatcatccagccaagattgccaagagtactaaatcctcttccctaaatttctccttcccttcacttcctacaatgggtcagatgcctgggcatagctcagacacaagtggcctttccttttcacagcccagctgtaatactcgtgtccctcattcgaaactggataaagggcccactggggccaatggtcacaacacgacccagacaatagactatcaagacactgtgaatatgcttcactccctgctcagtgcccagggtgttcagcccactcagcccactgcatttgaatttgttcgtccttatagtgactatctgaatcctcggtctggtggaatctcctcgagatctggcaatacagacaaaccccggccaccacctctgccatcagaacctcctccaccacttccaccccttcctaagt

SEQ ID NO: 371592 - DNA, 367 bp, Homo Sapiens
actatttggtgacgaggcagctgtcatttgcagaacagtaatgccagaataagaagttaagcctagaaaggctccagaaatcctcacagggtgtctttcaatcttttgctaaataataatctatgtatgcatagagtgaaacaacaccaggcaaatttaagaacaattaattccagggggcagaaaaaaggcataagaaaagaacaaaaaacatgggagaaataaaaaacaaatggcaagatggtcaatttaaacctaaccctatcaaaattacatcaagtataaatggtctaagcacttctaattaaaaggcagaaacttcagattggataaaaaagccacacccaaatatatcgtccaaacaata

SEQ ID NO: 371593 - DNA, 378 bp, Homo Sapiens
gctcgctacctatttggttggacgagtgaggaaagaagatagactagtaaggaaggaagactggtaagaaagtgactaataaggaaagaaggtagacgagtgaggaaagaaggtagagtagtaaggaaggaagatagactagtaaggaaggaagactggtaagaaagtgactaataaggaaagaaggtagacgagtgaggaaagaaggtagactagtaaggaaggaagactggtaagaaagtgactaataaggaaagaaggcagacgagtaaggaaagaagacagaaaaggaaggaagactggtaagaaagtgactaataaggaaagaaggtagacgagtgaggaaagaaggtagccaatattctgagcttgaagttt

SEQ ID NO: 371594 - DNA, 451 bp, Homo Sapiens
atattgttggacgatttgttgactaaaaagagaagagttgtgatatatttgagtaggttaacaaagttgttgtctctccctatgtttacatcctgaaaagttgtgtttgtgtgtgtgagagaaaaagagagagtgagatcaagagatgaactgcaagtgttgtttgaaacagtttaggtgcagtcctgctgggcaagtagagatgcttcctgcaggtgaggttagaattttacattgcttctgattgaaggctgcatgctttgggttctaggtgtttacttttaggcctcagagctttggaaaaaaggtgctttttttccttttgaacaggttttcttatgatcagttattttgatttagaaaaattctcagcctagaatttaaacaagaaccaggaggatcctaatttcttatttgtcgacataccccaaaagccctcctcgtccaccaa

SEQ ID NO: 371595 - DNA, 465 bp, Homo Sapiens
gctgatattggatttggacgagaaattgaaaggtcacggcttctagagcatctagctctcttgggcttaagatcaaattgtgctagtgaagacagtgcatctcataaaatgggaagtaggcccacagttatcacctattcacctttggatttctggatgtaatttcctttggctattgtcatgtgtcccttgcaaggcagaatgaataaaagaagatggaaaggctgtgctcatgatctcaccgcatgtaagaagtgcattcctgtgttcccatgaggacccaaaaagaaaaatatatcaacctgccgttgccaggattatcagtcaggggtatagctctctgggcatataccttcttctcctgactcttattaagccacctacactaaggagggcttggctgtagatagatatgagccttcgtttgcattcagtaaaaagaatctgtgactaatcagcaccagc

SEQ ID NO: 371596 - DNA, 480 bp, Homo Sapiens
tcgagccggctaccatttaggttggacgatattctctgaaagaggatgatagtctgtcttttaaaggtggtttagactctaaaaatagtcatgatctgccacaaaataggtcaggttctcctggggccacccgagagatgtcctggaactcagaagctgcatggcctcaggaaggttttctgggacagacctggtcccagggagagtgaggagaagcgtgtgagatgtccctgaagtgctcctgggagaaatgacagctggcttggttcatcagcatttcataaagagtaacactcacacacgctgcaagactggggccaaagaacgacctcgccaccacccaatcccttgttaaactccaacctgttgaggagaaaatcaaggactaaacacggtgctttgtgctgatgtggtcattttcatttcaaaccaatcccggttaaaacaacaaaagcaacaaacgacatcccaaatagcacc

SEQ ID NO: 371597 - DNA, 304 bp, Homo Sapiens
atattggtgacgaaagtgaatcagagagatgaaacaggaaatctctgtgttagtaacacatgagtgtcagtaggaagtaggaagagatcaagctagaaatatgacttgtgactattacatcagacatttgaggctcaaggggaagaggagtgtgtatgtaattcaccaggccatggggctcactggaaagttctgagtgaaagaggctttaggaagattaatctggtagtagtgtgtagtggaagcaggccaagtcactaaaagtcaattccctgcaagccagcttgatctcgtccaaccatat

SEQ ID NO: 371598 - DNA, 435 bp, Homo Sapiens
aggtagctaaggcagcttcaattaagactagggcattgttccaactaagggcagattttattctttaccttcctagctataaccttaggtatcctgaggatctaacaatgaaaatttttaaattatgaggaaaaacactaatgaatgtattcactattttgcattcaactatcctacatgaacatgaaaaaaagggaaatatatgtggcttatgtatataatggtatcattttaaatatcataaaactgggtttcttttcccttctctaaaaatagacctcaatagaaacctagtattaagtaacctagaatcaggaggtattccattactgctgattaagaagtgggaataggccaagtaaaatattaagtttcttttcaaactgcaaactatcttctaaaagatcctttctcgtccaaccaaaatggtagcca

SEQ ID NO: 371599 - DNA, 356 bp, Homo Sapiens
aggatccccggttggacacacttaggccacagatatccaggcttgaggatggggctttgccatggaaactgccctcttctacccagtatttccctggttcctgtcctatcagtgtacaaataccccattttctttatccatttatctgtttgttgttggagacctaggttaatcccatatcttggatattgcgaatagcactgcaacaaacgcatggtgtagatgtctctctaatatactgatttcgtttcctttggataaatgccaagtagtggggttgctggattgtatggtagttctatttgtggtttttctacggagttgcatatcggtgttcaattcgtccaacccatatt

SEQ ID NO: 371600 - DNA, 439 bp, Homo Sapiens
ggtcgactctaaggctccccattggttggacgaatgggaggggagaaaggaggaatagagggtgagttgccttgggcagtgtcagaatgtcaccaatcacaacctcaggcactgacagttatcagagttgtgagcttgagccaaaggctgcagtcacctgcttcattagtttagcactgcatttttatcaccactgacattgaaagattgaatgcatactgacaatgcaaccatgctcacttgtactttctacaggctttgtcccttgagatgacatgcatactggataaataattcacatttttctcctgacgtttgcaaatgtctggatggatcatatactgtggacaaaaatctagataattaacctgaatgtttatatttaatcctgtgatcttgttacattatagacaaagcaataaatgctcgtccaaccaat

SEQ ID NO: 371601 - DNA, 415 bp, Homo Sapiens
tatgttggacgagtcgggctgccaatgttaaggagtaaatggaagtaaacaagtggtccctgggtagtcagaacactcttttaagacagggaaaggagagaaggggcattagctagacacgggacaatctctctctcctctgtctgtttcattttaaagggttgagtgggtttgtagcctgagtggaaagccagcagagactaatgatatggatgatacagaaagaagagataactaaagggcaaggtcctggaggagaaagttgtcttacttaggtcatttattttaacaaggtttagcttctggttatctctagccaggagagcaatcaagcagtgtatgtcccaaggataggcatctgtggaaaggaaccgtaccgccggcatgaaacatcgtccaccatatggcccggcta

SEQ ID NO: 371602 - DNA, 274 bp, Homo Sapiens
atatggttggacgagactgcagttaaagggcagaagtccagtcctcaagcaggcaagggaggcggcacgcagagaccagaggcccgcaagcatacaggagcacacagctcgacagattgtcattttctaattgcagtgcagtacacagaggtcccagaatggacaggaagggctcgtaggtgggcctggaactaaccctgatgttctgagttcatggccatctgtttcattttatgcatacaaaaaaacttactccagcaaaaggaagaaaatg

SEQ ID NO: 371603 - DNA, 331 bp, Homo Sapiens
ataaggcataaaatttaacaagtttataggatcattctggctgctattttaagaacagactgaatgaaggtggagagggaaaagggaaagtaaggaaatcatttgggaagcgactgcaacaaaacagctggaagaattagatcagaatagcagtagtagagatggtgagaagtggtcagattcttaatatattttgaaggtaaagctagtttctaagttcaaaataactggaaaaaacatcaggactagaatctataaactgtggcctgcatatactttaactgtagtcttgtaatcagtttagtaaaaaagggtgactcgtccaaccata

SEQ ID NO: 371604 - DNA, 319 bp, Homo Sapiens
taccatataggtggacgagatgaagagatggtgcattgttgcaaacactacttgaggccaggaaaagaaccactcaaaaggagcagacacaaacaatccctggaactcacccaagggacagtaatcatttgtagtcctaccagccactggcaaaacttcataatacaggaagcaacaagtagaggacttaaaaggacactatctcaatatggaggaaaattggtcctagattaaaggctgctctgtttggctctaagcttcctgttgcccgccccccaaaagcatttaaaaacaaaaggctgctgtcgtccaccaatat

SEQ ID NO: 371605 - DNA, 391 bp, Homo Sapiens
acctcagtatcaaatccatccccgaggctcctggaaacaacgctgtcttcggggaggaacggttggacccaccaccacttctccatgacacccgaagagatgattttctgtatggcatgtgtttttctgcatgatgcaaaatggcataatctcgctcctcttaaatcaagttctgccttgggaaatcgcgccatccctggggaggagaccttgattcttcccggaatcagtgccattccatggtgctcaatgacgtggttgactacgctacgcttattcagtagacaccgtgacctgcttcttctcagcgtcaaatgcagcctagaagaagcgccctcaggcacttcgtggacatgagccttcgtccaaccaaaatggtagccgagctcga

SEQ ID NO: 371606 - DNA, 334 bp, Homo Sapiens
ggacccttaaactagataacagtgggggtcaagtagtaacccaaggctctgagttcagtaagtaaataaatctaatatgaatgccctctcctctcactcatctattaacttgtagaacatttccttcattactgcatcagcgatgagctttatgctgtgaaattctcaaaatctaaagcttatgaagtggtctcaaggtccaaagcgcactaaaaactcattacttacaaatgatgccaagtaactgtttcatcatctttaccatacctttaccatatttgagtggctatgtgaaatggtcacaggttagaaacacatcatcgtccaaccatat

SEQ ID NO: 371607 - DNA, 404 bp, Homo Sapiens
cgctaccatatggttggacgagcatgagatcaggtacatggccttactcatcttcccagtgtaaatatatcacaatgtcacaagagcctctgtgtccaaacacactaaactgggtttacaagcattagaatctttcactcatattgtgaatctcaattctgccagtcacctagtctgtgtatctgttcccaaactggaaaaaataattcttgagagaataattttcagaataatggaggtggaaagaaatgaacagttaagcaatttttcaacatagacaaaaccactggaccattgatagccctcaagctctgattcttcctcctgactaagtttcttttctttggggggctttcaacatctgaattttccagatgattgcggaaccatcgtccaaccatatg

SEQ ID NO: 371608 - DNA, 386 bp, Homo Sapiens
caccatagtggttggacgatatattggttgtatatcacttaggaggtaggtcttatcttgtatgttttacaggcgaggaaagcaaggtatctcccttctacccaatgttgaggttttcaactttgactaatcctctttttagataaaaggtagtctgccccaggaatggagagaattagggggctccattatggtgacatgtgtggtaccatggtcatcttcttttatggagatggggctgtcacggggccagtcctggcaccacatcgcaaagtccaggacaaagctaacatgtttgtgctggcttgacgtgctgttgactacccagcacgcggtcctactctgaggttccactgaggtcggcttccctacaaactccctgtttg

SEQ ID NO: 371609 - DNA, 406 bp, Homo Sapiens
aagtttcatcaagctctacagccgccaaatcccatggcaatactaggagatcatttcttgattagtggcatttgacacagttgaccatgtcctattttgaaatacttgctttacttaacttctagaatgtgataccctccagtgtggtcttgcctctgactgtacttctgctaccttgtttgttggctccttccacgttaaacaagaagaaggtcttagggctcagcccagggctctcttcatcatctatgcattcttcttggattgccattcagtcacatgctggagaatctcaaatttagatctccagccaagattccttttctgaatacaagatgcatatatccacctgcctactggtcttatgatgtcacaaataagttcctgatcttcgtccaacccaata

SEQ ID NO: 371610 - DNA, 410 bp, Homo Sapiens
tttggacgaataaagaagagaaaaatagcaagaagccattctcccaagggcgatatcgggaagtgtcacttacctatcgcctttctccctttctctctgatgtttaagtggtgatgctcaggactggtaatgctccaggaagtgaccctgtccctcaggccctctcccctgcctcaggcagcctgactcagaaactgtcccctaatcacctcatcctcagtcacagctgagctccctggttcaactctttccaggacccacaattcaaccttatcctgcagcagccatgacattctagaaacctcacactcctgcctatgtgcgtgccctgcaatattttttgctatcctgtaaggagaccacacgcaggcttatctctgagatgctctaaatctaactcaatctagtca

SEQ ID NO: 371611 - DNA, 362 bp, Homo Sapiens
ttggcgaggtggggatggtaatgccagccttctgcacaaaggctatgggccaggggacgtgcactgtccgaggaagggctgtgcagactctgaagctggaccaccagacagtggcagggacagaggaggcgaagatgttgcgtcaccaaggagaagagctgtagcagagctctgggttgtgaagagttgtgtggaatggatggaggtggtcagacacccccccgtgacgctgtctccggctttactgttggagtggccctgtgttcccacgcttcactcctgccaaagctatttcttgaagttgttccctcctcttgcctgtatttcttcattcatttattcgtcaacaatggaccgagccc

SEQ ID NO: 371612 - DNA, 494 bp, Homo Sapiens
tgaaggagctgatgtagaggagaatgcagggcgccttggtggtgctgaagctgaagcggatctcctcctgtgccaggtccgggtgggagttctgctggtcgggagcgttgtctactctgctgctggagtctctggcatttgttgctggtgcctgaaagttatatcgtagccacatcccttcttcaaaaaaatgcaccaacatctttgttgcaaatgttccatcatatgcagtattagagcaatcgcaggagtaaccgtggtatctctctaggcatttgcctccattttcacagtttgttccatagctggtgcaatggcccgagcatccggatatgaacccagatgtgacctttgctctttcctccaggtcaagtgtcaccccattcatcctcaaggagcggatgcagcccaggaagccctgctggcccccagcaccacccacaaggagggatgagcataaggagggatgaggaaggagggatgagcataaggag

SEQ ID NO: 371613 - DNA, 344 bp, Homo Sapiens
aaggacatccaagccttcaagatgaaccgcaaggagagaagttcttatgactcctccatgtctccaggtaaggctgtttttcttcagaaatggattatcaagttatttcattgctgggctttgcacctcagacacatctgtggcacattgtgttcactagtttgcaaagaggtgggaatcaaattaaaatgggtctccttgcacatttgagtttgctgcacattttgtacattgtttacttggtatttactatcttccttctctcctggagccattgtttgagaaactgtgaagccataaccctaatagctgcctaggctgcagtcgtccaaacaatatgcggt

SEQ ID NO: 371614 - DNA, 158 bp, Homo Sapiens
atatggttggacgactgtgaggtgggacaggcctaaagttctccccttaggcctgccattcactgagggtgtgcagtcatcatgctaagttctctttcttgctccattttcatcttcactcaccccttactttctgcaaagcgttgatggtgttgggt

SEQ ID NO: 371615 - DNA, 148 bp, Homo Sapiens
gttggggcatttgtgatctgtggagaaggcagagatagttaatgagtaggcacatttgctaacctccttggacaggaataagttcatctcctgcttcttatttcctcatctctttttccttaccattttttcctcgtccaactatagg

SEQ ID NO: 371616 - DNA, 336 bp, Homo Sapiens
gaactgaaaatgatgatggtatcatttccacttctaaatttgcagcttccttctttcttatcactaagcctttataccaatcagattttaactcgcaaagaaagagggaaatatctccctgtagtaactgggtacgagtgagaaagagacgcaagaataccagaagccatgcaagcgcagaggaggaaccagagggcagagggagtgaagagatgtcacagagggcagaaacctccatgggagggcacaacagcatggatggagcattcaggaaaaaaggaatgccatctggtgatggaaaaacagaaccacctctggtcgtccaaacatatgacc

SEQ ID NO: 371617 - DNA, 369 bp, Homo Sapiens
aaacttgtggaaaagttatctcttgcctcagaatgagacgtgtagcggatactactctaaccgaagagcccccgtctcttccactgaaagtgtcatccaatctaatactcccacaccgcctccttctcagcccttaaatgagacagctgaagaggaaagtagaataagcagttctcccacacttctggagaacagcctggaacaaactgtggagccaagtgaagaccacagcgaggaggagagtgaagagggcagcggagaccttggtgagcctctttatgaagagccatgcaacgagataagcaaggagcaggccaaagccacccttctggaggaccagcaagacccttcgccctcgtccaaccaatt

SEQ ID NO: 371618 - DNA, 570 bp, Homo Sapiens
ccccaaatgaatccaatcaactttccttattcaacataatctgccagaaccatgtctctccctcactgaagaaatccactttagatttacaccaaacaaaagcaacaatgtccaatctaggtaaaatccataatccaaactgtttcaattccatactctacacacaaagataaatttcgtagcaagaacaatatccaaaattccatttttgaatttaacaaagaccaaccacctcacatcagtcaataacaaatggtgctcgtgtattaaccatggatgtgtatgctgcagtatttgacatgaatcacaaacagtatgattaacacaaaacaatttaacctgaactatttattcttctcatgtaaaatgggaaaacagaatcaagaactcattttgtctaccaaaataatgcctaccacctttgtaatagttaccaaaactggtatcagttgattagtaataaatgaaaacctggcatttaaaaatcaaacgtaagtaatctatggcagggtgcaattcatttattctaaatccccaattgtacaaaataaaaattgggttgctttcaca

SEQ ID NO: 371619 - DNA, 539 bp, Homo Sapiens
  misc_feature (407)..(416): n is a, c, g, or t
agcacttatcccaggagtcaagaaaaccaactgaggtttagaattgagaaacctttaacagcagcccagagggccaagcaagggcactctctatcatggtgctgaaggagttggtcaggcaggaagacatgcgtccttatcatgctaaggtggccttcagacacatttctcatgaaatactgtggtggttaggaatatgcttacttaaatacaggccaatgcagacttcaggtcttgcttggaacctatgtctattttgacattatttcaaggggaaaaatgagttgcattctccaaatgaacagcccattattgcacattggaagcttccagcacacagaaacaggaacccaaaccaaaatgcttaggtctggcttctgtacttattcattgagtcatttgggtcnnnnnnnnnnagtataagcatggaattacactggacattttgtaagtacagctttctttgaatcaatacccacaacagttcccttcaatgattatccttctattatcaggttagggaattctttaaagaagtg

SEQ ID NO: 371620 - DNA, 580 bp, Homo Sapiens
aacacatggccctcaaaaaagtgagggaatcttaattatttagcaatgtggacagttctcttcccagagagctctgctttgagattctcaaagactaaatatctagatggatatacgccaagggagagacccgcacagggcacagtcccattccaggcacagagatctgtgtctgtgcagaaattcaccaaatagggggttgaagtagcaagcatacagtactggaggtggagggaacaagccacagggacgtccctgtcaccttgaggggcagagctctgaggctccaacccagaggaaacttcccattctgttgctttctctaccggtgctgaggaaggaggccagattggtacctgttgtgggaagttttgtctgcagagaaacttgaatagaccccccgactcttcccggagcagaatttgtatggactctctgggtgtggagcccaggcagggctcacttctcaggctgaagtcgctgagatgaatgggcagcccaggctcagccccaggccctgctgcaggcttgtgggaattggtgtctcaccagggtgtcggcgcaagatttgttctcagag

SEQ ID NO: 371621 - DNA, 526 bp, Homo Sapiens
acctggaccgtcatagcagtgggcaccctcacctccagagaaaacacttattaaagccacatgaatccctaacatagtacttgtattaatgatgactcgtagggcaaactatttatgcagcttttcccacgtgaactcatcatagaactttttttccccctgaaaatatcatgggcagagttacataatgaagagacaggaaagtctttagagcatcttccatgccctgatattttagtcttttaggaagagataaagcattgcttcttccctatctgtttaatggaaagggaactgtttctcatgcagctgacaggcaaagacacatcttcctctcccctttccacccctcaagcaaaaggcaacaaagtcattagaagctgggcattaaacaactaaaatatactgatattcctaggggatagtccaagacacaccccagctcaggtacactctgtatctgccctcagggtgcagaagcagaagagcttttacagtttttataaaaaaggagtacatacaaaaa

SEQ ID NO: 371622 - DNA, 639 bp, Homo Sapiens
tcacaccacacacacgtacatgtgagagcacaaatccgcacacaaacgcctgggctccttagcagtgttcctttacaagtgaaggggaaagaggcctttgttttctacctcattcgtcgtcatttgtcttgaggaaagcctccgtgtgaaggcaggggaggctgcccccaagcacagcacagctgggaacgcctttgcaagggcccctttgtcctttcagtgttcttttcagtggtttagtgatgacttcactgtacggtactttaagtataggctccttgctaagtaagtccctttgttaagaatggattttaaatcctgagtaaaatcaatgaggaaatcagggaacagcggatgaaccagacagcgcatatgctttacttctaaggaagacgttgaaagataagaatggtggattcttccttccatcagaacggatttttcacagaatcccagacaacaaagtgaaatgccattcaaatgcagccattatcataccccgtggtggcttgagccaactgcaaaccccgtcaagcatgcaccggtcaaaagcttacaacgaacagggagctctttcctcgctgcttcaccgctgcttcaacacaggcggcaccttaggaggggggatctctagagtca

SEQ ID NO: 371623 - DNA, 149 bp, Homo Sapiens
tacaatgtaaactaaaactataaaactgttaaaacatgggagaacaaaagagaagataacccacagaatggaagaaattattgcaaatcatgtctcttataagggcctagtattcaaattatttaaagagttttacgactgaataagat

SEQ ID NO: 371624 - DNA, 151 bp, Homo Sapiens
agtccataagtgaaaatgactgatgtttgatctgctggttctcccagcttgtctaaaagtagaaaaatgaacatgggttcacattatagggtggcactttgcagagaagacatttctacattttcacagggcaaggattgaagaaatgcaa

SEQ ID NO: 371625 - DNA, 227 bp, Homo Sapiens
agcccaaagtgaaaacacccctcttctccttccgcctgcccactctggggaggtgggtggaggactggccatgcttcatacaccaggttagctgatttgaaagtgtcatgctacgtggggacttggcgcgagcgagggggaaagaaacctgatgctgtccctgttgcgagtactcactggggtacatgacaaagagccgccctcactctctccttttagtctgaaat

SEQ ID NO: 371626 - DNA, 751 bp, Homo Sapiens
ccacagccctaagtgcaaaagtaagttaatacgactttggaaattaaaaaaataccgaagaagctatgttgcaatttggatcatgaaggcaattgtaatttgctgcctctgagcaaaatagagaaaatacggcagattctggatgcaggtaggtagaaataaaatgttaccctcagtgttcattgagtttcaaatgtcttaaggacagtttattgaactggaaatatgtatgtatggaactcaaaagaaacattgtaaacaaagacaaaagtctggtcctcctcagtgagtagaactgcacagctgagagaagagaagagaggtagaatgaaattcagaataatctacaaaagttaaagaccaggcctgtacaaagaaggctatgatgaacactaaaaagaataaagcatcaacgtagaaaaaaacgcaaagcagatttctccctaaaaggtaaaatcttccacgactatgaacagagtgtttaatttttatttaaagttaggttttcagatgctgtaaaaataaatgacagacttttagaattttctacagattattaaaaatttggtggatgttggcataattttcctagcaaaattttgaccttaacagggaaggtatattagaaatataacacatttctattttaaaataatgcttagtattgaaagacagaatgatccctaattctccaaaacccattaaataattttattttcactttgggctagcccaaagtgaaaataaccaa

SEQ ID NO: 371627 - DNA, 441 bp, Homo Sapiens
  misc_feature (39)..(39): n is a, c, g, or t
agcccaaagtgaaaacagctgcctggaagactcagaccncagtaaccttggatatgagcttatttctgcctttgtcaccagtatgtttttaaaggcaaaaagaggccacaaggagtgggctgatataaagctgtttgtcaggaattttcattggtttacacagatgacattgattagtgattggctatacactctatgggctacggtgtcctgtgtgtggcattgttaggttaatttatagccactcatgggatagctagcagttttaagacaggattccttagcccaaggagggaagtggtctgtgactgctgtctcattcccacgcgcctctggggactgatcatttagaggaggtttgcattcctcagataaaagctccttttctttctcagatgctaaattagttattatttacatttaaaattttcactttgggct

SEQ ID NO: 371628 - DNA, 454 bp, Homo Sapiens
agcccaaagtgaaaaggcaggggctgttgttgagaaacaagaatttcaagacagcagagcattacaccaattctgggacccttcaagcaccaaaccctgcacaggtcacaagtccacccctgactaggatgtgaagttaaatagatagtggattcggttcgaactctgctacttatttatgtcgtttctgaacccctgttttctctattttttatcttcctataaaatttttcttgttgtagtctatcctcttaccaaagttggagaacctgcagtaagaattgggagtatgtatacttattttcttagtccatgtgagaacttctgcgatagtgtttccttctgtttggctggtgcagcaatcaagattagagttttgtttttaggaaagtgattatttaattaaatatatgtataccacattatagttttaaaagtgttttcactttgggct

SEQ ID NO: 371629 - DNA, 570 bp, Homo Sapiens
agcccaaagtgaaaagtaatgagatacactgagtccacaatggtgacgggctgagctcaagtgtttgattcttgtgtcactccaagttccaagggaatgacaaaaggaatataaaaataagaataaacccattaaaaagccagaaaacaggaacggatgccatcaatcaataagaaattttgaggaatttctggaagagatacagcaaacaggatcaaatttacagaaaaatcagatttagccagaattgaggaaccaaaacctaaaaggtcagtgggaaatgctaaatctgggaagacatgggatttgctatatagggtctggaaaaatactcaaaatcagagaccacagagactgagaacagaagtaggcactgggaaggcagggggcggtgagcaaaggactgtggagtgccaagttgctaacgcaactggaagaaggaaaagaggaagggtattgtgggaagagcatgaaattctctacctgcagggtaaactcttccccacttccttagttcagaagggtccatccagcctgctgtcctgatgttcctcattttcactttgggct

SEQ ID NO: 371630 - DNA, 585 bp, Homo Sapiens
agcccaaagtgaaaaagaatgatccagccccaaatgtcaatagcactgaggtggagaaactctgctctacatgttctaataatactcgaaatttttccattacctcatttacataccacctttccctgaaataacttttaatcactcaaggtttttccaacacatgtgtgatgtggctgggggtctggttggatttcttgacttcacagatgaagctactgatcaaccacaggaagcagctaaatacagttgctcagactgaaaaaccaagttgctgcaggactacatgctcatccgcatatgctaagtacattttccacatttggtactttttatggggcaaataaaacccacgttgctttctcaagatcacacaaagatcaatcagtgttctccattgaaatgtcacccaactcagggaaaagcaaagaaaatgtgcctgtctgttgaggttgaggagtccatctctgggaaggggcagtgagatgatgagtattttcatgtctcctgaaagtttaaaaaacatgaatttttaaattttcaatataatagccagaaaaaaatctattagtttcactttgggct

SEQ ID NO: 371631 - DNA, 443 bp, Homo Sapiens
  misc_feature (199)..(245): n is a, c, g, or t
agcccaaagtgaaaacacggctttttctgtaatgaatgctattatttctgttttcattggttgaatactctgcaactccttggacgaggggagcaatcattgtagttctagtcattcactgtccctctagaccattgttttgccatttttgcacagcttctgatttttcaaaaagtccttaccatctgttctctccccnnnnnnnnnnnnnnnnnnnnnnnnnnnnnnnnnnnnnnnnnnnnnnntctgatgacttccaggatccacatggatcagttttcttcttcattgcattctctagtatccagtacctcactctcatcagttatctttctctcttccatcttcaccttcgctattgagtctttcttttcagactacaaatacagaggtcttgtctatcctaaaacaaataaaaattttctgccttttcactttgggct

SEQ ID NO: 371632 - DNA, 268 bp, Homo Sapiens
  misc_feature (190)..(190): n is a, c, g, or t
agcccaaagtgaaaatatatagaaatggaaagaaatagtatcattatttttggcgggccaccatgtttcctgtactatttcaggtatgcagaatacagaagaaagtgaatcttggtgttacatgaaatggtttctttcaaaataaataattatttacattttcccctaatactatgtctatgaaattatntgtgaaaaacatagattccttgaccaggcagcattttatatttaataaaaccaacatgagttatactgaacaacagag

SEQ ID NO: 371633 - DNA, 510 bp, Homo Sapiens
agcccaagtgaaaagaaaaatgaaaagtgaaaagctgtagagtataaccatgggaggaggtagataaggcaagtaaaagaaaatctaataagaagtgagactattaagaaattgaaaggacagttcgattatacccaataacgtcagggtcactagcagaaatagcgtacaggtaaagaagaacacagtgatcttggtacaaaaccttttcaatgaatgaagagtgacccaaatatgggtaaaaagcagcaatgcacaaaataaattggacaaggactgaactcttcattcataatataaagaaatacacttcaaactacaagttctccagaaaacttcctaactcccttactagataagtggcctttctttacgctttaatggcacactaggcataactacatcatcatactaacctggttaagtaaaaagtttatctgctatcaagtgtctaagagccctctgaaagatagaataatacccacatggtatatacgccacggtttttca

SEQ ID NO: 371634 - DNA, 599 bp, Homo Sapiens
agcccaagtgaaaagtctggggtagggaaaaccactaaagtcttagagttgggcagacttaagtttgaatcccagcttggggaaggttctcagcctcagtttctctcctatgtaaactggagaatatagcatctaccttgaaagattgtcttactcctatcttatttttatcatctactgaccctgtggtaattcttcttcacgttatatattatataacataatatatgtgaaatgtgagtatggtgtctgcaaaacataacctttcaacaaatgacggtaattgctatgagctacaatacagtaaagaatacaaaaaagctgacctctccctataaaatgagaaatgatagttgcactttccagaaaggaagttatcttctattccaaattaacagtgatataaaatgaaataaatcttttgcagatgttttttcttccaaaatgtatgtggaaattaattttaataaaatcctagagatatgtatcccttctatgcatagaggcaatttgttgtttctataacgaacctgaaacagcactaagagagttaagaccagtcagagattagaggaaacaacaatattctacctctttct

SEQ ID NO: 371635 - DNA, 421 bp, Homo Sapiens
  misc_feature (252)..(272): n is a, c, g, or t
ctcggtaccagcccaaagtgaaaattcaaatataatcctaaaagcagaaagactgacatttaggggaggggaaaggatggataaaaagaacaatactcaacctaccagcctccaaagagaagtcatgcaattgtgaatacatgtcaaccaactgttattaatattccagccaaatcacactgaaaataaaaaaatctggtaagagctgtagtggaaagccacattagcccaccttttaatggtatatatatnnnnnnnnnnnnnnnnnnnnntatatatataaaatcattatgccatcagtttgagggagagcatgtatgccaacattgtagagactaagtgcccatttatccataattaagataagcagacattttccccactgtactataaagttagagtttggggctgggtatggtag

SEQ ID NO: 371636 - DNA, 539 bp, Homo Sapiens
agcccaaagtgaaaagtaactggtagaaacactagacagttttacataagaggaaggaaggactcgatgacagacccctaagcttctgtgagtctgtaagcactggatcttttttccctccatcaattcctgaatatcttcacccctggagagtcaatttaaacattttatatataaattggtttgagttcattgacagaaatacctgttcctccagtgagagctcccttggctacatcaccgtttctctgatcactggttttctacgaagaagaaaaaaagaggacttttaaaaattagtgttacaagtgaaaatgaaaaagataaaagcatacaaaagtagttagaaaacggccatgtcaataccttatctgtagcttctgttctcctggttcttttcataatctcctcaagtcgctataggaaaggaagaattgagcaagaagattagacacagaaaaaaagccagcctggcatatttaactgatgaaatagattatttaaaatggtctgttattttggaaaaatacaatatgcac

SEQ ID NO: 371637 - DNA, 530 bp, Homo Sapiens
  misc_feature (90)..(101): n is a, c, g, or t
tgcaagttagcagattcgaaagcaaaacagaacttcaacaaagcaaatttcattaagtgaagctttaaaattccatacactttatgttgnnnnnnnnnnnncctagaatccatatggtaaaaggtcagggtggacattcaagaccggatatatacttctcagtagacaaacaaggtatctaagggggctggagacccaaggttttcacggtttacaaggccaattaattttcatcaccccagaacttaacaagggggatttattaaggataaacggtatccctccatattcaacatcctcaacagtcaacataagcaccatgtgtgtcagggtgatatgacaaaaccctagagctctggagcacacacagtcacaatacacacaacaggcacacccctccatcccaatccggggggacaactcactggttcagatgtccttcctatacgacagaaataggtcctttcactcactacccatgtccattccaaacgggtcaaactagttgttgagtaaaatttaaacaactg

SEQ ID NO: 371638 - DNA, 470 bp, Homo Sapiens
  misc_feature (47)..(47): n is a, c, g, or t
ggggaaggccagggatgaaaactgaagaagaaaacccctagaaaacnggcagcaaaatttgacccaacgtgatgccaggtgtgtcccaaattgaagaaaatctgcatccttgaacctaaagagaatcctaaagtgaaaagacccaggaatgaacctacctattctatgtccagagcagaaaatgttcaccactcctgagtaaggctgggagtgttgcctgggtgatgcagcaaaaaggacctttattccagtcctgggcacaatagtctgcatgggcttagccaaggagaagcagccactcccatgttcccactcctaacttagatcacgtcccctgggacctgaaagagaccttagagtcatctagatgaatcactctcatttacaaatgaagtcactgagactcagagagttttaaaaacatttttaaagatcaagtttgttgtttgtaaatgtggctcttgcaccct

SEQ ID NO: 371639 - DNA, 613 bp, Homo Sapiens
agcccaaagtgaaaaagcaccatttcctcaacagtgtaaaagacagggatatctttcaattgaccaagcaggatttcatgaccatctttaaattacgtatcgaatacactgattggctaggcctaggacagtgcctggaacactgggagacccgagcctcaagtcctgctgcatccaggagttgaaattagtgtctcccagataacctggtctgagagttgaggattatttctcaaggctgaacagggtactgatttaaaaagaacaaaaaattaaatggttgtgatcagcctcttagtgaaaattaagtttttgtaaatattgccctcagatttcttgagacagagacaaaggggtgaaaattggggaataaatcatacagttatttcagcttgatttaatttattcatgaagaccatcataaaatatgcaaagggaagtggagaagctgccccgtgtactataattaaacatccctactagcaagattaattatatttcctccatggtaagatttgcatcagggtgtggtcactagcgagctcttactggctacatttttgacctcagaggatctaaaggtagatttgtgtttaatgtttcactttgggct

SEQ ID NO: 371640 - DNA, 741 bp, Homo Sapiens
gcctacttttgtttcaaaaatatgcatatgtaagtagaaaatatctgaatgccgaaaggctactatccaaaaatattaacagcagctttctctaaacagaaactaaagcagtttctcttttcttttggcttttctatacttattacatttctaccacaaacctcttggttataatttctccagttgagtcagttttacaatttggaatgcagagatcgagtggttctataatcagcatatacttcgcacgtaccattcattcaatccacacccctttaaacccctttgacacacgccaaactcatttacatctatgtccctccaatgacaatatagtggtcaacacatataaaacatgaatacactatatcaagacactcaggaatacatctctgggataaaatctgactgccttctattatattttaatgaataaccaaaataaagggattctttcagttacagagagcagaataattaaaatagtaactttcaaactttgtagcagcagaagtatttcttcaaataaaatcttttttgaaacccaatatagaaaacagataaaaataaagccattctagaggtgggggccttggaaagtgagtactatccactcagacttctttcttgcctctcacaaggaaggaagctactgtgtagtttgaaaattactatttaatacattctgctaaccctaaatgccatgtcagagctagaagagaaaatgtacacacattcaat

SEQ ID NO: 371641 - DNA, 436 bp, Homo Sapiens
tctagaggaccccctgctgttaagtctcattctgcaaccaacatgcctccctctttcccctccataacccctaatactgaagctggagttgtttaccttctgtggcttctaggttcttcacagtcaggttgtccagctcaagtcactccatgtgcaggaacactgctcttggctaactgtgacctgggcatgtcctggtggtgggctgcagtggacagcagcacatgaagctgctctccagatgaggccagcagtgaataaaaaccctttcattgtttgatcacaagaaacagtgatcttttgtttacactgcctacttcctactctgtccagggcatgtgcagacaggaattgattgaagtgcatgtagaccaaaatctagccctgaatgagacaaagtagagttgagaaggtgacttgcagaatgagatataca

SEQ ID NO: 371642 - DNA, 147 bp, Homo Sapiens
tgacaccatcgagaacccagacccataaataggtgggtcagaaggcaacagatttctaataggatttctacacctttagaatccctattagaataatcataaggtgaatgcagccagaaggcgggcaagtaccatatttccaggtac

SEQ ID NO: 371643 - DNA, 456 bp, Homo Sapiens
tgacacccctcgagatcgggcccatgcactaccgcctgggtgacaggaccagactgcgtctccaaaaaaccattgccttttagtggggggaaaaaataccataattagtaattaaaaaccacaaacgcttaagttgtgccaggcacaattaggcagattttaacttactgaatccttgcaataattatatggcaggtactctttccccatttcacagatgaaggaattgatacaaagaggtattattggctgtcttgcctgggctcacatatctattaattgagggaagtagaaaatgaagttgggctgtctccagaacccttactattggagagcatatcacctctcacaatatttattaagttttactattctgtgcagtaatgctgaatgtctatgcttaatttgaatttaacttagattaaaatttattttgatttattttctcgatggtca

SEQ ID NO: 371644 - DNA, 621 bp, Homo Sapiens
  misc_feature (24)..(24): n is a, c, g, or t
  misc_feature (68)..(77): n is a, c, g, or t
tgacaccatcgagaacagagaatngggaagcagttagagatggcatcatcatgaaaaatggttagagnnnnnnnnnnggagaatgaagggatatgaaggaagtgaagtggtcccaagagtccaggtgacatcttccatgaaacttactctgaagcaactgttcatttatactccttcaacctgagagcacacacatttttctccattttatttcaagaatacttggagaaattgatgcacctttacccctatcatagaaagctaattgcacaaccaagatagaattttagaatcaacaggtatttacaggcacagtatttactatgtatgggagatggtgttaagtgctatgaggggtagtcctggcacttaatggttatatgcctctctctcattaacaatgtcttagacaaatcgagtataatacaaatcgagtgtaataatacaattgacacattgggggctgcttcttgaaatagcacttaaaaactctggagaaacgaccgcatttgaatattttcactaaaactttttgtgctttagctgtataaaaagcacggttttgaaccccaagtttgaacttagcgtcttggtctgctgtaaaaatctcgatggttgtca

SEQ ID NO: 371645 - DNA, 558 bp, Homo Sapiens
acacccaatcgagatttgcattaacctctgctagcttctcaagtaatcatgccaaggacactggtatctctttcactagagacgatagattggattctaaatttactatagcattaaacttgtatttttccctggattgttcttgaattttcttgttttgaaaggtaattttatgcccgtgatcacaaacagcataataaaatgtaacctgagaaaaacctttgttagcttaaggaactaaaaacaacattattttgtttttgtttctgttgggtgttcggaataaatttaaaaagcagaagtacctgtaagaaatgaatcttttaggagtgtgcttttctaactgctacagctaaggattagttaatacctactgggaagtgttttctcaatattaatttctgttttcatgtttcctctttatgtccttgtaaattatttgttcatttttatttttagcagaaaagagaagattggacttgaagctggaataaattattatttcacattatttttaaataatttactctctggatgtccctagttctcgatgggtgt

SEQ ID NO: 371646 - DNA, 425 bp, Homo Sapiens
  misc_feature (350)..(382): n is a, c, g, or t
aacactgggtctcactgtgttgcttaggctggtggatgcttatgtgaatcaagttcaagaataggagtaactagcaagtagaagatggggcaggtggagctggggcattttagaccaaggagccaacataacaaaaagcccagagataagctacatggtggtgtatacacaaaagaaatataggaatatagcatattatacctcacgtgagtcagcaagaaaggaaggctagtatcatcgaaaactattttggatcctaccctcgagagatgggaaccatggaaatcatttatggaaggaattaatataattataactgtgttttaggtagataatcttcttaaaactcnnnnnnnnnnnnnnnnnnnnnnnnnnnnnnnnncactgggtctcactgtgttgcttaggctgtctcgagggtgtca

SEQ ID NO: 371647 - DNA, 551 bp, Homo Sapiens
tgacacactcgagagataaaatataaagaaagttaaagtttccaaagggtgatgaaattaattcttgggcttagaaaataatgacaatatctcacattcttatagttcttatctaccaacacgctttggagtttcctagcaaaaaaattacccgagtcagagcttttgtcccgagattaaacatgccctgtgactatactgttacagctacagataactcacaccttttggttgtaaatgtactagtctcaaattcatctgtttgcttgcaaaacagatgggctctattgagtgacaaaactaagccgatgcagctgaggcaatactccaacagggtgaaagcactcaatctggttcccatgtttctcctgcaaaagaaccttccccttgcttagccaactctacttcccctccttgaggaagacgggaggattctctgtgatctccagggtgaaaccatattagatacacatgtggatccagttttaccaggtatgccacttattctgttgcatatgaagggaaaactatatagtctcgatggttacggc

SEQ ID NO: 371648 - DNA, 747 bp, Homo Sapiens
tgacacccatgagatttggtgggaagggaagcagaaaaaaaggaaaagtaaactaggttagttggaggaagagaaccttccggcatgtaggggagcccctacctccatctgtcccggcgggtggcttggataggggaacagggtgggactcaacaagggctaagtctgaagatatagatgatggtcacaatagctactgagagagctcccagcatccccctctctgcgcgttggctcaggtgactgatgatgttaatgaggttaaggtcatgagttcaaacccggcaatggataccttgccaaggctaggggaacctccattgtgcaaccaaggagcaccatggatattatagccctcgcagatgaggcggcccatcacccacatacaagttattatgacaatgggccccaggaaagctctggggagcagagctcagcaccatcatcccctctcttgagtaaacaagtcaaagcactgtgctcccctgcctgacataggggtagtggtgccaccttcatatgcaatttgcacactgctctatagtttccttaggggggagtcagcctctgtgactctactactgtgggcagtgctgaatccccagactgaggagcttcagagggtgctgtcctctctccacatgggttgatactgatagagtcctcagtataatatagtgagagatccaggaagaataggtagaacaagctagtcatgggacctcccaaaacggagcagcaacatga

SEQ ID NO: 371649 - DNA, 356 bp, Homo Sapiens
ggtcgatctaaggatccctaacccattcgagatccttgcattctggttacgagaagcgtaagttaagaaaatcagaaagggaggccttcctaggcacgtacacagagacataggcagctggggcaacatgtcagcacacaggagttcacacggggaaaaagacttcagcccgagtgtgactcagaaaccacagggcacagcacaagacagggatgataccacagacagcacaaacattggaactacgttgtgtggaggttaaacttacaggcacggaaacgggtggagcaatcattaacggagacagaagaaagttgggaaggctctctcgaggggttgtcaggttaccgagctcg

SEQ ID NO: 371650 - DNA, 682 bp, Homo Sapiens
tgacaccatcgagaacacgcctacagaaagctgggcccggcggggggccatggtgtttcaggggtttcactccacggcgtatatgatggatgatgaagtgggaagtctggggggaaaagctgaagcctcagtttgtcaccaaatggctgaagaccgtatgtgatgttcgcttcgatgtcatggtcatgtgccttcttcctaaacccatggaatttgccagggttggtggctactgggataagtcctgtagcacagtgactcagctgaaggaaggtctcaaccgaatcctctgcctgatcccctataatgtgatcaatcaatctgtctgggagtgtattatgccggaatggctggaagccatcagaacagaagtcccagataatcagttaaaagaattcagggaagtattaagcaaaatgtttgacattgaactctgtcctctgcctttctcaatggaggagatgtttggttttattagttgtcggtttacaggatacccctcctctgtgcaggagcaagctttactgtggcttcatgtattatcggagttagatatcatggttccacttcaactactaataagtatgttttctgatggagttaattcagtcaaagagctggcaaatcaaagaaaatcaagagtcagtgaactggcagggaaccttgcatctcgatggtgtca

SEQ ID NO: 371651 - DNA, 149 bp, Homo Sapiens
aagcgaaatttatacttagaataaggtctccggagttcttaaatttattttacagattggcaattccaaacatttacaactattttatgggaaaaggctttttttaaaatgatattggaggcttcatttatctcgacggggtgtcaggt

SEQ ID NO: 371652 - DNA, 331 bp, Homo Sapiens
tgaacacccatcgagagagagttgtgaataaacaattgatgaaagtaagaggtagttttctccagggattcttattagggggaaggtgccaaaaagtaatgtagcaaatctactcaagagaatagttactttagaaaggtctttagctaaggcccttgtttccttaattgattttactacttaaagtttgaaaacattgattttatttttttggaatattctggtctcctccagccaattgcccttgatctgtgtttatatctactctgctggtcttttcacattaaaaaaggaacccatgtactgaagtatcaggagaaaccagagttgg

SEQ ID NO: 371653 - DNA, 681 bp, Homo Sapiens
  misc_feature (133)..(141): n is a, c, g, or t
tgacaccatcgagagtcattctaaaagacaaagtttagaaacatgaagtcaacccacattttacacagcgtaaagctttttaaaaaataaaatgttaaactttatcactcttggtatttctattcagaaagannnnnnnnnaaaccacaaatacactcaactgagatttgccgaccagcaaagctatccttgaggaatactacactttggacaaagtggagtttccctagaaaattaaatttcactaaatatcttttaaaagccagtccagatacataagagaaagtaggagaatagggttgtggggatgccaaggaatggggagaagcatttcctaagccagccaccttgtttaaactgtgtggatcctagaatgtttttaacatgtgcagctcgaatggaagctacacagcacagagattttaggatcttcctttatcctgccttcaaaatactactaaccaaatctgtgccctacagatatggtaagccgcatatttattgttaataaaacatttccccttgctgtatttttccccctcaaaaagagaaatcctacttctctcagacacatcgatttcttgtatcacacgtaactaaccacaaaagccttttcagcttttactgtgatttggcagcaaggctgcagcaaattctgaaacttgggtctcgtgggtgtca

SEQ ID NO: 371654 - DNA, 382 bp, Homo Sapiens
tgaacccatcgagaatgaagtaagtagctagaagacaaaagcctcagaacacataaatctcaaggggtatggagtagaggactcagagctctgagataatgggagcccagggctatccaaaaactgggataacataaagttctggtttcaacaaagtgtgtatcctttccatatgtgagaactcggaggcaagtacaaactgggaacaaaagaacatagtacagggtaatcttagaaagatgttgaaaagaaagctatggtgggcatctaaacggtttcacggccgggcaatctatatgtatggtcacttggggatgcttatgatgccacatgaagtggataaccagctcatagtactggtggtacggaaaaccaagtatgc

SEQ ID NO: 371655 - DNA, 243 bp, Homo Sapiens
tttctcgacgaaagctattacccaacacggagattatttcgctcgggtctgtggcctcgaggttacactggtgtaccggtgttgctgcctgaagggtatttttggtaaattccaatttctctaagagaccctctgaggttactaaggtgtctagctttctactcgggttttcaggattctgagctagaccaagggaagtaacattgttcttcaacaattctctactcccgggtggaaaagtta

SEQ ID NO: 371656 - DNA, 286 bp, Homo Sapiens
tgacccatcgagacagaccaccacatcatgctgggtgttagataaatatgtttaatcttcttcttatttatcctaacaagcagatatttaaaggaaattatcaactaagcaagaaattttcagaaagtaagacatgtattggttcaaatacgggcttctcacaggaaagtgtattttaccacattctttacttgagcatacggtaacctcggcaaaagttacacattttaggaagaaaaaaattttttgggcaaaattggtattacggaccaaacttggaaaaaag

SEQ ID NO: 371657 - DNA, 486 bp, Homo Sapiens
tgaaatcaaaacacaggtcaactgaccagcctgtcctcgtgtcctgtatcgaattagtgaaaaacttaatactgtcgtcttagaaacttgctcgaatcgagtagcccttgggaatggcaagtaattgaccaaaacaggtcctcttctacttgtgaaaagaaacattgtctgccagccagtccctctgtcaatcctcagattccaagtgaagccattgataggaaaatgtccagacagacaaatccgtaaacacagaaagtagaatcatagttgcccaaggctggagggcgtccagggtttctttttttgtgtaatgaacatggtttaaaattgattgtagctctatgaatataataaaaaccattgaactgtatgctttgaaggggtgaattttatggcatgtgaattgtaactcaaaaacggttttttaaaaaacacccaatatataaaatacataccatttggcatttaagtctcgatgggtca

SEQ ID NO: 371658 - DNA, 208 bp, Homo Sapiens
acacatcgagataaatgaagcctcaaatatcatttaaaaaaagcattttcccataaaatagttgtaaatgtttgaaattggcaatctggtaaaataatttaagactcaggagacattaattctaagtataaatttcgcttccaagcatctatacaaacacttaaattctgagtctgggtttcctaatttggtcccatcaacttacaca

SEQ ID NO: 371659 - DNA, 156 bp, Homo Sapiens
acacccacgagaaaagaagactggaacaaacaatgaagcagtgcatgcgatgacctgtttacctgacatctgcacagtagagaatgggaagcacatgatccgaaatcaaagcggactggggtttttagataatggacattacacctgtatggttag

SEQ ID NO: 371660 - DNA, 486 bp, Homo Sapiens
  misc_feature (56)..(115): n is a, c, g, or t
ggcacaactgtattcccagctattcaggaggctgaggcataagaattgcttgaacnnnnnnnnnnnnnnnnnnnnnnnnnnnnnnnnnnnnnnnnnnnnnnnnnnnnnnnnnnnngagtgagaacctgtctcccaaaaaaaagaaagaaagttacatatccccagaatatgggagcttggaaggattttggaatgagtttgtttaatgggtctctgaaggctatggagtccaagaccagtaagcccaatagagggcactgggccaacaggcccccaaatagtaatcatatagaactaagcccagtagccatcctatacccactctttagactataggcatttgttatcctcacagggaaactcccaattgggttcttctgccaagccataaaccgtttgaggaaaggtaagttccgagtgtgggtgttggttctaaccagtaagatcatggtctgctaccatttggatgtgtttatcccctcccaa

SEQ ID NO: 371661 - DNA, 646 bp, Homo Sapiens
gcacccctcgagagatggagggcagttcaatataaagccctgcagcgctggtcccgggtcgagggatttggtggatctcctggacctcctgtaggcttttttccccaccccaaggtatgtcaccacgccgactgctcatcatctgctccgccgggggcccctcaacctgtgcgaggcctgtgacagcaagttgcacagcaccatgcaatatgatgggcaagtccgcttcgaccttcccccacaaggtgagcacaggcgggagccgcagctcggcccccagagctcctgtgtcagtgtttcagtaactgtcggaaacgtgctagggcgtcataaggacaagtcgactgtaaataatgaaacccgagtatgttacggttccttttgttccaaatgttttttagcaagagagaaagtccatgagcgtgccccttccagaggcaggcctttctctatctggtgctgtgctctcactggttctcacctcccccagctgcttttgcccctgggccttgtggcccacacagagaaggcccctttctttctagttctgcctatcctcagggcaggggacttctggacaagtcctgcaagccaggctgtgggcctagcagaggcagtgtgtacggctagtctggggatcctctag

SEQ ID NO: 371662 - DNA, 487 bp, Homo Sapiens
atacctactttccacagggcataatggccattatgccaagaggacttcacatctcccttaagatatagatctcaattctgttgctctttggggagaacttctttgaaaatcagcctctcaggggaactctaggaatggtcatttctgacatgccaccttggtggaccatgttttctttagtcattctggagttatctttctaagatgcaggaataaaactgaaggtatatgaaaggtaagtgttttagaaaaaatgaaatatgcataaaagctgtcccagatccttgggacaggaatgacttgacagtctgagaagacaatattaaggccctatcacaatatagtgcttctgtctgcaaaggactttcaacactctgttacattaaccctcctcagatgctgggagaggcaggaggcatcatttccccattctctcctgggggcacctaatacccatgagtaatgacccccggtgaaaaagtagggt

SEQ ID NO: 371663 - DNA, 203 bp, Homo Sapiens
accctgacaacccatcgagagtgctagaataaaaagaaacctgaaataggttataaaaagaaggatctcagcacttttaccgtaatcatgatttatccactgccaagctgagattttaacctggctgactacttctgtgctgtaacaccattaacctgcttaaatgataaagccgtagtttctccttttgggtgtgtagtgga

SEQ ID NO: 371664 - DNA, 477 bp, Homo Sapiens
tgacaccatcgagagaatgtgtgccctgcgactgtaatggcaattccaacgagtgtttggacggctcaggatactgtgtgcactgccagcggaacacaacaggagagcactgtgaaaagtgtctggatggttatatcggaaactgccatcaagggagcaccccaagtctgacagccgtgcccctgttcccctgccccacttggccaatttcgcagaatcctgctataggaaaaatggagctgttcggtgcatttgtaacgaaaattatgctggacctaactgtgaaaggccttctccacagagcacgagaggctttccactgaatgactcgaaaagcaatgctggattctttcaccaccctgtcgggagaatgtgtgccctgcgactgtaatggcaattccaacgagtgtttggaccggctccaggatactgtgtgcactgccagccgaacacaacaggagaccactgtgaaaagtg

SEQ ID NO: 371665 - DNA, 534 bp, Homo Sapiens
gatataatatgacccaactgaaatcaatctgtttgtaaaaagggaaattaagtccacgaggagttagcagtttatcagattagtaaccttaaaaaaaccgacagtaccaagggttggtgaagacgttgaacattaggaactctcatcactaattggcaattacctactaaagtgaaagctatgcacactctatgacctgtggttctactcctaggcatatgctgtggaacaacgtatgcctatgcgcattgggaggatacatgtaccaggagatccatggccacatttttcaggataactagacattgaaaccaacacaaatgaccagcctgaagaaggaagtcagctggagctggagtgaggggaactcgtcaggtgggctcggagttggcaggcaccacaaactgggagggcagggcgatgtcgggcatctggcattctgtggagaaggtcaccgagtagggcagagggttctccaacttgatggaggctgacgcaacttgccggactggggtcaccatctcgtgggtgtca

SEQ ID NO: 371666 - DNA, 571 bp, Homo Sapiens
tctccacatttcattggtactttcacatccatgagaaggacacagtgtgaaccaaattagtaatacaatgtagtagcaagtttatttatatacattaagtacatactccactctcccccacaccccaaaacaaaacaaactactctattagctattgcctaaataggcagtaaggaaaagggaaaagagatttgtcatactctgaacctcaattttcattaagtatgtatgcatccatacaaggaaacaagtataaaatgaagtataaaaaggtggcacaatatttatacacacttgaaagaataatatacaaccccagccccaagactagatcaaaacaacagcaactaggactactctgtcagttattgtccatgcgaacaataaggagaaacgcaaaggggacatctgtcatgcttttggaccaccgcgttttatctacacgtccacaaaatggatgaatgaaatacaaaatgaaataacacaaaatagcaaaaacatctgtacacacttttaaaagaatatagcttgctctcctctcaaaatcctgagctcaagtgatccagccggc

SEQ ID NO: 371667 - DNA, 551 bp, Homo Sapiens
tgacacccattcgagactaccactaccatttccaccatcacctctaccatcactactggcctcatggatagcagtcacctggagatgacgtcctgggcggctctgccccttctatccagcagcagcactaatgtccggagacccaagctcacttttgatgactcggttcacaatgctgattattacatgcaagaagctaagaagctgaagcacaaagctgatgcactgttcgagaaatttggcaaagctgtgaattatgctgatgccgccctctccttcactgaatgtggcaatgccatggaacgcgaccctctggaagcaaagtccccatacaccatgtactctgagactgtggagctcctcaggtatgcaatgaggctgaagaactttgcaagtcccttggcttcggatggggacaaaaagctagcagtactatgctaccgatgtttatcactcctctatttgagaatgtttaagctaaagaaggaccatgctatgaagtactccagatcactgatggaatattttaagcaaaatgcttcaaaagtcgc

SEQ ID NO: 371668 - DNA, 571 bp, Homo Sapiens
gagaatgtcacataaagataaagacagagataggagggatgcatctacaagccaaggaatacaaaagattgccagcaagccaccagaagccaggagagaggcacacaacatacattttccctcacagccctcaggaggaagcaaccctgccaacattttgactgatcttagacttctaccttccacaactgtgagacaataaattgctgatgttcaagccagccagtttacggtattttattacatggccccagtaaactaatacagtatttgacaacacaaatgtacataactttctactctgaagatagatattcatcatatgtaaataatagatacaatagataagctcctagaaaaatattttcatgaaatattaccatttacagttaacacagtaacatttagacagtaacttaaaatacgacaatattggaaacagagcactcacgtattttgaagttaaacttgcagcacttatattaaagaaggttgcattcgattctgcagctactgctttagcctttaaaaatcacaagagcaaatattaaattagtctcgtgagtgtcta

SEQ ID NO: 371669 - DNA, 450 bp, Homo Sapiens
  misc_feature (19)..(19): n is a, c, g, or t
  misc_feature (40)..(40): n is a, c, g, or t
ctagcaagttgtgctagtnctttttggggtcaatggactnccttgtttacataacagatttttaagcaaaagtagtcttgtctcctcatttggtaaagacacatatacccgtttgatgaaacgcctgagaacagcctcatcaagctcttgtggcctattagttgcacccattacaagtactctgtcatctccagcagactgtacaccatcaaattctattaggaaattcagtttttaggcgtctactagcatcgtgctccccttctcttctttcacacaaaaggctatcaacttcatctataaaaattataggaaggttgaagttctcggagccacagcaaaaagagccctcaccaatttctctccttctcccacgtattttgaagttaaacttgcagcacttatattaaagaaggttgcattcgattctgcagctactgctttagccag

SEQ ID NO: 371670 - DNA, 566 bp, Homo Sapiens
tgacacctcgagatattgtggtccagtattagagagaagactttgcaaagttctttgcaagcaactgatcaaagtctggagccaacttcagtcatgtgatttcacatagcttttcttatctgaaacttgctaaccattccccctgtgcaaactcatctagggaaatagggctactcaccgacgggatcacacttccacctgccccgaccctgaccgaagcatgtacagttcagcatgtgcccctcttcatgacgcttgtggaatgtgtcgttcacattgtaagtgatgtcatcaacaatgcactgatctgtttaggaaacaggtgggtgagtgagaaactttttaaagttccattgatgaaagaaaaaaggtatgcttctcaaagcatacaactacttccacttaattatcaacaccttccactaaaataacttttctacaagcatagaataacatttttctcaaagtttggtcagtacatacaaattttgccaaaaaaattacgttcttcctaaaatgtgtaacttttgcagagggtacagtatgcccaagtacagactgtggta

SEQ ID NO: 371671 - DNA, 634 bp, Homo Sapiens
tcacacgcaacttggcacacgcaacttggaatggcaggacgttctactcctgcaccacagaagggcgacaggacggacatctttggtgcagcacaacttcgaattatgagcaggaccagaaatactctttctgcacagaccacactgttttggttcagactcgaggaggaaattccaatggtgccttgtgccacttccccttcctatacaacaaccacaattacactgattgcacttctgagggcagaagagacaacatgaagtggtgtgggaccacacagaactatgatgccgaccagaagtttgggttctgccccatggctgcccacgaggaaatctgcacaaccaatgaaggggtcatgtaccgcattggagatcagtgggataagcagcatgacatgggtcacatgatgaggtgcacgtgtgttgggaatggtcgtggggaatggacatgcattgcctactcgcagcttcgagatcagtgcattgttgatgacatcacttacaatgtgaacgacacattccacaagcgtcatgaagaggggcacatgctgaactgtacatgcttcgatcagggtcggggcaggtggacagtgtgtaatcccgtcgaacctaatgccaggattcagagact

SEQ ID NO: 371672 - DNA, 1087 bp, Homo Sapiens
agcaccattgaatttcctcctcgagttctgaaccaaaacagtgtggtctgcgcagaaagagtatttctgctccgcctcataattcgaagttgtgctgcaccaaagatgtccgtcctgtcgcccttctgtggtgcaggagtagaacgtcctgccattgtaggtgaatggtaagacacatggctctccatttgagttgccaccgtaagtctgggttacagctgtctcttggcagctgactccgttgcccaggcacgtgcaaagcatttgcttatttccttgtgtcttcagccactgcatccccacagagtagaccacaccactgtctgtgacacagtggccatagggaggaggctgggggtgaggctgcggttggtaaacagctgcacgaacatcggtgaaggggccagatccgctcgatgtggtctgcacagaggtgtgcctctcacacttccactctcctcggccgttgcctgtgcagatgcactggagcaggtttcctcgattatccttcttgctccaggtgtctccaattctataggatgtccttgtgtcctgatcgttgcatctatttctagaagtgcaagtgatgcgtccgctgccttctcccaggcaagtacaatctaccatcatccagccttggtagggcttctcccacgtttctccgaccacataggaagtcccagcagcatgatcaaaacacttctcagctatgggcttcgcaggtccattctcctgtttccattaccaagacacacacactctaacatgtaaccaccagtctcatgtggtctcctccaggtgtcaccaatcttgtaggactgacccccttcagtgcagcggtttgcgatgtacagcttattctccctcgcccaaccccgatgcaggtacagtcccagatcatggagtctttaggacgctcataagtgtcacccactcggtaagtgttcccagtgtacttgtcaaagcaagtctcttcagcttcaggtttactctcgcagttaaaacctcggcttcctccataacaagtacaaaccaactcccgaggcaggagaggttctgctccactggatgtttgtccggggttgtt

SEQ ID NO: 371673 - DNA, 441 bp, Homo Sapiens
tgaccacccatgagaaaggaagtcatcttcatcctcagaagacaggaatcgaatgaaaacactgggtagacgggactcgagtgatgatggggagattcctgatgggcagattacagggggacaaagaatgggatctggatcattgggaacagtctacaagggaaagtggcatggtgatgtggcagtgaaaatgtggaatgtgacagcacctacacctcagcagttacaagccttcaaaaatgaagtaggagtattcaggaaaacacgacatgtgaatatcctactcttcatgggctattccacaaagccacaactggctattgttacccagtggtgtgagggctccagcttgtatcaccatctccatatcattgagaccaaatttgagatgatcaaacttatagatattgcacgacagactgcacagggcatggattactt

SEQ ID NO: 371674 - DNA, 389 bp, Homo Sapiens
atccacagagacctcaagagtaataatatatttcttcatgaagacctcacagtaaaaataggtgattttggtctggctacagtgaaatctcgatggagtgggtcccatcagtttgaacagttgtctggatccattttgtggatggcaccagaagtcatcagaatgcaagataaaaatccatacagctttcagtcagatgtatatgcatttggaattgttctgtatgaattgatgactggacagttaccttattcaaacatcaacaacagggaccaggtgctttgtcctccatgggagtataataaatgatgtggcaagggcttactctccatgagaggaatgtgtgaccaacagaaggataacacgttcgcaggtaccgagctcgatcc

SEQ ID NO: 371675 - DNA, 440 bp, Homo Sapiens
attcttctggctgtgggaaaacatagatcaatactcttcagcatgaaaattctgcaatgaagttttcatttgtaacaaacagcaacaaaaaagccttaagcatgccctgtcactttcagtttaggagaaaatgcactaataaactcttacccttgggtcatctttgacaacaggcaataccatgccagctcttattaaagactattcacatcactgcccccaaaatttcctttaaaattaccatctttggtatccatgtaacaggatgtcagctttaaaagtgccaatgagagataggacctgtcagcacagttaattctcagcactgtttcaacaccaagacagctgacccccgagagtatgttttgggttagtaatatttattgggtggttatctctacaaacaagaaaacttattctcgatggttgtcaggttaccg

SEQ ID NO: 371676 - DNA, 284 bp, Homo Sapiens
tgacaccatcgagaaatatacagtcatttgtcagaccagtgattttacactgtcacatgctataactgccaagaaacacatacacacacaggaagtacttcatagtgaggtatgtaaaaatatcagaaggggtataattgagtgactatagctaatcacacacattttccagcatgcagcatggcatttgaatttttctagtatatcagcgttatgttaaatatatcaagagtaaaggaagtagtagaatattagaggagaaacaaagggagcgaaaaaaatgg

SEQ ID NO: 371677 - DNA, 596 bp, Homo Sapiens
atcgagactctgaatgcccgctacacacttgtgtaggcaaaaaccactacttacaatgatatgagattagaagcaattctgttttataaatagccacaaaacagacaggcacagttgtaatgcacactgaattctctgggactacaatagtgtaagctgaggcaagggcacactcttctgcttggaactgggtggggagctgctgagcctctcaggaagccatgttgctgacggcaaggccagctgagaggcctggacccagccctgtgctcagcccttgcccacacaggccagtacggatcccgctgtgctgtcctcacgagtcagtccagaagcactgacacacctaaacgtatgactttattctgtttctttcctatcactttcccctgatgttacagttaggatactactctgccttccatttcagaattctgtgtgtcggcagcctacattaactatgttacccatgaattttatttctgcatagtaaaggggtatcacaaagtgttctaaaaacaggagttgagtctgataggcttggaaactaccagcctacactactgtacccagatatcagcctacatgtggcaggg

SEQ ID NO: 371678 - DNA, 622 bp, Homo Sapiens
aaaaccaggctatgttcaacccaatcctctccatgtggccaaagtataatgagattgttgtaataaatactgcagtaaatattatgattttattttatatgcctgacgttgttgtaactgtaaatggggcaaaatcaaatcaagtatcatagattgagtagctgttgtgtacatggtagctttgaaaaaagagaaatttacttgtgatcaaaattcctttcaatgtctagaaatgcttgcctcttcttatgacatgataccattcttatctttgaaacagaataccttatataatagaaacctagagcaagcaatttcacatgaggtaacaaaagagttcccagagtttttccagatcagtggaagacttaagtacaggatggagggaaattttaaaattgttcaatacaagaaagcatttccccattagagaatcaaataactgaagagagggtgtgtgtgtatctctttacagtttcttttctttttgctgtttatgtgcttgcattatcactacattttcccaatatcctacttgtattttagtagcattttcaaaatctgtatcaaataaagatagcaagtagtagagcaagatgaatgagggggtttggagacggtg

SEQ ID NO: 371679 - DNA, 400 bp, Homo Sapiens
tgctcggacctcactcccagaaaaggtacaaaatgatcacatttgctgacacgtcttccgcaaaactgccttagtgcctctgtccactctcctcgcaggagatgaatggtccacttggtcctcatttatcactcaaggcttggctaagatctgtctcgtttagttcttcccttccccactagaaagtctgcactccgacattaattcttctgtgatgacagctaattcagacttaacaggccacacttactcaagaggcaggaagattctctgtcccccaaataaataaataaaaacaggacttcatggcttatgatagtgaggctaattatcaacactgatcggtgctacttggtggctctgtttaaaacccaaattgattttttcccccttttctggg

SEQ ID NO: 371680 - DNA, 495 bp, Homo Sapiens
gtgaaacccatcgagattgagagtgggccccacaataggtatccattacccatattcaaggagatggagaaaaatatttctagactttgtcaaaatggaaagtgacttatgcagccaggatgaaattcaaacttacattactgaagtatagagcttattgatattttttaaaagaaagtcatggcaaaatgacaatccacaagtggcaatggtagataggggtagggagaaactctgtaaggtcaaaattatcctcactttaaatgaaactcctacatgttgctactataagggaacggaagccaatgttacgctcgactatactaattgtcatgggataaacaggcaggacatgatgccacatttattagtcacttctattgatagtattggtgaaaatcaattttggtgtcaattggccggggtcgggggtgccccagaccaattggttagacccttatttctcactgtgtctcgatgggtttcaggggatcc

SEQ ID NO: 371681 - DNA, 448 bp, Homo Sapiens
tcggtacccctttccacagggcagtgccacagtaatctgggaacttggtagaaaaacacaatctcaggccccatcccagacgtaatgaatcacagactctgggggcagggtttaaaagcacatccaagtgaatctaaagcaccactaaaggttgagaaccatttcttagggataagctgggaaatttttacaggtgtggaggatatttcaaatacatcttttgcctttgcactaacaagctttcatttctttcagtctcatcctccattccctttaaagtcttccccatcatatcactgatctcaaaagctagaatttgtcttcattttagtcgtatccctaaaaccatgcattggtctggacaggagttgtcccacattcccttgcaggctggtctctccatgttctctgttacagtaaggaccagccaagcttcagctgtcccatt

SEQ ID NO: 371682 - DNA, 635 bp, Homo Sapiens
ttcacaggggaaacaagagtggctatgattgatgactgtcatagactggtgtgcatgatttcataaggatttattataccagtatactctggggtacattttgaaaacttcttataagattttttagaagtcaaattcaatattgtatctactctaaaggctactttctcaagaccatacaccacaaatcatgaaacatcaatgtagtgaaatataatgagacattaaaatttacaaatatgtcaactatttcaacacaccaaaatgtatacatgaaatgttagattaaaatccacgatgtaaaatctatttacgctaaccaaaatctgagttttaagcttcactcagtacaacaatctctctcctaaaatcagcccatgtctaaaacttcagacattcctcaaaatttacagaatataaaaacttagccacccgattgtttaaagtgaggttagttcctaatacctcatagtatcaaaccaagtataatccaatttaggtaactctaagggtgatatagacttgaagacacatgggaggagaattcccatttactaacacctgctatttgctaatcatacacgtatctcatttcaatcttatattatctcaaactcatgcttccatcacatatc

SEQ ID NO: 371683 - DNA, 597 bp, Homo Sapiens
tccaccgggctccgaagaaatgaaaggaaacaagatctgtgcagttttcagccactaagaaaaatgggtgaagaatatgaacaaagttcttaaagtaggaaatacaaacagaaagatgttcaatacctaatacatatgagaaaaattaaatcaaaactgcaatattccatttttgcctatcagtctgaccaagataaaacttgacagtacttgtgctggccaggggtggtgaaattctcattcttacgtatatacactgccaatgagagctgaattgatataaaaactatgaagagcaatttggcaatgcttatcaaaattacaacacagactgtagctcaacaacactaatttttagtaacttagccaacatgcatattcctacgtgtgaatgtgtgcaatgacttaggtgaaaattacttgctgctaaggcaaagaaagcaatcaacctaaatggctatgagaatgattaaataaattatggcatacctatacagataaaatacatatccagttctgaaaaataaattcttgataaattgatactcaagtaatcttcacattctattcaaaaaggagctgaataatctgcccatt

SEQ ID NO: 371684 - DNA, 455 bp, Homo Sapiens
  misc_feature (93)..(131): n is a, c, g, or t
aggcataggactgattaatttgaaagcttctccagagaaatatcattgtataaactgtggtgttgcattatccaaatttttctctaaacaacnnnnnnnnnnnnnnnnnnnnnnnnnnnnnnnnnnnnnnngaaatcaaataagcttttgaaggctgtacatacaatctaatctgatttcatccagccataaattaaaaattgttagttctgtgctccgtattctagttgctttcgcagacacgctttgctcacttaaagtctgtataataaccccattgtaaacacaaacaactgcaaatgtgtatgtgcgcagattaaccttttctagacactccttgtaattttcaaagccagtactggagttctagagtgcattagcacatgcatcaaatggtagattccccaggacctcaccgcagtgccaactgcagccagcctactgcaccaaaacca

SEQ ID NO: 371685 - DNA, 572 bp, Homo Sapiens
gagccggtcctactttccacaggggcatgacctgatgtacattacatgtgtccacccaggagggagagctccatttccctatctataaaatgcaggcataggactgattaatttgaaagcttctccagagaaatatcattgtataaactgtggtgttgcattatccaaatttttctctaaacaactggctgggattacaggcatgagccaccacacctgaccaagaaatcaaataagcttttgaaggctgtacatacaatctaatctgattttatccagccataaattaaaaattgttagttctgtgctccgtattctagttgctttcgcagacacgctttgctcacttaaagtctgtataataaccccattgtaaacacaaacaactgcaaatgtgtatgtgcgcagattaaccttttctagacactccttgtaattttcaaagccagtactggagttctagagtgcattagcacatgcatcaaatggtagattccccaggacctcaccgcagtgccaactgcagccccactacttcaccaaaaccacatcctgtggaaatcgggagcggc

SEQ ID NO: 371686 - DNA, 466 bp, Homo Sapiens
tgggtgactctaaggatcccctactccacagagagaagaggaataaggaagagtccttgaactaggaaattagagggttttaagtgagatttcatccctgtcaacatcaatgaccagcgtggatgccacctgatactgagagccctcagtattcaaaacacatctaagaaattctggacagcacagagactaccaaattttaaaaattcaacagtgactcaggacacactgaacatagctctgggcaccattcggaaagtaaacactttaaccataagtgtcaaagggcatgtgtgtagcccaggcccaaagaccagacaaaccaatattgtctcacagaaacccttttccacctccccaaactcccactccccacttgctgccttcttagtcgcagccatcactcacttcaagcaaagcagtgcacagaatatcacagtctaaatacacaacgccctgtggaaaa

SEQ ID NO: 371687 - DNA, 552 bp, Homo Sapiens
tatttacacaggcaggatgcagactactcaaactgcatgttcattcatcagagagaaagaagggccatattccattttctcaagatccaatgcactcactcatctgttttttgaaagagtcttcgtattttgaaagagtgacttctgacctctcaaggaaactttcgcaacgtgagtcttcagtagccctcgtgatgttggcactacctgtagcacagagcaccccaatcaaaggcctaatgagtcattttaatcctgttactctggtaattgtctattatgggtataacacagttatttccttagtggtgcctagaaacagtgtatgttgacctagttacaaacgttctttacacagtacagtactacacagtgtggaaaaatctatttgaacatattttagagtaaaatgatatagtaaagaataaaactcaaaattctactttcaaagttttggccacagggaaaggtgacgaatccaattaataaggctcatgatcatcaataaaaaagtatataaaggatgacagaataaagttttgagttttagct

SEQ ID NO: 371688 - DNA, 696 bp, Homo Sapiens
cggatcgagctcggtacctacttttccacaggctacttttcacagggtgtggcagagtacagccaaggaggacacagaaaacaaaccggtgcttagcactcagaacgtgcctggcactcctttaagcaccttccatgtttagcttgcttaattaatcttcacaacaaccctaaagaaagtctgacactcatttcacagttaaggaaaatgaggcacagacaggttaagtaactgcccaagatcacacagctagtcagttatctgaaaccccagagtcagcatggctccgtgattcctgcttcagcacagactgtgatgtcaacactgtgctagtctttacgaccgtccacctgtgccagctcaacattaaacagggccaagaaagcagctccagctttacctggagcaatgtgtatgacagtgaataactccttcaaataagaaatatgccaaaaataatctcatattgagagttgtaaattctaatcttgtaaatcaggctaataaagatataacactaagcataaatgttgaaaatgagtaacaaaaaaaggttattcaaagatctgctaagaaaaccagtaacgttaagaataaaatcctgctcgcgtctcagcaactccagagcagacaagctttaatgctgtcaggaaatcctgtgtgctggtggcacaaagaccctccctgtggaaagta

SEQ ID NO: 371689 - DNA, 462 bp, Homo Sapiens
tactggtaccacaggtatttattgaaggagaaaccatattcaaaatgttaggctataattgttctgaatcatacattcaaaagtgtatgtgtcttatcaacataaagtattttaaaagattggaacactagaaaactaaataggatggctattgaggacaacaggcatagttttaccattttggtaccttctactgagttaatcttggtataaacatatttactttaaaagtaatgtcaaataaaaacctaaatgaaaaatgaaatagttttctatcaaggaatcatcttactgtatctctgtatcatttatggtgtatgtgttacatacattacaaatgttatttgatgtcatgatttctgaatccaaactggtatttgtcagctaagatttactgcttgagtacagtaataaaaatgaaaatagttttctgaaattttatgtttaaactaatttgttagt

SEQ ID NO: 371690 - DNA, 596 bp, Homo Sapiens
gaaatggtgtgtgagatgtcaacattgtaagagaattagaattctatcagtatgataaatcattgaacttgctgttgaaggacctaaatttaaattaaacctttaaatgctataacttcttttcgattctggtactacttggagatcatggagctcgtaagtggaatgaatgtgattcacaagtacagcaattgttccgtcaattgccgatgtgttcccacagtatatgtttgtatgtctgtcaaagtgtaagtcaataagctgtagtgagttgcctcgtttcgcacctgtgtcgttagtatacaacgttcgctagtgtctagatgttgtggggctgtttgtttgacatcaggattgtaggtgtggacataattggtgtcagatgcagtatgtttattaatttcctagcaagagagatgattttaaacatcaagctaagaatctcaggaaatgatgtgtttgaataataaacggacagttatcccaggtagtcacgtgaccagattcacgtctgctcagatttagttaacacacttcaacagtgcgactaaaaggaactgcacccagagcttgcaagccagtgacctgtgaaagta

SEQ ID NO: 371691 - DNA, 830 bp, Homo Sapiens
  misc_feature (724)..(756): n is a, c, g, or t
gctacactgaaattgcagttgtcaaggtcaccagtcacctcctaattgccaaatccaacggtaaattttcagctctgatcttacttgacctttctgtggtacttgacactatgaaacactccattctccttaaaagtttctccttccctaaccttttgtgattttatcctctcctgattttctttcttcctcattttcgtatttatcttccctttgttcacctttaaagaaagatactttttaggatgatgtcctgtattatatttacatagagcaacaataggagataaataagaaatcttcagattcttacacaatgcctctgaaaactgcagcttattagaacagcccaaatactctgggcatttacaaatttgagtgcctggaaaataattggtagtgtaggatgaggactaaacatactgcactagcttcacctcttactggctatatgacctgagacaagtccctacgcctcagtttccttgtctgcaaaatgcagtaacgacagtaactgcctcctagggttgttgggaaaattagaaaaccagactgcacatgagaatttcaattaatgctaattattatttaaaatgaacagaccagtttcaaggcctggcttggttactaactagctggtgagcttaatgtcacccagcctctagtgcaagaggaaatttgaattgataatatctcacatctcttcaatacataaattatgagnnnnnnnnnnnnnnnnnnnnnnnnnnnnnnnnntacactctgtatttctctctgagtgtttatatagcacttttcttatcgtcccaccagtatggtgatttcctcct

SEQ ID NO: 371692 - DNA, 468 bp, Homo Sapiens
  misc_feature (226)..(341): n is a, c, g, or t
tagatgactggctcaaagtaagcactcaataaatattgactgtgttgactctcattactttaatcattagtatctttaaatacacttaataaaagcctttcttaacaagcatagctggaggcctttcaggaaacaataagatgataataactaacacttaccgagcacaaatttgtgttttacacactctgctaagcactttacttacttttatttggttttatannnnnnnnnnnnnnnnnnnnnnnnnnnnnnnnnnnnnnnnnnnnnnnnnnnnnnnnnnnnnnnnnnnnnnnnnnnnnnnnnnnnnnnnnnnnnnnnnnnnnnnnnnnnnnnnnnnnatgaaatggtgctagctcatttagtattataggtccttgacctccatttatttttgtatgtgtttgttttactgctttgttcccacccatgaacactgctagaaaaattaaactccgggttaatcca

SEQ ID NO: 371693 - DNA, 670 bp, Homo Sapiens
tgctgggattacaggcacaagccatggcgcccggctgattgttgtttttacatattaactagccttcactactactgtgattctactactttgatacattgtgcttgtatacatttcgtttactcagaaaatgcacctgtcatgcaggttgcaattttcctattctaatccttgtgtaagaatataaatttattagaaagggcatgtttggaaataattttgatccttctctttgatttcatgcactagatacattgaaagctgtttgttaatatgacacattttctagcatttgcaacagctttgcctctgtaaagactatataaacgctttatcattttacgtattgcagttgaagttagtttccttgtgtgtgctcccagttggaaattatattttgtaatatagctgtgtcatggctagatgtgatattaatcataagcaacttctatgcatatcctaaagacagtagacccttaaagaagcaacatatgctagatttttattgcttccttttattttcctgattcaaacttacatcaagggtgtatgattttaaagaccagattatttaatcctctgatttttaaaattaatgcaacttttgaacttcttttaaacgtaagtcagttggcattttgtaaggaggaagtctagttttttcatgcta

SEQ ID NO: 371694 - DNA, 505 bp, Homo Sapiens
gaaaacactcgttatctgagctgaagaaaattcacagtagtgatttcagcttggtgaaaacagacacggagagcaccgtggacaaatggctggatgtatcagagaaacttgaagaaaacatggataggctgagagtaagcctgtccatttgggatgatgtactgtcaactagagatgagattgagggatggtcaaacaactgcgttccacagatggcagaaaacatcagcaacctggataaccacctcagagctgaagaactgcttaaagaatttgagtctgaagttaaaaacaaagcattgagattggaagaactgcattccaaagttaatgatctgaaagaattaactaaaaatctagaaacaccgccagaccttcagtttatagaagcagacttaatgcagaaactggagcatgccaaagaaataactgaagtagcaaaaggaaccctgaaggatttcacggctcaaagtacctgtgaaaaggtaccgagctcgatcatctt

SEQ ID NO: 371695 - DNA, 520 bp, Homo Sapiens
tactttccacagggaaaggccatgtgaagacacagcaagaggtctgcaagccaaggagagtagccttactagtaactaaccctgtaagcatattcatcttggacttccagcctccagaactgtgagaaaataaatttctgttaagccacccataagtccatggtattctgtatgacaggcctcgctgactaatacagagtgccataagttctcctgtctcaaaatggaaatttagggggatttggaacaagaatcattagataacaacagaattataaggatattaaataaactccatcctcatcccttgggccaaatagcagcttttttgtctagtgagaaactaaaatataactccatcatggagcaagggtaagaggaggataaaattgtccatagtgaggtggaggacaagcaggaaatctttaaaaggagaagatgaaagtgagaaagttttcctctaacctaaggaagtacctctaccctcatacccctgtggaaagtaccctgtggaaaagta

SEQ ID NO: 371696 - DNA, 265 bp, Homo Sapiens
aacctgcttgtcttactcctgcctttgacgcatccttgggtaccacggtgtgtccccgcactgtaggccagtgagtggctccagctgcctctggtgacttgctgcctgggtttgagctccatccaacactcacctgctgggtggcctcctccagtctcccctttccaagactcagttcctccatctgtgaagccggagtgattaactctaacggggctgtcccttggttgccgtgggatgcccagcgccaccccacactcaccaa

SEQ ID NO: 371697 - DNA, 901 bp, Homo Sapiens
  misc_feature (885)..(885): n is a, c, g, or t
gggggtgaatactgtgagtaggctctgaaatgattccttttcctagtacacactcatagacattacagggcaaagaaaagtctgcaataaccacgctgtgtctgaacgtcgccttattgctcagtgtgacccaaatgtaaccagaccaaatccatcagcagctgaatgtaaatggccttgtgctaggcttagtttcaacaggcattctctttgcctggtgaagccctctctccaactagaggccaagttattaggaaattgtttgtcatcttagactgaattgatcatttgtttccctgaattctttctctcatcatttactcattacacgcctcctcctgatagaagtagacatttattagcttctgcattcattgcattggcaaacagaaacattctgctgcatttcctgggggttcactcatttatctattggatacagagactgaagttttctacagggcaaaaaaattaaaatatcagtcaggttgacagctgggaaaatgagggtctctctgcgacaagcttgctgcagtttttggtttagtgaggagctgcaatgttatttcaccacaccaccacttcatatgtaactagaattgtgggctatcatctggtgaactaatattccacaagaataatacacatggtgcactgtaaagtacctgcgatgcaaagctaattgctattttaaatagaacataaaacaaaaggctttcaaagatccatttctaaaaggagctaggaagagaggctgtcttattaaatccatgaaactggagctagaatcattgaactttaacgtgtaaagaccttccaggtcatcaaatcctttcccccccctgtggaagtaccgctgtggaaaagtagcctgtagaaaagtancctgtgaaaagtagga

SEQ ID NO: 371698 - DNA, 522 bp, Homo Sapiens
  misc_feature (18)..(18): n is a, c, g, or t
  misc_feature (31)..(31): n is a, c, g, or t
  misc_feature (63)..(63): n is a, c, g, or t
  misc_feature (70)..(70): n is a, c, g, or t
  misc_feature (111)..(111): n is a, c, g, or t
  misc_feature (265)..(265): n is a, c, g, or t
aactgcctgtttcaaaangggcaactaaaanccaacccaatgttgggctgttctgaacacccnctgtggncccccccggaggggaactggctccttgtggggtaaaggganagccccagcccaacatccaaaagctctgcatccaatgcctatccccttgaaagcccaactgccttggtgaaggctgttccctagaagtcccagatgataaggcttcccaaactccttccctatatcctaaataagcgggtattaaaaacaacanaaggcagtggccagtagaaatgtatgggttcccagaaatgaggctgtatttctgggaagatgtaaaggagctgctttgcttttaggggaaagtagatatcaatactttgaagccacaaggacactatgaagaaaaccattactctttcaggtcaagaggtgcaatgactatggattatttaaaaactgaaaagctaagcttgagtggcccaatatcagcaggaagtggtttatcttttttcggttggttggtttccc

SEQ ID NO: 371699 - DNA, 331 bp, Homo Sapiens
aaatgctaaatcctaaagaggaataaaacaagtgagtgattaagggatggatattccatcccattctcctgtgtcttgagaagcaggattccgagctgcaggagacacagacatcatatagaggagactatgtaaagcccccaggaccctgaatttgtattgggaatatcaatataggctcagaaatatagtcttccattaaatatgtctgtgcaatgtttgtatttttttaaagctccgtcccaaaatctagaaataatgaccaacgcaatagcaatgagcatcctaaactggatctgaaataccatctctaccagagactgtggaaaag

SEQ ID NO: 371700 - DNA, 404 bp, Homo Sapiens
tgacgtctcacagtggtgggccatttactaacattcagaacgcctgaaggagatgtttacgggaaagatggtgttagttctcaatgttgtgagttgcagagagtccttcggacacaaagcttgaatagtctttcagctttagatgaagactcagatgatcacaaagctcattaggtttcccattgcagagttctgtttctggtctctacagattcctggatctctgtcgcatacatgaaaatactgaaactatttttgtcctttgcctaagtttattagcagtcgtataatagaagttgcatggcgatcccaaaagtttcctggctattaaataaagtacatttttagctgccctcttacctttgtttgtgtacctttctcaaattttcttcactagaaataat

SEQ ID NO: 371701 - DNA, 435 bp, Homo Sapiens
taaataataaataaagggaaccatgaggatttacagcatgtaaagacaccagaaaacaagacaaaggaccatatggacaactacttcaatgccctctggctcctactggaagttggcttgggaagctgttccctggacccaaggttaagttcaggagttacatatcctcttggagtagtgtttccaaattttgactaaattttcctgattatggaaatctttcaggttctggtaaaaattatatatttcatgtcccaacccagacctatcaaattggatgacgattatataaatatatattaatccaacaatgaggcatgattgataaatactactcttagaggagctgaacaatttcacttgcaggggggccttgataagaccgagacaatgacactgccattaaggcatgatggtctactgatgacttagttt

SEQ ID NO: 371702 - DNA, 553 bp, Homo Sapiens
  misc_feature (153)..(210): n is a, c, g, or t
  misc_feature (255)..(312): n is a, c, g, or t
gaagtgacaaggcctgggaaggcataaggctggggggaaggaaggcagggccccaagaaacatgtcaaagaagagcacgcacaatttgaagatgatgactcaatgacatgcaaaaggtaggaagattgtagaagtaataacagccacaattgnnnnnnnnnnnnnnnnnnnnnnnnnnnnnnnnnnnnnnnnnnnnnnnnnnnnnnnnnntcttttaatattgtagggatcattatgatttccttttcattagtnnnnnnnnnnnnnnnnnnnnnnnnnnnnnnnnnnnnnnnnnnnnnnnnnnnnnnnnnnggacagacaaactgactttcatattgattttcctctctttcttcacttctgagcgaaacttagtacctccagtattccgaattcatcatcattttgcggtgcattcttcatgcctgctaatgcatagaattcctgcctgaggctataaataattgagctaagacacttccgaacctggatgataacatgttcctcgtgggacacccgaggcagcatcccttagcactccctgtgcaaagta

SEQ ID NO: 371703 - DNA, 689 bp, Homo Sapiens
tactttcacaggtagtgctaagggatgctgctggggtgtctacgaggaacatgttatcatccaggtttggaagtgtcttagctcaattatttatagcctcaggcaggaattctatcattacaggcatgaaaatgcaccgcaaaatgatgatgaatttggaatactggaggtactaattttgctcagaatgaagaaagagaggaaaatcaatatgaaagtcagtttgtctgtccccacctccctactgtgtgacctcaagcaggctacttaccctctctggtctcaggttccactaatgaaaaggaaatcataatgatccctacaatattaaaagattaatatgtgcaaacgtgtagaaaagggccagacacttagtaaacactctataaatgtcaattgtggctgttattacttctacaatcttcctaccttttgcatgtcattgagtcatcatcttcaaattgtgcgtgctcttctttgaaatgtttcttgggcccctgccttccttccacccagccttatgccttcccaggccttgtcacttcacccagtggctgatgctcacattcatccccccgagaacgtgggcaactcttcttcccgtgtgaaaagtaccctgtggaaaagtaccctgtggaaaagtaccctgtggaaaagtaccctgtggaaaagtaccctgtggataagta

SEQ ID NO: 371704 - DNA, 626 bp, Homo Sapiens
  misc_feature (26)..(26): n is a, c, g, or t
  misc_feature (48)..(48): n is a, c, g, or t
  misc_feature (56)..(56): n is a, c, g, or t
gccagatacgattcgagctcgtaccntactttccacaaggcattttcnttgtaganttgggcttttattagaaatgcaagtttctgccattataagtcaagttgtagggcttatgctgtgtgggctggactctaggggggccagggtggaatcattctagaaacttgttccaggatgacttgaccaaagaaaagccatcagatgctgttgcagtggagtcctgacatttgctacccccagtgtggtcctcagactggcagcatggacatcctctgggagtccgttagaaatacagagcctcgagccctaccccagacccgctgtgtcagaaaatgcacttaacaagatcctcagctgacttacacacattgacatttgaggagtgctgctctagacactctggcgaagcacagagacagactgacatagagattggcctatgtaagattgtggacttgctaactaggaggtgcattggaggctttggtcttaggcggtggggttgagggttgtgccttttaagccctgctgtagaaatgtatgatggggtgattgaccacattaagaatctgattctgaagactcttgttgtcacctgtggaaaagtaggtaccgagctcgatgga

SEQ ID NO: 371705 - DNA, 202 bp, Homo Sapiens
ttcaagctccccttagtgttgctgatggaagcaatgtccagttctgggctgagactctacccaaataaaccagtgaataactttaggcatagaaaggctggctgctctaaattcttaagctactgagctgtagataatccccaaaacagacgcagatgagggacgggtggatattccccctgtggaaagtagggaccggctc

SEQ ID NO: 371706 - DNA, 501 bp, Homo Sapiens
ggatccccttttccacaggggttgaggcaggaacaggactcccgccaggaacccaagatggtgagaaagctgattgtccacctcaatctcacttttccagtgtaaaaactgtgagccagggagaaatatccttgagaacagccagagacaggggcaaaaagagaggacaaccatcccacctaaaaactctgctcagtgacttggccaaaagagatatcaaatgagagtgactgttcatcagcactgtgctgtcggaggtttgttccacaggtaccctgggcacaaactcctagccagccttttcacagtagcaggctacccactttgggacctccctcatttgggacaggtggcactctggttatttattagtgccaggcaaactgggcttaaggcaccatccagggctgaaaagaagatagcagcctagtcacgggtggagggaagactatcaataaataaattacaaagaatctgagcaaacatgccctgtgaaaagta

SEQ ID NO: 371707 - DNA, 565 bp, Homo Sapiens
ttcccacaggtactttcccacagggcattcaaataaaatttaagtttagcttaatagtatgtaccaatgttaatttcttggttttgatcactgtaccatggttatgtaagatattaacatcagagaaaactatgggaagggtacatgagaactcccagcactgtctctacaacttttatgtaagagaaaaatggctgggcacggtggctcacgctttcatttcttattcactctggtgagaagcgatactgctacaaaccttggtaaacaatttgctaccttttgtagccaaattccagagtgggaagaatctggctataaaatggtccaactactgagaaacagcagtttctaccaaggcctacctactttgtagaaacgagaaggaaaccatctcaggggatgccacacacatctttcttctcatcaagcacaagtacctggcttggaggagcaaagtaaagcttctgaatcagaaggtcccaatcagccactcaccagccctctgggctaaaatggagaggacacttgcccccccttggcatagggatccttagatcaccca

SEQ ID NO: 371708 - DNA, 405 bp, Homo Sapiens
cgaaagactgcctatctccagcgttattgcaagcattaactggagcaaatggcctacagcatgcattcaatcaatgtctgtcagtattattaccagcaaggggccagaaggccccaaaaaatccagactcacttctcagatttcacactaatacatggagactgggcttataggacacaaaaatgactaaataagaggttaaaaaatgtctcctaatcatccagatgtttggtagatggagcacatataacattcctcaggtttctccccaccaatattttaccttcctcacctccttctggggatattataaatagctaagtgatactgtaaaatgttcacaggggtttctcccctaacacatatgtttacttaaaaatgtaaaacatctgtacagcacaacag

SEQ ID NO: 371709 - DNA, 508 bp, Homo Sapiens
  misc_feature (52)..(52): n is a, c, g, or t
tagaggaggaagaaaagtggttgatgagctatcataaaatttacatttgccncagtaattgagaggaacaagagacaagccctaggtgtaatactaagcttagcttagcctgtgttctgacaaatctgagccctcagaggcctgcaggagtgggagctcctctccccactgtgggggcagttattaatcctgatggtgaaagctctgctccctcctggaccatccaggacgggatgaactcccaaccacactagatttctggaaaagaaaagatcctcagggccccttgctcctaaattttaattaaacccaaccccacagcagagcatttgcagaataaatgcaggtaaagaatgagccagccacttctcctgccccaaatatctccaccatcccggacacctcttgccttagccctgattctgccatccatctcagaacagacccttttgcttacagaactagacatggaaccgccttacgtaattattctagccacctcgaaaag

SEQ ID NO: 371710 - DNA, 370 bp, Homo Sapiens
ccagagatctacgctgattctctgaaaatatcaggcttcagccccaggatcttcagaaggaagccctacagagaggaatctttcaggattggtcggcgggaggactgaaggcaaaatgcaagaccgggaggaccctttaaacttttcttccaaacttctctcatacaaaagggcccacttgcagagggatccagtaagttcctcccatgggataaacaagatctacagggaagcacacaggcataggtctaacctaggtgtcctgaaggaagtgaggtctaagtggatgttataaagtagccaagaacaaaagaggagtaagagccttgtgatctggaggcaacctgtgtgtaaaagtcttgaaagaaac

SEQ ID NO: 371711 - DNA, 612 bp, Homo Sapiens
taaagagtccgcccaggtcctccgcaggcttccgcaggggaggacactcagctaggtcttcaagcgcggctccagcagcaccaggcgatccgcaggctaaaaacgccccccagggttctccgctgccatccgcagggcaggaacacccggctaggtctctgtacagttcccgcagcaccaccttccacagtataatgacgcccgcccccgcagtataatgactgtaatctcactcacgggtgacagggccctgaggatgactccgtgtcctagactgcgggtattaacatggggcctcttccgtgcctttccgaggcgaaagcctgggtgggttcggaggcgtcagcgctaaaatcctataggctaagttacagggccttctcgctttattaactaaaggactagtaacagcctcagagcgctccctggaggactatatgtgacgtactaatttctaacaaaaagttgaaattaagaaactttcaccttttcatgtctttgtacatagagtgctatttgaaccatttatgttttcttatttgtccttcctcttctagccacaagccatcttttggccaggcagctttattccaaatcaaaatgagcatatct

SEQ ID NO: 371712 - DNA, 625 bp, Homo Sapiens
gaggaaatgaattggacagtcatctataaatatcgtattttttaataaaatggctattcctttggtgcttggctggtagcatccatccactggtagtaaatagaccctggaaaaccagcacatatgtagtgagaccccatgagacatgattgtgcctacctttgagccatccataagttatctgggacatgacagtcttttgagtgagagcagtttactaaggtcatttagatcatcagttccaaagatggtgtggatcttatcgattatttttttaggcagaggtaatatctggaaaattaagagtgatttctaaccatgagaatattttagtttgtttaaatttgcttgctaacccagtaccaagaattcagaccttttttctgtctgtataaagcaatattctagacatttgagtgattcaagtagatgttgtgagatgattacatttccagtccttggaatgttatgtggattttattggctaatcttcatatttcatcagtggattttcctatgcatgttaagggagatccttgttaattgatgtctaggtggactttacggttaacctgaacaggtcttggaaaaaggactttaaacattctcctgccctgtggaagta

SEQ ID NO: 371713 - DNA, 600 bp, Homo Sapiens
acgaaaaaatactgtaaaaaatggtaaccaagttaaagaaaatcgtctttataatcaattacctagaggatattataagcttattaaaattaaagacataagaaaaaaatccctgcagatttagctgaatcttgattttaccaaaataatctcttcaaggagtttgttcaggtaatggcaaccatattagtagttatcattaatagtagtagttaccatttattggtcatatactatgagtcaggaccaatactagtaatttccatggcacatatttactccatgagtgtttgggacaggcatgcaaagagaaattcataccgtgataagctaaggataatattcaatgcctgatcacacagggtgatttacttttgtgtttgcttttgaatagttcagtgtgccatatggatttccataggcttggccagagactatagtgttttatgttggcatgacacatttgtcaagatatctagacactatagtaataagtgctacataaatacatagagttgaggaaaaacgtgtcagtaacaaatgatttctacagtctatattcaacgtttgataagcactcatttccaccctgtggaaata

SEQ ID NO: 371714 - DNA, 725 bp, Homo Sapiens
tacttttccacaggctatgtacaagaaaatggcccaaggaggcgcttcctctggggtccagggtgagcatttatattccccacttctaagggagaagcaccttttgctgctcagattgcctcttccgtggctcatggaaggggtcaacctgccctacgccgggagagagacttggtgagccctgcccactgaaagaaaagttgagactcaacagagctttccgttactctcaaaagggttgcaggagtgatagaccagcatccacgactaaaagaactttgcatatttcttaatattagactcttccctgtgttgttaggtaaacttgtcccccttatgtaaagttataaagcctcaaggaaaagaaggagcaaggtgtactgggtatctccaatcctgaggagagagcaaacagcaggaataacgtaggaggggcagctccgcagagcagcagaagggctgtgttcacagcagctgcaagagggaaggaagaacgtgcaaggccagtttgatcctctgagaggcagtcgtaaaccctaaaatgtataagcttccccaactttttttacctaggacctaccctggttgaaatcattctcctcatttgtttccatatgctacttgcccatcagcttcggttcagttccctaagatttaaaactttggaatcacttttcttccctgtcctctgtccctgtggaaagtaggaccgagctcgatatact

SEQ ID NO: 371715 - DNA, 493 bp, Homo Sapiens
tatttcacagggataatagctgaagttataagaatcagtatcagaggaaaacaaagtttgtagccaaagtcgttttgcaaaaaatatgtcatgaccctggtcaaaggattttaatagcactcagactcttgagtttttttccatagccttctccctcaacccactgcttcaggcatatttgtcttctttctattccctgaactctccaaccacttgtcacttgaccatcttggccttgggtgacctttgatcttggaatgctcttctccaggtagtcacattgctgaattgcctatcacttccttagaaagtcttccctgatccgcacgaagtgaagtaatcaaaaggtcatatttactcatatgggtcatatttactcatatgactgtgttttaattctttgaatagcatttctgcaatcttattttattactttgattgattgactgatttactggctattttcctccataactccccccgtggaaaagta

SEQ ID NO: 371716 - DNA, 542 bp, Homo Sapiens
tactttcacaggcgggaactagagatcatgaggaaaggtatacaaaatatactggttccaccttcatattatttataacgaattaataaaaatattatcaaacaacttaaccatataacacagtacatatgaggtacatgagtatatagagtttggttacatagagaagtaagtgtggtttggatttaattatatgcaaaatttcaagtgaaaaagatgtgaagtcattttgaaaagaaaggaaataaggttaattttcaaaaaggtaaaaattttgaaatcagaattggttattgagttttatttggattgatatgtaaaaatggaagagcacaggtgagtgcaaacagaacatctttaatgtgacacagaagacaagagaagtaaatacaattccaatatgtaaaacagatgcctgtgactgggaggtggaaggaaaaggaaagtggactctcttgcatctgggcttttccaaggtaaataagcccatcgtggaaacacagaaacgtcatcacatgtacaaacaatccctgtgaaaagta

SEQ ID NO: 371717 - DNA, 418 bp, Homo Sapiens
cacaggaatcagcaaatcatctaataataaatctataatgggaagaagccgaaaggcatggagctggtgcttctccagcaaggctgctctgtttgccagtttgacggccaggcaaatctccctgctacaatggggtgcatgtgagcaaggcctggtccctccagcaaggtttcctaactctccacctgacccctgacagccccagtcaagccaaggagggagtgcagctctggtggcagaggttcccttccctttcccactctgcacccccagcccagtgagcccctcctcatttccttcccactgcaggggaagggaaatgccggtagggtttggagtttccttcaaagctgtgagctctgctctgggacttgcccctactctgacagtcttcttgagccagacctgtgcaaaagta

SEQ ID NO: 371718 - DNA, 734 bp, Homo Sapiens
aggacttgaatgcaaaggcagcaccaagcatatctagagtgaagagtctcaacaagtagcttaacaagatagtttcaggccaaagatgatgtatttagtggaatttagagaatacccctttatttgaagttttcctatattgttgtactggaaatgcttcactgtattcagtcaactagagtgggtacatggaattttgatattacacctgattttgtcccgtagaacaatttattcctccaacacctccctcaggtgaaaattcaagaatttgcatgggtagtcattctgatgcatatctccaagcttgtatcttcttcccgctgacaatgatgcgttacagtctctggctctatctacatgtgatgtgcaagatgtctgacaaaagtcagagaagcccgttgttgagttttgtctccagatctaaggatcggtacttttgccagattgggctgcttctgtttgaaaaagacaagcgtgggggtgggagagattgctggttatcttccagtacctgtcttcctcttcttcactgaataaaaaattttagctgggcacatggctggctgaatacaagttacatttttcagcatcttatgcaaccaggtatggccatgtgactggccagtaagggtgagcagagatggtgtgtgcagcttctggttcatgccccttgctttgtcccactgttgagtgcagtacagtatgcggtaagcctgtcagacctgtgagaa

SEQ ID NO: 371719 - DNA, 462 bp, Homo Sapiens
tacttcacaggagttatgtatcagtatgcataggtaattaaaatattttaaagaatgaatgtatgtttctaagaaaacgtcttttgcccctcatcctttgggctggatgattccctccagacctcgttcaagtataatttcccctgacgagccttccctaacttaaccagccattacttgctctctcctcagaagatgtttaatctttctgttggcacttacttcactgtgatctgatgactggtctttcaagtctgtctttgccagtggactgtaagctcttgagcgaaagtagttccttgttgagaatggctgtcagctcagaacaagctcatctgtagtagctaaattaacctagatgtggtagtcatactagatactgcaactcctagaatactgcttctcaatcctagctgctttttaacccctctcatgattcccatccctgccctgtggaaaata

SEQ ID NO: 371720 - DNA, 612 bp, Homo Sapiens
gcggacctactttccacaggaaatgactgtaacaaattctcaaacaaaaaactgtctactggatgtccaaccaccagttacattcaacgtaaaagaacataaacattattctttctcacaaaatagctcccttttgtaaccttgccacttaaatgactaccaccaccatttatttaatttcgcttcctaaaattttgcaaccacatcttaattcttcttcaacttgtaaaattataaaacggtgggggctggttttaaaaaagaatctccctttaaagtattctccaagtttatctctctattgactttaatcaaggctttcaatcttatgaattactacaacagactcctaattggtttttctatctccaagctccatttaccttcaatcacatttatatactacaactaaattaattttccaaaattatcacatttattatatctcccttcactcagaaaccacaagtagcagcacttccacactctttggatcaaagttaactaaaatcatgtacttaacctttcatgtgcttcatgatctgatcctattttttctaccccatcttatcttttaatgatccacaatacaaactcccccctggaaaagta

SEQ ID NO: 371721 - DNA, 533 bp, Homo Sapiens
gggctcggtacctacttttccacagggaaaacaggacatggattgatcgtttaatccttatcccaaactcaaaattacccttgcactatctgacattgattgagtaaatagattagccaagaaagacaattcaatcagcagagaggcctgagaattctcttgaactttgtttaaaagcaccctgaaatttgagcttcttgggagcatttgcttccaaccattttctaaattgaaattgcattccacttccctaagaccacagcctttttctaagacaggattatgggaactctgaactatctaagcagaagttgtgtgtctgagaataaaactggaatgaacaaatctataaagcaatagaacaataaccccaacaaagacagcatgattcacattgcaaatgacaggaagaaaaaataaacaagggagcgttcacctcagaaaagacaaccacgatgacaatgatgagacctgagatgacaaaaataaaaggacagcaagccctgtggaaaagtaagccctgtggaaaagta

SEQ ID NO: 371722 - DNA, 167 bp, Homo Sapiens
ctgtaccacaggaatataaaagaatgtagaatctgcggctgaataatgatttctatttccatagaacatacacactcaacacaactccctctatgtggggaagcccttcttctttctcagtgccagcgtgtaccctgctgtgggatcactgctattccttgatctac

SEQ ID NO: 371723 - DNA, 538 bp, Homo Sapiens
  misc_feature (310)..(342): n is a, c, g, or t
tactttccacagggtaaatagaagttctataaaatcattacacaaagaaatatttttattatcagaatttatgaatgagaaaaatttcataaataatttaggtcatccaggcctatgacttaattaggtttatcttgatttttataggtatttcttttatctaatttttttgcttctatctttcatttttatttctctaaaaatagatacttagaagccacctccagcttagttgtttgaaattttatattttcccttccaaaactgggtcttccacatgttaatgacaccagcatatcatgctgatatnnnnnnnnnnnnnnnnnnnnnnnnnnnnnnnnnttaatagagctattaacagtgctgtacatgcattatctgaatcctcattacaattttatgaggtagtttattgtctgtattttataggtgagaaaactgaagcacagtaaggtctcacaacttgtaactggcgaagcttgttgcccagctagacgactgtaagctttgggctctaaccactgtactgacagcctct

SEQ ID NO: 371724 - DNA, 737 bp, Homo Sapiens
tttccagggtgtgcagcgccttcctctttacttataagctcaggagccgaggtcagtaataaaagcccacagcactaagccacagagtgaaatcatggtttccctactccaatgacaagaaggaaaacaaactgattagctccccacactgccaagcccttaccaacatgaatcacacaatactcctgtgacatcttccaattcaaaggattcgctacttacagcagtattccctttacagttattggttttttattgcatttgtattatttatatttgttaaccctggattacaaatttttatcattaaaagataaattagtcagacaaggcaatgatgcacttggtttccatgacaacacttcacaaaaaaagttcaacctgctgcatcaccacagagcacttcgaaaatcatttcctagcaaccccacgggtatccagagacacagaccttcatctcagccttttactcagacataagagaattacacacatgatgacacagaaaacaggtcactcggttagcacaaacatttcaagttggtatatttcactaatgtgtgcagcaaaataattcccagctatgtctgcaaggagatgatatatgcagctatgtgaatgtctcaaacacacagcatcttccccctaagctatgagctacgaaagacattaaactaaattccactttgattaacttgatttaaaggcaagtgatcacctttgccctgtgaaaagta

SEQ ID NO: 371725 - DNA, 669 bp, Homo Sapiens
tacttcacaggggagggatgagggataagagaaactagcacatggcattatccacctaacagagcaataatagtaacttaaacacctagggaaagaggcagacttctgtaggagtcaaggagccttcggggtagaggaaagggactcaggctaagaagtgttggtaacatcctggcattggcagaaaggcagctgtcctttgagtttcagagcaggagccaaggacgtttttatgcacatgctccagtgataaaggtttatagagggtgcaaaggtgacagatctgtttgtctactagtccctgtcattgggttatgtagatttaggataaaaggaaggtgggaaagaagagggaattattatttttttaatataggaagaaattcaactgaaattttgactaagctctaaatcacttgtataccttttcaccttgaggtgcgataatttcttgattatacctgtttatttccaaccatagaaatagaattcataattacaagtctagacatcttgacaggaaatttctacagaacacagcttctcattttgttctaatacacattttagtatttaagattatgtgtaagtttaatgaaatgtaattctatataccaattattaactccgtttccattatagatttctagccctgtggaaagtagggcc

SEQ ID NO: 371726 - DNA, 470 bp, Homo Sapiens
tataaaaatatagtctataatattaataataaacaataagcaattagcaggtactgaaccaaaagactactataagaagccaaacaatactaacatcatctgaaaattaaaactcactcagaaatgatagtgaagcttgtagtccctctgtctcagggatgttatcaccacttgcccacgtctgctggcttgcccctggaggattagccttcggaagtagatgagagcctgtatagttaggtgttgcctatttcagattcagcaagaatgggatgctggcctaagtatcaaggacttactaggtgtgaaaccagaaaaggcttcacttggtcgttttttctcagatgttcttctgaaactgaaacttaaaagcaaaacttggctggtgtctaacctcaagctgttttccacccatagtaaagaggactgtgcatgctgagactccacctgtgaaaaggtaccgagctcga

SEQ ID NO: 371727 - DNA, 949 bp, Homo Sapiens
  misc_feature (593)..(791): n is a, c, g, or t
tacttttccacaggcacagggttagtgtagggctcttatccaacagggctagtgtaggttagtgtagggctcttatcaacagggctagtgtagggctcttatccaacagggctagtgtagggctcttatccaacagggctagtgtaaggcttttatccaatagggttcgtgtaaggttctcatccaatagggctagtgtttttacaagaggaagagacaccagagctctctctgccatgtgaggacacagcaggaaggcagttatctacaaaccaggaagagactcctcaataggaactgcactggccagcaccctgatcttggacttctcaacctccacaactatgaaaaaataaatgtcctttaagtcacccagtctgtggtattttgttatggcagccctactgactaatacagctaaggagctatgatacttaccaagttactatgactactgactgaggtgggtactaatttaaacgcagaactgagtgacaaaaagagcctaacagtttgcaaagagaccaaacctaacaggatgacattcaatacagataaatatatgattccaccccctgtgaaaagtagggatnnnnnnnnnnnnnnnnnnnnnnnnnnnnnnnnnnnnnnnnnnnnnnnnnnnnnnnnnnnnnnnnnnnnnnnnnnnnnnnnnnnnnnnnnnnnnnnnnnnnnnnnnnnnnnnnnnnnnnnnnnnnnnnnnnnnnnnnnnnnnnnnnnnnnnnnnnnnnnnnnnnnnnnnnnnnnnnnnnnnnnnnnnnnnnnnnnnnnnngctaaggggctatgatacttaccaagttactatgactactgactgaggtgggtactaatttaaacgcagaactgagtgacaaaaagagcctaacagtttgcaaagagaccaaagctaacaggatgacattcaatacagataaatatatgattgcaccc

SEQ ID NO: 371728 - DNA, 552 bp, Homo Sapiens
  misc_feature (398)..(406): n is a, c, g, or t
  misc_feature (423)..(509): n is a, c, g, or t
cccttttccacagggtaggcaccagaatctgggttcgagtgatcatcaaattagaggttcatcaagtcctccatatggcatagccaggaagtgttctttaatcctcggactttttaaaggtaatgaaaggactagttgcaagtgaccaaacccttagcaactattgccatgcattatgtgattatgataattatttagctgttcaagaaacaacacttttacaatttccttttcaataaaaggtggggaaaacctttggcatacaccagtcaaactatcttggccagatttttgttttccattgttgtccccctgctgctccttcactgtgacatcacaccatccttgccctgtcttccattcaggagctacattcttgacttgtaaccctccccacnnnnnnnnncttcttaaaaaaaagtnnnnnnnnnnnnnnnnnnnnnnnnnnnnnnnnnnnnnnnnnnnnnnnnnnnnnnnnnnnnnnnnnnnnnnnnnnnnnnnnnnnnnnncactcccctcacccctaaccccccaaaggccctgtggaaagta

SEQ ID NO: 371729 - DNA, 700 bp, Homo Sapiens
tactttccaggggaagccagtgttccccttagcaaccatggtaacacaggatctgatagagagcctagagttataaaaataccagcttccaccagacactggtttccaaagggaaaccagtctccaagccagaaccgtttttaaacagtcttaaaactcaagagatttctaaaccaatctcaacatggctcaggaggacatctctttaatcctgttttggaaggtggtgtgggtgcaagctttgggtattttctctgaaatacagagattcagaatgcatgtgctcacgggggaattaactagccttatgaagggtatatagcagggagcagtttttcctaataaacatcaactatttggcattttttcatagattgagctgccctgctgacccccagtgaaatcttccttccagttccctcccggggagtcctcagctccatccatcctcctaattagggagagagaatgatttcgcctatctccccttgcttgaaaacaatttaaattcacaaaaccattttccagccggaattctactttaaggcttaggtagggaggtaagagatggtgatgtcaaaacttttctgctcaggaccaacaagaaaagtcctacatccctgtccccagccctttctctccccacagacgcaccctcgggcatgggcccagcacgagctataaatcctgtggaaaagta

SEQ ID NO: 371730 - DNA, 721 bp, Homo Sapiens
tacctactgtttcacagaggataagaaaagtgagagcaaaggcacaaaaggcagcataacatgggaacattaattagactatagcggaaaaagcagtctgactggctcacagggcacaaaggaataggaaaataaaaatagcagtaatcttcagttaagattaaggagatctctgagtatcagtgaagagctctgactcatttaataagcaacaacaatagacattttgaagataaacatgaatactgagaaaactaaagatacttttaaattaacgaaagaagttctaacagtagaaggctgaacaatacatctaggcatggtaagcatttcattaaaatatgagtaatatgtggtaattttttggcgaaaaacaaaaaatgaggtcagaaatagcataccaaatggaagaaactgcaagaaagtgacataaggatagttaagaaactggtaatttcagctttattcaatattatatggatattaagtatctgctatgtgcagccaggctaggtatcatatgcaaacatttttgcttccctattttttataacaggatattaattttgataccatggcatctaatatctaaggcacattgaagttacatttagttataccactatcacagaacatagcacttagggtatttgcctacaacctcacatgtattaacaaataaagcagatgtatggggcagactcccccggtgggaaaagta

SEQ ID NO: 371731 - DNA, 560 bp, Homo Sapiens
aacttttccaacacgggctggggggagtggggatataaatgtagaaaaattgtaacaattagagtgtctgaagaccataagggtgttcattatactattctattttcctgttactttggcatttttaaaggaaataaataaaacaaaatttaatttctcaaatggagttgaaaatgcattgctggattgttaacattattagttttaagtatttttggcaacctacaaactcatgcaggtttatctctctctccaaaatttatcatagttaatctgtaaacaaaaagcactcaagaaatgttgattgaactaaattgaattggttttaattccaaacatttttcccaacagtctttttagtactgaattctcgttaatgccaatatttttgttgtgtttgatctactctccatgaagcactgcagaattcctaatcccccaatatattacattcccatcagtttaatcattttccctcattaaaatgcattaaattttggtaataatttaaattgtcaacaagtatttaaatctagtctaataatccctgtggaaaagta

SEQ ID NO: 371732 - DNA, 541 bp, Homo Sapiens
ggcctctcaaagtgctgaggaatacaggcaagccaatattgtacctggcctcaacaaatacttattgagtgtctgttaggtgctagagatagatctagttgctggtcatacaaaatcaaataagggaatatacagtctcaggcagagaaacagacaaacacataaaaacacatgcctacaacatggtggatgtcatgacagaggtatttagtcacaggcacgctaggatatgaaaaggaaaaggttatctcagttagactcgtcattctgagaacagtttccagaggaggtcttacagaaagacaatgtgatgtatagctagaagaaagcaagaagaggagaaaaggtatggaggagtggaactgcctgatgtgttcagaggtcccctggtagtatggtccctatgtgtgtgtgcctgctcacatgtatacaggttgtggagaagagagaaaactggccaagtcacaaggaagccttcagtgtgacacttaggagcttgaccattactctagaaattgtgggggccattgaacagcattgg

SEQ ID NO: 371733 - DNA, 494 bp, Homo Sapiens
ctgtgtgaccttgggcaagtggctgtacctctctgagcttcgggttgtcacctgtaaaatcagagtttcagtcgtagttctgtcctcagagggtttgggggtaaattacttaaagcactaaacatttagaacagtttggcacatggtaagtgcctgaattctatgagttttgtttctttattctttcaagtagattcctctaatttcggagtccgttgtaccacacgagtggtacaggaaagacaggtggattacattatacacacacgtggtcttagaaataaggaacagaagcctcaagctctcccactctgctctctgcatgttccaaggaggatcacggacaaactgcccacccactggccaagatataggttggtggcatatgactggctgtctggacaagcaccggaaagtaagtattagcagcagttcgtacatgtcttctgaccctcctgaaaggacttgatatacctcggccccctgtggaagta

SEQ ID NO: 371734 - DNA, 360 bp, Homo Sapiens
tactgcactaggagtgtgctgagtgtgccagctgaagtcgggcagcaactaattaatgttttaaaaatttaaaaaccaaagcaaccaggggtcaagtgcaggccctcagaaccaggctgcctggcctcgaccatttaccagctctgagagggtgagaaagctgctccccctcactgtccccatacggaaagtggggataatgagagcccacagcattgcagggttgccttgaagataaaatgagagctggtatttacaaagtgcttggaatctgacacgtggcagtgaacaaagattggacagtgccagccctgcatctgaatgagcaccttgaatgttcacccatcagtccaagcaaga

SEQ ID NO: 371735 - DNA, 421 bp, Homo Sapiens
tagcttttccacagtgttgcgaatggaagctgcagagcagaatgaagcagctgggcagggaaggaggcaaaggagagtcagaaatgccaggagccacagcacatgccactgctcaatgcatccacacagatgctacgcactcggtgacctggttatttctgaaagacagatcaattctaagacaggattccacccagtagttctgggttttgtttgttattatttgttgatttgcgtatttgctaaagtggtgtccagagaagtgaacatgaacctgagtctggagaaccctggaagagagagttggcatctggggaacccatgtttgattctggttgtgggcttaggttcacgaatccagatacatgcctgtcttcatgtgaaaagcagatgccctggggcccagaccagcttctggaat

SEQ ID NO: 371736 - DNA, 500 bp, Homo Sapiens
  misc_feature (38)..(38): n is a, c, g, or t
ggctcggtacctactttccacaggggctctcatcgtgnttagcttccagtaaaaaaggtgctataagaaagacccttggttttatagattgtttcatccgcactggatgccatgtgtatgtagctggcactttggcaggctgtaataagccattaagactccgttagaccctgctcttagccccatgttttctgtcttattagatggttatccatcagtaggaatagcagccatagctgttaacagttattgagtgatcactatgggccaggtcagcgctgagcatgctacatccatcatctcattgccctttcagaaaatcacactgcactcaaaactaagcagcacagtgcatctgacaatatatctactgtcaaacagagagcttggatactgaaggccgtaactcagcactcacacattcagggggtggggaggggcagtgttctgctcagatcctttgcatcatttcttatgcatcatttccctgtggaaaagta

SEQ ID NO: 371737 - DNA, 536 bp, Homo Sapiens
  misc_feature (225)..(225): n is a, c, g, or t
  misc_feature (253)..(253): n is a, c, g, or t
  misc_feature (268)..(268): n is a, c, g, or t
  misc_feature (277)..(277): n is a, c, g, or t
  misc_feature (335)..(335): n is a, c, g, or t
  misc_feature (344)..(344): n is a, c, g, or t
  misc_feature (357)..(357): n is a, c, g, or t
  misc_feature (371)..(371): n is a, c, g, or t
  misc_feature (379)..(379): n is a, c, g, or t
  misc_feature (386)..(386): n is a, c, g, or t
  misc_feature (394)..(394): n is a, c, g, or t
  misc_feature (410)..(410): n is a, c, g, or t
tacttcacagggtagttaaaacaccttcaattggtgtattataaacttaaaagatgataaaaagcaaaaagtgaaattttattcctctacaacttgatataatttttatattatactttcataggaaaacaagtgatgctataactaaaataaatcccttcactgcagaaaaataaaaatttttacacaggaattttccacacacgattaacgatattctaccanggatcttaaaacatataacaatctatanaacccattctataangtgtcccanctatttaagacaatgtttctggtgcatttaagaaagtcaattttaacagaattttacncttacacangtaaaatcttaanaatcaacttattcnctttccanttttcanctatcacncagcctacttcaaacnctttattattacataactccctcttggagtgttgcaacagtctcccaataatgagttgaagcctttctaattttgattgtaacacatagccaggtattcattcacttgcctgtgaaaagtaggacc

SEQ ID NO: 371738 - DNA, 741 bp, Homo Sapiens
  misc_feature (725)..(725): n is a, c, g, or t
tttcacaggacagggggaatcaatagctgttgaacaactatatgtaggcagcaatcaatgaaaacttgaacagtggggcacagtggctcacgccaaaaactgtttttttcattcgggtggtggttaaccaggtatatccaactttggaataattcactaagcaatgaaaatgaacaaatcgcagttacactcaagatgaatttcaaaaacaatactaagtataaaagtcaggcaaaagaatacatcttttgtgattctaattacataaggctcaaaagaaagtcaaaagactctgtggtattagaactcagtgactacctgtgggagggatggaaaggacaatgaccaggaggggcaggaggggcttctccatatgaagcagtgttctgtttttttcattcaggtggtggttaaccaggtatatccaactttggagtaattcactaagcaatacacttacgacatgatatctgttctgtatgtatacgtcaataaaagggaggggaaataattatttagaaggactgttctttccatttgcacacttcaaaagtctattttattcaagctcttcatgtgctacatttacatcatcaatagagccattttagataacctagcaattttctaagccacatcattttaaaatgtcacagaagttgtttaagataaactactttttgaatctgtggataatgtcattatgggaagtttatcttaaccancaatacctgtgaaaag

SEQ ID NO: 371739 - DNA, 512 bp, Homo Sapiens
  misc_feature (19)..(19): n is a, c, g, or t
agtgccacctatgaaaccnaaatgcaggtccttaccagacatcaaatctgttggtatcttgatcttggacttcccagtctccagaactgtgagaaataaatttctgtcacgtataagctatctagttgatagtattttgttctagcagcctgaacagactaagacaagtccctgcccttggaaaatttccaaatgaaatgcaggaaagccatataaacaataagtatggaaaaatggagtcaacgagtggttgggagaaagagagcaacacagtcaatgttggtgcagaggatgaggatgtggggttgaggggagtggtggggcatcaaagaagtctttcaggagaaagttgagaaagttgcaaccaaattgttactgagggatggaattccaggtcacgtgatttgaaagtaagactttcataatcctgcatagattctgaacaattgggccactagaagattttggactacgtatttattttcaaacatcttttttccctgtgaaaagta

SEQ ID NO: 371740 - DNA, 514 bp, Homo Sapiens
tacttttccacagggtttgggggaaagggggcagagttgtagttgaaagatgcattggcactttgctggctgctgacattctgctaatttcactagataacagggacccagatgttgttatatgattaagtcagtttcaactagaaatattgtgaaaatcttgtggccagaggaagcctctcatattcagagtaaaaaaaatctaatttagtaaaatgtgtgatgtcttatgggctgtcttatatccttaagttcttttcaataggagagcaaaagagaaatctgttggcagtacagtgcttgccacattcctgttgctaagcaaagggaagctagggagaagaggaaaagcgaaggtctgtgaatcaggggcagtaaaattctaatcaactcttggtgttatgcttggctgactttctagagaaggaaaggcagcagtctgcattggtatatccaaaggctcaggaatgtagtcccagtattcacaaaggaaaacgcttcccctgtgaaaagt

SEQ ID NO: 371741 - DNA, 301 bp, Homo Sapiens
tgagccaccggtgcccgatccggctttccctttgttacataacatattcaagcttctaaacattacctttagactttccaaattctggcctccttacatccatttacctttccaatatatctcctgttactttttgtagtagattttcccatttaataatacaacactgcttttaatctccctgccatgcagtttcacacccacaggggtttacttatattggttattttcatgtaatgcctcacctttgttcacatgattcaagaattaagtatcagtttttccagacgtcacctggaag

SEQ ID NO: 371742 - DNA, 638 bp, Homo Sapiens
  misc_feature (222)..(256): n is a, c, g, or t
gaggatcccctatttccacagggggaaaggatcaaaaaggaagagcatcaaggtgtcatctattatgctatattttatttacttataaaatgaaaatgattgggaaattcacgtaagatagcagtggtggttgcaacatagctttgggacattcagaaatccttacataaaatgaaaagactaacttgatagcaaaattaaaatcacatggataccatttannnnnnnnnnnnnnnnnnnnnnnnnnnnnnnnnnngattaaataaaacaaaactcagtcaaaatgtcatcctcattaacctcaaagcagaaatgagagagagcacaccaccaatggtcaatctacacactatcagcatgtgtgcagaagaaacagagggaagcaatgcagcaagttaaagccatgaaaacaacagaacccacaggatttattgaaaatcaatgtgaaaacagcagagaactgtgaacatttatgcccacactaataatgggtggatgcaagggctctgttataaggctaaaggaaataaagtctctgaaacctgctgaactcttgaagcttaaaatctgccaagtttcttaccattcaggatgaggggattccacatacagagtaactgctgaccctgtgaaaagta

SEQ ID NO: 371743 - DNA, 706 bp, Homo Sapiens
  misc_feature (252)..(364): n is a, c, g, or t
tgctccgagctttcacaggaagcataattagtcctgacacagaggcttctccctagaacctcatttctttaaaaggcattatgtaaagaacgtgttctgaacagctgcgaagctcagcaaagaattccatccagtggcttcctattctggccctcgctgaaaataggtggcaagatgcagcaaaagcaatcatgtacaccacgtccatgtcttaatctaaggatagtttttgtttgtttgtttttgagacannnnnnnnnnnnnnnnnnnnnnnnnnnnnnnnnnnnnnnnnnnnnnnnnnnnnnnnnnnnnnnnnnnnnnnnnnnnnnnnnnnnnnnnnnnnnnnnnnnnnnnnnnnnnnnnnatgggtgtgagccaccacgcccggccctgttgtcctattgtggaaccaaatactgtatcttattccttctaattaactgtatttttatactcattagccagcccctctttatttccctctccccactacctgtcccatgtcctgagggcagtattttttagctctcagatatgggatgagaacatgagatatttgtctttctataactgacttacttcacttaatgtaatgtcctccaggtatatccatttatatccatgtcattacaaatgacagcatttttgtggttggataatatcccattgtgtgtatgtaccatagtttttttattcatttattcgt

SEQ ID NO: 371744 - DNA, 459 bp, Homo Sapiens
aggtcgactctatcagatcccctacttcacgggggaaggataagtcatgctctggctttggaatatattgaatttgacataaccattatctgtacgcattcgtgatttgcagtgaagtgtctggatacgggattctggattgcaaaaccccggtctgcagcttgagatatgttttgtgagttttcaaggtgcagaatgtatagtggatgaggtcactggcaactggggttctcaaccctggcctctggatatttggagaaagatctttagggcaaagggattaggaaataaaatacaaatcagcgattatgattcatttggaatggagtgggtccaaggtatcagcatcctttagaagctccctatatgattctaatttgaatgcaggattaagaactcttgcccagaacatagataaagtgcaaaagtactccaaaaactaagccctgggccattatg

SEQ ID NO: 371745 - DNA, 587 bp, Homo Sapiens
  misc_feature (142)..(267): n is a, c, g, or t
aagtgagaagatatgcctatattaatgtcactaataacaggcagggaagggacttgactcctggtctcctgactcccactgcacaggctaccatgaaagatttcctaggatggtggttcttgaaggagggcctagcccagtnnnnnnnnnnnnnnnnnnnnnnnnnnnnnnnnnnnnnnnnnnnnnnnnnnnnnnnnnnnnnnnnnnnnnnnnnnnnnnnnnnnnnnnnnnnnnnnnnnnnnnnnnnnnnnnnnnnnnnnnnnnnnntgcacacaagttcgagaacactgacctgggacatgggaatggataatgagataaaacagataaaaggactttaatcccacaaagcctacatatcaacagagaatgcctgggagcagctggtggctgcttatttcatctgtagacagcgtgagccacgcagtgccctcaaaccgaagtcaagctatttacccactagaaccccacagtggatactggactctgtgcatggttattcagggtgtgcactgtacaactcaaaggcaacagtgcccctgaagatgggctgcatggccattagtgtggcaccatgtggaaaagta

SEQ ID NO: 371746 - DNA, 643 bp, Homo Sapiens
  misc_feature (306)..(431): n is a, c, g, or t
gccaccactaatggccatgcagcccatcttcaggggcactgttgcctttgagttgtacagtgcacaccctgaataaccatgcacagagtccagtatccactgtggggttctagtgggtaaatagcttgacttcggtttgagggcactgcgtggctcacgctgtctacagatgaaataagcagccaccagctgctcccaggcattctctgttgatatgtaggctttgtgggattaaagtccttttatctgttttatctcattatccattcccatgtcccaggtcagtgttctcgaacttgtgtgcannnnnnnnnnnnnnnnnnnnnnnnnnnnnnnnnnnnnnnnnnnnnnnnnnnnnnnnnnnnnnnnnnnnnnnnnnnnnnnnnnnnnnnnnnnnnnnnnnnnnnnnnnnnnnnnnnnnnnnnnnnnnnactgggccaggccctccttcaagaaccaccatcctaggaaatctttcatggtagcctgtgcagtgggagtcaggagaccaggagtcaagtcccttccctgcctgttattagtgacattaatataggcatatcttctcacctctctgaggcttagttttctttctttatcaattggcaatggaaacctttgcttttatacctgtggaaaagta

SEQ ID NO: 371747 - DNA, 644 bp, Homo Sapiens
  misc_feature (306)..(431): n is a, c, g, or t
gccaccactaatggccatgcagcccatcttcaggggcactgttgcctttgagttgtacagtgcacaccctgaataaccatgcacagagtccagtatccactgtggggttctagtgggtaaatagcttgacttcggtttgagggcactgcgtggctcacgctgtctacagatgaaataagcagccaccagctgctcccaggcattctctgttgatatgtaggctttgtgggattaaagtccttttatctgtcttatctcattatccattcccatgtcccaggtcagtgttctcgaacttgtgtgcannnnnnnnnnnnnnnnnnnnnnnnnnnnnnnnnnnnnnnnnnnnnnnnnnnnnnnnnnnnnnnnnnnnnnnnnnnnnnnnnnnnnnnnnnnnnnnnnnnnnnnnnnnnnnnnnnnnnnnnnnnnnnactgggccaggccctccttcaagaaccaccatcctaggaaatctttcatggtagcctgtgcagtgggagtcaggagaccaggagtcaagtcccttccctgcctgttattagtgacattaatataggcgtatcttctcacctctctgaggcttagttttctttctttatcaattggcaatggaaacctttgcttttattaccctgtggaaagta

SEQ ID NO: 371748 - DNA, 562 bp, Homo Sapiens
  misc_feature (98)..(98): n is a, c, g, or t
tacttttcacaggccaggcaagagagaagaaacttcacctaggtgctgagcctagtgatatgttacaaagcttcctattgacagaacccccccacccnaccaaaaaagactcacatcacctgggtgcagtacccagttatgtgtcacaatgcaccataagtgcagggccaaggcaatagaaggaagtcacatcacttacatgatgaatctagataaaagccgcaatgctctgtaggcagagttcaggccaagatttcacatcagctgggtgctggtcccagtgatatgtaaaagtgccctttgtcgcactgccaaagaaggtgttatacattgcttaggtgcttggtccccgtatgtcacaatttcaactgtgctctaggcctagaaaggagagtccaaacactcagatgctgggcaaagtcatacttcccaatcacacacttgaaaatgttcagaaaaaagtttcctagtgccacacaagtcctggcttcgggtatgagagtcaacacctcctatgagttgggtcgaagcacaggagtcacagtcccctgtggaaagtagg

SEQ ID NO: 371749 - DNA, 691 bp, Homo Sapiens
tactttcacaggggggttttcaaagcacctttgctcctaaaaactgacttaactagccattcttttattagccatcatcactgtcactacagttgccatttaaggagaacctgctatgtgctgcaaactaggttaagaatattacacaaagcatcttatttaatccagccaacaactttaaaaggtgagtatcattattcttatttatcagatgagaaaatgatggccaagtcaaaatttgaactcagattttattgttgaatacaaactctgttctcttttccctatgtcaggctgcctctctaaaaataggcattgtctcctgcagctccgtctctcccaagtattcagattttatttattatatctgttaccactaataacaatatttttaaaaataagccaatatgtgatgatagtgtgaaaagtaaacatggtaattaggcaacatcaaaatgaagttaattattgccttgatgactagggtggtttgtgtacagtcttgagacagggaaaggcgtcacatcagaaagtggtactcccacatccctgccgtatcacaaggctgtgctcagcctatcaggggattgctggaaagggagcaaacctgaattcgctggtgccacacaaagactttttacccagggctgctatttccccaaggctttctctttatttgtgatatcctgtg

SEQ ID NO: 371750 - DNA, 575 bp, Homo Sapiens
tacctactttccacagggcatgactacaaggcctttgggcaagtttttctttgagtcacttgaactctgatgcagtgaagcaccaacctcatctctgggcaatacctacattaggctgttcttcctgccaattagtttctaaaacaaaaactagacatacagacctcttaatctttcattgttactgcttccattttaggacactttaagtgcaaacccagatgcctaaaataaggacaaatgcagtcacaacatttacaattcctttaaagaacattgtttttaatgaatcatttgttcaaagcagaagtgaatcaatagtgtgctttggtctctttcatgctaaacctttgttgatggtacactgaattttgtttcttcactgaactcagagaccctgtgacatgctggggagatccagggatttagggaggtgaagaataaaaggatgggaggtaattcatcactgtccttccactaatcactcccaggttttacataaaagatgcctagttttctttgttcaaaccatatagtaacttaacagaaaaaattgtcctcgtggattgcaatca

SEQ ID NO: 371751 - DNA, 531 bp, Homo Sapiens
gtcttcaaagttttgaacacaatctctcagaagaatcaatttctgatacctgaatctttgtaagcacgaacagagagaagggactggacagatgaaaaggatttgtagttcaaagaagagggccattgtggggaactgatgctgagctctcggttctatgccccccagacttccttcttcagttacggtccctgcagaatcagcatccatctgcgactctcctttattcattgaactccttgttttggagaggagaggcatattttctactttatgtagctctccagcccatgatctcctgtggtcaggggctaaggattcctttccctgtttcctagtaatgcataactctatctctccataaggcagggtgggccaggcattcagaaagttggggaagctaggcagaatgtgaaataagtgaagggaattgaagggtgctggaaaacctcccatcaaaatttcctcccccatgttattccaccattaggtaattagctcccctggtttcttcccctgttggaaaaagta

SEQ ID NO: 371752 - DNA, 596 bp, Homo Sapiens
  misc_feature (374)..(411): n is a, c, g, or t
ctagctctgtgacgttgtccatgttacttaatctctcaatcctattttctcatctacaaagtggggataaataatagtcttttcctcataaggtcagaggaagattacctgaaagaatgcctaaatgcccagctaatgtcagtgacacttcccattatcttgtcacagggtctgttatcactgtagcaaagtgggtggtatcattgcctgcccagtcccgagggctttgggcttgcagaaagaagaggaggcagttcccttcttcccaggatctcagttctttatcttagattcccaagagagctcagcctaggaagttttcttagactagctggggtctccaggacaaaggttgtattcactagggtagaacnnnnnnnnnnnnnnnnnnnnnnnnnnnnnnnnnnnnnngaatgacgggtgggaagatggcagggaaacctcccacactgttactcagcactgtgccttctgctcttggggttcctggttctccttacaaactggagaaaagagactgatagacaaaggctaaagcaagaaatctgggatgggaaagggggaaagaaagaaaacagggaggtgcctgaaaagta

SEQ ID NO: 371753 - DNA, 555 bp, Homo Sapiens
tacttttccacaggtacttttcccagggattccttggaataaccaagtcagtgaaactggcagacagaagatgacaaatccggctgcaaaccccaaagccaggcccagggttagcttcagggaacaaggaggcctgtcggggtacaagtgtaaggtctgctattcaggagtgttgcgcctatgaggatattcctaaccaatgcagagaatgtgggtgcaggggaagctccggggagaaaacatgagtggggattcttgggcagttccatttgtgaagtcaggaatgcatatttctatgaagtggggcccaggagaggaactgatcttcactgtattgaaagacaatgaaagcgacacaatttgttcttcccacgaacacacattaataaacacctgtcatatgccatacactctcctaggctctgggaagtcaaaattctggtacttactggtctctctgacagactgagaatagaaaaatagaagcagcgggctctgaaatgcccggaaggcagtatttaatggctctgggccctgtggaaaggtaccgagctc

SEQ ID NO: 371754 - DNA, 653 bp, Homo Sapiens
ggggataatgccggcacctacctcataggattgtggtgagactgcatatcatgaggaagataaagcatcgagccccaatcctggccatagctcaatcaccagcagctgttgttatgaaccaaaggggagaggctgggaaaaggatccactcccaaccatgtatcagcttgtaatttgtggtgttggaagagcgaaactggctaacacagtacaagcatgatacataacagggctcttcattccaggctagtaaatatcactagaacaaatgaacagctccatcaccaaaaatatacataaatattttgcatttgaagagtgtgaatgttgtacctcactgcaaatgtactgtccttaaaaacctccatgcacacctcactgagggaatgtgtgttttctctgtgccagctatctaaatgaccccatgctgcaaacgcttttggaaaataaacactctcacccacccacctagtttctcttctagaagcacagctggttcagtgtacttacctccctaatcagggattggagaacatggggttaataccctgtgaaaccccaaagtgcatcatttgcatgttggcaaagatgcaggctgccagccaaccccattccattttgaaagcggaaaaagggtgctggattcaggcata

SEQ ID NO: 371755 - DNA, 668 bp, Homo Sapiens
tactttcacagggaggatattgtctaacagaatctgcagttagtggttacaaacagctgcagaaattgttagttaagttcaagttatgttttttaaacgccagtaacaatttcttccttttcttatcggtctagtttcatttaacttgtatggttctttttctgctagagtctcaatttatgagccgatgttttccaccaaaagttaatggtgcctcttcattctaattcattgcaattaattctgagtactggatggccagaagagctctctatacagtgcgagaggtttccttatttctgactaattaggagtttttattatataacccgatttgaggaaatgctttaaaacttaagttaaaatctgaccatgagcactgaacagtgtatcagtttctttgggagtttgccttccattttttgtatacagacctctcgaagtatttggctttgaatatgattaactttttaattctcaagtttaaattctgtcttcctgttggacaacaaaagcagcgtagatctgattctaagacgtctgtgacccagcctaggcagcgggggttattctggactttttagaacattatcttgaaattctgtgacactgactcgttgcaagtaaaacaagccaactctctgtacatctttctgccctgtgaagta

SEQ ID NO: 371756 - DNA, 545 bp, Homo Sapiens
gcttccccagaaggaagttagaataattgttcttcagatctcctgattgttagacactctctgacaatcatcttactcttctgtcaatatctggatcaaatcagttaaagaaggaaatcctgagggcaggaagatattaacaatgaaatttgggttgtaataagagatatagggaggtacttcttattaaaaacgtaagctacttctgctttctgtgtccctgaaatatagaatgttcttgcctagaatacctacatatacccaaaatcaggaaggtgtgtttatgcggcatactagggaaggggcatctacaaaggagaaatgtgtcagtaacttatgagttataaattcatctaacaagacctctagtcatggtggtcaaggtcttcccatagagagttcagggtctctaaagtgggttaggaaaaaacttcctgtagagggaattcccacactagaggaaaggctgacaggtgaataatgctgtgggaaggctagatacacgaacgttgtaaaggcttttgcgacacaggcaccttttcttt

SEQ ID NO: 371757 - DNA, 503 bp, Homo Sapiens
  misc_feature (85)..(152): n is a, c, g, or t
  misc_feature (162)..(204): n is a, c, g, or t
  misc_feature (419)..(427): n is a, c, g, or t
tacacaaaaaaatgtgccgggcatggaggtgcacatttgtaatcccagctactcggaaagtgaggcacaagaatgtcttgaacannnnnnnnnnnnnnnnnnnnnnnnnnnnnnnnnnnnnnnnnnnnnnnnnnnnnnnnnnnnnnnnnnnntctgtctccnnnnnnnnnnnnnnnnnnnnnnnnnnnnnnnnnnnnnnnnnnngagtgaatgaattctctgacctctctcttaccttcctgaatcattgcttttctgtttctgtcttctctagtttaaccttgttcatctacttcctgaggacactcttgtggttttaaaacttcacagttacatttagtaactctttatataaggaaacagattgccacataatccatgataactgggtggaaaatttttaatctctcttgtacttnnnnnnnnntcacctgttcctcttacctgagatttgcatatgtttacattttggccttggagataacccttcctgtggaaaagta

SEQ ID NO: 371758 - DNA, 427 bp, Homo Sapiens
  misc_feature (215)..(256): n is a, c, g, or t
  misc_feature (267)..(334): n is a, c, g, or t
aagtacaagagagattaaaaattttccacccagttatcatggattatgtggcaatctgtttccttatataaagagttactaaatgtaactgtgaagttttaaaaccacaagagtgtcctcaggaagtagatgaacaaggttaaactagagaagacagaaacagaaaagcaatgattcaggaaggtaagagagaggtcagagaattcattcactcnnnnnnnnnnnnnnnnnnnnnnnnnnnnnnnnnnnnnnnnnngggagacagannnnnnnnnnnnnnnnnnnnnnnnnnnnnnnnnnnnnnnnnnnnnnnnnnnnnnnnnnnnnnnnnnnntgttcaagacattctggtgcctcactttccgagtagctgggattacaaatgtgcacctccatgcccggcacattttttggtgtaccctggtgg

SEQ ID NO: 371759 - DNA, 365 bp, Homo Sapiens
tactttcacagggaaagggttatctccaaggccaaaatgtaaacatatgcaatctcaggtaagaggaacaggtgatgtgtgtgttaagtacaagagagattaaaaattttccacccagttatcatggattatgtggcaatctgtttccttatataaagagttactaaatgtaactgtgaagttttaaaaccacaagagtgtcctcaggaagtagatgaacaaggttaaactagagaagacagaaacagaaaagcaatgattcaggaaggtaagagagaggtcagagaattcattcactcattatttttctgttttcctgttatttatttatttatctatttgggagacagagtctcacttggcca

SEQ ID NO: 371760 - DNA, 469 bp, Homo Sapiens
  misc_feature (43)..(52): n is a, c, g, or t
  misc_feature (267)..(308): n is a, c, g, or t
  misc_feature (318)..(385): n is a, c, g, or t
gtcaagtaaacatatgcaatctcaggtaagaggaacaggtgannnnnnnnnnaagtacaagagagattaaaaattttccacccagttatcatggataatgtggcaatctgtttcctgatataaagagttactaaatgtaactgtgaagttttaaaaccacaagagtgtcctcaggaagtagatgaacaaggttaaactagagaagacagaaacagaaaagcaatgattcaggaaggtaagagagaggtcagagaattcattcactcnnnnnnnnnnnnnnnnnnnnnnnnnnnnnnnnnnnnnnnnnnggagacagannnnnnnnnnnnnnnnnnnnnnnnnnnnnnnnnnnnnnnnnnnnnnnnnnnnnnnnnnnnnnnnnnnntgttcaagacattcctgtgcctcactttccgagtagctgggattacaaatgtgcacctccatgcccggcacatttttttgtgta

SEQ ID NO: 371761 - DNA, 592 bp, Homo Sapiens
  misc_feature (66)..(74): n is a, c, g, or t
tactttcacagggttaatccaaagagcaaacagttacaattttaaaattaagatggaatactcagnnnnnnnnnttctagagagtcatctgacactaattggtagctacagcatgacaacacccattgggaaacatggatgcaggcaagacaaaattcaaaaggaaattatctgatattgacatttggtgaaaaccaccgatgttccaggttgttcctatcacgttattgaactgtgaggctcttgttctgcctctgtttctctaagtctccaaggtttctttttgtgccctcctgaaaaaggagctccgttttcttctcttaggtttcacaatggccaaccaattcaattaaactcttaagaagggttgcaggctttcctccaactctgataattgacaggtccagttttcccactttggtgggcatcaggaccatgtgggatgcgatttaaaaacacagatgctggccccaccccagatacggcacatccaggagtcgtgcaactgtgtctgtgttgggaacaacagctctgctgtgattccaatactcgtgcttggttaaaaaccaccgtttttcccctgtgaaaagta

SEQ ID NO: 371762 - DNA, 711 bp, Homo Sapiens
  misc_feature (206)..(248): n is a, c, g, or t
tactttccacaggatgaattacatgggcatgtaagtgaacacaagcacgtcatgaacacatgtgctaattgtgacgatgtcatcatcgtaagagctgtgtaaggttacagcttgatgaaggacgagaaatgaacctaagatggttgctgttttgcctccagctgactcagatactattggtacaattaaatcgcatgagggaggtnnnnnnnnnnnnnnnnnnnnnnnnnnnnnnnnnnnnnnnnnnnaggtaatgaatgcagaagactgaagtacaaatagaaggttgattaggcagctagctggaaatagatgtgaacatgttcaggcaattagaatgtggtgccacagctcaggttgtgttagggattcagaaagaagagaggtcagaaccttggctttcatattaatttaaggcacagaaggaaaacaaggagcaatagaaagaaacagagacacaaccattcaaaatagataacagccaggaaagtgtgttaccaaaccaagaggtgagaatttccagatatcatatcttgctgtataataattaaaatttatctatctctatgtaaaaatggtattatacataggacagaaatcaccaattaagatgaataagagtaccatatttaatcaagtgcatacatctgttaatatccattttcagaatgtaacagcttaaataaaagctgacagaagtcccctgtgaaa

SEQ ID NO: 371763 - DNA, 539 bp, Homo Sapiens
cttaccacaggcatatttacatctagaagtgggaggtaagtcttcactctagtgtaatggcagaagagacatgagtaaattgtggcagtggggagtgtcaccaagtaggaatattaattcttgtggggagaatgaggaagtttcattaaggaggaaacatgtatagtagatatttcaggacatgtagggtttggttatgcagaaagagagggaaggggaggaaggatcccatgtggaatgaaccatgttaccaggacaacgagaggataggatatattagagaaatagtgaacagtcctatgtggttggagggcaggagacagtggtagttgcagtgacacatgagttggaaaggtcaccaactgccaaattatggagggccttgagtccagggtagggaatgaaggtttatttaataaagtacaggaagctactcaagatctttgcataagaaagtgaagcaatcccagctcaacagggtgtagagaatgatcaggagactgactatgccctaggtggtgtgcccggtggaaaagggg

SEQ ID NO: 371764 - DNA, 511 bp, Homo Sapiens
  misc_feature (119)..(127): n is a, c, g, or t
tattttccaggcgaaaatttattgaaacataggatgtcattctacatagaagtgagggtatgtgacatcatgacataaagtcctttcaaacaaatactacttgtatacaagaggtaggnnnnnnnnncatgattcctggtgagaatttaaggatagacctcttattggtttgagatatatggatagatacgatagatagatagacagacagacagacagagttggatatatgtgagaggatttttactgaatacctaccatgtgccagaaacaggactagaactttagaaggacacaaagtctaacatgggcccttttccccaagagctcctaacatcagtgagaggccagatgtcttttcagtaaggctgaaatatatatgatgtgctttctaattatacatgttaaacaccattaggtatttgccaatgaataggttgtaaattataagacttcgctattgaaagaaaggagtaatcatctgggaagggaagcctgtggaaagtgggta

SEQ ID NO: 371765 - DNA, 310 bp, Homo Sapiens
taatttcatacctgaactagatacgcctcagctgcacactgctaaggaacacagtcgaaaatcgaaaatatatcataagcaacattttcacagaggtacccagtgggatgtcttaattcttatgaaggtgaatttttagttggatgggggtgagttacttattttagagagtcattcatgctagtaagaggattatagctacgttaatttacttgagcaaacagcatgtatatatctattaaagcctttagtgtaggtaagcctattatttttttcatacatgtagacctgtgaaaagtagggccgagcc

SEQ ID NO: 371766 - DNA, 608 bp, Homo Sapiens
tattccacaggggaagaaaaggcgagcttccagctacaacaaaccgtatcctaggaatctcgattcacacgaaacgacaatgaagaatggaaagtctggtgttttaaacaaatggacagatataaagtgagcatagctttagtcattacgcccagcctcctgaattgagacggacaagaataaacctgacttcccccacaaataaatctgcagacgtcacttattcattctcggatgttctattgctcacgatcttcgtcgagtggagagaagttaggctctcacgttaatccagttctaactcatgagtcaaactgagactgcaacaaaagaacgccccttttttcttttacatgattttccctttcccctgagtatacttcctgaaccaagaagaaaacaatcaacaggaggggagactggacttctccttcccgagggaaaaaggctgcatgggaaaaacacatcccagcgggaaggggtgctccaacggagctgagcgtgactcagagactgggggctggctctttggaaaggtcggctcccaaagagttccagagcagcctggttccacaacacgcttttaaaaagtgccctgtgaaaagtac

SEQ ID NO: 371767 - DNA, 711 bp, Homo Sapiens
tactttccacagggcaaatcagagtggctgaagcaattggaaatttattacttcatgtaagatcagatgctaggcttttctaagattggttaatttaacagtagccaattcagctgtggcagagcattgttgactttcatgtgatttttttggcttttgcagtcatggttgccaggacactgcagttgttctgaggatcatggtctaacacttgagcatctaaaggcaggaagggaatacctcttaagaatgaggagaacagctagaaaattccaaagtgctggggttacaggtgtgagccaccgcgccctgacagggttgtttgtttttgaagacatttctattttttcaggtagtgacattctcttatgtaaacataatcctcatagttgtgtaggcatttgttttgtatttaaattcgttagctgctcactattagtctttttaccacagctattccagtaagttcattgttcctcttaaattggctgaattttattcacttttttcaataataagttcttaggacttgtgttctctgatttctttcataatggagaacatttccttttgccttaatttttgaactgtatcttggctgtatataatattgttgggtcacactttatttcttctaaaaacttaatggtcctggaatattgctgtggagatgactaacgacacctccctctccctgtggaactaggggag

SEQ ID NO: 371768 - DNA, 537 bp, Homo Sapiens
gggaagatgaagagtgtaaagagaaaggtgaatgatgactcctaaagttatctgagggcaaacagaacaaaggtaaaaagaaatggggacaattaaactgacatagactcaaatcacattagattgcaaatatgtccctaaaaatgacaacacatacacacgcaggcatgaactaaagtctacacaggcctatggtgagacttcctttggggagtagaatatcaaggattagcaaaggcagagtagaaagacaaatgagtgtgtgtgttcagatttcctggaatctatacagagatcccaatttcctttcacataagtagcaccattgatgtcagtaagaaacaaagattccattaaggcttattatgtgatttagatatcctggtgtagaatttatctgccaaaactgttttaatcatttattataaatgaagtggtaagaaataagatatttttattccacattttatatctcagctatatagtccagaattatcttcagcaaaagagtcctataaactatacctgtggaaaata

SEQ ID NO: 371769 - DNA, 545 bp, Homo Sapiens
ttttccacagggcagggtagacagaaggtgatactgccacatcctccactcagaaggaatctggaaggttttgacaaatatgtacattttggagtgggaacagcagagagtaggggctggctacctactttccactacccctatccccactccccctagggggtgaggcagagataagcacgctttgtggggcacactgatccacaaacttgcaagcctgagctccactcagcagcagcctgggcaggatgaatggtggtgtgcaggtgtttgcggcatgcatagcttctctttctcctagagtcaatccagtgatcccaatttcctttcacataagtagcatcattgatgtcagtaagaaacaaagattccattaaggcttattatgtgatttagatatcctggtgtagaatttttctgccaaaactgttttaatcatttattataaatgaagtggtaagaaataagatatttttactccagatcttatatctcagctatatagtccagaattatcttcaggcaaagagtcctataaaatatac

SEQ ID NO: 371770 - DNA, 539 bp, Homo Sapiens
  misc_feature (136)..(160): n is a, c, g, or t
  misc_feature (525)..(525): n is a, c, g, or t
aattgtgaaatcaattagcagttgtgaccaggaactgctttaaataattaaaatgcatggaatggaatggaatggaagacattaacgtgtatcatacatggtaagagtgagtatttgagaaattggtttcaataannnnnnnnnnnnnnnnnnnnnnnnnactgcgacacaaagaaacatattttggactgtgagttgtggtcaaaatagccttaaaataattgaactaagccagaggcattcctatctcctttatcagacactcactttcccagcctttcttgcagttagagtaaccacagttgtgcaaatagtaaaaactgaagtgtacagacaggttctgctcagtgagactttcagggaaagttttccttccagaatacaaagacagagtttctccagaaagacagtcttttgctcctgcttccagttttgaatacagttgagatgactagagctgtggcagccattttgcaaccacgggacaacaaacctgaggctgaaaagcccaccagcagaggatgnccctgtgaaaagta

SEQ ID NO: 371771 - DNA, 564 bp, Homo Sapiens
tacttgtccacaggggatcagcattgagaagaatattcacaaatgtctggtaaataaaatctatctaatagtacctgataaatatttatcacatcctgttacggttaccatactgttagtttcctgggtaattgttgtatactaaaaaatcagtaagattcagtgtccaccccaatgaagttcatggtctacatggaaaaataaaacaagtgcacatgtgattatactacattgtgctgagatctgacagaaagataaataatcctcgttaacatatttttactaattctatgtgcgaggcactgtgctgaagaatatatatcgatttcacaggaaactcagaaaacttagacttgaagacactaagtgactaatctatgactgaagctcaaaatcaggacatctatttctggcacacttaaacttaattactattttatatttcttcctgggttacaaagtggagtacagactggaataagggagatcagttaggttactacaataatcaatatgaaagatgataaggacctgagctaggaacggcagacctgtggaaaagta

SEQ ID NO: 371772 - DNA, 582 bp, Homo Sapiens
tacacaggatagcaatattccactggcgtgtccttccagtatcctattgtctttaagtttcagtgtttccttttgataaacaatctttatatggttctatagcaagtacaacaagtatcactagagccaaaagtgaaaatttgtatacattttcagtttggagtgtctatctggcacagggtgagactgctgtcgtcgtgacatagcccgtgatctttcaaaaggcacatagtagctaaatcagataacttttttcccaaggagctccagagacattcacagtacaaaataaggtagcctttaagttgcacagttctctcccaagaagatgtataggagaatcaggacaaggtaagaacacatgttcctcagagtcctcagaggagttatctgtatgggaacttgaaattacacattgcaggaagtcatacttcagcccgtacctcctgttgactttttattgtgcttaccttttggggaaattttcctataaatttaacacttcagggtcttaagccctttctcctctatcagcagaagccaggagtgcaagacatctggggtcatatactgatgacgctg

SEQ ID NO: 371773 - DNA, 213 bp, Homo Sapiens
gtacctactttccacagggatacagagatatcagcgagggataacagaggcagttaagtcactctttcacgttatccactctgtttaactatttattttgaacacattttaaaaaccagatcaggcaacaacacaagtttcaaaaaattcttcagtattagaagtaaggttatcatgcaagaatatgttaaaattctcacaaagaatatatta

SEQ ID NO: 371774 - DNA, 460 bp, Homo Sapiens
cagtgacctgaacagggaagctctcaggtacctttgggagcatagaacccaatgtagcagaaagagggctacattcctagtcctagtcctacctctaattcattgtgtgaccatggacaaggtactttcccactttaaacattagtttccacatctgaaaagtggtagtggaggttagacttgatgagattaaactttatcttcaggcttctaatcctctactgcctgtcatgattgtagcaaccttccctgagctttttctttggtgaattcttatagcctcctagtactcattttagcaatatcatatccttgtatgttctctcctaaatgacacagatataaaagtcttgcctcagctacaagagcatctgcttctctcctggcatgccttacctataacagagtcctaataaatgtgtcctcagtccttccttgctgtgttacctgtggaaaagta

SEQ ID NO: 371775 - DNA, 719 bp, Homo Sapiens
tactttccagggccatgtgtagttcatcttctgcttaactcttataaaaccctgccgtggccaattttcttacatggccatctctttctcctgatttgattaaggatggaaagtattcaagagtatactgactcagagtcaggtgcccaggcaagagttagataatcatttgagaggatcatcaaaatatcaccttgttatattatttctacatgagcatagatttacatcttaaaaaattaatccagctctcatgggtgagtatttcagagataacaagttccttgtggacatatgccacttcttggttaaaaattacaaatatgcacgcacagttaaaccaaaatcagctgtacattctattagctattagagtaaacaaatggcctagatgtaatctgaacaaactaaaagactataggtatttagtgactgctcagcaatatttaccacatgacaaaatgatgttgctatagatttctttcaaaaacaaatgaggtattagagaattttcaaaggtttaacaagacccagcttgaagtgacagaaaaaaccttcataatgtgtttttataatgtccttcacatcagactacccagggtcctgtgcttgttcaaacctgtagtctcaaccaccctttgtctcccatgaaatctccatcctccttcctctcagagtttccctccctgtggaaagtaggtaccgagctcgattgacat

SEQ ID NO: 371776 - DNA, 517 bp, Homo Sapiens
tcagagcttaccagaaagggaaagcataaaagcctttgagccattctaaagacagggccaccataggctctcagtgaccctctgtgactgagtggatgcagcgatgccaaatctaacccttactgctgaagacccaacaaaaaagtcacccgttctacctaggatgagaagccctaaatcagtggggtccacttactaaatagacataaaggaatgaagtgccctggaagaattcctgcctgaacctctcaagagcactcatgtttgaggacacttatcaagtattcactccaggattgggaccatgaaaacttcagctgcttttagctaatcactgtgacttttggggtgtcacagtgcaggcaggaaaggacctgatgaacaaacataatcattgctgtcggagttactgttatttattgccttaatgttacctccttctcctgagcatcacatttcctcagtcagtaactcaccatcccctatatctataaagtcaccatccctctgtggaaaa

SEQ ID NO: 371777 - DNA, 575 bp, Homo Sapiens
tacttctccacagggcatggtcatgggtttgagttgtgaaatatggacccttccatgtgggtatcagcacagagaaagcacaggacattagtggtaggaaagaaaaaagaaacaatacctttcccctagattccagtgcattattttgtttcccttccacttacttatcctcatataaatgcaagtgttcagagctagaaacctcaaagatgcttcctgaattcaagcccagcgtcttcaatctggggcacagagtatgtgaaggaagctgcaggatacaccccagcagttctgtgtcattaacagtatttcatacaggaatagcttctaaattcaccttgtaagcatccacagtgaatctgaaacaagctttctgagatttccctttctaaggtgatttggtgtatgtgggttctcacatcagtgaagctaggaaatccaagctacaagagttaatctctgtttcaaggcgggtaaacaccttaatgttttctgagactcctggtgctaattttcatgtttaaaatgcccacagaaatatatattaccctgtggaacagtagggtacgagctcg

SEQ ID NO: 371778 - DNA, 215 bp, Homo Sapiens
gccgtacgttgggcgctgtactggtattccgggggagggggtgaagtaaatgtcccggtgtcaggagaagcacgacgcggtgacacgctagctaccagcagcgctgcgcgtaaatgagagcagagtagaagtgtagttagctcttcctgctgtcttttcactttgcactctagaaggaaagaccttatatttaaattaactcagtagggaccagg

SEQ ID NO: 371779 - DNA, 483 bp, Homo Sapiens
cagccggacctacttttcacagggggaccagcttgaccttccactccctgctgtatggagagttttgcctaccatcattttcagagctgcttctgccacttttgctactagggattaaaatttctctataatccaaaggcagaaaagagcattcattgcctgacccatgttctcttccatgtgactagcacataatggctgtacctcggctcttgtggaaatttagagtgtggaagccgtagaaggagcagttccaggaatagtgtgtgtgtgcctttgtttttggcagatccatcttgatactaccaacacccagtttgttctaaatctatggaataattctggagagaatgaaaatacccctatttactgagcgccatttagtggaaactaatggtaactactacacagtaaatgccatgtgctgagcaagtcacgttacctgatagctacctgaccttcacaaaagccctgtggaaaaga

SEQ ID NO: 371780 - DNA, 476 bp, Homo Sapiens
  misc_feature (221)..(229): n is a, c, g, or t
actgccaatgctcggtgacctgggatgcaaccaggcgtaatgttgatggctgctgttttttaggttaacttatctatcccagtagctcagtttctattttaccactgggtgacatggaaatcacaataaggaattctaatgtcatttgtggctgaagaacatttttatgacagtagaaacatctaagatgacttgaggtacagaatcctggaggaaaggannnnnnnnnctggcctaaacacagtagaaattaaagtttgatttcttacttgttctgttactgagtcagtgttatgaaatgatgaaataagaatttagtgtttttgtattgctactggacagtgttcttgaatatattaggacatctgctatttgaaattaatattcagctagaaaggttgaaaataaagggctttctggttatattttatagctatagattttttttctatgggctggcctgtggaaaagtaagt

SEQ ID NO: 371781 - DNA, 748 bp, Homo Sapiens
tactcacagggtaaggcgtcacttgacatactgataaatcttttacattctatatagtggaattagacaatttactgaaccttccgtcccaaccttccatcccttaccctggttcttgctactttgttgtttagatcatggtctgttagcggaaatatgactccatgtggtccatgatatgggcaccttacaagttattctaaataatggcacttaggttcaaagggcttgttaataatagtgccattgaggaaaatcatttgggccatcaaccccttctcatgttgaaaatagcgttaagtggtcaagagtgtgatcggtgaaacacagcttaattcagctctacaggtgtgaatattttagccctggaaaggaaagaatgattattgcagggttagaaggttcaggagaacagtgcctccctcctagtcacagttttgcagggcttgcgtgtgagcccttacttagaggtttacttataggaagtttgagactgagtcagaacctttctgggtctcttgcaaactgcgggggaaatagtagcaactggggttttttgctttagcaccatggttgtttcactccgactccgttgctgtttcccagagtcatttgctctatctgaagacactggcccgtgggcactcactgcccttagtaggagttccttcctggaggctctccctgcagaatctgcctctggaaatcaaaacgtattgcccctgtgaaaagtaagggagtcctctac

SEQ ID NO: 371782 - DNA, 492 bp, Homo Sapiens
  misc_feature (415)..(415): n is a, c, g, or t
ctgcaagctcacacaaaggcagaggagacttgagagggcccaaactttccatccatcactgattgcctggaaagctgtgcatatgcaaggggaacctggaagggcccagtggaaagtaaaagttaggacagaattgaaaactgccgaaattttgcatatgtttctcaacccacatatgtatctatcagcagatgacatcatcaggcatgctagcaactgcatactacaatagagatagattctgcaaattaaatccaggaaaaatacttataaacacaccaaataaacaacaaaaaataatagaaacaattatagctctcaggaaagaaaaatccaatccagagctgccacaatatgttatctaaaatgtgaatttgtcaacataaaattagggataggcaaagaaacaagacanatatgaattctattcaggaaaaatagctatcattataaacatgttcaaggaataaaatagtatttaaagaaacggag

SEQ ID NO: 371783 - DNA, 483 bp, Homo Sapiens
  misc_feature (172)..(318): n is a, c, g, or t
aggatgtttcatcacacggaagcaaaatgtattgctgctaaaatgagaagtaacaccctgaaggttatcaagacaacaattttcaatgccaaatgttgtttccagttccataggagatggaataagcacacccattacatttctcttctaattacaactaaaacccctgttnnnnnnnnnnnnnnnnnnnnnnnnnnnnnnnnnnnnnnnnnnnnnnnnnnnnnnnnnnnnnnnnnnnnnnnnnnnnnnnnnnnnnnnnnnnnnnnnnnnnnnnnnnnnnnnnnnnnnnnnnnnnnnnnnnnnnnnnnnnnnnnnnnngttaaattagctgggcatggtggcacgcacctgtagtcccagctacttgggaatgttgaggtaaaagagggttcgcttgagctcagagttctcacggttgcacgtgagctatgattgtaccactgcactccacgcctgggcaagagtgatacctgtggaaaagta

SEQ ID NO: 371784 - DNA, 587 bp, Homo Sapiens
  misc_feature (175)..(273): n is a, c, g, or t
tataatgaatctcaagaatatagtatttggtataacagaagttatacccaagcccttgcaatacctgataaaagtataccagagtttgagatgttattttggtggttttgattataccttgaaattatgtcaaaactgtggttgtttcttactggaaaggtaaattttgatttgnnnnnnnnnnnnnnnnnnnnnnnnnnnnnnnnnnnnnnnnnnnnnnnnnnnnnnnnnnnnnnnnnnnnnnnnnnnnnnnnnnnnnnnnnnnnnnnnnnntgtaagtagttaaaattacagaaataataaaaattactaaataaatactactgaatcacttggtatatggccaacactgtgctaatcattttcatgacttaactcgttgaatttccccaacaatctgtgcagcaggttactatcatatccctcttttatagagaaggaaacaaaaagcatcaaaagtctaaatagcttggccaggtgagtggttcagggcatcaaacccaggtggcctgacacccaataacacagccttattaaggaggttgtattcttgcattaccagtggtatgaacagtacctgtgaagta

SEQ ID NO: 371785 - DNA, 419 bp, Homo Sapiens
atactttccacaggtaaagtcaaaagatttttagttaagctgtagtcaaataaaacagcaaaccaccttctagtataatattaatcagcatggtacatagacacagagtcttggagtaagaagatttacccaaaaggtaaaccccaaaagtcaattaatgggattcatctgggaaacaaaaaggcttaagggaaaagcgatagtcctaataaagtggtcacaatcaaaggatgatgataacagtctcatttagtctcagcacttacaatcacaaactgatcttcaatatcaccatatataaaacctagaaccaggagtgatatcattaaaatggcaaaataggaagccctggactccccttcaaccacaaaaatatgaacttaaaaatgaccaatggaccaatgcccctgtggaaaaga

SEQ ID NO: 371786 - DNA, 654 bp, Homo Sapiens
gaagaggtagttgaactgtggtgcaatagttgtaatagaggccaaagccaattccatggctggagctgagacgccccttcagaactgggacaagccaatgcatcaagtgggcattgattgtgggctgctctttggaaggcagcattaccttgggcaaagcagctcccttcttcaggggaggagtcccagggaggacacagctgtgagcaattggttttcccagcagctgggggaatgagtgccttgtccctatagatggttttgagggggctgcatttgggggaatgccttctggggttcactgcgtgcttctatgtctttcttagaggttcatttcaaactataccttggttcattcacagtactgatttagttactatccagattcatagactgtacttgctggcactggaatatcatggacagagagtcctaatctgactaagcctagggaatgacatgggaatagcttgtcctgggtcatccagctaccagaaaagagagctgggattcatatccaaccaacgatactttatacctcacattacttctgttatgctacacactcctgagtcacaggagattccaacttgtatttcaagcccagactgcatgacttcaatgtcctgtcgcctaaccctgtatcagatgcag

SEQ ID NO: 371787 - DNA, 347 bp, Homo Sapiens
caggatggcagagctggagctacaatatttctgcagacttcatatgacaagcaaaatatgtactcatatgttgcttgggcatttagattccccagcaccacgaagagacaagccatatgtactactggaatcacattatagccgaccaggtagccagaaaatttctcagcttatcagtaagaacactgagaggttatgacagccatagtttaggggcatgcagtattagggacagaggcaaggagttgctcaagctcagcagatactaatgctcccctcaagtaccttacctaaccattacccaccgatgtcactaaactgcccttcgtggtggtctaatattaccc

SEQ ID NO: 371788 - DNA, 560 bp, Homo Sapiens
ggggggaatttaatacgacaactctcacaatgggggttgggagttggtggataaatgctgcgccatccctgtcccggggttgagacagtcacaagatccatgctatgtggttctgcaggggctccccatacagttgcctgcagcagtaaccagctcattcctgaaaattgtgttggtttttctccttggtctatctgactttctccaaagcagcttacatccgggtctttatctcagtgactctttcctagagaatcccaaattaagaaaacgtcaaccctgtattattgaacaatccgatttatcttaatttttgttataaaaagaaatataatggatatctatgtataaattcctctacatatgggtcctagttaattattgtttaaataataaatgctaagtcataggatatgtttttaatttttattgtaaatagaattataatagatatctatgtaccagtacctttatatatggatctagttaattttttacaataaacgctgggtcaaagatatgtacattttaaagactcttgatatatgtaaccaaattaa

SEQ ID NO: 371789 - DNA, 531 bp, Homo Sapiens
  misc_feature (332)..(347): n is a, c, g, or t
  misc_feature (433)..(461): n is a, c, g, or t
cacaggcatagcagatgcaaacagtgatgagctaaggatgccttttgaattgaggaagaaatctttcagaggcgtatttctgtgttttaaagagtgggacagtttgctcatcacccaacagatggcagtaaatgtcagcactttgtccacactggtggtctgactccctttggaagcccttcaatccttagggaatcccaattcccatggcatttcattctcttttgatgacttcatttcatccttgaaaatcccctagggaatattatctcattttagagatgaaaaaaactggaacttagagaagttttgattttatgctgttactgagnnnnnnnnnnnnnnnngtcatctaattgtactgtgttttgtattatccatattttgcaattaatccacatttccttaaaatttcatggatccttcctttgcnnnnnnnnnnnnnnnnnnnnnnnnnnnnngggcccaagaaggggttttcaaaattttcttccaaagaaggcaggataacttaggtgtccggtaaaaagg

SEQ ID NO: 371790 - DNA, 422 bp, Homo Sapiens
gagctcggtacctacttttccacaggaataaaaataatgattcctaaatgcattataaaactaagcttttgagggtttatatttgcatctggaaaaatagctaagagcaatgctcagataagactggggcttcagacccaatcctcacagacatcaagcagctggccaccaaaggactgggccaggaagtcaagataggagcaaaaatcggccaggatgcagcgaagaacccaagggcaggcccttgaatgatgatccagtgtcggactcaggagctcataggacttgcacattttcactgataaaataacccagaatgcaagctctggctttgtcctccaagggacaacccctccatttgaacttggatcttaattacaagcatatatttatgaaggagcccttgaagaaaaactgtactg

SEQ ID NO: 371791 - DNA, 546 bp, Homo Sapiens
  misc_feature (16)..(16): n is a, c, g, or t
cacctactttccacanggggtagagaggagatgggatggatacaaaagatgaacaagacagaaggtttgcccatgagtcaaggaagataaacaagtatatataaatacagcatgaatataaatacagcatgaaacagaccagctggaagatcataaatacccctcagatagggttctaaatgtggaggatgaggagaaactgcttcccaactgggagcatttggcagaggctctatggctgtaagatttcctctggcagaggttgggttaagggccttccaggtagagagaagaacttgaacaaagttaacagagcctgggaagtgcagagttcattttgaggaacagtaacatagtatatatgcttgggaataatgcctaaggttgcttgctggctcaaaacagatctcatgtttgcatattagttggaaattaataataaagaatattagaattaaacagtattgacatttgttttgtagtcttgtgcttttatacctctcataaacataggtcattagcccctgcctgtgaaaagtaggtacg

SEQ ID NO: 371792 - DNA, 549 bp, Homo Sapiens
  misc_feature (461)..(495): n is a, c, g, or t
ctactttccacaggggaagagggtagagagaggtcagggtgaaagcacgtgggcctcataggccttactcagtgatttagatctttatcttgactgcatcaggtagctatacaagtaattcctgaaaaggaaatgtcctgagatcaaactggctttactcaaaggtcaccatttaaacccagccatgcacagtttagcacttcattaaatattgtgtcctaatggttgctcccttctcccaggggccacacacgtcttctcatgtacataagcactcgtggagtctgcggttggaagaaatcacgcaaggactggttgtgccttgcacacctgtcacagatttgcacacccagaactagctcctgtttgcattgtctctactgtagcttctgcaaatgacaaatgtgggggtttcttcttggatgaagtggtttgaggtttgaggtttgagacttggatgnnnnnnnnnnnnnnnnnnnnnnnnnnnnnnnnnnngcaaagagaaacttgttcctcttcctatgctcactgagtcctctttgccctaac

SEQ ID NO: 371793 - DNA, 957 bp, Homo Sapiens
cccacagggcatttagttatctttgcagcaacaagtagaaatcccagttttgaagggttacacactaactgggcatactaattggacatgtacaagtagcatgtccaagtaactgaaggaatgaaacaaaatcatttcctattttaacaaatgaaaacataaaattccactgagatcctctaaagaaagaacatgctttcacaatataacaaaaagtgagtttctatttccatcctctaaataaaaactctgaaagaaaagattataaacagacgttcctactgtgaaaaacaaggaatcctactacctgtgctttttggttaacttcaaatggttttcagatcttgacttagtatttccagttactctgcttccagaaatagggttcctgaaaatcagagcttacacacacagaccttccatgtatgttttgggaaaaagaagttgactctcaattatttgtgattatggtaactattcatttaaaatttcacaaataattgagagtctccgtcgaactagttcgacggagactctccaaggcagcagtgataattgtgtttttgatttcaagttcttctcactggtgccttggagagcttttctatatgatcaagttcgacggagactctccaaagctccactgctcaacattctgtgtccagccagtgggcgtggggctttggagagtgcagaggaacctgcaggagggttttaaggaccaggcctagaagaggcttatgtcgcctcttcccacagtccactgaccaggactcaaagccataccacctgcagcagaagaagtgaaggaggaaatgggctttggtgaacacatagcagtctctgccaccccagcctcccaatgagcagggcagtcttcctgacccaaaaataaataacacaaggagcctgatgtagaaacaggttcgatatgtcgaagagagtatccgtcgactg

SEQ ID NO: 371794 - DNA, 510 bp, Homo Sapiens
tacttttccacaggttaatgggaggaagggttctgaaaggacaacaaatgcatcccagacagaatccatatcctttcaacactataatagcatctagctaaaaatacaaagtaagccaaaagcagcaggccaagtactgttaatcacattgctttaaagcccttggaagtatgcaacaggcccaagatttacaatcttccacacaggacaagcaccacaaagaaacgtggtgggctacacaaatggcttaataaaatgttaagagctgtacatccagcagagttcttgtgaaataatgtgatcattagtactaattttaaggtggattatatttctgatctatacctgcattcccccccaccaccagggaaatgagtctagtattttagtagcagaacagggtgtactcctaagaggctgttggagggtggtgttttttgcttctgactcattttgatggtaattagataatctactttgtggatttattttcctacctgtggaaaagta

SEQ ID NO: 371795 - DNA, 634 bp, Homo Sapiens
tactttcacaggggagagatacaaatatagtttgatcagtggtttagtaaaatcactctggtggcagtgaagagggctgaagaaaatgatgatgataaggcggtgggaggtgagtgcagggttacatctaaaagctgaactgtgaaatagaaaggctgttacaatgatccagttgagggatgattaagacaagacagtggctggaggagttgagagcaagggctaagactgacaattcagaccgtgcatgaaagtgatgaatcacatgacaaccatttgagtcccttcccatgctctgatttcactccaaagaagatcgcagatcttcagattcaatattgaccacaaaccttcctgcagaagtagaggcatctgtagcctcttgaaacctacagtacatccttgcggtgaaactgctttgttgataaaaatgatccctgtgtgaaacagatgtcactggtgctggcacagagagatgaggaaggataaagaattacagtggagttgaaaacactgttaaaaaaataaaagacctaacagtatagcacagcaaagaagcaaaaatgctttgaagctacatattttttctgcacctgacagtgaaaacctgtgaaacttcatacttcatggaaaa

SEQ ID NO: 371796 - DNA, 218 bp, Homo Sapiens
acagatgaggaaactgaggatcagggcttttaaattgccccaaatcacactactaataagagatagagttgtggtaccttttttagagggaccattattctgctgactgcagtactgtagagcataaagtttcttatccacactgtttcttagttcagtctgtcaatatcactactccacgattattgttgtttgtttttctttctccctgtgaaata

SEQ ID NO: 371797 - DNA, 791 bp, Homo Sapiens
  misc_feature (50)..(62): n is a, c, g, or t
  misc_feature (104)..(171): n is a, c, g, or t
ctcggtacctactttccacagggacagcactttctcaaatgaaattatgnnnnnnnnnnnnnaatggcccatttttaggtagcagcaggggaggtcagagaccnnnnnnnnnnnnnnnnnnnnnnnnnnnnnnnnnnnnnnnnnnnnnnnnnnnnnnnnnnnnnnnnnnnnttggaggtggcttgtcctgaactccttcaaacggtataaggtagtcctacatctccatttttccaattattggcatcaaggcacaaaggattaaactccctaagggacacgagttgtgaagtcactccgcggggacacaaagccagctgccgtgccccacaccctgtgtctctctgccactctgctgcccttcccttcagtcttctcggactctccagctcattctgctttcctctatctatgaacttatatggtacgctgttttcaaaaccgtacagttaatcattccatggtgacgagttcatgcatgttagttttttctgagcaattacatagcaagatatctcgaaatgatttctatgcctcattctactttcttcccaaagcagtcctggctccgggtaagaactcattaaatactttgtgattgatagataatacaaataatagagataggaggcaggggaattctgggcagaagaaggcaggtccccggcaagggccccaacctcaagcctgaaaccacagcccaaagtgagaacatacatccctgttttcccactcaaatgttgccttttccaaaccacccctgcctgtcccactcccgaccctgtgaaata

SEQ ID NO: 371798 - DNA, 496 bp, Homo Sapiens
caagtgtgtctacaacaggccctccagctgacatacagatatgcccaaattcaaatgtccaacatgctgtgtcttctcgagagcaactcttctgctcgtctctcctgctgtaaatagcatcatcgtccttcgttgtccaagctgggaacctcagcagatttgcaggcatttacttctcctttaattcccacataatttttttaaattatgtatgttatctctaagaattttctgtttccacagacatagttcagactcattttttacttggacagttgtaagagccttggataaattatgggttgagtagaatttttgcaggaaaaggggatttggcatgggactcctttatatgtatctcttagtcacaataaaattaacaattatggctatgcttggcaaaatgttaaggagactctaatattaatgaacagagtgaggtttcacagctattgagcaagagaagcaagaatagacccaatccccctgtggaaaa

SEQ ID NO: 371799 - DNA, 695 bp, Homo Sapiens
tacttacacaggttcaaggaataaaactagaatatacagtaattggtagtttaaaaataataactgtcatatattgcactcatactatgtcataggccttgtaatagccactgtagttaagcattttatttctatcacctactctgctgaattgtataggggaggatcctgaagcacagagaagttgaataacatgcccaaggtcacatagtcctggcctggtccaaatcctatgttcttaaccattacaccagcctggctcagagacagattgtttgcttagaacaaagcctgaccctcccggggaggagagcctgaattgaggggagagaagtatgctctagtattgagtgagaagatggtctccccttgcttatcttttgattctgctgttgagagcctgggattgaaatgaagggaggcttttcttctggactcagcaaggccactctcccagttcccctcatgatactgagcaatagttcttttcccttcttcaagttaggaacaagtgactaaatattcatatgctattgataaaagtttgtcttggttgacactaggaggctgtagccaaaagcagtgcaactttgccgtatggttcactgtcctgaaagcttcctggaagattggtctaaaatcatcatgccattcctctgtcaaaaattcttgagtggtcccccctgtggaaagta

SEQ ID NO: 371800 - DNA, 489 bp, Homo Sapiens
taattactaaaacaatagtatgtgaatctttaaaaccaaatcggggttcgaggtggggtggagttgaataagaaggaatgagctggaaaatggtggtgcccagattcgaatccaggatgccaagttcccaagcctatttgcaaaagaataccaccacattgcatacaatcagctctcagaaatcacatgtgtgtccttaggaaacaaacatactatttccgcttgtcatcttttctcaaagcacatgaagacctaagatttaaatcctcagtggatcaagagttgatgagaaattaccaccacaggccacactccatacacagcacttgtttttggcctctccaaaggaaatctttccaagtaggttggaaagtcaacaagatggtaactagaagcagaactttttttattgctagaactatccaagcccatcgccactttaaattttgcctaaaaattaacaatccctccctgtggaaagtaggtacc

SEQ ID NO: 371801 - DNA, 457 bp, Homo Sapiens
gtagggtgattttaagagacgactgctagtcttgaaagactgtaccggtaggcgataaatattagtcgagactgtgaaacctgggtgttacgactgtgccatttgatgtgggaaatttctgagtttcttctttgaggcagaacaacaataatgaagagccaatttaaatgtttttcactgcacagaagaaaaatgaacctgttttggtcctgttgttttgcaagccatcaatcaaaagagccttgaaccaagatgtggcaaaaaatgagatttaataaaagaagcaagttttcaagaagctgctctatgaatctgacatgaggaggagctataataatagccacacctacttgcaaatgcaacttttctcctctgattaaattatcttgtaaagatatatacatcacaagaaggtgaataggtttcgtgtacccctgtgaagagtaggaccggctcg

SEQ ID NO: 371802 - DNA, 487 bp, Homo Sapiens
tactccacaggacaattaaattcattaacaggtactggtttctggactggaatcacttctggctcataggatttatctttgtcatcattctcatcatctgaaccatcattgtcattaaacactataaaatctgttgaatagagactattcttttttataggtcgctgctcctgtttagccacagtattagtcttctgattttcattggtagttgtgatctttggaggccttcccaatcttcttaatggtttcatagctgctagtctctctttactagattgtttaacatgcagtgtgacatgagggacaaaagtttctttagaattaaagttctttgcacatatggggcaactataaattccatctttgtaatgtttctgagcatgtcgtactattctgtgaccaaggaattctttgtcacacaacacacaatactgcatgtaggcttgccaattcctaaaccgagcagatataaatcccctctctc

SEQ ID NO: 371803 - DNA, 565 bp, Homo Sapiens
gacggttaggaacaggtaactaaaggtgacttaggtcagagaggtgaccaggggtgactcaggtccaacaggtgactgggatgagtcaggatgaagcaggtgaccaggggaacagatgtgaactactgactaggactgttgggaaagttgtttactgaaactagaagcaagggggcgaagagaaccaggaagttaaactttaaaatggagaatcaaagaataagagagctgaacatactgacgtattgattctttgaaaagaaacttggggttcacttatatttaacatgctctgcacttttccttctgcccattctaggccaccggagaggggatgtgctctggggtgctatggagcccacaaatcgagtggttttgaacagaccccctgagtctccaagccttggtctccacatgggaaaacgtgaagacgcactgtctcccctgcctgccatgttccagtgctgcatcactccattccccacaaaagcaggggtcttcaccgagagcctggggcctcccaggtagaccaagggtgaaatggtcacctcccctgtggaaaaag

SEQ ID NO: 371804 - DNA, 521 bp, Homo Sapiens
tacttttccacaggggcatctcactaggaaattaccacgttctggctttatgagctgaggtccccaagtacaacgttttggccgaggattccaaccaactgccagcaggataatgtggttatgctgtctgagctactgtgaaaatgcattaaaatctcaatgtttgagctcatccaagcaattaaaattaacacggactgttctgttttagactgggaaaaacaagggataggggaatgttggcctccataatcctctgctagtttcttaaacactttaaaggcatttggagctggcatggatgctatccaaactgagtgtgaagggaatctagttaggcaggaacacctccaccgctcaagtgttcaggggcagggggaatggcagatgggagcctggggtaatgagcaaaaaacttagacctactgggcacctactatgtgccagcccgagctaggtgcattcaccacccggaaaaaggagtatcttcaaacccccctgtgaaagtagggacctctaga

SEQ ID NO: 371805 - DNA, 489 bp, Homo Sapiens
  misc_feature (296)..(296): n is a, c, g, or t
  misc_feature (315)..(315): n is a, c, g, or t
tacttccacagggccatcactgtagaagatccccatcaacactgacaccttgcatctcaatatctcacgctctcttagcttccactggttcttccattgtgcctgcctcatttcctttgtataaaactcaagtttcagtttacagtggttgggaagacacagatggactctgcatagaatcaccacatctctcagacactagcccatggttcctgaaacagacttttccctctgaaatgtgcatttcacctctttgtctgagataaaattatccaaattcccttagttccttccanataaaacaggcccataagngggcccacccaccagccctccagccattcctgatacaggtttacgctagaacacctattcaagaatatgccaaggctcaaccatatgcctcctcttcttttctttatttttaatgagtaccacttgtctatgccacagtagtccccagcttcagttagcctccacagcaccaaa

SEQ ID NO: 371806 - DNA, 845 bp, Homo Sapiens
tattccacagggctacacacttattagcattacattttaaattatcagctgattttaaaacatcacttttagtatctaaacagaacatacaatctgcagttcataaaagagactgttcataaaactccaggttggcacggccaatgcgtaaatctcaaatacgctcacaaggcatttcagccacataactggaattgtatttctataaagacagttggagtaatcactttctgtcatgatttagaacaaatggggagagtgaagctgttcaaaatctccctcaatgtcttcccctttcttttaaaagtcctttaggaggagtctaaagctctcactaaatgaaaaatacattcccaggaggaggagatggtttccatcccttcacatctggattcagagcatgaggatattggatggaacaattacacggtgatgatactaaaggggaataattattttacaattacctgagagcatcacatttgctgctctaattagtttttgtttcccacataggtttttcccaggaatgtgcagctccatttctcttaagtttagcaagagctgtttcttaaggaaaaataaaaatacattttctgcactgctacacaagtagcacaccactgatactggcttcattatattactcggcacctccttggtggaggaaacaaacaggatgcatgagaacttgtaggtgctaatgaactggaaatcattagtagtttccaaaccctcccttctgtggttctgtaaaacaaacattacactgacaacatctaactctttgtgatggcctaatccgaaaacaaaaagcgaaaatgtgaccctccccctgtggaata

SEQ ID NO: 371807 - DNA, 546 bp, Homo Sapiens
ctttcacaaaaaatatatagggactcccatactattccagggactgttggaaggtaaaagaaccaatctttacccgtaagaagagcctactaagtgatgggttggaggttaatagggaagttgagtgtgtgagtcagcagaatgagccagcattcaatagctcagtgcaaaagcacacattcatcggttaaggtcttgttccttaatagagatggatcgtttgctggttggtgttaactgagatgcttcctgattaaaataatcagcaaatgaaaatgtatctcaattttcagaagctcgtttcatatgaatcactttcgcttttctgggatttcaaataaattggagagcttgggtcaaatgatgttttagggcgctcacaactgttctcaatgcttaagagcttacttgaaagagtaagttacaagcctcttcatgagacatgagtcggacatcccaggggatgtttccctttgttatccaaaggacccggaacgttgtcctatcaggcacctgactcactggacctcttccctgtggaaagta

SEQ ID NO: 371808 - DNA, 562 bp, Homo Sapiens
gtactttcacagggggaaaggaaacagctagtttatcatgcagtcattatacaccctgctgtctgcagatacttcagtgttactgcaggggactctctggaattgctccgcttttggcttcccattttccccttcccccagctcaatcccccattgatccagtcccctgcactctggaggctgtttcaatggaaacttatgatctagatctaaatgacttttaagtcaccattgcctggttctgtgccaaacccatgcaaaggaggaactgcaaaattacctaacttttcagagtcctggttccgaatctcttactccatgccattccttactgtgtactggactgtcttctgcttcccccaagtttcttgctccatctttcctccccttgatggcttgatgtttcctgcaacatgattctggatagattctcaagaaagagaatgagctgctgtatatgaagttctatgtgtcccaaatgctttcagctagtccaaagaccaggaaccatatccctaggttttacctcttccctgtgaaaagtaggtaccgagctcgatga

SEQ ID NO: 371809 - DNA, 483 bp, Homo Sapiens
tacttccacacggggtcaggatcttgtttgggcagccagatgaatgcatggacacaacgattgtctgtgcttattatgaacaacactgtcggttagaggtagcatctcatgcttaggtccttactgggttgaaagaaggcgtgtgccagagcacaacttaagtgtgctgtacaaaatgctacattacagttaaacaggcttcggggtgctgagttggtgaatgtcataaccaaagggctgaagatgatgtcttagaatttcacttgggcttcaagaaagatggacagtatattaatgggcagagtcaagggtggagttgagcgagaaaaatgataatcatgcacttaaattcacagttggtataattcccaaagactcatttctgtttttaaattgaaaatgaaaataccactttaaaaaaactagtcaatttactattgatatagaattctaagattttacctgataactagtaaaagcccc

SEQ ID NO: 371810 - DNA, 548 bp, Homo Sapiens
tgactttacatcagggccataggaataaaatgaaaataacgcacaagaataataatcctttgcctaggaaattccttccttcttcaagggaaggcactccgaacacctccatgagctacacttccacacagctcaggggaggcggcaaggtcctcccagtacaggtgttaccagcagagggcacactcctctccccagtcctccaccaggctccacaggaaacgccagggcagggtttaaaggaaggtttatcaccccgactttacataaccaggtaaacagagtcacagccagaattggaagcagctttcccagggaatgcacaatcaggaaaagagtgtgggtttccagcatctccccacaagccactgttcgctcaatgactccaggaatggtcctggtgacaaagttttaccagtccactcaaaatgagaaaaatgccagcaattgcatgtatattcaacagtatatttaagagtgtatattgcttatatacaactgtatatgggtgtctgtgtgtgtgatgtaaattcccctgtggaaagtag

SEQ ID NO: 371811 - DNA, 504 bp, Homo Sapiens
tactttccacagggtacttttccaagggtacttttccacagagcttgtacaacatgatgggtgaagcatatatgcgtttaagcaaactccccgaagcagagcattggtatatggaatcactgagatccaagactgaccacatccctgctcatctcacctatgggaagctgctagctctaacagtgagtaaccgccttccttggtctttaaaacttggttttctccatgcagaccgggatagatgggtttgaggtactgttttacagccagttatctaagctattagggatgcaatggtggtgatactaactttgaaccctgtacagaaaatatagaaaaatgtgttactttgcctatgaggtttggtctagataagatgtgagatgtctgtatcttacatcttgatctagataatatgtgagatgtctgtatcttacatcttggtctagataagatgtgagatgtccgtatcatccctgtatcaaaacatcccctgtggaaaag

SEQ ID NO: 371812 - DNA, 513 bp, Homo Sapiens
tactttcacaggacactgagagtgagctttctgaaatgcaaatctggtcgctccacttcctcgcttaaaattcttcaatgcctttccattgatttctgcacaaagacctagatcccatgcagtgcctccaaggtggatcccccaggagtgtcgtgctgtcctgctgcagccttcccacttctgactccctatctttaccactgagtcctcgtcaagttgctgtttcacatccacttgtgcagccaactgacgtgccagtcctccccctctgaactgcaagatccatgcgggtagtgaccacacctgtttcagctcacctgggtaaggcggtgcacagcacttaacaggtgcttaatgagtatgttcacttggaatgaacaagcgaacttcactaagcatagggccctgcttaaaggcatttgatcaatattcaattatataatacttgatttacatatttctattcaatattgcacttcagaatcaagtttctttggcttccctgctggcaag

SEQ ID NO: 371813 - DNA, 335 bp, Homo Sapiens
cgcgccctacttttcacaggcgaagacagacctgaatacaaaggtgacaatacaagacagagtcaaagagcccaacttgaagtttcagcagaatagcaccaaagactagttcccaacccagctcccagagccagagccagagccagagccaggctggctgcatgagatcacctgggagcttttgcaaacataggtcctaactgagcccctaatcatcagactgggagtcactgggagtgagctccaggaattggtttatttaataagcacccacacacacatgattctgatgttcctatgccttgtagaaacatggaactatggaaaacgctaac

SEQ ID NO: 371814 - DNA, 497 bp, Homo Sapiens
  misc_feature (38)..(38): n is a, c, g, or t
  misc_feature (165)..(178): n is a, c, g, or t
ccggccctactttccacaggggctggctctgatcccgnataaagcccatcatcatgaatgaatgcctcctttgcaggttattctaagtattgtaaatagtgcacatggagcgtcctcatgatgcctgggatggtagtgaatatttataggtttcttttagtgccnnnnnnnnnnnnnnaagcgtttcccatagtcccatgttcctacaaggcatagaaacatcaaaatcatgtgtgtgtgggtgcttattaaattaaaccaattccgggagctcactcccagtgactcccagtctgatgataaggggctcagttaggacctatgttggcaaaagctcccaggtgatctcatgcagccagccgtggctcgtggctcgtggctctggctcgggaagcggggtgggaaacaaagtcttgggtgctatcctgctgaaacttcaagtggggctcttggactctgtctggtttggtccccattggtattcaggtctgtcctcc

SEQ ID NO: 371815 - DNA, 776 bp, Homo Sapiens
catcttggagtgcacgtgactgctataatctatcagcagggtgagaataaaagaagaagtacatttccatggggaaatagtaagttttgccttggaactttggactttgaggtgtgcagtggtacttccaggaagaaatactccgcagcagctgcatatatatgtaagatgtcagtcctacatatagagatctgagattcatgtccctagaggtaccaatcgtactcaatttatgggaatgaatgaatcaagggagtttgaaagagagcactcatctgagcatgtaatctagttgcagacaaaagaagaaaggcaggctaataaagaagacacagaatggaggggcaatgcaagatagtacagaggagttcaagaacatgtgtatggtggaaaggtgccataaaacataccaaatagtgcagagagattgaggaggagagcgatgagaaatggtcaggcagtcagatggtggctgcaataagaatgggcagtttcaatggagtgaaaagggtgagaaccagattattaaaggggtgtgtgagtgtgatggaggatacatctaactaacaagcaactagttataaatgaggataggtgcatatcattgctttcatatataaaggtgaaaaaataaaaggtgtatttatatactaaaggctggataattttctccgtggaataaacaatattccattcatttaaccattggtgctgcaacagatgacagctggtaaaatttcaagttaaagaagcatctgccgtgaaggaccgctcga

SEQ ID NO: 371816 - DNA, 154 bp, Homo Sapiens
tagttaaatgtataaaaatgaacacaatttcctaaatatactgtatttattttaaattttagtttattttctgagaaaatggagaggttcaaatgattatctctaaagtcccttatgttctcaatgttctatccttccctatcttcagcatcat

SEQ ID NO: 371817 - DNA, 545 bp, Homo Sapiens
tactttccacaggggtagaaggcatttccctgggccacttgttatcactggagtgggtgggggaggccagaagatgtagggtctggtaaaatgtctgatgctgggtggagggcccagagatccaggattctgctgacattgccactgcaggttggattggtctgtcactgctccaggtatggagaagggattggggctccccactgggagaccctctctgttgggcttcctctttccgggtcttttggctggagaaagcaagtttttcttctacttttgagtgtgtgtttatgctgtcggcagatctgtgtgtcaggcttctgtggtgcccagtttgggttatgtgagtgatgaaaagaaaactccagggaactcaccatagtgtcagccttcaagtcctgagatgcctagtcagtcactgccttctttccagccatcagaatccttttatggttgtctgttgaactatttccaaaatatttagttatttttagaagggaagaacagagaaaagtgaattgacaaccttgtctatcacattcatt

SEQ ID NO: 371818 - DNA, 537 bp, Homo Sapiens
  misc_feature (73)..(91): n is a, c, g, or t
cccaaaggggcccaagacgcggcccaatccccccctttggggaacacccccggatggtccaataaaacttggnnnnnnnnnnnnnnnnnnnggtacaggaaaagatctttacccaaattatatgtaaagcacattaatatttttatactatttttaaatgctggtggagatctcttgttgatttcattacctattcacagtttgaaaaccctgtcctaaatgttactgtaccccaggccctgatgttagcttctgaccatctcatgctgcctactttccctgagtgtccttaccctagtgcatggctgtagtccttacccatggctactgttccttccttagagctctgtcttcacagactttccgcagatcacattctgagatccttcagcctttgagataccgctggcctgtcccagagttgcccctctctcatggatccaaatctgatttcatcccctttgccaaatcctgctcttctgacattcaatgctggtaagcggttctacagtccacctctttacctgtggaaaagta

SEQ ID NO: 371819 - DNA, 522 bp, Homo Sapiens
  misc_feature (284)..(400): n is a, c, g, or t
tactttccacatggaatagaacctggtttaagtacagctcatgtgggatgaccttttggcagatttggtgaactggcttgaaatcctgagctcccagggtctttagctccccaaatggaaaacacctacaggccaaataaatcaaatacagtaaaacactggttacaaggcaaccagtgatctcatctttattttcccctttagtttttattttaaaaaatgtccgcaaactggaatgatggggaagggaggattagaattctttagggaccttttccaacctnnnnnnnnnnnnnnnnnnnnnnnnnnnnnnnnnnnnnnnnnnnnnnnnnnnnnnnnnnnnnnnnnnnnnnnnnnnnnnnnnnnnnnnnnnnnnnnnnnnnnnnnnnnnnnnnnnnnncaaaaattccttagggatcaattttgacggtgggataacaagtatctcttactagtatgtcacctatatttcaatggatgcttctggctgggcatgtagctcacagctgtaatttcacactt

SEQ ID NO: 371820 - DNA, 516 bp, Homo Sapiens
  misc_feature (207)..(336): n is a, c, g, or t
tactttcacaggggtcttgcttgtgttgaccaggctggtctggaactccctggcctccagatagtcctcctgacctcagagatccctggagtgctgaaattacaggtgtgagccaccatgcccagccagaagcatccattgaaatataggtgacatactagtaagagatacttgttatcccaccgtcaaaattaatccctaaggaannnnnnnnnnnnnnnnnnnnnnnnnnnnnnnnnnnnnnnnnnnnnnnnnnnnnnnnnnnnnnnnnnnnnnnnnnnnnnnnnnnnnnnnnnnnnnnnnnnnnnnnnnnnnnnnnnnnnnnnnnnnnnnnnngaaaaggtccctaaagaattctaatcctcccttccccatcattgccagtttgcggacattttttataataaaaactacaggggaaaataaagatgagatcactggttgccttgtaaccagtgttttactgtatttgatttatttggcctgtaggtgttttccatatggggagctaaagag

SEQ ID NO: 371821 - DNA, 458 bp, Homo Sapiens
tcgacggtcgtccgggacatggttacgtttgcacagggggaaaatacaaccgcccatggcaaacgccaaccaaactacctgcttgctctggcaagtcctccctggtcttgggtgggtgggctagctgccaggagttcagcaggcacacaaggtgcttcccttcctccctcacagagaccctgaccccctgaatcgcatagatgctatcttgcaggcctcactctagagactcaacccaatcaaccaggcaaaacttgtatagggctgatcctggaagcgtgcctgtagataagggtctgtaaagaaggagatgatgtggtcttggtactcagaggactcgaagtctatttggggcaacagaatagccacaaatgaaacagaaagtgaatgttaaactgtctgagaagagaagcactgataggctggagaagttaggcaagactgtgcctgtgaaaacc

SEQ ID NO: 371822 - DNA, 501 bp, Homo Sapiens
tatttccacagggtcacatacacaactgcctgctcaacctcacccctgggagcagctgtgccacactccctgggctgtctttcctcattctgctgcttcttgggcacttttgagggatccttttcaggctctgactccaaatgttgaggtatccagattcagtccttggtctcttctctttgctaaagacacttactccttggtgatctcatcccatctttgtatcttcagctagactttccccagggtcacatacacaactgcctgctcaacctcacccctgggatatcttaaccttaactcactcaaggtaacttactccggagaaaccaacaacacctgctcccgcatctcagccagtgcacacttcactcttctgcgcgcccggggttttctctctcgagcacttgtgatactgtcagtacatcctaatgggcacacagcctgcagatagcaatccagaaatccacttagaaggaacagttaccagaatccatactc

SEQ ID NO: 371823 - DNA, 873 bp, Homo Sapiens
cacagggcacacaccaagttgaagcaagcattccacaatgtttagcgccacgtcacagatacgagagctgatgtcatgattaaggacaagataaacagccttcagaactacagaaagatcaagcattccattcttgtggacaaagttattggtcccgtcaatatgttctgtgtcctctaggtagctgtagtttatgcaggagtctgtgaggcttcgaggtaggttagcacatgccagaggttcatgtggcatctccgggataggcacctggttgcagagtttcctcatatgctcattgaaaaagtctgcatagcctacgttgaatgacgccaaagtggtattgaaggtcgcaactgtgatggtggagatctgagatcgcacttccttgacggtgttttctccatggctgttggaggggtccggcaggtcgcttaccagggtgtgatgggagtgggaatgcctggcgctcagactctccatctcagtggctgcatctgaactgcctcgccgggtcaatttccctaaaatggtggtttgccagcctcctttctcaattcctcgcctgtcttctcccagcccagagaaacttccaaaggagaatgtgctgcgcgtgggggacacatccaggtggtcctcgtgaagcaggaagggcactcccattctccgtggcctcctcttgcctgtgtggtggaatggaatggagcctttcctctctcggtcttctttgcggctcttgaactttttaaaaatattcatgcccaggtctgaagaaagatctgggactgcagatctacgcagatgggtcagtgaaaccttggaaaaggcctcagagctaagagatttttcctcctcgttacacttcatggtgagatc

SEQ ID NO: 371824 - DNA, 660 bp, Homo Sapiens
tactttcaggggtgtaggcatattgataccaaaacatcaaagaaaaggaagacaggccacacatcaaacacagacattaaaatcttgacctcaaactaaattctgaaagttctgttatctgctgaatacttggagcttcccagtgaaaatgatacagtgtattctgcccagattgcaactttccatactaagcatttgaaatgattcttggccctaaatatcacttacttcagactgaatgtcactgtgtatcaaaaacactgagcaagtgagatttttattctttgaacgttccagtaggtcactaatggaatagattcagtaaaaccttgcagcctacggtataatttgaaacaacaaaaaaatcaaatcactttttggaaaatattaggtttgaacaaaaatagaagtttcgaaagggctgccacttacattcttacctctgttagttctttcccatcactcacagggagactgaaatccatgctgagtgcccacagacctgggcaggagctgttcctttgagagacaatgatgcaaatgagtcaagtgatgcctagtagaagtcagactgcaaggatcaccttgacctcaccctagtgcattagctaagcaaactcacaagctttaaataatacctgtggaaaagtagggccggct

SEQ ID NO: 371825 - DNA, 552 bp, Homo Sapiens
  misc_feature (166)..(166): n is a, c, g, or t
gggaggatagttactgaaggaagactggggtggtggcttaaagagctgttcatgccggcttgttgatctgcggcgggtctggttgtgggatcagcatgagcaactcaattggactgtcaaaccctgcagagccgggacacttactcatcacccccggtttcacctngtggttgagtctcatgtacaggtagtactggaaaagagattaattttaatactagaaaacaatgtcagcatctggaaagagcccccttatggagggggtgctttatacctgcctgtctggtctcacactaggacagcatggcagagcagggacttgaatccaagtggtctgagtttttgctctttacttacacacgaatctgtgtaactatttttacaaaactcttaaatcttcaggagtttattttgggttatgatgtgaggtgaataactcaattatttcctaataagtatctgattgtacaaatgctgtttgttgaatactcttttccattctcgctgattgtgatgccggtttatcacattcaggcataccctggggtaccg

SEQ ID NO: 371826 - DNA, 519 bp, Homo Sapiens
gggtgctgggtgctgaggaacaaatcggagacattaggtgattgcccaatgccacacgacgtcaaaggcaaagaagattcaagtcagcagtgactgtgcaaggtctgctgtgggtaaggctgatgtgattgtagcatgtaaagaagagcactgcttcaaactacctgggtttagaccctgcctcttccatgcatcgcctatgcaaacaaatctctcagtctccaggagcctccgtttttttcacatataaaagggaacaatacaatttccattgcaagtttcttgtgaggatttggtgaaataaagcataagaaagcccctccctcctctgactgcttcccattccctgcctcccagcccagctcacatccatcattcttttccactgcccacagctgcctgacttagctgggtactcagttcatcaaatgctccccataattctgcccatgtcaaggaatgatcagacagccttcaagtgcatcccttatgactcttcaaaaaaacctgtgaaaagta

SEQ ID NO: 371827 - DNA, 561 bp, Homo Sapiens
tactttcacaggggaagtcccaccatagtacctttgtttaatccaatattttataaatgaatttaacataacctctgtttaagacatgctggcttactgtattttatctattcaaagatgcacacttttttcacgtttcgacatctctgacgatgagatgtggcttagaattaaaagtagctcctcttctgagctctcattctgcgattcttcaataagaaccaatgctaactttcagccccaacatggcccctccagacaggtggctcaaatgtgcaaaaagataagaatgcatttttgctccctgcctacacatgcacccaacaaatattcatgagtgagcatctcctgccaggcaggagcactgaggatacaacagtgtggaaggcaggaatgggctttcctcatggactctggtctagaggagaaacgaatcataaataaggcaacagaaaaagagctggcacatgaagataactgctacagagacaacaaataggtaccatgagaaagaaactcacttcgtatgctaatcaaaggatgaaaactaagtccctgtgg

SEQ ID NO: 371828 - DNA, 431 bp, Homo Sapiens
  misc_feature (303)..(314): n is a, c, g, or t
accctacttttcacagggaggagctcaatgtctgtattgatagtggtctggtcaaatgggcaagccttgcggtggagtttattcaggcacatcttgcagacagtatggccacaacccaaactgatgggctttcgaattgtttcgtcgaaagtctgagtgcaaattgggcaggagaggaaatccgtccattgtggagcttgtacaggcattgcttctggagttacaattcacgaacacaaacacacacacaaatctaaagcaaagattccactggaatcaaaatctttgaaaaaaagtttatcnnnnnnnnnnnnaaatatcttctgtagatacagtcagcacatagtgtgaaatataacctgaaaataaagaaaagggaaaaaaatggagtgtctttcttttcaattaaactgttgaaaaagaaccacaag

SEQ ID NO: 371829 - DNA, 814 bp, Homo Sapiens
tctacagatcctaatactaacccactgaggcagcgccacccccaccaggctcaaggtgccaccaccaggatggccattgctcaacagggtcggtcccattcagggccatgggtggttcccgacccttgaatgttcacggcctgactccgtaagccagatcacccacacccaacccctctgcaagcctcggggacagagggctcccgtataagactcctggccacggagaccctgtggatgccctcatgtggcctgggcagtcctccaggactcacctgtgcaccaagtctcagctaggatctgcactgcgttgggttgaaagaaccctctcttgcctggacctctgttacccctgcaaggtttcagggaaggtgtccttcttgggactgatttccaaggaaacctgcttcccagagaaaccattcatcactggtggggattcaggtcggctcccttaggaaaccctcatgacccgaaaggtgacgctcagggaccccaccccggcctggctcatggcccatgaccccagcaggatccattcacccgagactcccgccaccacagaggtgacgccatagctcagaagcagccaagacagcaaatttctgagacagggtcttccacagcaggccttcccacctcaggaggacatgcttcccgccacctgtccacacatgaagcggtgactgacacatgatatcactgatctgtaacccatgtacccaaagaccatacgatacgccaggtcaggtttgcaccacacatcacggtgtcgcagtcagagctcgtcgttatatagacctgtggaaaagta

SEQ ID NO: 371830 - DNA, 465 bp, Homo Sapiens
tacttttcacagggtactttacagggtctggaacttaaggccaatttgtgctgaatcgaggaaaaacaccagggtctgggggccaattggtgctgacttctcaaagctggatcaaaaggaggacacctgggtctgggggtagggaacctaaggccaattaacacgaacttcctaaaactaaaccagaaggggaaatcccatctccccacgccgagcagcaaaggatcaaatctccctacagccctcccgcttccagcacatctcagatggaaagagagagtgccctgattggccaagcatgggccaccccttcctctgcatagggcaccaattcacctcagcctttaattagccaggaaccaaatccttcatccagacaagaggtaacttataggagcctcaaaaggggtacttaaaacccggaaaactggctccttcccccgccctgtgaaaagtacggtacca

SEQ ID NO: 371831 - DNA, 513 bp, Homo Sapiens
  misc_feature (322)..(330): n is a, c, g, or t
tgaacatgaaatacagctaacaattacgtgttcgctgtctccctttctttatggtccaggaagtactttagctgagtggaacccatagacagataagagctatggacacttgtagaaaggtgtccatagatggaggcctggacatttttatccatataggactactgcccctcagaaacaacagttagtgtatttcaacatggtgcatttcagcagcaactcacttctatacctgtaaatacgactcagctagacccggccttgcagggggcacccatacaaaagggaagagcctctcaaatgaaaactcacttttaaacannnnnnnnnaataaaaaagcatgtccctttctgaaatgcgggattgggatgcagaatttaaatgtaacattacttctggccactgtgaaaaagcccttactaaatatacagcaacaaaccatttggttttctccatttctcgtgttgatggaactctctctaggccctgtggacatagggatcctctagatc

SEQ ID NO: 371832 - DNA, 546 bp, Homo Sapiens
taataggtgaaaagaattcaaagttaaaaaaatattttcatagacaccaaaaattattagactctaaagtctaagctcccttatctgtactccctcttgttcccgcatactctggggaggcctatattaaacacaagatctttaaatacagagatagcatagtctatattgtgcaagttattatcatctggctgagcaattcactgagagcaaagtatatggagtaagggggcagggaccagagagagtagaggcaggattgaagctttgcccactggagagcagctacatgaggacagaggagacaggagagcatctgcaaataaccagcctcgtcctgaagctgccagtgccctatgagacagttggggtggggtatactgtttagaataggtaaactaaaccacagaaattgagaggtttgctagcacaagcaaccattcagcagcagcagaaatggtctccagttgtaccatgcattctctcctccaggctgtggcacatcaccttactccatcctggtcttccctgtattcctcatgtctg

SEQ ID NO: 371833 - DNA, 537 bp, Homo Sapiens
acgtttccacagggtcattgaccatttcctgtgattctacagctgccctgtacactatggtagctcctagccccttgtttagaatttgtgaattagaaatgaattaaggctgggcatggtggctcacacctgtaatccccgcactttggcccgatggactttttttgagcaatttagttcccagcaccttccctgcactttctccagtaatcctccccagtgactctttgaagccgggactatgaccatcgtccaatccccagatggagccactcaggcaccagaaagctagtcattggccaccggttgccccgctgaggaaagatggaacccagctgagatcctgttctggggatctaactctgcagcctgcattctgggcccttgtaatctcccatgatgctatctgacgagcaccagcctgggctcagagtaccgagaggaggaacccggtcacaaggataggtcttggggtggtaaggctggtgcccttggggaaaggagagagaggcccccctgtggaaaataaggggatcc

SEQ ID NO: 371834 - DNA, 509 bp, Homo Sapiens
tactttccacagggctggattaaagggcaaggagtctggagaccaattactagaggtatctacagagacgggggaccatttctgaagaccggtcccacaaaaaagacaaaagatttcctgtggcaaaatacttctatataattaataataaaaacaaccaagatccaggtgatagcagcttgggctgatcaggacaacttaaaagatttggcagatgagcgggcaaaggtccaagccccaaccaaggggatccttcgatcgtgcaagtcctagggacacggtgctcagtttatcttcctaggacaaggtactcattacccaaaggtccagactccggaccttggccaggtgagtcatatatcctatctctatatagataccacaaagggagtggaaaaaccggccatacaagccaattccctaggcggaaggcagaaattacttaaatcccattcggacatctttcggcttggagtatcacgagaggttgctttaaaacaactagtctg

SEQ ID NO: 371835 - DNA, 310 bp, Homo Sapiens
tatttccacagggcacaggaacatcccaccacaaaggaatgaatatttaggtacagtgaggtcaataaataagtcaccaacttactgaaacgcccagcaaaccaaatcacaaatcctttcaaagctgtgtcttctcatttctaaaacagaatatcacactatctggctacattggactattgtgagtgttaaaataagtgaacttagcatagcatatggcatatggtggaggctttaataacaacagttgtcatcatgtgccccctcccatataatctccgatccccgggggaaaagtagggtaccgagc

SEQ ID NO: 371836 - DNA, 516 bp, Homo Sapiens
taagcaaagccatgatctggtcctaaaaacagcacatttgttaaactgaaaatgctctaaattactccttggtaagggctattctgcacaatctgatgatttgggatttcgccaaattaatgtcactagatatgccttataattaggataaaatattttaaaagttttcaaaatgaagctattcattaactcattgattttttctacagattgggagcctgaatttaaatgatacccaaaaatataactaggtgtgctcaaagagagaagaactggttgtgagtctctacaatggaactgcaatggtttaaaatgttattactattcagcttctctgagaatattaaaactgcccattaaatgaaaatctaataattggccccattgaattgtgacattttgtaacctgtacagaaatgcagaaaattgtggaagaatagctcttttgaggcagaatttgatttggaatgtaatattattctaaaagtgaaggttctcatacacacacacacaata

SEQ ID NO: 371837 - DNA, 564 bp, Homo Sapiens
tacttcacaggggatgccctggaatcacccaggggggttctgcaaatgacacccgccattgccttcaccacaagcccaaccctgtaatgctaaggggcgggcatgcttcaaacctctgctggaactttctagtaaacactggacagagtgtaccccacccccaagcctggtataatgttgacagagggtgcaagtgagaaccactgacctagaagcaagtcataaggcaaattccacctcaggcactggcctctcaaacaacagacctactatgtgtcaggtactgcaggaggcatgtaaagttaacagagactccctaccctcaggaagagggcaattgaattgtgaagggaatataagacacacatgtaaacacagaacagtcaataacaagacaagacatatttgctaagtcatggcagatcgatggtatagacaagggttgcaaatgcaattgtccagaggagtcggataggtagcacaggggcacaaatcctgctgggagtgcacgatctgccgacaggcgataaccactcctctgcaccaaaccaacactgccctgtg

SEQ ID NO: 371838 - DNA, 342 bp, Homo Sapiens
aaaaatgttgtcaagtaaggatgtaaggagtagccatttctatgtgtgacttaggataaaaatcacttaattaggtcaatggtgataaagatactgtaggaaactgtcaattttagaaattgaaggaaaccattaataaagaatggtcctaaaatatttagcaaatgatttagcaaatctattacttgacgactagaatgtactcgttagtggtttgaagtctggcagggaaagccacaaggcatcagattcttcagggaaaagagatagaataagtataatggatgggaatagaggaaagtttggctgatagcctgtggaaaagtaggaccggctcattca

SEQ ID NO: 371839 - DNA, 672 bp, Homo Sapiens
tacttttccacaggacatggaaacagtagttgcctggctcattctaaagaagatctcagaatacttccttctaatgttagagagaaagagacttcctttacttcaagccctacctacttacaattggtttttatcattatcaccatccacagtgttgcaggctgcctgaaaaaaatctcctatcagacacttaaggccatttcacagcttcctcttcccaaaccacattgatagcactgggttatcatctgtcctttagagatttaagattcttaacttcttgtcaccagcagaggcatgactttagctattaagggataaatctgattatcacgattggaagaaaaagccagtacacctctgggacacattatggcatggatccttgggaaggcccaagtctgtttccccttcactttcttagagctgggcttctctcctaaagctgctgttgctgtgtgctcttgggactgttaccccaaccaagatcctaaaaaaaggcttagatgtgcctgtggttggggtgctctgcaaggcaccaaaaaaagaaacctgcagaaggctacataccatgaaggaaaaaaaccacaagaatgtgggctacaggagagtatgaagtgaaaagcataaaccctagcgttaccccggaaagtaccctgtgaaagtaggggg

SEQ ID NO: 371840 - DNA, 588 bp, Homo Sapiens
tactttgccacaggtctgttgggacaattacaaggtaaaagataaatgaacggttcgggcaagcaggaatccctaaatctgaacacaaataccaacttagttgaatggaaagcagtgacatcaatacgtcctccctttttgctaagaaaacaagtctgttgataaaagaaatgggttgctcttattaaagaataaaaatcagctgagtgtggtggctcacgcctgtaatcccaacactttgggattctgtctcccacgcactacttgtaccaagtaatcatcaacatttcatggtaacagcccctccatcagattcttccttcctggaaacatcaatggtcacacaaacgtcccacaaagaagaaaggcccatcacctaggctgcagaaggtatgagtccttgtggcaaatcaaatcccactttgccagtaactcgacttaggaagacaacacaaaatggaggaagaaatggaagcagcatatacaaattcaatctattccatctcctatttattttatgcaaagttttcctggtccttattaatgccggctttccccctgtgaaaagtaggtaccgagctcgatcta

SEQ ID NO: 371841 - DNA, 736 bp, Homo Sapiens
tactttcacagggaaaggaaaaagagtcagacagaaatcaacatagcattattagtgctaaggtaaaggagggcacaaggtattccagaagaacagaagagagggttccattctaattgggcaggtttagagagagtcttccaggttaaaaatcaccctctccatagcctcagtttcctcaatgcaaaatggaaaaaaatcaatcaattcatgaattcatgtgatagttggtccacataaggtaaccttggcacaatgtctgcagcacaacagtttataaataagttctactttccttacccagaaattatcatggtaccattaaggctattaggttaacatacaacattgccaaaaacttatattctctgtacagttttcaattttccccatgtttctcaagacatgttctttcctcatgatggctagaagccactaaaattatccttgaaatgttaaagcccagattagaaaactatacaaaactaacaataatgtcttgtacagggaatgatagccactgacagagttaacacattctattcccgcttttatttctctgttcaagtttatgggccagatgttagctggatccttaacactctgagtactctgccttccttcaaataaatgattgtccaatgtgtcagtcagtaattctaactgcaaagggacaaacactctatcttaaactggcatagcctatgaaggggattgattcccctgtggaaaagta

SEQ ID NO: 371842 - DNA, 509 bp, Homo Sapiens
  misc_feature (53)..(193): n is a, c, g, or t
tatttccacagggtatcacagtattttaagaactttgttttcaggacagaggnnnnnnnnnnnnnnnnnnnnnnnnnnnnnnnnnnnnnnnnnnnnnnnnnnnnnnnnnnnnnnnnnnnnnnnnnnnnnnnnnnnnnnnnnnnnnnnnnnnnnnnnnnnnnnnnnnnnnnnnnnnnnnnnnnnnnnnnnnnnnaggattacactgtacatacagtgcttacaggtgcttcttccacaaggaatggccagtacacttaaagtataattaatatttctgatatcccaacagttaacactaaaccgtaccaagtatacataatttggctctctctcacacaattatacacttttataaacaagtcacacagtcccaaccctgaaggtcaacgaggatagtgtttgctacccttgtagagtacaatctttaaactgtgatgacaagacaataaattttcccaaccatttgaatgagagagagcaaaataatgtatacttggtacggtttagtg

SEQ ID NO: 371843 - DNA, 520 bp, Homo Sapiens
  misc_feature (26)..(26): n is a, c, g, or t
acaggggatatctgtgattcaggtgnacagctggaagatggcagatggtgaagaacggcactccccctcaattaatcagggtggaattgtcacttgaataggaaaaataagcaagcatcttaatagcaaaaaattttatatgggtatatcccagttaatagaaataaaatgatatatatgtataaagatgcatataaagagctgttacttattgtgtgtgtggatttttagccttctatcatttttcaacaacaacgcagaatgatgatacatttttatggtattttaaaaggcttctgtcaaagtccacaaccttttaaaaaggtaaacatgtaaaataatgtgatcaaaaaaatatttaagatatggttttggtggtgggcaagagtcagagagtataagccaatttaaaatgtcactaagtggattaatagatgtctggagaagaatgatttgatttatcttgcttctgccagctcagcactctgttttgtagacctgttctggccctgtggaaata

SEQ ID NO: 371844 - DNA, 436 bp, Homo Sapiens
tatttccacaggggccttttaaatatcaaagtagaaataaccagtgctcaggaggatataagggtctgaggctcaagagaaaggtcatagctgcaggtataaatgtggtggctcatcggggagtgagctgtccaagttctgtgcagattacaaggggtaaattcaatgagcctgttggtggccacagaccgccacaggcttcccagtaaccacattaccacaaaaagcctcaggggtgatctactatgtgtctgtccccacatgtgggggctggagtggtgcagaatccccatctggctccctttctccaacacgacaagaagacctcagtaagccaaaatgtcctgaagagggccgaggaacatgggtctgaatcatcccacgaattcacttggtacaggaaataagtgctgctctcccggtggaaaagtagggt

SEQ ID NO: 371845 - DNA, 396 bp, Homo Sapiens
caggatggttggttaacattattacggtcagtatgagttaaccctaaatggggaagtctgattttctcctaggatcattatatggtttctctcatagacagaatttacttgaagtgttcatttaaatgcaagtggtccttggcatagtaagtttaacagtgtcccagtacagatgtgttaaaggtatatttaatggagaattttcagaaagacatgtcttgaaaaaactgatttcacattatatttcaatataagaagaaaaatattttgactgaaaaacactatcccctactttgatctgtaagttttggtcttttgcattaactctgcattgcttgcagagttgatattgctaaaagaatgattgttctaaatgggcagttaacatttctggta

SEQ ID NO: 371846 - DNA, 444 bp, Homo Sapiens
tgggttggtgagaagattctgtctgctcagtcactatcaggcctcactgacactagatgccactctgatatcagagcggtctcttatttgggggtgaagacactacagtgggaatctgagtatgcaaaacttctagctgggccagatgtcacctgacacttcttcatcacactggcctggcctgaggactgctgagtatactggtaggggatgctggaaggctggcagcagtgagcacagaagctgaggcaacccaagggaaatcaaagcacatcatattattagcaggtccctgcccaaaatttatagattttatcatcaagttagttatatgctatttattaagtctgataaagcagaacaagaaaatgtgccagaaactcttaaaattgcatataaatataaccatgtgcatatattacatatgtccccggtggaaaagta

SEQ ID NO: 371847 - DNA, 531 bp, Homo Sapiens
tcaatggggtaagtctttgaaaagctttaaaccagacaagtgatagtttgattgacatttcaaaaagatcccctcaggctgcaataatcctggtgggaggtcgtggctgcccaatttaggtaccagcattgtaagtgttttgaggccagacatccatcttctgtgacattacagagctacatgtgatgggacttggtgactgactgaagggcaaaggtgactcagagaaagggaggagtaagtgacaacctcccaggttcctgtggcatttggtattcagatggcggtcacatgctcagcatggtaaatgtcatggcaggagtgccaacattgagagggcaattgggccacaccagtctctaaaaactgtttgttctataaattactgtcaagctcgattccctcaagacattacagccacagcaactcaaaataatactgtaggaaaagcaagtagatatttaaccaaaaagggttacagcgctttgtactccagctgaatggtaaaacctgccatcacctgtggaagta

SEQ ID NO: 371848 - DNA, 614 bp, Homo Sapiens
actttccacagggaggattagcgcttcagaaggaagatagtaggagatcgaggctccgggtgagagaattcgaagccatgcaagccgggtagtccaagctaggtgaagaatggagaagcagaagaccagaggttgcactgacctctaaaacgagtgtagtggaaatagaaagactaggaatggaggccagtagtcagaaaaggaatattggaattttcagttttgaagctgacagaattcctgaattatatagctctggcatttgaccataggagtggatggctgtagtgaattctatcctagaaatagaaagtgaaaaccaattaaaaccattctttttctgcaatgccaaacttactgagtaatcctccagcatgggctttctctcattaatcccaaatacatcaaccagcagtattaatttaaacggctaagtggatttacagcattctcacgtgatatgaaacaatggataattaggatacaatttataatccgaaactgatgtgtttgcctttgaattactcattcatctataagtttagtccttttattagatgaattctgtgtatattggatgcaaaaaagaataagacaaaagcaaaagagtatca

SEQ ID NO: 371849 - DNA, 613 bp, Homo Sapiens
  misc_feature (246)..(271): n is a, c, g, or t
ggtcatatctaattactatggctaaaaaataaataactaaattcatgtgttatatactctgttaaaaaaagttatgtatgctcatagaaaaatgaaagagtataaacagtataaagattcatttgttcatatatagtcaaaatgtagactgaataagtgaaattttgagtattttgttcttacttgttttctatggacatatagatgcatgcatactttctgacatatatctatgtatataatgtnnnnnnnnnnnnnnnnnnnnnnnnnncccttattgtggttctgcctggaaacatttcccgaggactttcctatgtctttatataccttttggaaacatttattaatctttaattttcccctcataaaggatgatgctccaacttagttttaagttatccactccttgctggacatttcgaccgtgaccatcttcttccacccactttaaattaataggtccccaactgttctcacctccttctggaatatttttattttacgattcccatcttccctgtttatggtactgagattctttgggtaatgtagcttttaccagtttagaattatcttgcatttttctcacgcctttaccctgtggaaagta

SEQ ID NO: 371850 - DNA, 555 bp, Homo Sapiens
tactttccacagggcctgcatcgaaaactagttagtagcaaaactaaaagcagaatccatatgtccagattccctgtcccatgctccttccatgatgctattctgctttctaacctttcctcactccaagtttcccatatatcttctgctccagccaggcccatctgtccattgacccctaaatacattgtggcttctgtcatgttggtaccactgaccccacctggaatagtctcaccattccttccagcctaactcggttctaggcttggctttctgtaaggttggttccatttcctgtgtaagctttcttagctgccactgctgcacactccacctctcccttccctcgatccctgtagcacttacagtcacagcttagcattgagttattatgtggtaacacaggctagaaactgccagaggcaagagaccatggcttattcccttctcacatccgcccagtgcactcagaataaacactcagcaaatgctcctccattcccagacagaaaggctcaagactcattcacgtatacctgtataaaacggggg

SEQ ID NO: 371851 - DNA, 570 bp, Homo Sapiens
ctcttgtcagcagcaagccagtctctcaggtgcatactgcatggtgtcttcaaaatgtgcatcttatcatgtcatttcaatctctttaaaaactttagacacccaaattattactatgacttacaagctcttaaaagccaacctgcaatgcatcccctcttcagcctcatctggcctttcttgcctcccactgttcaattggtgtgatccagacacaagcagcctctcctctctcagctctttggatatactctgccccaggacaagtgcaaaaggtgtttcctctcctgggaattctcttccgattctttcccttcttcaatgtagtaagctggtaatcatcctccagaaatcagctccaaagactcctgctatggaagcctcccctgaccctctccttccccactaatccttccaaagattgggtctctgttctatactgttgtagttaatgtttcctagataacatttttttaacaattgaaatgctataattatttgagtagcatatgattaatgcctgtctctctaggtaaatggtatacctgtggaaagtaggaccgagctcga

SEQ ID NO: 371852 - DNA, 687 bp, Homo Sapiens
cggggcgacatctacatgatgtgcagacaggtgttcattgtgttctccattcagcttctcctggaatttgcaattctttagcataggtagcatggggcaggtgggaggagatcatacctgtgcacaccaggtgaatcccagttgggaaacggcaggtgagtcctggggacatatgtgtctctgctagagcatccttctctttgctccagtgctatggggtgcagacgggggacatccattcatgcttttccttcttcacacattcccctggtacctttttgctggcagggaacacagtccagtgtctgggctgcagatccctcatggtcagaagaggggtttggtgagaagtgggagactggttgctagtcctgtgagtgcatgccagaggccatctccttggttcatccctgtttccccagttctgggcacaacttgcctgtgtttgccaggaatgcatagcttatctgagcttcctcatggggtgagtgggtgaggagagatggtgttatcatcaactgtcaaagctggaggcttccagaaatgacactgctgtccagggtggatggcagatgccatctggactgtctcatctcagtgtgcaggcctctagggacatcctgccctgtggaaaagtaaggcccaagtgaaaagtaccctgctggaaaagtaccctgtggaaaagta

SEQ ID NO: 371853 - DNA, 632 bp, Homo Sapiens
  misc_feature (443)..(497): n is a, c, g, or t
tccacaggggggactcatagatttaactcacaaagtgaacccactgctaaaataaggcaattctgtatacctttgcctctgttaccatcccaaggcttctataataaaataccaaatcatcgtaaaatcaggcatttgtttttcttagatggttccttgaaattaacactggtttcttacctaattgatactttcatacctggttttccggtggcaacaggaatctttccacaaataacaaaaagaccctccacaaatagattcctcctgcttttattttcaagggtgaaaaagaactgtgcaagtttgtgagccccaggcaacatggtaattgagcccagagtaagctgcatggatatatctaagtagtctgaatttgaaaggatcagggttctccctgcccccaagaaatctccagtggtttctgaaatcgttagcatgcnnnnnnnnnnnnnnnnnnnnnnnnnnnnnnnnnnnnnnnnnnnnnnnnnnnnnnnaccagcgagttttccagtttacggtcagttaataatatgatgatctgatgaattctgcctgacttaccatatgtgtgctatttgttttttatatatacacaccacactgccagtttacacactaaaatataatct

SEQ ID NO: 371854 - DNA, 541 bp, Homo Sapiens
ctactgttccacagggtattactcgaagaccttcgggcccttccatgcgaatcttccactaggaagtgcaaggccaggatccttaactctagttgtccaaaccatgcatttccctttgacttgatagaagattcctccctcccaacacagtgattattgagagatatgaccaagcatctcaagatcccctaaatgattattttctgtagcctcccgttttgaaaataaatttgagctaggcattcaaccatttagcaaaaacttggtgcctgtccaatattttgtgaacacatcaatataatattacctatatccgaatactattgttcttcctttgtcagtagattgattgcagtgccttatgttaatacaccttgtttctcccttattatattgtgaaatttagtaagttgttaaaatcagatctaattgattttctccatggcatttggctacaaaagcatctcatatccaaaattcaccacaggagaagaaatccaggtggattcttttgtggcattttcacttgtgtattaaaaat

SEQ ID NO: 371855 - DNA, 581 bp, Homo Sapiens
  misc_feature (466)..(537): n is a, c, g, or t
tacttgggcacagggcttcaagacaaagagccagcaaggattccagaagaatgagaactgtgaactggaaaaccaacaagaattcagacaatctgctctcatttttcccttgcgtctgcttttctctcagtctactccttcattttttagacacactctgcaggttgattcacagaatggcggaaggtgacttcctactcttttcaagttgactggctatgcccagagccctcagaactctctcaagttctctctcaatttctcaactttctgctcccagaaaggaacttgggcaagctcctttcttttcttagtctaactagtgtatgtcaatcctacatacacatacagtaacctgatagccttgctatcaggttagggttaacatacactagtgaatggttaaaccatgacagaccacagcacaatgaggtaaatgctgtgattgaggcagctagagaggaannnnnnnnnnnnnnnnnnnnnnnnnnnnnnnnnnnnnnnnnnnnnnnnnnnnnnnnnnnnnnnnnnnnnnnnaaaaggagaaggttctggcgcttcccatcccaattccaaaatcc

SEQ ID NO: 371856 - DNA, 542 bp, Homo Sapiens
tacttttccacaggcacaaagaagatgtcagtgttcagcatcttacatcttgctgatttatctagatcttgagacactcaatctccaaacaatttaaagcatagtagtctatggctatacacaggctggtgtctttctgctcatgctccttacatattagtaatgtctggtaccatgatattacacaccagtaatgagtcacccctcataatgtctacaattttttatgtttaagtagtatatatttgctttagataatgaaacaccccacagaatagaaagatcaagggatgttaggagtcaaataaagctacatagaacaggattggtctctggatctcaaggtaaagctaattaaattgggttgaggcttgtcatttggaaatgatagtaagtgatctttcctggctatgaaaaaaataagagagtgagtgagggttgcatttccagaagcaaagcagtctttatctagctcagttgtatacttttccccccttcctgtgtaatattagtctacccctgtggaataggggtaccgggct

SEQ ID NO: 371857 - DNA, 847 bp, Homo Sapiens
  misc_feature (331)..(379): n is a, c, g, or t
tacttatccatcagttctgaaagtcggtaataagtgcaccagaattgaaataatcacgagagcgacagattgaacttggtagatgatccagaggatctggcaaagtcatcaccgaaaccatagacatcttgtcccggatagtatccttgtggagaacacgcactctgcagggctcacaggtggagtagaccaggacaaggcccctctctagttcattgttagccactggttcgcaactgtggccgcacactgtcatcacttcgggatactgatgcctgactcccacactcagagactcaaattcaactggtctggagtagactggtctgtnnnnnnnnnnnnnnnnnnnnnnnnnnnnnnnnnnnnnnnnnnnnnnnnngtataaggtaaaagtcccgtctttgaagataccctcagagccagaaagccttttgttcacccagtaataccgtgtaaaacagaaagttgaatgaaattccaagtgtactgtaatgtataagaacaaaatattttaaaaattaagattaatttttcattttttgtgggggagtgaatcatggttgttttgagattggttatggtttttctttccaaatattacaagtgcttagataatggaaaactccagctgtgaagggtttaaagtatctgaggagagtaatttagagtgcaacatgggtatctgatatggaatgtatcagtcttcctttagttttcttttgccatcaaaagaaaaattcctttagttttcttgtccccatcaaggatggggacaagtgatcaggcaaaccttggcactgcttgctagtcctggcagtgcaagtgcacggcaggctcaaatgctctt

SEQ ID NO: 371858 - DNA, 532 bp, Homo Sapiens
tacttccacagggtaacaagcaactacttgggaactataaacacaactaccagagtttacacaggcattctccttctgactgattaaagagaccttactaaactcaggccattcagctgaaacctttataaacacagctcaactagcccgagggcaaaggctcctctacaggcccagatgaacaaagctttaaataaaaacaagcctaacgttgaattatggattttctaacatatccaaaagtaaactgtatgacaatagcaaaaagaacagaagataggaaaatggagacataacgccataggattcttatacattaagtggtatataatttgaaggcagaatgtcgtaagttaaaggtatctactatagagcagccacagagaaaaatagaacaaataagtatatctccactaaaagaggagataagatgaaatattacaaaatctttcattcaaaaaatgacagaaaagaatagacgggatgaatagaaaacaaatggcaaaatggtagactgaaaactaaccatatg

SEQ ID NO: 371859 - DNA, 512 bp, Homo Sapiens
cagggtgaggccctaatatgcaagaaattttcctattaaatctatctacattaacaaattattgatgaaacattaagaataaaaacatttctcagagtagttaatttgagtattgtttcctctctcaaatgcaaactcatcctaatgccaaatatactttcataaaaccacttacctaacttggcaaacagatctacattttgttagctttagtcatcaaagaaccaaagcctaagaactactcaacgtataaaggttgggtgtgttcgtgatatgaacatgaaaaaaattatgactcagaatgagtgaacacactcaaatcttttgagtaataacaaaattagcagctattccctattatctgagggacagtggcaaaaatggccagattagaagccataactgttagcataaacatgcaaccaaagctacgtctgttgattactcttataatcaaattcactataaatcccattccaaccatctacccatcccctgtggagtaggggtcc

SEQ ID NO: 371860 - DNA, 503 bp, Homo Sapiens
tacttttccacaggaatggtaacattagcaaggcacaatggatacataactaagagagtgttactattatctataaagtattattaaaacacttaaattcttctgttacaattggcaagtcatataattatctaatgtaaaaaagtacttaagctccctgaaatacacatattcaaaagtgggtttcctttaaaaatgttaactcagaaataacaaaaaaggatatattaaactatccttaatcacaatgaataatgtaaatatttctattatccatcacctctctaccacctacaggataaatttcaaactatcttagcctggcatttcaagctctttataaatgggtcacacccacatatacacttcttatattaggcctctgcagtaatcaggttaatctactcatcgactcagtgtctcctaagaacacattacataccacaaacttaggcttttactcatgtctttctctttgcacctctgtgtactgtggaaaagta

SEQ ID NO: 371861 - DNA, 792 bp, Homo Sapiens
cctatttcacggggagaagcaagtttgggataggtaaattatagttaaagtggttgggaaagtctttacagatgacattacactgaaaaaagacctgaaggagttaaaggagtaatctttggaaattcagaggaagagcattctaggaaaaaagaatagaaaacataaaggcattgagggaggggtgtacttaggatagtcaaggaatggcaagagccagagtgtcagggcagaggaagcaagagagagttgcagatgaggtgggggatcaaggattctactccatgtccacccctaagtgcagtctctcccaaagttgtatcatgaactcacttggctgtctatcttcttcatctttgccatcaggtccattcctaagccttcattgaccacaaactctgtaagttctataaagaaatttccaatataaaaatagaagttgtaacattagcatcaaagtggcatgactgtttaaaaatattgggtttaattctgttaaggttaaaaatatacatgttccattcaaatgctaaaagccaattatattagttaaatgcaaaattacagtgatttgggaaaacattagtttatttgaaagtaaccacattcaagcaagcttgaattatgataactaaattaaataaatgagtactactctccgaatccagtcatgattaacactatcaatactacaagctagtattaatactaatactgtaagctagatagaagtgaagttatatactatttatcgtctgctgttaatttccaacgggatgacctgtgtaagta

SEQ ID NO: 371862 - DNA, 572 bp, Homo Sapiens
acctacgattccacagggaaaaagctaacacaacctttaagccgcattaacaggatcaagggatgtattattagtcctgctagcctccgaaccattgagagtacttctgaaagacagtgcttacttagcttgggctccagattttaagagacccgttaataatttggaaggtttattagcagactgcagatccaaaaatggtcctcctctatttgggaagatattgcaggaaacaatgctctaggagagaccacagctggaccagccagattggtcaaatccaccctagaaatgaattagggagaagagatggcagccagatggctttttaaatgttgataagctgaagtgtggccagaaaaagagaccagagaatgagggaataagtcacctaaagcatgatggcagaatctaagcataaacgcttagcagagaaaataaacacactgtccatatacaccatgcccagccccaagcccagggcagatctgatactctcctgctgaccctgacacagcctcagaatacttctcaacacagaccgccagctgtcactgcccctgtggaaagta

SEQ ID NO: 371863 - DNA, 500 bp, Homo Sapiens
  misc_feature (234)..(316): n is a, c, g, or t
gcagtgacagctggcggtctgtgttgagaagtattctgaggctgtgtcagggtcagcaggagagtatcagatctgccctgggcttggggctgggcatggtgtatatggacagtgtgtttattttctctgctaagcgtttatgcttagattctgccatcatgctttaggtgacttattccctcattctctggtctctttttccggccacacttcagcttatcaacatttaaaaannnnnnnnnnnnnnnnnnnnnnnnnnnnnnnnnnnnnnnnnnnnnnnnnnnnnnnnnnnnnnnnnnnnnnnnnnnnnnnnnnnagagcattgtttcctgcaatatcttcccaaatagaggaggaccatttttggatctgcagtctgctaataaaccttccaaattattaacgggtctcttaaagtctggagcccaagctaagtaaacactgtctttcagaagttctctcaatggttcggaggctagcaggactaataatacatccct

SEQ ID NO: 371864 - DNA, 470 bp, Homo Sapiens
agttacatacatatgaattcatgagaacagtactgccacataaccagggctttccaggagttggctattattattttaggttcaattcacgtgttcatgtgtattcaactcctcaaactgtatttctcctcgtgcaccatcctacttgtctcagtgtcacgcttagttcttaaatctttcagcagctgtatgctctaagctttagcctcccctctttcacttacccaaatttacctcttcttaggatcctggtttatggcctctgtaggaattgaagcaaaccaactcatcttaacattgtactaagaggctacagctgaatataagctctagtggggcagaggtgctgtctgccttatccactacctatccctagtacctagtaggtccctgaacatagaaagtgctcaataaatacattacgtgactctctggactttcagaaacacaaaatattcgttgaaagtaat

SEQ ID NO: 371865 - DNA, 453 bp, Homo Sapiens
gtactttccacaggggggaaggagatgggagggggtggagagtgacgttatagtttgaatttataatttgaaagcagagaaaatggatgaaataaaaagattaccatatgagtatcaccagatcctccctcccacacacacatacctatccccaggcaatctttctgtgagaatttaccttggtgtttaaaaatcacggcaatataaaagtgatattaaaaatagtatactaccactgtaagaagtatgacaaacatgtgagatcctgagaaactgcagaatattttctcattcaaagtttagtaccttggtcttatagtgtttgacactaaaaaacatagcaaatactcttttatatttagcctattccgtgatgccttgtttcttaaattaattcatgggcaatgaatgggggaggaaaaataacaacaacaaatatgccctgtggaaaag

SEQ ID NO: 371866 - DNA, 492 bp, Homo Sapiens
tcattgattctcttcaacaaatgtgagcaatactaaataaggctagtgaaaaattaggagatccatggcatattgtcacggaaacagtattactccagaaccagtacgtattttcacagtcttgtagcttggcaaaccctctggcgggcagggctttgaaaaagtacctgaggctaactgagaaggagggtctgctgggtggaatggtcctttgcactcttagcctgtagactctcctcgggctaatttcctcccaatccattttcattcctgtgcccaggtttgtgtgttcccttaattacttttcctattattgagaaagggtagattcccccagctcttgcctcactcaccacatgtccgtcttggagataggaatgtctggagaatgctgtcacttctcaaagttaaagtcaccaagggctctgaataaagatggtaacgatcttcaaaacagtaatacttcgatgtaagactgaaaatgcaacaacc

SEQ ID NO: 371867 - DNA, 527 bp, Homo Sapiens
ccacagggtaaattaaggggtaagtattaatactgggatttgaacattggcaatgtagatcttctgtcccaatcttaatcactgaagtgcagcattcttctagacatatagtttgcaataaaatgcactgttatgatttttgttgtcatccctatcatcaactctattagtgggttgttaaatggatttaaggaaatgtaaaacactgcaatattgactagcacataaccagtgctatacacactgattccttcttttgtataaggttgcatattatctgtttggctctattaaaactatcaaactcaaaaatatttgaaataaataacagagcagattattctttatagctgcatgaagcaattaagccttctacaacaggcattcatttattgctaatttttactttccctcgaataactcatatttattttcaaaagttactgtgaatattaagttagtgcctgaaagtcttcaagcagtttgttttcctctgatatctgggcagaggtggcgcctgtggtata

SEQ ID NO: 371868 - DNA, 640 bp, Homo Sapiens
  misc_feature (324)..(335): n is a, c, g, or t
cgagctcggtacctacttttccacaggggataatgaaaacatacatcactcgtaaccttttaggccaactgggctattgaacttaacaggagcataatggctttcctggtgtcagaaattctccacccctgcctacaggtagttcatcaaattgctccgtgcttattgcttcaatctgcattgagctttaatacgccctaaaagcctgaatcccttccctcagaactttcaagcctcagaaaattgttgtgcctgtctgctgtactcactaaatgacaaagaccctgaaagttgaaaataaagcctgttacactatagaagggnnnnnnnnnnnngacagaagggaaggcatgttaaaaataaacagtttcaaagatttcatgaaaaaaaagtcaatgcaatttgcaacttcatttgttccagtgacaagctgataaaatgttggtggtacaaatgcatcagaaaatttgacacaaattgaaagtgactacacattctattatccccaattcccttggtcatggaaaatgattgttaaagacagtttctaatatgtcttagaagcatgaggctgtctatgggaaataataccctcgattatcaggaaagataagcatttaaaggaagcaagggctacaat

SEQ ID NO: 371869 - DNA, 459 bp, Homo Sapiens
atgacatggcagtgagttacttgggttccttattatctcctgtatattctggacaggatactgaagaaagccttcaacctggaaccaccaacaggtggcgtaaacaaaaaatacccctacaaaagcctgtttgtctagccaacagacaaggacaagggtcacctaagaggcaagaatggcttttcagcaatatttgccctactacagctaagtaccaatggaaaaactgttcagttcccttatagtttcagttgagtcaagcaggcagctgatattccacatcaccccctgccatcccacagaagtaagtggcatagttctgaatccctcacctggtggtggcagcagggctgagtagggagctattcttccatctttcacctggcagagcagatgtcactctgatttcctggctatgatattaaagttgaaaccaagcagaagttgatctatcaccag

SEQ ID NO: 371870 - DNA, 984 bp, Homo Sapiens
agaggacaactagggaaggaagaggagacacagagttggattcaaaaggtaaaaggtaacctcaacccagaggaagtgccaatgggatttcaggtagagggaaaagcatgttcaaagacaaggaccattgcttggcatgtgcagaggactttgcatgtaagtaattatgcttggcatataaacagttcctaggggtagcagggatgagattgaataggaagggacgggtcattttgtgaagcaaccaacttttctgtctatagatcaggtgctgtgcttgatatttaattttcacagacctgaggtagcaatatttattatcccaaatttacagatgaggaaactgagatacatctgggaataaacagcatcagaatctaaacttgtagagtctgatgctggagccttgtctcttaattattacaagggagttcaggctttatctgtaggctatggggaagagtttcaaagagaggaatgttacgattagggtaggttttagtaagatccctaaaaccacagtgtggggagtgaattagataagggtgtctagaggcaggaaaccacttaggagaccagtgttaataagcaggcaagaaatgaagacgtaaattactgcagtaggcatggtttctccatcacagtgaagctatttgcccaaggtgccgtagccagctaaattgggtctagaaggcagggccctagactccacatcaccaagctgtatcattcataatcctgttgaacatggaataaagagaaaagaccctctctcctaatcttcagctgggacccagggccacagaacttagagtcggaagaaaacttgggacgatttaatatatctgtcatttctagtcagggatttcttgcggaacattgctgttggatgatggtccatcctctgcctgaattcatcattaaaaatttctttgaaattattaacaacatttactcaataaacatttattgaatatcaaaaaa

SEQ ID NO: 371871 - DNA, 509 bp, Homo Sapiens
aagtgcaaaccaaaatgcaaatttcaaagtgggtatcactaaagtacatgaccccttgttgatatagtgggtatacaagtgacaggtaataaaggctgaggagcgctggggtaagagtgccacctccttcacatcaagacagagaaagctcaaggccatgtcaagagctggctatgttgtgctcgagtttggaagacacctttttctggcgtctctaacctgagaaataccagattgctcgggcagcatgaaagaggccttttagcttccccttctgagagcaggtcaaagaaaggtaggcaactgttctccatggactcacagacttggcagaaagaagagccggtatggagccattgtgaatccttcctgagagggagggtcacagatagagaaagtctgtggcacagacaaccaaaaaaccaagggctgaggggaaactgttagccagagggaaaggcaaaatacttcaggcgagctgtggttagagaatcccccctgtggaagta

SEQ ID NO: 371872 - DNA, 583 bp, Homo Sapiens
  misc_feature (370)..(379): n is a, c, g, or t
tacttccacagggtaagcccattgctgaatggcaacaaacccttggtcacggcacaaaggagcaatagggaatggggtgaatgcagtgaactggagacatgagccccaagagggtatcttctctggacaagcaggaattcaaatccaataatgctgaaaggaatagtctgatccttccatcctcccaataacagaaataacttggttctaaaagttaggaattaatttaattaacaataaaagcataggggccaaacaaaacacatctcagggccaaatctagcactggtgccagtttgtaaactacaaaataagtgtttccaaacacctaaaatattttcaataacatcccttttgcagtatttgaagnnnnnnnnnntttaattttaaaaagtcctttcacttgtgactgaaaagaaaaagccatgagaaaatattcagttccaattcctattattttagtatctgtaagaattaagtatggaagttgatttagagaatgcaggattccaccaagttttacagcctttggaggtagatgggtaagacaatctctgtcctgtggaaaagtaggtaccgagct

SEQ ID NO: 371873 - DNA, 497 bp, Homo Sapiens
tactttccacaggagacaaaaataactcagatgcccgggagtactttgagaataatatcacacttgtcaaagtgggtctaatgatgtcagtcatctttttctaccttgcatttcttcattgcagcttacactgacaaatgataccattcctatgtccacagttttctttgattaaaaacccacagagaccacaatactaatatgaccactaaggctgaggcttgaacgaaggttttattctccagaatctgttcaataaaccaatttgatttttataacaaaaaatgtgatacataatttgctcccccattcagtagagattctggacaatggcatcacagaatattggagctagaaagaaacttaaagattactttcatgttattttactgatgagaaaacagatgcccaaagaggaaaaataataactttaaggtcaaaggcaccctgtgggagaggaaaagtaatcaggatggctaacaggccctgtggaaaag

SEQ ID NO: 371874 - DNA, 645 bp, Homo Sapiens
tatcttccacaggggaatactagggcaacaccacaaagattatcctaacccactgtaaaaataattcacttggtgtgcttgaattactcatgagaagatctctgtctttgaaaactaacgtaattgtttagcactgcaattactgttcagaaatacaaatacaaagattcaaacagaatggaatgctaactaaagagcatacaatttatgagtcagaattaaaatgaatgtactgaatgattaaaaataatatttgagacaataacaagttcttaaaacattcaaacattttagtttactattttggagactacataattgggctgatcctatttatcctctatctgatcagcgtagggatacaattttcaatctgcacagtaattctgaaagtgtgttgtttcatttagactttatcttgttttctggctacattagtaacatccacacacggttctgaaaatatccagaccaagcaccttcaagaatctatttttcttaatcccagaagaaaaatgttttatgatgaagaagaatcagctcattaaggaaaacttctactatctacccgactatctctttctttgctctctcactttgattaattccgtcattaccacatcactcccgcccctgtggaaagta

SEQ ID NO: 371875 - DNA, 390 bp, Homo Sapiens
tactttcacagggattaaaagatttttctcaaaattatatagccaataacaagaagagtagaagtgatcttcaatgttgtccattattttattccccttcttttccacctctttaattaaaacacagccttcaagaccctgcttgaatcccacttcctctgcaaagctctccctccctcccccacagaacatgacatagagcctttcatataccaagtatgcaataacagcttgatgactggtgatgatgatcaggtagcaactgtcagcctgtgtggatgccttgtgaccactggataaaggggcaactgcagtggtctggactcaggaaagaagtcccctaggaaggactaggctttgagccaggtcttgaagaaactggtagctgtg

SEQ ID NO: 371876 - DNA, 521 bp, Homo Sapiens
tacttatccaggtaggagagtccagaacatttcagttatacttaacactaagtagaccagtaagtagaatcagttgtgaccatattttcaatagcacttcctggagaaacatttcagcatacctgatcagcttgagtaattcaagtaggttttctcttttggtgcaagaatttgaaatgagaattttttaactgtaaatatattttctaaataaggataatttgagccattttattgaaattactgaattctgatagaaaatccaaagatgtggacactttagttggaatatataggacacagtaaagaaaatgggttgcctgtcattaaatgtccccttatctcatgaccaatggaaatactcaagacctatgcattttcatttcagtcttggcagtgcattatataattcacttgaactgctctcttttctactcgcaaatgaatactcgggatctatttttttccatgatgtctcctttttcctccctccagagtcatgacaccctgtggaaaaagca

SEQ ID NO: 371877 - DNA, 474 bp, Homo Sapiens
tacgtttccacaggggtattccctctggcatgggcaggccaagttcatgtccaaactctaatactttgggttgattttagctaacaagactgttggtcctcttgttgcacacccagaacatgaaagccaaatattatattaggccttgatacttcccagccttgaggaggttgacacatcctaaatatataaacagccactattatctaaagatggattatgtttggctgggagagtcattactcctaggtcaaactgagaaaactaaaaaccatagaacaccctacctcaccaaacacatagcaaactacttaaaaatcattattttccactcaaaccttacatgcaaaaattttcttgtcccatctcatactatgaggttaatggcaatccttgaaaattaattatgtactgaaaagacttcaataatatttctgctaaaaataaactggaggcagattagtgcctggaaag

SEQ ID NO: 371878 - DNA, 532 bp, Homo Sapiens
  misc_feature (371)..(379): n is a, c, g, or t
tacttttcacagggtatgaaataagagtacactgggcagtaaaggcatagctgaggccctgatttaaaatgtgagttaggagaagcttttatgaaaaaataacgtttaagctgagacctgaaaatcaaatagcatttagccaagcaaagtagggaagagaggatgggaagaaacatttcagaagaaatagaatgtgaaaaggcaggatcttgaaacctttaaaaaacttttttataaagacctatgagatataaatactatatttttcattttaaaaattgggggaaccaaagctctatattaagtgatttgtctaagatcacattaaatagtgatggtaatatgggatcctaagttgttgctgtctttgnnnnnnnnngcaaataggtaaattggttataaaatttaaaaacgttaaaatgcaataaaattggctgtattgggtgtacaggtctatgagttgggacaaatatgtaatcttgtaaccaccatcacaatgaacatactaaagggttccatggtctctgaaaat

SEQ ID NO: 371879 - DNA, 480 bp, Homo Sapiens
tcgatctagaggatccctactttcacagggcctcactgcctctctgcaaacctcttaatacccttagtcaattgtaagaagctgcttggaaccctgtaagatggtctttggccagatcaagtcttgctcctcttcctctgaatcttgtaggggcctttaatctttctgtaactgtgattccccagaacaggatgcctttgttagcctagcatcttttctgttacttctatgaaacaaggagagacgctccctgggacccttaactatttctggaagcaaaatgacccttgccccactgaagacttaggagcctggtcacttccaaccgggcttttcatctttgtgactctcagtcatgggcaagaggctagctagctccaatcctaatgcccgtgccatcacctgcttcatttctggtttcttccttgcttttgtgataccctcattgactctttccactgtaccctgtggaaaagtagg

SEQ ID NO: 371880 - DNA, 350 bp, Homo Sapiens
tactgttcacacagggaatgcttaaaatatcaatttaaatgcaaatgaatcttatcattccaaattagactcatcccattgtgttgaaattaatatagaaaataacaccgaacaccaaattacaagtaattaatattgacactgtgaaaagtatacactctcattttgatatttggggaaagaaagtcttgcctgtgcgtgtgccattgtgtcctataagcaacaactagaacacaataccctcagtgctagtaatcatccaggattaacacagccaaaatctgagagggaggacaaatggcatgatacatcttagaatccagtaatctattctttggcccttgaaaacg

SEQ ID NO: 371881 - DNA, 489 bp, Homo Sapiens
gggtcccatatatcgatggcaatgcctctcagtaaatgggaagtatatattacatttatcaatttaagtcaaaattaccaactttcctctttccttctaaccaggcacttcgtttaagtgaaagataattggccagagtaatagatatattgttttatgaggtaagaattagaatttataaaaggaactgatgtcttgatgatagtcataaatttttgaatcaaaattgatgctttgttttattttttctgtaatacatcacataacttacatattatttatcacttcaaagaaaaattataaaatcctaagcttactactaatgcagctttattcaacttcaggtatttatatttgttcaccatttgtaaccaccatttgtaatggcaaaaaaaagaattcaccaacatttgctttgcctggctgccaggttccgggtcaaagtaccttattttattattttattcataataataccctgtgaaagta

SEQ ID NO: 371882 - DNA, 454 bp, Homo Sapiens
  misc_feature (294)..(306): n is a, c, g, or t
cggtacctactttccacagggcatctgtccataaagcctttcgatttgtccaacctttgtaatgatcagtttcttactcctcctgccttctattattggaacagagaacgttctgcttggataagctaatgctctgtaagccaagccttcccaacacttgctaccatcagccgaacctctttgtatccataggcaggcaatgcaatttttgttttatgcctgggaggaatattgtgattagaagcagggtttatgaagaggatagaggatgggaagaataacttgattcctcannnnnnnnnnnnngcctcttttctaagattgtagggaattgagttttataagatttggtgtaactatttgacttacctggatataagctgatctgctttgggccccatataattgcatgtgacaccaaatgggaaaagaggatgaatattctccttcccct

SEQ ID NO: 371883 - DNA, 547 bp, Homo Sapiens
tcagccggtcctacttttcacagggggtgagggcaagtgagcaggaaggcctagcctgtgtatggccaagcttagcaacaagacaaatatggtgacagtagaccagaaaaaattctactgcattaaaaacaacacttttaccttgcagattatctcagtgcctgcggtaaattcagtagactccattcaattcctttctctcttcttttcaacgtctcactcatccccaccacccccactccaaacttcctgttccttggtgtatattaaagtctataccactaagtaaatacctcatcatcttcccttgtctctgattcccatgtgcagcttatttattttacctataatgtttcagaggccgctaaaatatgtttagctgtctccttttcctagcttggtaaaataaagagcaatagaaggtaaaggaaggatgaaaaacagagtgctgaaaaaaggtacaatcatttcgtgggaaggtgaaattcttgttgccccatttagggaaaatgcatggcccgtgaaaagtaggtaccgagctcgatta

SEQ ID NO: 371884 - DNA, 478 bp, Homo Sapiens
  misc_feature (307)..(337): n is a, c, g, or t
tcgagctcggtccctacttttccacagaggaagaggcactgtaggcaaagggtgcagcatatacaaaagcctagaggtgagtccttggggaaatgtgtggtgagggataccaaaatgtgagcctgaagaggaaagaagagaccagagcataaaggatgaggcttaggcattaggtttctctcccaaaggcctgcctgagtgcttcacacataggaaggctcaactaatatatgccaaattcaatggttacatctttagaaatgccatttcatcactggtaaagtacataaattcaagctattctatnnnnnnnnnnnnnnnnnnnnnnnnnnnnnnntcaagaacagaggtaactctataggcattggagaaaagggcaactcatagtctcaggaaacctattagttcctaacatcccacttgattacgcttaagtctccttgaacctaattcacaccaatggcatttagcaaataga

SEQ ID NO: 371885 - DNA, 516 bp, Homo Sapiens
cttttccacagggaaaaaatttataatcaatcataaatttccactaaaataagtatatgcttctattaaagggaaagtatcaatcaaaaataacaataaatacatattctctttctctttttccagctggtggtatggatgggaacacacattcataatgcaagaacttttacacgaataaaactgagaaatcccaaaaccaacaactgtatcagtgatgttcgtatttttccagctcagtatcacttcagttcaaatgctacaggaagaaaacccggtaacttaaaatctgaattactggttaaagacatcagaaaaaagaacaaagaataaatctaagaataaaaagagatggggaaacaggtaacaagagaaatgcagggagagaaggaggagccagaatgaaagaagaagagatgggttaaggaatgggaagaaatgggaaaaggaaaagttgaaggaggcagggataggagaccaggaaatttttaaaaagtaataataaaaaacaccttg

SEQ ID NO: 371886 - DNA, 293 bp, Homo Sapiens
aatctggtctcatacctctgacagctcatgaagaagtgctcctgcttcatatgtatatgtgttagcatagtgttaacatagcataggtgttcggtgtttgcagtttctgtttgttttatatgaattaaggtgtattatgagcagttgaagatatataggaaattttttcccaaaccactatctctgctcgttctattcattcagtctgtttatgttattccttcattcattcattttatagaacagtggagtgcctactgtatgcatctattgttctgggccctgtggaaaag

SEQ ID NO: 371887 - DNA, 511 bp, Homo Sapiens
cttttccacagggtcaggtgacattcatctatctagtcctacatgccattctggcattgacgggttccacagggctggaatcacttagctctaggtgcacaattctaatgtatgagtatacttttctattctaacaccactataggcaaaatggctcaatgtaattttagaattcgtctactccatatcaagctctgtaataggttaacattttacatacatcctctctcatctttgcaacattccataaagtaagggttatttcacccatttaaaagacactagaaagtcagagaatttaaaggttcttaccccaaaaagatagagtccacaccaggatttgaacccaggactctctggcttcaaagccctgccctaatcaattcactatactaccaatccaaggaataaagaaacttaaggtatcttagtcagataaaagtggtaaattaatgagaggaagatgcaaataaactaaccccctgtggaaagtaggtaccgagctcgatag

SEQ ID NO: 371888 - DNA, 522 bp, Homo Sapiens
tacttttccacaggaaaaggattatagaatattccagcataatctatttggatatcatcttgttctatcctaaataacagaagagggaagtgacaattggcataccagtgcgaaacagggcatgcatgttaatgtttacatagtatttgtcttttcctaggataaggtttaacacttaccttgctggagggtacttcttcaaagcaatcaagtggtttatagttttccattaatgagaggagaataaattttgacttattatgtttatccacaatccaaacaaccagagggttcaaattaatacacttggggagtttcattgtgcatttgacggttttaagaacaagaacaagagtgagattacaggtcagcttcttaatgtattcaaagaataaaataagatttattttaatagacatcttttagattattacatgggctcaaacatagtttttcctaccgtctagttctgctctgagtcagggctatcaaaattaaatcatgtttaccctgtggaaaagt

SEQ ID NO: 371889 - DNA, 725 bp, Homo Sapiens
tcggctcggtacctactttccacaggactgtacatgaaggatagtagacgaaaaaaaagatattaaaggaagccccctttttaacctttaaacaaagttaaacatgcagtgtttcttaatattgtttaaccataaatgccttttcaaaagtataatatgcactaagatttgcactgtggaacttgcttgggtaatcggatcttttaaaagagagagaaattctgtggagtgagacacagaaaatcttattgaatgggaccccttttctccgtgtgggaatgaactggtctctcaactttctccttagctaactgtctgcaacactacagactcgtatctacctccaacatgagcctctcttgtcctcacaagaacccctcgagggctctactgtgtcctcagtagcagacactgtatcatgttcaggtgcttgtctgtttttttgatcactagccccatcaatctgtttttttccaacttgccgcattctacacattttcctcctcaggtcaccaaagtgcagcctttcatttctaccttcagaaactcaagagtttctggaaacttgatttgccccatattattaacaaaacaattttattaacatatatattggcctctgagctgcttctgaccacagacaccttaggttcctcttggttacaaagctgtggtctatctctgatgatgtacgaaagaagctgatgcttaccctgtggaaagta

SEQ ID NO: 371890 - DNA, 564 bp, Homo Sapiens
tactttcacagggagtctcgccatgttgcccaagctgagtattaaatatatttcaaggaaataagttttttcttacatattcaagggaggtattctagaaaaatgtaagatctaaaaatatgagtcaaaagaatttctctgcaagatatatggtagagaactactctgggcacacaggggcagtacctctgccgctgctgtacactgccacttcaataaaagctgttgttcaacgctgggggaaaacagatatatggtggaggaggacgacataggatgtcaatcactctgagcctaataaactactggtaggcacttgaattctgtaggatgagtgactcagttgatagaatgagtataagtagtgaagctggtaaagcagagaatggaggaattataaaagcagagagtgccatctctattaaataacaaggacattgcaagatgtgttccctgtctaaaggatgacaagcaagcaaagctatctccagtttggcttttcctttgtgtcatgtgtaaggtaaactaaaagctgccgccagggactaccagctcatgacagca

SEQ ID NO: 371891 - DNA, 505 bp, Homo Sapiens
ggtcggtacctactttccacaggataaaaggtttctagctctgtttctggctggaaagtgcacgaaagctgagtttaatcaataaataagagttgtagctactaaattcctctccacctggccccagcaaaggatacatttacatctcattccccaaatgtaggacatccaaagaccagaggtcccatgagacgccacttcttcaaatgccgacattttgaagaacacacaccaagatatttccaaagccctgaccacatacgtggtcagggaaaatgcttaaagcttcagctcctttcagaaaagcaaaaatcaaaccagacttatagcactatcggccagtaatggttaagctcacatgatgtgcaaggcattcactgggctaggagggagaaataaagaaatagccctgtctgcaaggagcagatgatctcaatatcattataaggcccaaataaatgaattatggtcttagacaagtcaacggctcccccctgtgtaagta

SEQ ID NO: 371892 - DNA, 472 bp, Homo Sapiens
tatagcggtcctactttccacagggcatcaactaacagaattcagcaggcccattgaccccactaccctagaaagatgatgtgtacacacagacctgctctgttccaatggagaaagtgcctaatcagcctaatcggaaagtaccaaatgttattttatcatagcaggaatttctatttcctttcctgcaatccctctttataaatgttctaatcccatctacacaataagcctttggatctgttctattttaaaattcttcattgtgtttccattgaggcttgctcccaagatcctgtttttgatttgtaagagcatctttcatctctagtaacctttgatgtacagctggctccagacttagcttagaccactccccaaactctttctgactcctgtccttattgggattttcctaccatcagcctgaggcctgttataccctctagccaaccaagttcttctgtggaaa

SEQ ID NO: 371893 - DNA, 580 bp, Homo Sapiens
tactttccacagggatagtgcagcatcataaccaaaaaagaacattagggccaaagtactacagataccattgtaataaaatagtaattccataatggcattttatgcccaaagccttagaaaaataaagtaacaagtaaccatttggcaaatagctcttttctccacaacatcgcatattccgtgtgcatcttaaatgtagaaaatgtaaaaagtatatctctgcagttaaataagtaacattaaacaaatatttactaggtggtatttagtatgtgctaaatagcagtagacaagatagatatgttgtctacttccacaaagattataaaccatcagggagtcagatattaatcattattcaaatcaattacttcataacaattttgatgagggctgcaatgtacaagggagttgtgagaactgtacactattgatggttttgtaggtcataataaattaatgccagcaacttaatatgattccatctaaactaggctggaatgggagaagctaaccaaatctggaggagggtgtcactggggtagttatccccccctgtggaaataccgctgtggaa

SEQ ID NO: 371894 - DNA, 548 bp, Homo Sapiens
tactttcacaggagggtgtgagccaccgcgcccggcctgaaaagtgcatcttcattttacagggaattctttcaaatcaaataatcaaaaactgtaaaagggggcaaagtacttttttgcagatctacaagtttcttatgtaaataggaaaaaaagcctttgcttttctggtataagcatttaaattaaaagaggaatgaaactgttttctatccacaatgtgtgaggatgttttttatactgctgcctgaagtttaagttgctgattactttttaaatagataatttggtggtaagtactatattttaaaaatgcgtatgcccgttacccttcaattccattatactaaaatacccttgggaaatagagatacatgcactttgtttttcacagcacttattttaaagagaacccatagaatggatcttataagtaaatttcagttgcatccataggatgcaataatatgtgaccatcaaaggtgacaatagatatagaagtacgttgatgtgcaaagatgtattttgttttagccctgtggaacagc

SEQ ID NO: 371895 - DNA, 494 bp, Homo Sapiens
aggatcgagctcggtctactttcacaggggaaataaattgaacttaaatacttaaattgacacttttaaattttatcttataagtctttaattactcaactttttttatgatctagtatctactgtggattatgaagactatcagagtgtaacccgttttctagacctcataccccaggatactctggcagtagcttcctttcgctccaaagcatacacacgagctgtaatgcactttgaatcatttattacagaaaagaagcaaaatattcaggaacatcttggatttttacaggtctgaagttaatatagtgaatttaataatgaaaattaatgtggccagtcttttatgtttatgttgttcattttattgaatgttttatatgctatgcttagaagcttatagattagtggggagagataaacatcaatttggtataatattttaagtacagtaacacacatgtacctgtgaaaagtaggggatcctctag

SEQ ID NO: 371896 - DNA, 308 bp, Homo Sapiens
ctcccaggaccattaagtatccaaattgttctcctactctgccagccaccagccaactctgagcaataaaagacgtccccttataaatacttcaccaactctagtagtcgtttcaggtggattttaggcagtacgtcccttgcctttcgaatactcccaatagtacaaactagctaagcaagtacatttgtatcgctagtattttatccaataaacattaatactgcattcctctattaaatatttaaatgctaaataatccttaagagtgactaacacaagtacttacatattcaaacaagacagga

SEQ ID NO: 371897 - DNA, 628 bp, Homo Sapiens
tctattccacagggcggaggttggaacaatcagagcgcatcataattgtgtaatagctagtaagtgagcaaccgattcggagtacgcagtagtctcgaatccgataccatggtcataactgatatccgctagtagtaaagtggtaagctaacagagtggatgagacgcaggtcgagtgtggttgtcccgtgtatagacagaaaaaataaaatcagtggaagaacttaatgaaataagtcagaagtagtcataggtataaattttagacacgaggtcttagagccaataaagttattggccagctaaatcaaaaatggtttgtcaaaactactgcagctctctagatccaatcatattgaagaaaaaaatagagataaaaaggacagggaacttacaataactacatgggacaaagtgagttggtaacaaaagcattaacctgaagataaactgtatcttacacagtaatatataactttccctttacaaatatatttctccttattattttggcaaaaatctaatatagaagcaacttttctaaaagcaacagcctaaaagcaacttcaattaagaacttgaaaatgtgcactctaaactacttggaaaagccagtaattcatactct

SEQ ID NO: 371898 - DNA, 502 bp, Homo Sapiens
aaatggccatagatggatgaagcgattctcagggtgtgcaggaaacctccagtgaggctggggggtggttgagtacacagggaaaaagctcagacacagagactgactgaagatgagaaacagaaattctaggcctaaggcacaaaggaaagagggagccaaaaagattccctctgacattcccccggacagtcctttagggataatgctgcaggtttggagggacaaccctcaagccagggacaaagaaaagaaaagatggtaagtactgctgttttatctgtcctaaagaccccattcataagccttcagtcttttgacctaggtttggcccagatgaggattgggtgtgccaagctttatttttctatgtgaatgataaaaccccatcctcacaagagataagttatgctgtctgctggatcaaggaattagccctcatattcccccttcaaagtgtaagaataagaaacctagtacaaatccttggcctgtgggaata

SEQ ID NO: 371899 - DNA, 708 bp, Homo Sapiens
tactttccacaggcgaaagaagatgagaaaagtgagagaagaggtaacaggagatggaaaggggaatacacaggaaggcgtcacacggcacagccagacgaagcagcagcaaaggacaacaccagatgaaaacaagcaggagacaaaacagctccaccgacacgggaggagaaagtatctctggcgtgaggaggggactggacaggtgcactaactgtactctcaactttgtgcagaataacaaatatcagaaaatgtcctaactaggttaagctttaaatacatatttttaagaacatgatcaatcacataggcacagcatggaggaagaagctaacctggtatggttcatctggaggcagcaatgttcatctcaggattctacaggtaacatgacccaagcatgctacaaccagcccacgtatccttcaggataacagcagctgtggcttcacacatgaacaatgcaggaaacagaaacccaggcccctgcactggagacagggatgccacaacacattccagttcccccaaaatatacacagtataaagactgctgttatgaggacagtgaaacagtatattcaagctccaaggaaagaaagggtatgagccaaacatttaaaagaacccaagttttcctcagattataagagcaaagggcaggcattctcacctaggaagaaatcgtgaagcaaaccctcatga

SEQ ID NO: 371900 - DNA, 533 bp, Homo Sapiens
atggcggcgatcccttagtcacctgcttagtgaacatcttcagtgtgtatatgccggcagtccctcaaccacatacttagggaacgtcttcagtgtgtacatggcagtggtgccttagccacatacttagggaacgtattcaatgtgtacatggcagtggtttcttagccacatgcctagggaacgtcttcagcgtagtcttttagttgcattcttagggagcgtcttcagtgtgtacacggcagcagtcccttggccgcattcttagggaaccttttcagttcatacacagtggcggtcccttggcaacattcttctgagtgtcagtgtctgtctgtgtccttttcaccctgtaagctgcttttgtttcttcactgggtgtctctgactctcatgtggaatcccatttctctgtcaccgcctgtcccaggcacagtgagagacgcagccagcctgctcctctcagcactgtgcccagtctccagacattctccagccaccgtcctgaccgaattcattccttcccctgcccc

SEQ ID NO: 371901 - DNA, 582 bp, Homo Sapiens
gaccctacttgtccacagggcacacacacactcacacaaaattaaaaagtatagctaaaagaggtatacaatgaaaataagtttaacaataaaatgttgagcataataaatataactaagaaaattattacattgagtttatttgcttaatgtaatatcatatcaaaggcatatctgctgacattctaaatgccaaacttcttaacactttaaattctggaaagcattgggaatgtccatttgtggatataggaagtaaagggtatacatttatatgcaacattttaaattatcttacatttcaatattcttttaaagtggtgaaaagcaagttgttttctacaattatgaaaaatatgaagtcatattgtcgcagtaataaagaaaaataacctagcccttcctttttgtttaattttgtaaattttttcttaaccatttgtgtatttaatctaattacagagttttaagcagaaaatatattaggctttataagagaatgaaatggttttcgtttattttctctgactttttgattttttcatttaaatttgagaatattctttctactgtggaaaagta

SEQ ID NO: 371902 - DNA, 745 bp, Homo Sapiens
tcatgaggtgactctagaggactcccctactttcacaggcagtgttaatgaagagtctactacctctgtgggcacctggcgctcagtcccacaggacatctctcagcattgtcccacccaaggatctgagaattgaagcctttgctgggtcatgggcatgttggtcatttttcagagaaacattagtgttttgagctgcaaaggacctgagaggtcattcaggctgacctcttatactgttgaggacacgaggccatttcgtttggccaagaccacagtcctgtttagtattttgggaccagaaacaagttctcccaactagagcccaattgcttttctagctgataatcatattttcatcattagccttatttctgaatatgacttgacactgaatttttgaagctcttggattgcccccctccatctttgtctacaagtaacattaattactcctacagaggttactgtagaatacggcagggcgaggattatgcttcccccatgttacaagtacagaaactgaagctcaagtcaatgcaatgctgtgcctagtcctgaggcccatgtattataaaacctaaccctgggaaaaaagcacaaatctactcgtcccgggagccacttggggctatagcctgaaaggacggcgaacggctcgccgtcctgccacggatcggatcagcgtttcactcgtgcagatccgcctgctgccaacgattccacctcgcagcgggtgactcga

SEQ ID NO: 371903 - DNA, 719 bp, Homo Sapiens
tacttccacagggcaacatggtatatggaacaccttgccacccacctcattggcttccaaagctgagcattcccagctgctggaatgagacagggcgccagctggatgcagacagcattgtgaacagtgccctggatcccacaggagcagcaagaaactgaaacccattggaatgtgctttgggttagcagagatgaccttgaaaccagtctagcagcagaaaactacaatctacagggtacttgcagctgtgatagggagacagaggagcaagcactaggcaattcatgctggaggctggccaggtgtgctcctcccctcccaccaggggcagagaggatggaaattatgtgattgccaagggcagctgagaaaaggagtcatgcctggggttttgctttgttgtgagctgagttgggggaataaagatctgagaggagcggaggaaggctgactatgagtggtgaagacggtgaaggccagcagcagccttccacacctattccattgtcatctgatggacagccaagacaagcacttttcctggctcttacttatgatattgtcttcactatttggagcagttgtgtgacaggaggcctaccaggagcagacaaagcctgatgcaccttgcactgccctttgcctccataccccccagcggaggagaggatttgagccttatgtattattatacttactgtacctgtggaaaagta

SEQ ID NO: 371904 - DNA, 651 bp, Homo Sapiens
  misc_feature (452)..(497): n is a, c, g, or t
tactgagaagctagccgctgagttggagccatattgaggaaaacagatcagagaagagaattggaaagccactataacactgggaaaagacaaagtaaccctgtgcaatagtgtcaccgggtcccgtgtctgtgatcagaggtcgttccgtctatccctgagttttccatttggtttctatgccccccatccaccaaaacccacacctagtgcatcttatatatagtcttgtcatattgtttgtcttttcaacttcaacaaattggacagaggatggtttataaatgtttccatttacagattccagttttcacctgtactattttgaaatatgccaagcacttcatccgtgtcatcttcattagaattagtgatcattactattcataaaaatattgtaatatgaaacaaataaatgtcatctgcaagaaataatatcctaatttgctgannnnnnnnnnnnnnnnnnnnnnnnnnnnnnnnnnnnnnnnnnnnnntaaatcaaattcaaaaaacttttttggaaacattactcccagtgaaaacattcacatgttaacatttgctttcttctttggatctcccttcttacccttccttatattgtcttacgcttaattttcataggtcatatttcgcctgtgaaaagta

SEQ ID NO: 371905 - DNA, 214 bp, Homo Sapiens
tcgagctcggtcctactttccacagggggttcttattcacgtatttttatcagtgactgggagctgcggttgaaaccaggctgggagagacagccgatgacagtcagaatccagaaaataatccgtacaaacgatgacaatggtaaagtgaagttgataatgctttaaataacaaagctgtatgtcacgctgtgaatatagcttgaaaaaatca

SEQ ID NO: 371906 - DNA, 546 bp, Homo Sapiens
tactttcacaggggttccatgtttgcaggtaaaagatttgatacagacaacagaggcgatgatgtttattgaggaagtatgtttaagccttttgcgtcatcctgttttctggaaaattcagcttacccagatgagtcttcagctgctgtgtgtcagtgaagtcagcttaaagataactggtgaatgttcatcttcaattcaccttttagagcacagtgttgaacttctgaaggaggattttcctgttgaactggtcataattggaatagctttactacttctacagactccagcaagtcagcagaagccaatcttaaatctagctttgaagctcctctctgttactgaggatcagaaaatcccaaagtcctctctgctgctagtgatgccaattctgcagatactatcttctactgccttggaagactgtatatctgtggatgaagaaggtccctctaggcagcagttggctctaaaccttttggaaatgatacagcaggaacgttacagagatgaccaccaaaagctctcctacaagcttgtgtg

SEQ ID NO: 371907 - DNA, 367 bp, Homo Sapiens
ctaccccaggacacacaggaacacaccaaatggacccacagtaacacactaaacacatacagaaacacactgttaagcagactacagaccacaatgagacacagataaactcagttgctcgtcctgacgcaggtacacacagatctacagacacaaggacacatactgacacaccagcactgatgcacaggcacacaaggatacaacatgtgccctggccctgcattaataggcaagtacagagacaccagccctgacatgcacaaatgcacactgatgcacactcacagataaacacagtctagcatacagacaggtgggcatgtatgcagacagacagtgctggaaaacagaccctgtggaagta

SEQ ID NO: 371908 - DNA, 523 bp, Homo Sapiens
tacttttccacaggagatgtgagttagacaatagagagttcagggatatattctctggcacagatactcggaatccatattctctacaaatcaaatgaacagatggtaaggatgtatcattttggctttcatctaactagagggccatcttatctttgccaagaagaagctaacagattttctgcaagcaaaataaggcctttcttagaaaataattctaggtcctcaggaacaaatgatgattagatccccaagttcttacaccaaaaagaggatgactttgattattttcactgggaattatcaaaacaaatgttcaaaaatatcactgaattctgtactttaaaataatataagcacggtaattacttacactgctactaatctgaatttcaaccaaattgtataaaaacaatggcatcaattgttaattgaactaggtccggtatataaatcttaagaactgtcagagaagtgtcaaaaacattagcaacatgtagtgtgctaggtgctagatgtaaaa

SEQ ID NO: 371909 - DNA, 499 bp, Homo Sapiens
gaccctactttccacaggcagcaatagtgtaatatggatacttcagcactgtctagttgaggagacctatgactgtcttgaggagtgtcaccttggagcagttcataaagttcagaaaaataatggggcaattattcatgtcacttctggctgatccaagagcattgatggaaggcactcaccagacatcaactagaaagctaagatgtctctttatcacagagcaagtgatgggcagtctatagactttgcttcaacttgcacacatttcttagtatggaccataggtgggtttggcagtatcttattgctgaattccttcttcctacctactggctccctccaccccaccaggtttattggctttgtgctagatctcattaccaatccaactcctttttctctcccagccagaaagactgtcatgtggtctcttggagagaggctcatttagttcatcctcatattcttgctaggctgttttaataacaaaaacaca

SEQ ID NO: 371910 - DNA, 469 bp, Homo Sapiens
  misc_feature (41)..(70): n is a, c, g, or t
tactttcacagggtataaaggtcccaatgacatggggacannnnnnnnnnnnnnnnnnnnnnnnnnnnnngaggtgatagtatagttaagtcagcattgaccagattttgaaatgattaatattatgatgactataaaatctgggaaaggaacaatctccctgagtatagaaagataaagcagagaatttgagccagaaattatgtccccattgagagggtagaaggagaaaaatgctctaatgaacagaaaaacacataaaaaaaccttttgttctgaaatgaaaagcgtggactctccactgtcaggtatgccagagaagtaaaaatttcaagggcctgctcaataaagcccagtgctgtagcaaaaatccaaaggccattatggattctggaaaagcctttatttttctatcttcaatctcttttccaactttcatttaatttctattttattgagaaaccctgtg

SEQ ID NO: 371911 - DNA, 422 bp, Homo Sapiens
tcggattttccattcaaggacatttagagaagtgggataatttttgttttaatctgagaattgggtaacatatcatccagctccactcctcattctacagatgagaaagcaaaggccccgagaagttgaattctcatgttcaaactgctgacatgtggcagaatctaggttagacctcagccctctgaccctctatccagcgtcctttcctctatatcccacagctctaatgatatagtcacgaggtggcgggattttttctctatccctcagatgaaaattaagccagtgttgtaatctagtttgataactattagttatctagaagtgtattcattaaaatcaatgccgtgtataggcttactgggctattcgaaagtcaggctactaaattcttattagccacttgaaatccctgaaaa

SEQ ID NO: 371912 - DNA, 332 bp, Homo Sapiens
gtccacaggtgctggcagatgctgaggaaaccatagcttgagtaggccaggaaaagttaaattcatttatggggcatgggaagaaagatgaccagtgcaacagaaataagagagatgtctactgaagcagaaccaatggaagagacagaagataattttaatgaaaaatatcatggaattatagaactaaaaatagaaaagattttcagaaattaaaaactaccacgatttcttaattaaaagttcaatatccgacagaaaaagagaatgactgactttgaaaataacattagtggtcagaaaaatcgctggaggaaatacctcataagaga

SEQ ID NO: 371913 - DNA, 635 bp, Homo Sapiens
tacttttcacagggtaatagggaaataaatggccttgtatttcttttgtacgtgataaaaaccagatgatggagtacctgatctgagaaatccaaaatgttgtcacagatttatacttgtgtttactctgcccatacaacagagagatatcccaaatggccaatatcatatgtgaattcaagcctgagtcagaggactgcagttctttaaatcaattcactgggaaactagtccttgacctataaagaaacattccaaatacaacaaatgcatgagccagcttaaatcctttctggaataagatggggaatatatagatgaaaaaacagcacatgaatgaatatgaatacataaatccactttcaaaaatatttcacagagctgcttcttaaaaatgtcaaatggtgaccaaaacacatttcagcatggaaaaactatttctgttccactcgggacacagatccattgtattttctgagcatggcatatggattcggatgacaaagataataaacattcctgtaaaaagttactccctcatgcacaagccatggtattccagttgtattaaactcatcagtccgccacttttgtctaaaacatgcccaaagtgaaaccagcagaacccgtgaaaa

SEQ ID NO: 371914 - DNA, 619 bp, Homo Sapiens
actttcacagggagggtagggaactatgtagttaacacatctaatatctctttatttaaaacacactaggatattaagcccatatctaaagtcaaaatagtaaccctgttgatcttgcaacatgagggacctaatgttaataaagcttcccccaaattttgcctccagttgtttcatttctccagaggtctccttgtatctgatcaccactgcacagctcaggcagtacaaggaatccttcctcagtgcagccctctcacctgtgaagcaccagcccaccattccccttttcagaaagacaaccaatcattgggtttctcctgtcttcattcctccaggcaagaaacctcagggttatctcagacttctatcctctcttatccaataattccacaagccctattggttcttctttaaaatctcccttacatccatccaacctttccattccatcttgactttggtctttttcacatggtagcagtaactcagtctccttacctcaatctccctcccatccaacgacatataaaaatatcccattagattaattctacctaaaaactgctttcatttattgccctacctcaaaatgattataggtcccctgtgaaaagta

SEQ ID NO: 371915 - DNA, 529 bp, Homo Sapiens
aaaggttgatggctcctggcatctagtgagtaaaggccagggacgctgctcaaatatcttacaatacacaggaccctaccctaaccccaatactcatgaacagtgagaaactatccaaacggtagtgctgaggttgagaagtcctgctctagaagttctcctgagagtgcatttaccacatagagatggaagccgaagagtctcccatgcatggggacaggaagtgagttagggagaggggcttggcttctgatacttcaggctcagttatcacacccactagtaaaacgtggctcaacccatgtacctgactcagaacaatcagatgaacaacatctctttcataaaaggcaggaaggccgggagcaggatgaagaagaaacggtacctgagctctgataccaatattttaagaggattcttataaaactcagcataactttatttcctcttggaatttcctctgaatctctaggtatattggatgtccccttttctgagtttctagatacccctgtggaaataggga

SEQ ID NO: 371916 - DNA, 587 bp, Homo Sapiens
gataaaggcctcaaaagtatatacaaaagcttgcatcaacaccgagaacataactgaatgttattttgagaacacagaatgcagaaatggaattatagatatcctatacagttgctgactttgcttcaagaatacaacatagacatgtagaagactgaggagaggaagaaaaactaattaaaatatttcaagagcaacaaaagaggtggcaacaagttagcattgttaggagacagcaaatgaaagagattaagctgctatatgagcaattcacgaagagtatcatgaaagaactcttttcagtgaagaaagtcaatttaaatcgccaagttccaagataaaattgtgtgagagacactgcagcaagagttggcactaattcataacttgagctacactgaaccacatgaccgtattttgatattcttgtataaaccagtttatgtcttctatcattagtctgttaaatgccagacctcatttctgtggtctgttgaatgaatcctagacagttctgtgagaaagcagcaattacacagttatatacatggtcagttaaattttaacattaatgataatttagtttt

SEQ ID NO: 371917 - DNA, 569 bp, Homo Sapiens
ggttgagagagacgaaagagatcattgaggaagcagctgatgaatgaaaaagagcaaagcgacaatgggtagagattcgctacgtagagttagagatgtggtgaggtatatgaaaagaaatatattttaagcgaagtaatccgtaagagtaagctgcagataaattaaatgtgataaagaatatgctctagaatgttatcttccatcattacacagaagaaccttaagagcatctgatatttattgaacaaagaaagcatggacttcaataatctataaggctttaaaaattcaaccaaaatttgataattttaagttacattttttccctagagcactatataatagcatgtcctaggaaagacagatgtgggcaagtttcttttctaccaagagtgtagaatagtttacatttctgatttaaaaagcagttccgttaacacttaaatttgctgaactggttgatattaatgttgcaaatattggtagaaaagttgtttagctgtgaataattagatcccttactttaaattaataaaagaagtcgggataacactgaccgtgcaaat

SEQ ID NO: 371918 - DNA, 516 bp, Homo Sapiens
  misc_feature (186)..(211): n is a, c, g, or t
  misc_feature (309)..(318): n is a, c, g, or t
gttatgccttagtgctatagacaagagtaacctaccatttctgaaagccatactgtagtctcattattttatagtcacaattcatgttttatctaaagaaactactaaaacgtatatagtttaatctagatcagatgaatctagaatgtgagacagtctataacacaattggactgaccttttggnnnnnnnnnnnnnnnnnnnnnnnnnngtacagcagttttatactagttagaagagactaaagagatactaataagcaaagataatatgaaccttgatagaatactagtttttttgttaatgttnnnnnnnnnngactataaaaacatttgtcaacaattaggaaaatgtggatatgaagtataatactaattaacactaattaatgtcaattgtctcaggtatgataatggtattgtggttgtgtagaagagtattcccatcttaaaagattcatattcaagtattcaggggaaaagtatcatgtctacaacttattccctgtgaaaagta

SEQ ID NO: 371919 - DNA, 153 bp, Homo Sapiens
cagttttcacgggttgcatgtactgcaattacttcttcatgtacaatttaattaattaaatctctcatacatttttaagcatcttctttccctaccaaacctacaaacctatatgcccttgaaaccatcttctcttttgctcctgatccaaca

SEQ ID NO: 371920 - DNA, 639 bp, Homo Sapiens
caggcgccctgcgcttcccaagatgaagaatgatttttaacacaatgtcccccactgcctccacagtccaacaacaaatgattaaagggacccacatcaagaggggcaaacgaaagacacacgacatctgattccctgcagactgggttgtggtgactgtgcttctcaaggcaggtaacttctgttttcaccactgaagatactgtgcctggacttatttatgcaagagaacacggtcagtgcggattcacaaccctctctacacacttcagaagcctgggtggtgaaagccagttcttcccctttgcagaatcttaaacaaaaccgaggtttaccctgagtccttttctttccttctcattctcagttactgaatatctgctttatgtcaggcacagtggtaggtttgaaggtgagagagctgaaaaataggtcatttatgtccttctgctgctcatggccaattagaagagacagacatggacacaacataaaaccaaaaccaatgtggtataaggcctataatagagcaataaataaaggcctggagttagttagaaacaagtgactcattaagccaaggggattgggcatttggcattctgaactatgctgcatcctgtgaaaataggtaccgcg

SEQ ID NO: 371921 - DNA, 522 bp, Homo Sapiens
aagaaactagaagcaggcagtatcagagcggagtggatttatggaatccactcaaggattccataaaggacccaggaactttttgtcttcttcctctgccatccttggctgaggcttccctcctttccatccttccctaaccaccatctgcttggactccattaaggaattatcttccactatataaactcctacccgcactccaatgcctcccactctcctaattctaaaccccactgtcctccacaccagccctgattcctcctttcctagcctgcccactgtgcccagagaaacaccttttctaacatgagtaggttcatctacctcaactactcccttagaaaatactcctttcatcttcctgatgtaccaaggccacattacttcctagattcccttccttcccttttcccctgatgtgctcgccactgtcacttccagcccagcattccactctcacctccccagcaccttcctctcttaggagcctgctaatcatcctctatatgactccaccaa

SEQ ID NO: 371922 - DNA, 531 bp, Homo Sapiens
  misc_feature (12)..(12): n is a, c, g, or t
  misc_feature (406)..(436): n is a, c, g, or t
tattccacaggnacagtgtggatagtccagttggaggaggatgaagagagctgtaaaatggtatcctgatgctgccattcacatggatttcagtgggccccatggactcagattggcagattttctataacagccagcctcggtatctattcccatcaattaatccacaccgtgcagaaatacaagctgaagaggttgaattcttaagtatataaaggcattccaagtagacgttgcccatcccttgaagacttacattttacagaggttattttagaaatcaaaattcacttcttccaatattctgaagctcagtcttttccagttattaccaacctagccaatagggtaactgttccaccataaacacattcaatctctctctctgtttctctttctctttttnnnnnnnnnnnnnnnnnnnnnnnnnnnnnnnttatactttctaaggtcctccacctgcatcgttatacctttgtgtaggatataaacttagaaaggtatgttaccaaagagaatatatagaagttg

SEQ ID NO: 371923 - DNA, 525 bp, Homo Sapiens
gaatgagtattaaaaaagttgaggcaggatgtccactgtctgagctggaaatagtcttgcaattaaggagggtgaaaagaagcttggcttgagagaaacggaagagggagttgaggtgattgacgttccccaaggaccctcttcatttgtgtttgtttcaaggctttttctggtgacatagataattactggattgaaggtctctattttgctaggctgtttatgaggagattactaaacaaaagataagagaaagtcaagagctgatgaaggaaagtaatctagcctgtcttgctctctgctttagatggaacacgtgagggtgaaaaacagatcattgattccagttgatgtttataatatagaaatagcagagttatcctcctttacagaaatttcttaaatccattagtaccttacttaggtggacttgttcttgtttatgagattgttcacatgagtttgcggtcaagaaaggtgagccttctgcttttaggcttaatattgcaaatccctgtggtagta

SEQ ID NO: 371924 - DNA, 703 bp, Homo Sapiens
  misc_feature (640)..(658): n is a, c, g, or t
ctacttcctccacggcctacgtctgtagaatatacagctatctgctgatactgctgcgaaatgtcactgactgtcaatgctcacctttgcaaactgaatgaaaacgaaggatgaccccatggagagctagcattaaaaaacatacagaccaggggtcagcaaaatatgacctgcaaaggtgccctactggctgttatggtaagggaagttatataggaaaacagttatgttcagtcttattattaactacagattgcattagcagaatggcaaagttgagaagttgcaacatagaccttgtggaaaagatcatctatatagtccttgacagaaaaagtttgccactcttgctctagatatgcaatgaagtcttggataagatattcacccttctcttttaaaattttagttgtgaaatcatacattgaagagagagattgcttcaaattttgccagtgagaaaggcaaaagactatggattttgaaataactgcctgcaagacagacattcaatctgaaactgggaaatcagagagaaagaaaaatcaacatataattttgatttcctttagttaccaaggtcattgatacattatttattttctccatctgctcaaaattaaaaagacatccagttccnnnnnnnnnnnnnnnnnnncttaacaaagataacaaatataaaaatctagtccctgtggaaaag

SEQ ID NO: 371925 - DNA, 752 bp, Homo Sapiens
  misc_feature (578)..(605): n is a, c, g, or t
  misc_feature (607)..(622): n is a, c, g, or t
atacttccgacagggagtcagtcgttagggtatggaatgttaactcaagtggtgactgacagatacccggtaataccaggtcgttgtggctgcacgctctagtaattgaggctgtgtacttcaccgagcttgtggtagagcctagggcaaaccgctgtcccaagagaatgctgggatagatagagttagccaatacgagtctgaacgtggtgattttgctggttgtttagctccagatgttggcatgcttagtttttaatgtgattaataagtgtggcgccatatccctccccacgcctgaaccctgtctcttctacctccttcccacccttgttctttttgaaaaacttaagaaacagtaatgaaaaccttggtgtttcaaactgcactttgttctcatgttttataaaagcctttagatttgctagtaagagtgaaagctgaaaaaacggtttctcagcctgaaatttctatgcactttgaaatctggaatagaaataaatatatctgaattttcttcttctcacatcttgtgatatgttttgttgaataaagcagctataatactttcgagtaannnnnnnnnnnnnnnnnnnnnnnnnnnnannnnnnnnnnnnnnnngaatacatccatgatacactaattaatttttctacgtttggagtagtcattagtgaattaccaagttagtttagtaggatactgcctatctatcctaccatagttcatttcctaaacctgtctccatcat

SEQ ID NO: 371926 - DNA, 473 bp, Homo Sapiens
  misc_feature (16)..(16): n is a, c, g, or t
cctacttttcacaggngctaaggagcagctagatgtttctgcaataatatcacccagctgggtctcattgttggtacccacttgcagcttttctttttccatttaaaaatatttaaaattatttagctttaaaactcctttagaaaacagggagtgctttagtaaaattaccagtgaaatgtcattggcataatttctataactgagatcataaggcctaaagatactgatttaaattttatctcacgcaagtttttgggatttcaaggtgccctctagtatgtctttttccactgtttgtttgaacatgactagtcatattttctttttccaataaaaaatctctaaacaattatttaatcttaagtgttgttcgaagttatgtttttaaagagaatataaagaattatgaaattcatgatcatttggttactcatagagctgaattatcctatacttactctgtgaaagta

SEQ ID NO: 371927 - DNA, 601 bp, Homo Sapiens
gccaacttccattcttccagttccactctagagatcccctactttccacagggagagaaggaagatcagtggtgcccagaggctaagagggaagagggaatagggagaattgctaatggactcagagtttctctgggtgatcaaagtgttttaaaattgattacggtgctggtgcataactgtaaatatactaaaagccactcaagtgtacactttaaatggctgaactgtatgcaaattacatctaaattaagctggtaacaacaacaaaggttcatcccgctgcagtgtgcagaatggagacagggcagagaccagtgaagaggctgctgtacaaatgcagctggaaagggcagtggctgaagaacggagaggggttcacaggatcagactacaagggggccagaggaggagactacatcctgaggacgccacaaattatcctgggtacctggtaactctccagagaggagagtgggaaacaaatgaggtatctgcaattatcatcaagcagcaaacatgtatgtaaaatctcctacacataagactaagaggaacacacaaagtgtgcagccctgtgcaaaagtacccggtggaaaag

SEQ ID NO: 371928 - DNA, 175 bp, Homo Sapiens
tacttttcacagtgggagtatcaaataagatggctgcaatcatcttatcatgcagtcttgactgatataacagcaacaacaatcataaaaaagcattccataacttggatggaaccagttaaatttctggaaggaggcagtatagcatggattatcggaagccctgtgaaaagta

SEQ ID NO: 371929 - DNA, 478 bp, Homo Sapiens
cttttccacagggttatccagttaatacttttgctaaaagctataattttaaggaaatacaaaaacactgtactttgaatttaaagatatttaggcagaagccatcagctcattatcttaatttaattaagcttttcatagccccatttgagaagaggaggaaccattaaagcaaaaataagttgattgttaggacaagttaatgttggtagaaaaagttttttttaagttgttcttttccccctttcttgtggcccttccaataaattaagattattaccatttgcttcatgagaatttgctttatttatttatttatttattgaggactgagtttcactcttgttggactgaattgttataattggtaaatttaaaaacttctgtgttgtgatcaccaaatatctaaagtatccaaagtggctcctggatagcacagatggaactcagggcccggtggaaaagtagggtacggagc

SEQ ID NO: 371930 - DNA, 431 bp, Homo Sapiens
tgtgcaactgaaaactgtaaatgccaaaatactttgtaaatattcagatttttaaaatctttcctattacctggtgtggaattatgtacatatttggatggtcttcttgtgttatgccattttttgaaaagacagaatatagacatgtaaagtataattttcagatgcttgtacttaaacatccacataacattttagtgaatttctaaaaatcaaggaaataatcatctcagcttcaggcacaatgctaacttagatgagtcataggtacgtcagaaattaatgataaggaaacaatgtcaggggaagttaggtaacttgcctaaggtcacagagactatagaaaaataataattaaaatgcttctcctaactccaaccaagttctcacgccttccattttagcataaggtttatgtgttgagccctttt

SEQ ID NO: 371931 - DNA, 439 bp, Homo Sapiens
cagctaacaactatcagcaatttcttaacagtacctggatgggggaagcacgtatgtccttggcttcctattacagtggccaaaactccctgacagatgattggcttggatgaatggctacacagatgcagctacagagatggataaagaaacagagatggcgggaaagaaagaaactagtggaggtagacatataagttaacaatattttataaaaatgattgcttccttgagaagggaagtcctcccatctgaccttatgcaatcacatagcaatgttacaagaaaaggaatctggggcatcggggaccaaatcccaataacagtggatataagtagcatatatctgttttaaaatccacggtaatatcaggattttgcttcttaatatcgaggaactagcatgctgccccggtggaaaagtagggtaccgagctcg

SEQ ID NO: 371932 - DNA, 401 bp, Homo Sapiens
tactttccacaggttggtgtagatgtctggagataacggtaatcatatcatcctttttatactgggggccagggtagaaaaggcagttaatagatgggtgagtctaatggatgcgaagagtcttacataaacataaaaactcaatcctatttagtaatatacttaacatttggtttttattggaaataataaaattatatggagttgagctattatactaaattttttgctatggaggctagagttttcacaacccttaagtgcagataagttagtgcttagatgtaaatgttaagaatcatggtactttgggaggaaatgttaatttggttgcatttatctgcagcgtcccatgcctttcttctgtttctctatctttccttctccatcttccaacatcc

SEQ ID NO: 371933 - DNA, 505 bp, Homo Sapiens
  misc_feature (181)..(273): n is a, c, g, or t
cgccctacgtttccacaggggactcttcacttcttgggatatatttagttagtgtccccccaatgctatcccaccagaattttcgtcactgagggaaatgttctgtatctgctatttagtaccgtagtcacatgtggctaatgatcacttgaaatgtgactactgtgacttaaaaatgggnnnnnnnnnnnnnnnnnnnnnnnnnnnnnnnnnnnnnnnnnnnnnnnnnnnnnnnnnnnnnnnnnnnnnnnnnnnnnnnnnnnnnnnnnnnnngatttccactttgtgctgacatcatttccctatttgctcatccatatgagctaattcacgtgctagatagaggtggtgtataaccagtatgctctgttcctttcctgagataaaattggaactagcttacatctatatgctgctagcatagatcaactttgtaatgacaacacaaagggttataataggttataacccttttaaatagaagcctgctcatccctgtgaagta

SEQ ID NO: 371934 - DNA, 428 bp, Homo Sapiens
taacctaccagatcatctagccagccaaattgtctgaagagcttgttaaatgtgggtttcccaggctccacagtaacccactgaatatcagatcttagttcagcactatttttcctgcctgtttgctcagacactccatgctccccactcttattcactgaaattaaagtgaaaagggaaatgggtgcatttttgacaagccctctggtgattctcatacacacttaaatttgacggccacgtttcctttaggatgttgctaaccattttctgtaattgactggaagagttgactttgctcaaggaatggctgcctgtatctcttgtcaccttggtgcacatagatggagtttgggaatccagaccgcccagccccagcacctaccacaccagtataggctgcagaagaaatagccactgtgaaagta

SEQ ID NO: 371935 - DNA, 513 bp, Homo Sapiens
  misc_feature (125)..(161): n is a, c, g, or t
tactgttccaccgggactaaattctccctgagttaaatttatatgctatccaagtgaatttggaaaatgaaaaggggattttggaaaatactccaaaaattaaatcacatagacctatactttcnnnnnnnnnnnnnnnnnnnnnnnnnnnnnnnnnnnnntagtttcatcagacattaagacacaagcaagtaagcatgcatgctaaatctcatggtttgttctgggcatgaatctgcctctatttttttctgataaccactgacaagaaggtaggcatatgaatcccatagtcacctccagaaaaatagaattcaaagtatagagtggcatttgtggagctgcatgaatttatgagtcacctttcctcttcatctttcacctcgtctctccacaaatcctatacaccaacatcctgggactccttaattcatggtgcaatccttcaaacagaaatttttctccctatcaccttctcccctggggatcgcatactccccccctgtggaaaag

SEQ ID NO: 371936 - DNA, 482 bp, Homo Sapiens
ccacagggataggtacagatttatcctaaaagcaagtgtttttgccttctctctcagttgctcagtgcttcttacctcatttgatctcttagtattacataagcaccttagggaggaaaggactcaaaggagccaaccatttctccttggacccacagccaaaaagaaaaggctcaacgagagtgagcttattcgagggtctgtagcctaaagcatgggctcttttaaagcctcttgttgggccgtgaagcataggtctaatccacgtgaagtaattacccaggcctggggtggccacagggtgagcagagctcttcgtaccctttttgccagacctacacttaatttcctttaaagcctcacttggtcttgccatttcagccctttccttcgaagtatgaagcctgactttttttgtcttcctttcttcagccctgcagaggcagctgtggccctgtggaaaagtaccctgtggaaaagta

SEQ ID NO: 371937 - DNA, 447 bp, Homo Sapiens
cccccaaggatatctgatatattataaataatcatgaatgatcaatctaactgacttttctttttatgaaaaataaagatgctctgactaatggtcctcttttgttctttggaatgaaagatatttctcttacttcttccaaaattttgaccacacagaggtaaaagcactatccaatagtcatagagacttgactgatggacaaagattccaaagcagacacaatttagcaaaatccagtctgagaactttttcagtaagttccttttaatgttagaagggtgaaagagaagacaacaaatcccacaatggacactcctgtagacaactttggcaagaaattaattcaagcccaaaaatcttacaaatcacccccctgatgatgacagtgaaggcaactttgcttcccggctcacaagaattgaattcctcccactgtgggaaata

SEQ ID NO: 371938 - DNA, 574 bp, Homo Sapiens
gtctttgctgtactctccccaaccgtgcaatgttgacagtgaccataatgacctagcaggccgggtgactggagctcgtgaccgccaagggggtgtcgcggagggcacaacatagtggagggaacaaagatgccaacaggccaggacacaggaagtggagtctgggagcagcccatcagctgggttggccaggacccgacaccaccagctgcagacttgcagtgcagagcctaagttcaagagaaagggctgggcttgaagtttcacactttggtttcatgctttggcaggaagaaggagtggtaatgatgacttcggttaaaacagatggggaacattaaggataggagttggggggagatacgagaaacaagaatacagacgtaggagtaagtagcaaataaggttgctgtgggcctgaactagacccagaggatgccaggatcaaacccctgagaacaggctatatggagggggtaggaagaaaaagaataagcaactgaggcagcatggaagggaaagctcaggaccctaatgacgccttcggccaaggtccaggataacctgaagtgtt

SEQ ID NO: 371939 - DNA, 534 bp, Homo Sapiens
gtactttcacagggcttgggatagcccagcttaattctaacacagcgttcccaaaagcagcaccactgacatctggagccagatacctccttgttatggggattgccctgtgccttgcaggatgtttagcaaacatccctagcctatcctcactagatgtcagcaatagctgccaccagttgtgacgagcaaaaatgtgtccaaacatggccaggcccgggggatacaaaatcgtacctggttgaaaaccattggtctaacccaaggaacattcttggttatctcaaccctaattcttcacattcattagatgctcatccagatctctgcattcagactttctctcaccatcaaactcagcaaatatttgcgaaacctctaaaacacaacatcaagggctctagataaataaacaagcaagagagattccgttcctaactccaagcaggtttcttagtagataaagaattgtaataaaagacgcccaattatataatgttttgaattgttaattgtttctcctccctgtggaaa

SEQ ID NO: 371940 - DNA, 500 bp, Homo Sapiens
  misc_feature (89)..(137): n is a, c, g, or t
tggcagaatgctaccaggaaggaagacagatttataaaaatgaaaaaattcactcaagatgctgatcaaacttcaaatgtgtagctttnnnnnnnnnnnnnnnnnnnnnnnnnnnnnnnnnnnnnnnnnnnnnnnnncacatgatcataatataaatcagaaaatctagattgcaacattgtctttacagatgcactaaatatgtattaaattaccaagaaaattcattctataactttggttgtaaaatggaaaggctaaaaagctgagatgatttaagtatttgttttttcccccatgacaagtttaaatgaaggacagaaaaagacttaaaataacctttattagtagtggctcactattattagtagtggcacagtcagatcacacaatctcaggggtattgtattttcaaacgtgtcaatgtcacaaaagacaaagaaagtcctgtaaacagtccagattttaaaggaagctataagaaaatccctgtgaaagta

SEQ ID NO: 371941 - DNA, 482 bp, Homo Sapiens
tactttcacagggaggaaacagtcgtgaggtgggtccaggaatgataacaatgcccagtgtgtgcaggaagctgtggatgaaaactaccaagttgcagcaaaaggtgatcttggagagaggtggttagagagtcaggtgtagtttgtggcgggctttggaattcaggcagaggatatgttcatgtccaggcagtcttgagtgtgggaaggcaggccccctggttcccctagtagtgatctggtgaaaccaggatggtcctccattgtcctaggctcccacagtggttgctataggaattggttataagtaggctcaggtgtcaaaggcagtgtagccagaagggcaaatcagtcaaagcttcaagaagctgagtttcgttttttttcagttaccaaagcggggccctatcttgttctaaaatatttggccctatatctgactttggtcaagatttgagtgatcacaaccttgtggaaaatta

SEQ ID NO: 371942 - DNA, 467 bp, Homo Sapiens
tacgtttcccccgggataagtccggccagaagctccaggcctgcatagcaggaatacttctggttgtttttctaaccacgaagagcaactatatggaggacccagcctattgaactacctcatgtttgccagagacttggcttttctgcacaccagtgtcctccggaaacccccccaccttgaaaaggtttcacgggagactaggtttcaactggatagcatcaagacttgatctctggctagtggaagattgaaaattagactaaggtgcagagacaccaagggacaccacggttaggtgagggtttcctaatcctagggcatgggacttgcttcacacaccaggtccgtccttcactggactgtgctaggcctaccgtccacaacagagggtatgcgtgtgtattcgtaaaagacgtgacttgggaaagctaaattttaagaccagtcccctgtggaaagtaggg

SEQ ID NO: 371943 - DNA, 569 bp, Homo Sapiens
aggatcccccttttcacaggggaaccgtgtgtgctggcttcaccagcattatctcacctcacctccaacatttgtggaagtgagcatccccatggtacagctaaggaaactgaagtccagggccttacagctagtagacgagagagctgaggtttatttaaaatgagatcagttagaatccaaagcttgaacttttctgtccacagtgaagatggggaaaatattttttgtggcctccacaacccagagttggataccttaggatttgaatcaatggaatttgttgggtgagtgatctgcagggatgttctacagaggtggatgagcagctgagacacagagatctcttgaagatgagctcttggaggcctttctgtccacccacctactagcttactgaaagtgttcgcttaccctggacataacccagaaccccacaaatcctcaactatctattctcacctctggccccttcaccccaaaccccggtcatacatctagctgggagcctcagtgctgtgcctgtcctccacccattcctcctagtgtcccttgtccctgtggaaaag

SEQ ID NO: 371944 - DNA, 466 bp, Homo Sapiens
tattaaactatcccattacacgttcttgatatctgtggggtagctctgtgagatagctcattggatactgcattgctgccttgcgaagcttgggctttgaagattgccattctgcccacggatgtgtacccaatttccattccctttcatggtgacaaatgcaaagagcacattggtcaggccagttctcaagtgtcagtctctcgattgcaagcacgggagccaggctgagcttgagagggagtgctgctcgcccaaggtcttcaggaaatctcatcaaatgtttggaatcatcattggtagtcctaccacactgtaagaatcctagatccctgaaatgtggtgtgggggtacaaaagcaagcccagctttgaaatctcagctgcttatcttgtaaaacaattatttgaaaattctttttcatagcgagcaaaatatactcctttctaccactgcaaagccctaa

SEQ ID NO: 371945 - DNA, 146 bp, Homo Sapiens
tacttttccaccgggcaaaaataaagcacagcagctgccaacctgatgtgtgggaaataaaggacagggaaaagatgttcaggtcttcctcctgaaaaaaagaagtgtaaatatgaaaacataagaagactatttctcttcgattg

SEQ ID NO: 371946 - DNA, 625 bp, Homo Sapiens
ttatccccagcctcagcagtgggaccctcagcacctccaccagtatctcctctcagatctcaaccactacctttgaaagcgccatcacacctagcgagagcagtggctatgattcaggagacatcgaaagcctggtggaccgagagaaagagctggctaccaagtgcctgcaacttctcacccacactttcaacagagaattcagccaggtgcacggcagcgtcagtgactgtaagttgtctgatatctctccaattggacgggatccctctgagtccagtttcagcagtgccaccctcactccctcctccacctgtccctctctggtagactctaggagcaactctccggatcagaagaccccagaagccaattcccgggcctctagtccctgcccagaatttgaacagtttcagattgtcccagctgtggaaacaccatatttggcccgagcaggaaaaaacgaatttctcaatcttgttccagatattgaagaaattagaccaagctcagtggtctctaagaaaggataccttcatttcaaggagcctctttacagtaactgggctaaacattttgttgtcgtccgtcggccttatgtcttcatctataacagtggcaaagc

SEQ ID NO: 371947 - DNA, 699 bp, Homo Sapiens
  misc_feature (633)..(633): n is a, c, g, or t
tacttccacagggacagactggcagggcatgtatgcagttacaaattaattcttaactgtaaaaacacttgactgaagggggaagaaaaatagtcaagagtcttaggaaagctccttaggagccataaactcagtcaagctttagggcaaggctgctactgggaaatcaagacaataaaaaaatgaaacaaaactctaaagcaggagaaaatcccagggagcagccagctaaaggggaagtcctgagcacaagttacggctgtgaatttttaaaaggcaaaagtgaagtccctggatgtggtaacctgcgtcctgaccatctgccataacatttgctagtctgaatcacttcagggcctattcctgttgggtacctgatggtagaggatgagaaaaccgtgttttctctcctttgtctttaggggtgtggcctgttcagcaccagctctgaaaagcaggaggggaaatttaaaacaaatgcagcagaacctgttacctgactggttcactaggacaggatatcactttaaggaaacgggaatcttgtagcttagaacattttctcattcccctgtgacagtcaattttggaggaccaaataagaaaggaagctggcagttattttggaagganggtttaagatggaggtaggaaagatggagagaaggacattcttggcttgcacagatggcagaaagt

SEQ ID NO: 371948 - DNA, 166 bp, Homo Sapiens
ttcctttctccaagaatgtttagaattggcgtgaaggcttgtcctgagggcaacctaacactccgggatcttgtaggttggtagtactgacaggttttttcaattcaaagcccaacaggtagagagcaagatggggtggatggcattccagccctgtgaaaaagta

SEQ ID NO: 371949 - DNA, 777 bp, Homo Sapiens
  misc_feature (119)..(144): n is a, c, g, or t
gccggtccacttttcacagggcaggtcgacagactctcttttcagtgatttctggctctgagaaacctctttactcactagaaaagaactttatttaaatggccaatttgttcctcagnnnnnnnnnnnnnnnnnnnnnnnnnntaggatactgaagacagaaccatgtgacttggtgacaaacaaaaggaggggtgcactagaatttcaataggctccctaattccatagaaaaagcaaagcaacccaatgcctcctgagcctccagtgcatgaagaaagtgcttgagctgacccagccaccaggccttctggggctagacataacttcccactggaacagcagcagcctctttcccctctttgtgctttcatgaagaaaacggctgttctcttaggtagccaggaaatagattacatggggcaaactttcaaaagcaatctctaccctggtgctcaggctacatacagaggcagaaaaggggcacggaagagcccttgctcttgagagagagtattttcatattcccaagggctttccgtgtagagttgctatatctgatatcacttaaacctttacaagaaaaaaggctgtggtgactcagtgttcctataaattcagaatgtggaaactactaatccaaagcatcatttctagcactgagtatcaagtacgatcagcctgaccaaaatattgcaaagagttttctaagtctctgaagatttttttctccttgaacactgagtctatagcagtcagcaatgtaccttagccgat

SEQ ID NO: 371950 - DNA, 607 bp, Homo Sapiens
aaatcgagctcggcccaggtgatacaggtattgttgctggtggtacaattaggcattgacattagcagaagtctagatgagagacagtgaagtcagccaccatctcaacttggctctcatcaatcctgctcttcccatagtgtgggacaaactccccgcatgccttacttcctgctgtactaatgagtaactcttccctccatatatatccagttacatattagtattgcattataagccagctatttggcagtgatgaatattagaaggaagagctattggcagaatctctgggagcaatctgacatttatatttttgatcaagtagctattgaatgatagcagaacaaggcttttccccaaaaatgttacacatcacaaggcttttgttctaattggaacatgacctctagtagtaagcagatatgtatccagccttgaaatctgggaacattttttcaggattattaagtgataaagagtgccgtttctaggctagtctgtacctttgtgagggaaacaaaatgacagtcagctttgtccttccctctgatcctaacttgcagagggcttaaagtgcaaaatattcacctgttaatctaggggc

SEQ ID NO: 371951 - DNA, 469 bp, Homo Sapiens
tccttctggccacccttcaggcaccccatggtgaaagaaaaggattcagaatagaagccaagcaggggactgttgttaaccccgaatatccattatgcatagaaacagctcacatatcccagggactcaaacagggcttcaaaatggttgtgaagggtcccaaatgacatctaggcctcagtttcctctctgtagcatgaagaaattgtgattcttaactcttctgggtcacagcccccttggaaaacttgctagcgatggatcatcattcccctaaaacgcacattcccacaaattcccatcattcccccaaaccgcacattccctacttttcccagggactcaaacagggcttcaaaatggttgtgaagggtcccaaatgacatctaggcctcagtttcctctctgtagcatgaagaaattgtgattctaactcttctgggtcacagcccctgtgaaaagtaggacc

SEQ ID NO: 371952 - DNA, 1591 bp, Homo Sapiens
ctctcgactagcccgacaggtgctgggaaggaaatatacagcctcatgggatatgaaaggaagctcagacaagacatagagaactggtgctcccacgtcatctacacacacctagatggagaggccagggccttggcttttgctcaagaggacaacagcagagcttcgtgcttgccattccttggatggggtaggcaggggtgaggccagctttggggtgtacatgtgtgcatggccctagctgtatggggtgcctatgcctgtatatgtctataggagcatgtgaaggtaagaggttaacattacagcgctccatgtccatgacacttgtacctgtgctctcatttatattctttaattctataccagagatgttctggagttggagaatcactgtcccttttaatagcttaatgatggctgagatctggtaagcccgggacagtaagccgagtggctgttggagtcggtattgttggtaatggtggaggaagagaggccttcccgctgaggctggggtggggcggatcggtgttgcttgcctgcagagagggtggggagtgaatgtgcacccttgggtgggcctgcagccatccagctgaaagttacaaaaatgcttcatggaccgtggtttgttactatagtgttcctcatggcgagcagatggaaccgggagacatggagtccctggccagtgtgagtcctagcattgcaggaggggagaccctggaggagagagcccgcctcaattgatgcctgcagattgaatttccagaggcttaggaggaggaagttctccaatgttctgtttccaggccttgctcaggaagccctgtattcaggaggctaccatttaaagtttgcagatgagcttatggggggcaatcttaaaaagtccacagcagatgcatccggctcgaggggccatcagctttgaataaatgcttgttccagagcccatgaatgccagcaggcacccctcctttcctggggtaaaggttttcagatgctgcatcttctaaattgagcctccggtcatactagttttgtgcttggaaccttgcttcaagaagatccctaagctgtagaacattttaacgttgatgccacaacgcagattgatgccttgtagatggagcttgcagatggagccccgtgacctctcacctacccacctgtttgcctgccttcttgtgcgtttctcggagaagttcttagcctgatgaaataacttggggcgttgaagagctgtttaattttaaatgccttagactggggatatattagaggaagcagattgtcaaattaagggtgtcattgtgttgtgctaaacgctgggagggtacaagttggtcattcctaaatctgtgtgtgagaaatggcaggtctagtttgggcattgtgattgcattgcagattactaggagaagggaatggtgggtacaccggtagtgctcttttgttcttgcttcgtttttttaaacttgaactttacttcgttagatttcataatactttcttggcattctagtaagagatcctgaggtggtcagaacataagggggatccttagatcgacctcaaacatgca

SEQ ID NO: 371953 - DNA, 693 bp, Homo Sapiens
tgactttcacagggcagaatccagcagtcagaaaataacacaaaaaatgccgaggtttggcgtagctggtagctggggacagtgtcttcgtttgattactgccagttatttccagcatgctaaatccctacccacgttccagcctctaggtgagtcagtgcgtcactctgtctcccgtccaattaattatttctcatcactccctcaatccaagtaacaaaccttgaaacacgaacatagacaccaggcttattggggcgtgcacagccaagaccccaagaagtgactccttgtaaaatgtatttgtccttctcaaagcaaaccagaggccctccactgtcaccctaaatagaggtagggaaaaattcatgtgagggttaggctgccagccttttattgtggcatccatctattgtccatatgtatattttcccagtaattgaaattggaaaggaacttatgggcatattactggagcatctgcagtgcttaagtacttagcaaaatctattcagcgaaaccacaccacttagtttctcccaggggtaaaaaaacccttgtgaatcctgcacacatcccttcctgtgttggtgtttcctcttagatctggcactagcctgggcatcacctgtaaagtactgtgcaagttggtctctgtcctgtaccctctacctcttactgggacgagtcgat

SEQ ID NO: 371954 - DNA, 546 bp, Homo Sapiens
gcgagtcttttccacaggggggaaagtgatcacgacggatgccttgcacagccttcagtctggctctaagcagtcgaccccgaagcgaaccaagtcctacaatgatatgcaaaatgctggcatagtccacgcggagaatgaggaggaggatgacgttcctgaaatgaacagcagctttacagccgattctggtgaacaagaggagcacactctccaagaaacagcattaccacctgtgaatagtagcatcatcgctgctcccatcacggacccttctcagaagttccctcaatacctacctctttctgcagaggataatttaggtcctctacctgaaaactgggagatggcctatactgaaaatggagaagtctattttatagaccataacacgaaaacaacatcttggttagaccctcggtgcctaaacaagcagcagaagccactggaagagtgtgaagatgatgaaggggtacacaccgaggagctggacagtgaactagaactgcctgctggttgggaaaagattgaagaccctgtggaata

SEQ ID NO: 371955 - DNA, 654 bp, Homo Sapiens
tacttttccacaggtcccctttgttgccaagctgtgccaggatagaagatgaggtgatgcagataaaacgcttccaacacttttatatacagctgtccttggtttgggggtgctttaatgggttcctgcagcttcttcactgtactctggagtattctcagagctatttttgttggcaagtagctgttaaattcttgcttttgttggggagacaagagctgggatctcctagtgtatcatcttgttgatattacttgcctgcttttaatattttaactaatttttctgattacaaaggaattgaggttctctgaagaatatttcagatatttaggaaattttaaaataagatgaaaatattgataatattctggtataaatccttccagacttttacaatgcatttgtaagtacatctacatttttgcaaagagaatactgtatttttcagatgatcatattgaaaatgcacttttgtcttggtgtactactattttgtgaacattttttgaggtcattatttgtctgtagcttgacttgtaatggctgcctggtattccatcatgactgactttattaaaccactttcatgccattgacatgtcagatgtttccacatttttgctattataaataattctaatactgaacact

SEQ ID NO: 371956 - DNA, 285 bp, Homo Sapiens
tcgtacctttcacagggtcatgtggcatagcctgggagtacaatgtccgtgccttagtcccttatactctccaaataacagtcaaccccttagattacctaccatcgtagtttttttaaaagccgtggaagaggggaaatgatatttttactaaatctggggtacgtatcttcctggataccctgtatcttagaggctttgttaatagagattacagacgaaatgacggtagttgacttctgggtggggaaacaagttcattgaatattaaagcaagaaaaaaaa

SEQ ID NO: 371957 - DNA, 454 bp, Homo Sapiens
tgaccccacaggtactttccacagggttacgctgtgggacagacggagagaagtggcatatggataaagctagtcactaagaatcaactcagtcaagcacccacagtcacactcagaccctcaggctgatccttagtcacaaactcacacactgtcagacagactagacacacacaatttagacaatggtgtcctactgacaggcatgtgagagggagatacacatagctccgagagacagtcaaacacaccatgacagactgatatagacagacaaaattccattctagtctagatcacaaatacagactggagacatgaaaagcatggcagataaaatgagagaacagaaagagggaggactaagtgctatacagatacaacgcattagaaaggggggaaaaagaacagggctgttgtcagtgacaccaaatcagagacaaaaatagagagc

SEQ ID NO: 371958 - DNA, 549 bp, Homo Sapiens
  misc_feature (12)..(12): n is a, c, g, or t
gacgtaacaggnggaaggaaggaaggtaataactaatcatggcattcaagcagagcttagccatgctatgtatccctctcctgcacttggcacagcattacacaaaatcacttagcagaccacagctcaacaggatggatgttgctgcagtcccagctggactcagggcacgttcacaaaccagtcagagcagcaagccccctaagcaacctgtgagataactcaaatggggtttatggatcaagatggtatactgaacacatgagcctgtttcttccctcatgaaaccccatgaaaataggagcagaggaatgaaagttatattaatacaaccatgaacacagaatacagaagagaacagtaagcaagagctagcaacctatttatgcaggaatggaactgatggaaaagtgagcagggagggggatcctaaaaccacatgcctgcagaggggaggccacagagtggtcagcagagatgccctgtggcctcaaggagaggcctggggatcggaataggagggatggggtgagacatggggctgaagac

SEQ ID NO: 371959 - DNA, 943 bp, Homo Sapiens
acacattcgcattaaaaacaactacaagtgggtcaggcacaccatcctccaactgctgcattactgaaatctgtgatggtttctcttccacagcatagtctccttttacaccagtggagcatgagcaatgggagcaaggccatcttcaggaatacagcattcattgcacttccaacaggaattccaacctgagttatactcccagagactagcaaaatatccgtctctgctggtagcaggctggtagttactggcttgactgggtcgtgtgaccagccagggttcctgcagaggaagttccatccattgttaatttggctgcatcagcaacttctccaattgggccagatcccatcagcaaaccaaactcgcctctgctctctgggctgagccacttctgctccagggtgctttaaaactcccacaggtaccatcacagtgggaggtggagagctcagagctcctgaggcctgagcttgctgcaagggagggatagtagaacagtattcagcaggattgttagggttagggctctggcttgaggcactcatcatgttctcccaggcttgagcattcattagcactgaatggcagattacacacactctagcttcctttctgtccatgtataacagtttacatttcaggctacagcaggaagcacagaaaaccttcccacatgctctgcagtgatgcctccttttggtgaatgtaaacctggcttcacatttcatgcaatttggagcctgagaatccggtacccatactggagccacctcacccagagtggtgaatggctttctggcagaaattccaaactgaccagctctgagatcattatctgggctatctggagctaatgcaaggcatggtctagtggagatctcagcctcataactttctaaatgttccccctgtggaaagtacctgccgggcggcgtcg

SEQ ID NO: 371960 - DNA, 505 bp, Homo Sapiens
  misc_feature (73)..(300): n is a, c, g, or t
acagggggaggacactttatattcatctgcgacatgtgccaggcagagaagcaggtacacttaacagcagatnnnnnnnnnnnnnnnnnnnnnnnnnnnnnnnnnnnnnnnnnnnnnnnnnnnnnnnnnnnnnnnnnnnnnnnnnnnnnnnnnnnnnnnnnnnnnnnnnnnnnnnnnnnnnnnnnnnnnnnnnnnnnnnnnnnnnnnnnnnnnnnnnnnnnnnnnnnnnnnnnnnnnnnnnnnnnnnnnnnnnnnnnnnnnnnnnnnnnnnnnnnnnnnnnnnnnnnnnnnnnnnnnnnntatgctatattttagttattattggtgttattattaaaaataaatatagtctcaatcaactattcatctaaatttctccctatccactctttctcacagttattttttgttaagtttaaagtcagttttcacaagtgcttcaagaagtacagcactttgcagtctgagactcttttatagatgaaaaccaagcctgtgaaaagta

SEQ ID NO: 371961 - DNA, 457 bp, Homo Sapiens
cgctcggtacctacttttccacaggtgacaggttggggagaaaataaaggacatgtgaaatgccacactgaggagttgggacatattctacatattcaacattcattaaaccaatgctacaaagcacctactatgtatcagactccgttttaggcagcagggaaatagcagaaaacaatgcagataaaaatccctgacctcatggagcttacattgttagctggtaaactacagaataagataaacaagaaagaatatataatatgttatagaggaagaagtatcgcggagaaaaatgaagaagggaagaggaatagaggtgacgcaattttagaatgtccagagaaggccttactgagaaggtaacattggaacaacagcttgtaggaggtgagaatctatgtaacagggattcaggaacagatggtgaacgactcacagaaacagagacaatatg

SEQ ID NO: 371962 - DNA, 839 bp, Homo Sapiens
cggagcttcggtgtgtgcttttgctatacagcttacagttctaatgccgtgaggtagagatgatgaatttctcctttttaacacctatcttctgtttactccttttgcattatgaaggcgcctcgttcaatgatgtatgtttcgtgatggaatcagaaaatgtcacactagaaaagtgtacctaacttgattcagtgtgagctcttgggacagggagtggagccaggggtagagcttaaagaagctgactctgtaagagttgtatatcaaagtaccttttgctacaaggtgcatatagaagtctaagataagaaatgtaccctctatactttatttttcatgcccctatcatgtttggtgtgccttaaatcttacctttaaatgaagactctatggattgtttacaaatgaagttttacactaggaccagatcgtccatacatgattggtcttctacaataataatgttcaattctttcattttaaatctttctttagggtcatataaagattagttctttcagaaaagctattgctttggtacatgacttagtctaaccagttgggtaatgctgctttgaaaaatagtttgtccctctccccattccaaaaatgaatccattcagtcagaaaaaaagattatcctactatttgtagatgattgctaaggcttgaaataggaaaggggaaagaagggatagaaaagtttcaagtccagtagtgcagtgaatcctttgtgtttgagacttttttacacttatttctgaagttagtgaactttcattgtcccctgtggcatagtaccctaggacaagtaacctgcaccgcgcgccgtcgac

SEQ ID NO: 371963 - DNA, 614 bp, Homo Sapiens
aaagacaggcaacgtgttggaccttccggagcttctcagaagacagagggttttcttttgagatccctcccgtagctgtcatacagagtgcgatttatgacttgtaagttgtgctatggagcttgacaagtaagtttgatttcatttaatattttctttaaaccatcttagatcttctctttgacaagtatttcatctgttagtgttctcaaaatgtaaaatgggtaacttaatgagaacaaaaattgtaccctaagacatatttgcactatctacatatttgcaattaaatcttaacagatttaattgtaatagaatctaatggttttcctcttgaatttttttagacaccagaaattttcattactaataaataatgtttagcttcctagtcacaaaccaaacagaaagcaaatttcatcagagtttagaatggttaaaaccaacatagctgcaatatttttagttttgctttaaaattttttgaatcaatcagtaaatcaatcagagttgaccattatgtaatccacagaccttgaaataacagagatatatttctccgcagatcaatatctatatatgtttttaagatgagtagaattccctgaaaagta

SEQ ID NO: 371964 - DNA, 565 bp, Homo Sapiens
  misc_feature (553)..(553): n is a, c, g, or t
ggaggcttggccgggtgaggaagtcagaataggcagtcactggagagctcgaggcaaactgtgttagaatttgttttaacaagattaccaaggttgccagaagaggagtggaatttagggcaacaacagcaacagcagtggcactcaggagctgctgatgtggtccaggcaagagatgacaatggcatggactagggtgggagcagggagaaggccagagatggaaggatccaggatgcagtttgagggtaagactgacagctttgctgactggcgcaatgggagaaggaaggaaaagagaacttcaagctttttactgcataatcatacttgtgaaagtttcaaaagagaagtcaggctgccctaagtgcatggcaaaagcctgaacatctcagcgtcatcagagtccaggctccacgagaagctgagcaacatctttccaagagttgcgggaacagtggtgcctcctcccaccacggaggctggggaggtgaagtgcatcctgtgaggtgcttaccagtctaaagggtcattcttcatccttaaatatccntgtggaaaagta

SEQ ID NO: 371965 - DNA, 941 bp, Homo Sapiens
  misc_feature (908)..(908): n is a, c, g, or t
agctttggagacagttgcctgcctctccaaggtttagaagaccttgcagccgatcgcattaacagactccaggcagctcttgccagcacccagcagttccagcaaatgtttgatgagttgaggacctggttggatgataaacaaagccagcaagcaaaaaactgcccaatttctgcaaaattggagcggctacagtctcagctacaggagaatgaagagtttcagaaaagtcttaatcaacacagtggctcctatgaggtgattgtggctgaaggggaatctctacttctttctgtacctcctggagaagagaaaaggactctacaaaaccagttggttgagctcaaaaaccattgggaagagcttagtaaaaaaactgcagacagacaatccaggctcaaggattgtatgcagaaagctcagaaatatcagtggcatgtggaagaccttgtgccatggatagaagattgtaaagctaagatgtctgagttgcgagtcactctggatccagtgcagctagagtccagtctcctaagatcaaaggctatgctgaatgaggtggagaagcgccgctccctgctggaaatattgaatagtgctgctgacattctgatcaattcttcagaagcagatgaggatggaatccgggatgagaaggctgggatcaaccagaacatggatgctgttacagaagagctgcaggccaaaacagggtcactcgaagaaatgactcagaggctcagggagttccaggaaagctttaagaatattgaaaagaaggttgaaggagccaaacaccaacttgagatctttgatgctctgggttctcaagcctgtagcaacaagaacctggagaagctaagagctcaacaggaagtgctgcaggcccctagagcctcaggtagacntatctgaggaactttactcagggtctggtacga

SEQ ID NO: 371966 - DNA, 508 bp, Homo Sapiens
cttttccacagggtaaaagatactataggttcagaactataaattacttctgaagttataataaacagtaagggtaattttatgagtcaaagatggcctattcagagaatgaaggctataacactattttgtcttaaccatttatttacctacttaaaaattccataagtgtagctctataagcttaccaataaaaatgtatttcttaaataaatgaacatggaacatgaacctacatagaaaaataaaataaaatgggaaatggctaatatttgatgtcctgtattttgttctattctctcttatgaactcccaaaaccagaagcaaataagtttattaagatgccttgaaggaaacatttaggatttggaaggttaaaagaaatggcatttcaagtcaggttttggtagttccttctttagagccctttcagacaatgtttctgtattctccatgataaggagagagaaagtaagaaatcaggtagctgcttccctgtgaaaagta

SEQ ID NO: 371967 - DNA, 480 bp, Homo Sapiens
gccacataaagggtcaagcgtgacatgtcaggttaggtgcaattggattttgtctcccccaaagtcactgccctcacgcctgggagtcggtagctcccgagagctggggcgagtcgagcagccagtctgtcagctccgccgtcctgagcacgttgctccggaactgctttcctccgttcacgttccaggtccccatagcaatccggatccgcttgaaatttgtgaattcggactgacgctcagtcatagctttcacgagtcctgagagtcactgtcaggaggcataaaaaggcgcatttctttgcagttccaaagctcaggcatcctccaaaaagacagatgaggctgcctggcagagacagatggttcatgagcctctagagataaaccagggtatgctccttacgaagacgacaaaaggcttaaaaccacggtcaccacggggcttcccttatggcatttctacctgtggaaaagtaa

SEQ ID NO: 371968 - DNA, 457 bp, Homo Sapiens
tacttttccacaggcatcacatggtgaggggactaacgagagacagccacattggcttttattacagacccactcttgtgctaactagccccttctctgaataacccattaatctgagaatggctcaagcacttcctaaaggtctcgcctcttaacacgcctgcattgggcaccaagtatccaacagatgaacttctgggggacacattcaaatcgttgcggggtattaaagcgaagtacaaagaagagagatttgctgtcaagtagtttgcattaaacttggaaataaatatgaattggtaggttacctattaaacaagtgtgttagagtagcctagcagttttcaaagtgtagtctgtggaatcctagagaatagactcctttcatggagtctgtgagatcagaatagtttcataataatactaagtcatcatttgccttcttccctgtggagta

SEQ ID NO: 371969 - DNA, 973 bp, Homo Sapiens
gatggtaccatcgttaggtatttctttgatgatgaaggctctggagagtcacaggggaagttggttaaccacccgtgtccaccctatgccttggcatgggcaaccaatagcatcgtggctgcaggctgtgatcggaaaattgtagcctatggaaaagaaggtcacatgctacaaacttttgattatagccgtgaccctcaggagcgggagttcaccacagctgtatcaagtcctgggggccagtctgttgtgctaggaagttatgacaggcttcgggtgttcaactggatccctcgaagaagcatctgggaagaggcaaagcccaaggagattaccaatttatacaccatcactgccttggcctggaagcgggatggctcacggctctgtgtgggcacactatgtggtggggtggaacagtttgactgctgcctccgaaggagtatttacaagaacaagtttgagttgacgtatgtgggacctagccaggtgattgtgaagaacctgtcatcaggaacccgagtggtgctcaagtcacactatggctatgaggtggaagaggtgaaaatcctaggaaaggaacgttacttggtggctcacacatcagaaacactgctgctgggggacctgaacactaatcggcttagtgagatagcctggcaaggatctggtggcaatgagaagtatttctttgaaaatgagaatgtatgcatgatcttcaatgccggagagctaaccctggtggaatatgggaataatgacaccctgggttctgtacgcactgaattcatgaacccccacctcatcagtgttcgtattaatgagaggtgtcagcgaggaacagaagataataagaaattggcttatctcattgatattaagactattgctatacgtggatctgattgcaggtcacaacattggcaccgctcagccctgagagcgcccgtggaaaagtaaccctcgccgcacc

SEQ ID NO: 371970 - DNA, 357 bp, Homo Sapiens
accacgtaatatggtatcttatcgtctctcaggcaactcagactgtgaaacttaaaaatgtaagatattcctgccactaacagcaacaattatgtgaggtcttccagcagcaaatataattggtctcaaaaatgattctgagtcataccgcacctttttttgcagataggcctagcataactcaaagtggtcttttttaggaaatgaaattttgacaatagaggagcattttcttatgcactaatatagaatgatgtgacactactccctgtcccccaaaaattgagggaggtgattctagaatcaattaatttcaataagttggggaatttctatacactgtttccctgtggaaaa

SEQ ID NO: 371971 - DNA, 629 bp, Homo Sapiens
gagctcggtaccttctacaggggatctgcccgtggttaatgatggggcttatttagttgcgtttgggccaatcagcttaaagggctctgtagaaattagctcattaatcctcacagatcaagagtaagcactttgagtgcgtccacctgcctgtgttgtggaggtaggcaggcagaggcctggctctcctgaggtcttaggactgagaggtggcctttctggctggattaaaggacccagagctccctgccacagttctggcatctgtagacattgtagggtggagtgggaaagtcccacactgcccttcaaaagctctagagctttcttttcttttgtatatcagtgatctctctctcttgctgttcatgtatttatatataacactcaccttgaagttctgtggagcctcttcctgtgtaggaatcagggctgctggagacgatcagggatgcaggtgaaacacaggagcagaattgcagaacaagtggctttcaaaggttgttaggatggcaggagttctatttttataaattataagggactgacatgataggatggctgtggtacctgctaagaccatagaaccgggtcattctaatagatgttataattcctttacagtgtca

SEQ ID NO: 371972 - DNA, 335 bp, Homo Sapiens
tcgagctcggtacctactttcacagggaatggaaagcaataatccttcacatttagagtaaattgtgattgggggtagaaccagaggaaaacaatttttttccttccattttctgactttctttaaatattggggacgatactgttattacgagaaaacatagcacagctattttaaaaattggaaacacaccctcgctctccttgaagcaccaccatttgaggctgcctcctcagagggctccccgactgcccctttctggacagatcgctcatgccctgtctctttccattctgctgttctttgcttcctttgtgtcttctgatcagttcccc

SEQ ID NO: 371973 - DNA, 511 bp, Homo Sapiens
tttcagggggaactaatatcaggggcacaggaagaactatgcagaggacacagagaggaactaatatgcagaggacagagagaggaactaatatgcagggggcacagagaggaactaatatgcaaggggcacagggaagaactacgcagaggaaacagagaggaactaacatgcagaggacagagagaggaactaacctgcagaggacagagagagaattaatagtgctaatcgtgcaaatggcttttgcctcttttctctaatccctcctttttgccccaacaatggaggaatcaggaccagagaagaggggtaagaaaaataaaaaagtgcagctcttctgcatttcaggtctctcaaactggggcctggctggcatcagagagagggaataatatgagctctgatttagaagggacattgattaacttaaccaaaatgaacttcaccagaaaaccaaagatctctgcctcgcatacatcccctgtgaaaagtagtaccagctcgatca

SEQ ID NO: 371974 - DNA, 469 bp, Homo Sapiens
tttccacaggtgtctggaatcagtactcattactgctaatagcacagttgtataaaagaagacacaatgctaccttacgctagcctgagtcagataggattaggaatagccaaaaccacaatatagttccctttttttgcttgttttcaatgatgcttagttgggatttgtcatctgaagacagcgttttttataggtcataataagaccagtctataatcaaagtctgtaagtccagtctatattttataagtccagtctataatcaaagacaccaaatttaggactatcagtctcagactttagagaaacataactgttttgataatccaggtaattttaattttctccagtggagaaagtgaaacatctccaacagattgattgtcaccaagagttttaattttttgaagaggacaaagaattccattcagcttccagagaatgagtgaatgtctctgtggacgta

SEQ ID NO: 371975 - DNA, 519 bp, Homo Sapiens
aggatcccctttcaggcagtgcccagaattcagcacacaattaacctcaagttgtttcataaatataagccatgtctccttaacagcaatggctcttacatactaatctgagcattagacacacagtaagtgttcaataaatacctgctgatcaattaagcttccttgagttaaccctacacttgcttaaatggcgtatttcatgcaaacctttagctgaacccattcaaacagcctttacaatgattacttttgcagtagctatatacttaattggtcctcactctctttttagaactctaactgtacaagcagttgaaagagtgattttttaatggatgctgatgttatagtgaatacagtcattcagaagtctaacacatccaagtatcacagagctggtcatgcaacacaaattccaatgccactcagaattctggtcataaacgatgagaaaaagggagtaaaaatccctcctgtattacccgaagaacagtattatttctccctgtggaagta

SEQ ID NO: 371976 - DNA, 555 bp, Homo Sapiens
tacgacgtgtccacagggcacagcaggcaagcctccacatctcctcagtgaacacagggcccgctgtcacaaggacgtatctaatacaggagcagcccactctggagatggtttcagtgggcttggccacacaggcgaccagcaactcaaagaggtccttcagcatggtattgatcatgctctcgtacctgatatctgaatgtagaaagctttgaatgtgctccaccaccagctcacaggacagaccaatagcgtgcttgaaattggcagaggccatatcccagtaggaatggtctttatggctccggcggagccaaacggacatcacaggaaggaggaggtgaaccactgcatagataccaaaccctggtcctggtgttttcgtcacatctctcaacagctcaaagagtaaatccagagttggtggttggtgctgccgtggacaattggacacagccgctgtcagctgctccagcaggattatccagacttctatcagaccggtgtcatcatcaaaatcagacaggactgattcaattccccctgtggaaagta

SEQ ID NO: 371977 - DNA, 472 bp, Homo Sapiens
tatttccacagggggaaaaagaagattgatttgactttataaacatttaaatgctatgaacataaaaatatcagaaatatcagaaacaacattaaaggacaaacagaaaacatcagaactagattttttctatcctcattatgaagatttagtataaactcataacaggaacattgtgacaggaagcttggcaaagggtatgaagagacaatccacagattagaaaataccattagctaattaacacaagggaaaattttagcctcacatgagaccaaggcaataaaaagtgaaataagaaaagaggatattttgtgtacaaaattggcaaaatgtttagatggtactaatcagtgggcggtgattctcacgtatgctcctggggaagtgaaatttgatatagcctttccagaaagcaaagtaatcctatgtactagaagtcctgtgaaaagtaggtaccgagctcgatcaa

SEQ ID NO: 371978 - DNA, 454 bp, Homo Sapiens
tacttttcccagggctgtggatgcatcagctcaggtgtgaacttcaaggagttcaggtcatttgtggggcagcatcagaggggctgaggggctccaggccccgcaagaaggaaatcaaatatatattttaaaaatgtatggacaggtgaaaatgggacaagtaacgtgattggggatctgtccaagagataagtgggttatggaaggaaagggaagccaccaccaagtatgagactaagcagcagatgcacagcgtggttgatgttgggatgtattctggggaagcaatgctgcctgctgccgaagagggagcccagtgtgctggtgggagggagagatgggttcaggtggggcggccatatcacactgaagtcagggacaagtggacctggtgccggggtcactaggagaaaaggatacactgtggaaaagtggtaccgagctcgatcatcag

SEQ ID NO: 371979 - DNA, 383 bp, Homo Sapiens
tacttccacagggacattaatgtgaaagaggtccagtgacaaagattcagtcacttttgcagaccctcacaagccacaataatgaagttgcagtgaatttgggacatagccttccctccccaaaattcttgatccaagaatccacccgtcaagttcaatgactcagactccatttctagtgtggtcgttggttaacaactttactagtttccatccaggcttaacctttctatggaccataatgtcttggtgtctgctgcatttattgtccctccctgttttaaggatacttaagtttttaaagaggcataaatacttcaaagtccccattggccctcctgggggaaattacctcaaaccacagggtagtctgctaaataacc

SEQ ID NO: 371980 - DNA, 572 bp, Homo Sapiens
tactttcacaggggggaaccctcttttgtcccagggatgcattgcagactgaaccaaaagctgtgagaacaactacacgttacgctattcgttgtgctccaaaacagtttacctcttatctaacagatatggctgtgctggtgctggaagtaatcaccaaacttgatggtcttccaattggtagagttcagatcaatggactagctcaactttctccaacccatcaaatcaatggattttttaccattgtttcatcaacgtctaagaaacttggagaactccaggtctcacttgccctggaacctctgtcagaaacttacgacagctaccatccacttcctaccactgacatgacagaaaatgtgcttttatctaagcagggattcagagagaatactgaacccagcagtacccagtttcaggttccatcaaggcctcgcgacatacataccatcaaaattgatggaaaagagttagcagccaacagcagtagatcaaccactccgaggggaaaagaccatgtatgctttgcagagaacactgtgaaaagtaggtacgagctcgatgatcat

SEQ ID NO: 371981 - DNA, 540 bp, Homo Sapiens
acccctccccgtcggcccaaatggggtatggagattttccaggtgggtgtggttgaaggaagggaagaaagagtttaggagcacattacaagaagaaggtgactgtaaggtccaggctgagcaggaaggtaaagcaagaaggaaacatgaggttgtgaagagaagtttagagggatgaggaggcaggagaggtgaacagttgcaggatgtagctagagtggcgatgttagatcttggggccagagagctttacaatgattatgaagatcaaagggcattagaatcaagctataaagagccactgtttgatgttgggatgtgaggatgctgcaggtggatgtctgcacattgatggtgagaacatggtcaccctggccctgctgggcctttgctaaagagactgtgctctgttcttggggccgttttcatcacctgattacagcagtggcccccaaatggtgttctttggaccatctgtataaaatgctcataggtcaaggataaaatggaaaaacagagaaaatgtcacagaaatgtgcc

SEQ ID NO: 371982 - DNA, 535 bp, Homo Sapiens
  misc_feature (69)..(69): n is a, c, g, or t
gagctcggtccctactttccacagggctattgacagagtatcgtgctgggaaaagaaagatcctaagcntcatagtgtggggcagtcattttaacccccttgcctttgctatcgcccaagcaggttatacaaagcagagcacaccaactgtgcccataaccccctcacagtctcctcatgccacatagtttctgagttattttcttctttgtgaatattctttaaatccattttcaactagacatgataacaatgagaactgggttaggaaaaatcattatgaattaaccatgttgaattagccctaagaaatgcctcttgccagaagagctacatttgttttgttgtttaccctcttccaaatcagcaatccttttaaagagaaaaatctactttagtaaaatttgggtggctacatgattactcacttacccatgtggttcctatggaaagtgccctcttcaatcacccagaaatattatgacaatggtcagaaaataggaccatgaacaaagaagcaggagtcctgtgaaga

SEQ ID NO: 371983 - DNA, 409 bp, Homo Sapiens
taaaatatacttaatctaaaaaaccgacaaatacattttataaagcgttaagtaaaaacggtcactccatctcattcctgactcaactgcctgactgctagaagacaggcaattaagagacttaactatttagtatttttaagtttcacatgttttatctgaattttcttaacggcttcaaaatagatgcttacgcagaggaattaatcaaagtaaatccactaataattcccacatttcatgtctcttccccttacatttggtgtatataattatacactggtttgccaagatgtattataggtatgccaagatattgattccctcagcccttgcagccaggtgagcctcgaatactgcagcagaatgaagcaccctcctccttcccctgtggaaaagtaggtaccga

SEQ ID NO: 371984 - DNA, 509 bp, Homo Sapiens
tacaccattttcagaagatgtgtctccatacgcgcctgtggtagtgtcaaagagctcctcaggcaacagtgctacacatagattgctcaatgcccaacagaaaataccactgtcagaacatgaaggttaatttgtctggagcacagaacatttttggagataatcctggaaagataaccagcctcaatatggaaaaccacagaaatattccactccattcctggcagatgaattccaaactgtatgcagagacttaattaccccataactataaactatgtttaacaaatttgtaggggtattttagccccagaaactttgtgatctgtttgtagatatttattcatcactcataatttcctcctaattttcctgcaccttgtgcagcatttagaaggttaaattttgtttctgttagaatccaaggcccctcatgtaaattattagtggctatcagcttgtcttttgaaaactgttgctaaactacagatcagccctgtggaaaagta

SEQ ID NO: 371985 - DNA, 537 bp, Homo Sapiens
gcgtgtgttgaattggcaccacccaagtgaggctgtcgtatacctgggtagaggaatgaacaatacatcgcaggttgtgacaggcttattcctacgcttcatttaatatggaacccgcaacactgatttcagtgcgaagaactccctttccttggtctctgggaagaagtcactgcaaaatctatgtaatttgctcttcatttctcatatcccaatgaattctcaaatcagtaatgtgtgatgatatgtctagatatcttgtgctgccatattgcccatctcaaaatgatttggcaagctgagaaaacaattaaaccaaatagataaatctatcattgtaatgaaaaatattaattacaagcaaatgagagccaaatatatttcaatcagtgtttgccttgccatgtactgagatacggatgacgagaaataggtcgactgtctctgcactccgtttcttctgggatgactcccatgttaataacatactcccacgttaataacatatttccacattaataacagtgtccctgttgg

SEQ ID NO: 371986 - DNA, 457 bp, Homo Sapiens
acacagggaaatcactcctggctgcccaaacggaggcccggtgcctctggtcatgtccacatctcgtccagcgcttctgctgcctcaccaagtctggaaagagctgctcttatctcaggctacccacttccactccgcgcccctgcctgtcccatctcttggaataagcgccagcttcctgggagtggagtgtacctctttcccaaacaggccctctgtctggaacgcgcctcttctccctccctgagtcatcaataaatctgtctcactttgtcctgactcaagctttgcagtcatagagttgggtctgcggagttgccattctcacaggatgagggatccaagacactgtgcaatattctcacaggatgagggatccaagacactgtgcaatattctcacagtatttcttagaggtcatttcacttttcgggcttatttttaaaaaggttttatt

SEQ ID NO: 371987 - DNA, 387 bp, Homo Sapiens
tatttccacagggctgcagctcttgagaaatttctgtagctttttcaagtgtgtcttcacatacaaaatgaaaataacatcgtcagtcaattttatctgataaggtatactgaacacctgttatttttgcatcccagcctctgttcaccattctcccaataattacccccatttctctctggactccaccccttcatacatgatctcaaagactgagtatacagcccaagcctaagccatgggaacacatcatgacccgggattcagtggttggttctccaatgagtttatgacctaagtagagaccctgagatgcaactgaaacttttgctgggaatagctaagataaaaactctttttctttccccgctgtggaaagtaggtacc

SEQ ID NO: 371988 - DNA, 234 bp, Homo Sapiens
gaatcggctcggtacctatgtgaagatggtatgcgctccctatctcactaaagagcactgaacgagacaagctatctggaagcatgttttaagctgtaaaagggtacacaaagaagagatgtaataattgtgctgtcatctttagttttttttagctaaaaaagctaaaagctactatcatctttagccacacattcaccccatcaccttatgttaccatttcctttatcccgt

SEQ ID NO: 371989 - DNA, 595 bp, Homo Sapiens
tcatcgagctcggtacctactttccacaggggtgagcaccacgcccagcaagaacttttcaaaacaatgctttcctttccacacacatgaatctaaactaatcagcctggccattatgtttcttggagccctggaagatggtatctgttttcggtgaagaatttgcccattctatcccatccctctgacttaggacacaccacactaaatcctgatatataaattgtatatatcattaagacttctttagttgtcctttaggatgtatgtcctttaggacagtgaccatgttcttttgtattgactgtttctccaaggacacattcaatgataatcaatgtggaggacttccgagataatgaccctttgccatcacaggctgtctacctcttctcagcattaagaccctctgcttattcacatgcccacagctctcgagggaagaaaagaagtctagaaatacccaaccaggcgcatggacaaattggcctacgtaggccttcctccatgcctccccttcccccaaacccacatttattttcattcctttccttctagtcaggcacaacatgtcagtccatgtgaaaagtacccg

SEQ ID NO: 371990 - DNA, 501 bp, Homo Sapiens
aggggacatcatgtgataccatgcaaggcatcagcgagtaactgcatctctcgcaatgccacttcccccatcttcacccccctcaccaaacacttctccaaggctaagatttcattgtagagaactattgattctcttctatatcactcctacttttccagatcggaaaatagataatccacttgtatcacccctgtttcctggataactcacctagaaatggtctaatctgtttacatctttttatccaggtgaaaatgccttagtgaaaggcatctggggcattttatgacttggaaaatcacaagaattgatgtaaaatagagcagaggagccaaagcaaatatatattcattaagggctatttgcaattatagtgagctgagtggtttcgtgcattctccttgaacatgatgaaagaccgcagattactctagcatcattgcagacaaagctacttaaactactaattacaccaccaaggagctgtttttttctcat

SEQ ID NO: 371991 - DNA, 557 bp, Homo Sapiens
atgttaatgaggaaaagaggctatgctggaggaaaggagataaatggatgtttcctcccttccctatgtaagctgcctaagttgactaaagttcgacttgataaacgtcctagttaatttaattttgtgttagtgcctctcctcccctcgagtgtccagtccattttcagctgacttgcagaaaataccaggttaatgcaaatccatcagattctgcatgcctgttaaaaggcttaagcattcgacatggcgtgggagacatgatgcttgcctaaaagggtccctggagagataaagtatattcctgccagtgcatttagggagttatacatatataactgtctcatatgatttggcattgtcacatactgagcactgggagagccaaaggaggtctggggttggtaggctgtttggaggtaaaagtttactactggaatagtccttccagctcagccgcttccatttccacattgcctcagaagttgcctaaaggatgtgcatcttgttggcagccccatgactttctagaagccgtgtggaaaagtaggtaccga

SEQ ID NO: 371992 - DNA, 616 bp, Homo Sapiens
tacttccacaggggctgtctactagctaggtaaacatagatgccttacatagctgttaatttttagtttccttctatgtaaatgggtgcaataaacttataactttagaagatttttgtgagggagcttgtacaaaagtccctaaagagtagataggtataaatttgccaaataattatgaaaaagattttttaaaacgtctgtgacccgaagagtgttaaatcagtctgctggaagaacgtaccgtttagaaatagatacaaaacttgtcataaatataacctcagtataagattatttttgtgttatgtacaattatgcaaactcttttggggcatccagagggatggaatagtttttaatgctttcatggaagcatttgagttggaaattcttgaagagtgttcccaaaatatttagctgacattactttacgctggacctccatctcctgctccagatacccttcttgtggcacctatatgagtctaatgtaatggtgaattttcttatctgcttccctcataagtttgtagctcctattacttccattggaataaagttcctacatggttctactttgtatgtcttgcactgaagtgtgactcattataaa

SEQ ID NO: 371993 - DNA, 395 bp, Homo Sapiens
cttagtaatcagcagcccattgacatcagggtataacagttataggagtgacaagcgtctgctattgatcctacgaggttcggtctgttgtcagggacattggataagcagtggtgcaggcaacagggttcctgagcctatagaataggaaaatgctctacaacgtttaaaatttttaaatttgtctcctcgattataaaagtagcatatgcatgctgtcaacttcagaaaatagagagaaacagaaagagggaaaacgaccagctagaaaagcattttgttgtttttcttttccgtgatttttccctgtgtactttttcaaaacagttgctgattctacatgtaccgttttgaattgtttccgttatctgacatgaagcactcatatttgcctt

SEQ ID NO: 371994 - DNA, 431 bp, Homo Sapiens
atgaaaaattcatttacttgattgtggtgatggtttcaagggtgtataaacatgtcaaaacttatcacattaggtacacttgaaatatgtgcagtttatcataagtcaagtatacctcaataaagctgttaaaaaataactgattgcttttgtaaggcagaaatatgagactaaggatattgtattacatcatgcattgtaatatttcattactgtgtggccctgcttaattattcatatactagttagaaaattttgtgatgtacagattatgggtgtacccttgatagctgcctgagtttgattttgtggtcagttctataaaattttgtatatcagttccatggccaggaacataatcctttattaatatattgttctgtgggaaatcagaattggcttatgtgatatttacatactccctcctcctg

SEQ ID NO: 371995 - DNA, 520 bp, Homo Sapiens
ttttggaatcttagtactcaaggcaagatgaatacttagcaaaagtggagttaaattttactttgatatattttggactggaaacaaaaaacaacatcacattgacaacagatgcctcagagagtttagaaaagaccacaacatttttctggtatatatttatgtggggtctcagctacccaggatgataaagaagggaaaatgacaacgtgataggtagaaactaggagaactaaaatgattgcatggacacaacatctaaatggatgtagtgagctcaccatcaaataggccaatcctagtatcccaaagagtctgatctagtgggattgagaagaatcaactatacagtgtaaaataaaaatacatgatctgaccttgcctgggctatcatgaatagtagcaataaatatcaagcaacaaaaccaataaccatattaaatgtgggtggttattctccattttccattataacagtaattccaatctgtctgtgcatgaaaactgggagaatatttta

SEQ ID NO: 371996 - DNA, 556 bp, Homo Sapiens
cacctgcatgctgaggtgatctaaggatccctacttttcctgtgctaaatggcctccgttgactgtctatacagcctgaatctccaggttaactgtcaacacctctgctttacaccaagctgtcatgttgaccagttgtctacatacccttgcaggagccagtgatgtggtaaagacagagacctgacctatgatgggcagcagagcaatggcccagccacatttctgcctcacagctgtcctgagtgctcagcctattaacgacagcacagcagaggttctcttccttggttcagctcccagaaagagcagccgagatgctgacggacaagtgggaaggagagaggggtgaggtcagaaaaggcaggaggactgtgatctctcctccagtctcttctttaagaagacagtttgtctctctcaagaaattcatcatgataggaacaagacaatgaatgtaaagtccaatcctaggcttgagaaagaagggctcactcccacaaatattccagctctgcccaaaagactaaatctaaaaggtccccctgtgaaagta

SEQ ID NO: 371997 - DNA, 436 bp, Homo Sapiens
caactcagtgaagaacatttctcagaaccaagctttttgtctgcttgtcactgaatctatttcccattcaaccttctgtttctcattccaatagacacacaatattaatggttaaaaataacatgcaacaactcactgggcgagaaatttagaaacacttgcctcctatgaacccagggccaaggggagctgaggatagtgtcacattaccagcatgttcaagctagacatcctccatcacaaagggcttgtgccttgaaataaatttaaaaagagagaacaagaaaagccacaataatacactccacatacacaacaggcatcttgatcacagagcaccaggacacatgtcatcagaggtggcttaatattccagagcacatccctgctccaataagagccactcactatcctcctgtggaaagtaggtaccgca

SEQ ID NO: 371998 - DNA, 675 bp, Homo Sapiens
  misc_feature (58)..(58): n is a, c, g, or t
ccaagttgtgccctgggctgagagggtaaccatccagcaacattgcctgcgcaacccnttcctccgccaacaacactgaagccccccagggattcaatggggcggtgtaagggctccagggaggagaggatggagtccaactgaaggagaccctcttgaaggactttgggttcatgtgacagtgtcaatatggatttgcagacacctgcaacagcctgacaggcagcagatgtgggaaagtcaatgggcagattgggaagacccaaaatggtaaccaaaggcaacagtcctttctgattcacaaattcctggcagtggtcatctgttgtattgttgctcagaatagattccacaaatttcatcacattaaggatgtaatccatgaggggaataggaatacgttcctctgtaccaacaacctgctgattaggctcagtttcattttgctgggtagaattaaagctctgcatggcctgtacttcctcttcctcctcatcctcactagaggcttcttctgcggcatgattagaccttgggggaggagcagtggcagtgccatctgccttctggattgatggcttctgacagatgtatttggggtcccttccaagattacagatttcttcaagtaacttgatgatggcagtcgttgcatctgccctgtggaaagtaggt

SEQ ID NO: 371999 - DNA, 557 bp, Homo Sapiens
atgtgtttaccatctgtgcttatgactggcacagccacatcttttcttttcatgttaaaatgtctatggccatttttggagggacaaaacagatacaaattgtcattagggaattgagaattaattcaatcagccatatggtttgcaaacaagctttatttttctgtgtttaaaaaatgcatttaagatgtatagcagtattatggtgtgctctagaagtcatccttcataaaagtaattccggtaatggttagaatctgcggccagtttcttgggcaaataatattcgatgtataaatttatggctccacagggacacacagatgttggagaaatggttgctgggaatgttggccaaatgtgtagtttgggaactgtggcatttgtttctgctttaatatgcgcaagcaataagggttgatactagtcataaatgtgttagctttaaatagctgccatatgccatttcagtagaaatgctgttcccggtcccatagtgtgtatttgaatattcatttttgtgtgcaaagttttttccttgatacgtgagtcctgtg

SEQ ID NO: 372000 - DNA, 541 bp, Homo Sapiens
caaaagactgagggatgcctggcctgattgcctctactttctaaattagtcaaaagttcacatagatgtctctcatttcccatgaatttgtatcctaatcttagaaagcatgtatcacaaaatatcacaaatgcctttgtactctagtttttacctgattgtgcctgaggagtccttgtcaagaagggcagattggtgagagtaagtaaaacgaatatagctagtatttggtgaaagcagaactccatattctaatatcaacccaaaccaaacacacaactctaagacactggagtagttacaagaactatacttaaattttaagaactattgatccctacccaaaataaatccgatcaaaccaatgcagcacccaatctgactgaacctccaccaatagcttccaaaacttcttccttagcaagaaatcagtaataatcataatgataaaaattagtacaaggatgatcagaacaaggtccaggagaacctctactaggcagaaactatgtattttccccgtggaaaagtagggatcctc

SEQ ID NO: 372001 - DNA, 526 bp, Homo Sapiens
tactttcacagggaggaatcaggaggtcacagtgtttataaatattccttgttaataagaagcctgtatactgaaagcatactttttttccccaatgctctatacgtctggatataaaaggaccagggcagagcaggaattgggtttttctttcaagtctgacataactgtaccccagaggggaatatgggcagcagctgtgtatcctgggagtaaggaaaaagctgttctaagatatgctacattgagtgctgatctgtgggtccatattacttccattcagtgttgtgtctttagaaacattgaggagagcatgtaaactattctcaccaaattctcactcatgaaaaattgcagtcatggtggcctttatatgtatttttaatgctgcaatctttattcatataccgtctcattatattcttgcacatatttcctttaaaaagtggcaaaaataaatgtgcacataaaataaaatgctgtaaaaaaatgctgtgctgtatataacgaagcctctggaaaagta

SEQ ID NO: 372002 - DNA, 913 bp, Homo Sapiens
catttacatctagtttcctatattctgagcatttgcaaacgtgcacccaatctttataacaatgatgtgagataggaactgttactgcccctgttttatttctgtgatacatgtggcattgaggcacagataccccaaggtcccacagcatatgaaaggggtggaccctagatatgaatttaggcaagcttctgtttacaacaattatttctgacagcatcaaaattcatgtacttaaccattatattcaactgccttaatcaaagtgtcaccctttgtactgaaagtgcttacaagtacagagcctcaggacttccagccacaattaaataatcctgaagaagaaaggtgagagctatatgactctgcattaattttttctgtcagatttcccaaagtacttaaaatgcatcgcatctcttataaagctttttcaaggggtgatggatttgatataatccttaaccaaagtaaggagaatataagagctattgtgggcataagtcttagtccacaaactcaaatgaagtagaaatattcttaagtgctccgtagcttaatttagtttctaatgcagagcttccctttgtggccctacactaggtttctgctctatccctagagtcttccacagtgtctggacattgggagggagaagggagatgggccatctgctctagtccctgtctcatacaagttgccaatgagatgactagttctgaatgcctcttcacgtcctcttagctttctgctactttgtgtcacctgtgagaaccaaaaaccttttgcaaggctgcatataatccgtctgcctggatctacctgtttggtgcttctccagtggtggtactcctgcatcagcccccagataataatatctctttcctccccctgtgaaaagtagtaccgagcc

SEQ ID NO: 372003 - DNA, 369 bp, Homo Sapiens
tgagccggtacctaaaaagtaacattcaaaatattcaacaattagagaaggataagcaatgatacatatattgcaataatgtggcattttcagagacataataataattgaaaacgagatatgcagctattatttcaactatataaaaatttggtttaaaagttagtgtgatacttcagaatattaactgggtttcctagatagtagaactatagatggctttttcttcttttttacaaatttgtttccaaattttcagtaatgagatttcttacttttattattagagaaaaacttgtttgaaactgttaattgttgttgcggtagacagcctctaaggtggcatccagtgaatccattgatacacat

SEQ ID NO: 372004 - DNA, 433 bp, Homo Sapiens
  misc_feature (359)..(371): n is a, c, g, or t
ggcatctgatgaggtaataggtatcaattctgaaccattatatgggaagtaatctttatagtgctactaattaggagagcccaggtattcctgaggaactataaccatagtcaaaatttgatataataaagtttagttattgtcttttggaagaattaggaaaactaaagaaataacttctctgacttttgagttatttcccattagccaaatagggcctaattgtaaataataaaaatgggcctgttttaattatttatcttgacatggattaaatatagtatttaatttccttaatgattaaatatagacagcaaatgtaatgctgtacttttcacatgatgcaattcatttggccnnnnnnnnnnnnnaaaaaaattaagacagttactttatttagaacaggaaagtggtgtaagcaactgagagtgtg

SEQ ID NO: 372005 - DNA, 221 bp, Homo Sapiens
ggcttcagagacatttaaatggctccctcaggcggcttgtgggaaggtctctctgggcacatttccagctttgctgctttactctggtgacacggttttagctaatttgaaaacatctgctagagtaacttgctgttttaattctactactggagaacatctgagtatgtgataggaggactggcactaaccctcattctaacctcatgattacacccttt

SEQ ID NO: 372006 - DNA, 599 bp, Homo Sapiens
  misc_feature (66)..(74): n is a, c, g, or t
gggattatgagctttgacagccatccactttatatgccattagatttcaggtatatgggtgagtgnnnnnnnnnaagcctaaggtcaaatatagcaaatgccaataaacaaggacaagcccatttttacgttagtacgtcattgccaaagattgagaataaaagcctgctatcaaaacagaggcactttcttcagcaatttctctgtgcttagtatatgtcctgtgacataaccttatctgatctttgtttaaaagcctttcttgattaattgatttctcattgatgtagtgttggcactgaagagtttatctttatttgtgggagtgtacactggcattaaataattaatttttatgagctctgccagaaaatgttgataaagttttattttggcataaatatatattcggtattttcttttccagtgggtattggaagatgaattttttcccgtttccttatatttattttaaaaaaactcaagggtctacaaaattatccatgtcaagaatacttcagaaattgtatattacctattgtgttattgtcttagttcttctttctcagttattgaaataagttctccctgtggaagta

SEQ ID NO: 372007 - DNA, 636 bp, Homo Sapiens
aagattggagtccagtcacataatctggtccaataattcctttcagtgactcttcttttagtctctttaataaagttgcataaatcattctttgtgaatcagaagggggtgtatacggagagtcttctaatgatctgttggtggactgtgtgcaagttctccatgcatccaattcctcagaaagatattcaatttttaaaggtactgacacctcccgacgttttaatagctgacttgtgtactcataaagtgctggaacaatgctttggtactgtcttctgatagccagtaatgcaccaatgtaaccacataatatcagcaactcatttcgagcttcagtacacgtatgcaagagtaatttttcagtacgaatatagctcagtaggtcaagaacagggtatatggtatccaaagtccagtctgagctactgatgtattctttaacaaagctaataccaataggaagggctttttcaggttcttgacttaacaagtaattttacagtttcaaatatattgtcatctgcacgggctgtctcagctaactgcatacattcttccactgtgggtagcttacactagaaaataattgatttgacaacaatgttactaaaattcaaacccctgtgaaaagta

SEQ ID NO: 372008 - DNA, 466 bp, Homo Sapiens
aaatggagtgcttgaatattgttctggaaatattttccatccattgagaaaggattgtctgtgatggtagcttgttaaaagctttgatgaagagattagggcagacagatgttatgaggtctaatgccttctcctataaaccttctgtgatgctcaggcacagggtatcaccagctatctcaagaaacagtgtgaaattaaattaacatgaaaaagtatcatgatatgagccacttttggggacagttgtatgcagggaggaggtaaggaaaggacaggaatactaagtaaacaaataacagggtatcacaaggtttgaaaggtcggaaatctgcactctagcatgctagggaccccacttgggttctctgacctttctttgagactcaattctctagtctgcagtgggcctaacaatactgacaccttcagaattgctgctcctgggagagctgtgtaacatagt

SEQ ID NO: 372009 - DNA, 519 bp, Homo Sapiens
gtacctactttccacagtggggtagagaagtggttatttgtgcccaggcagtgatgcagtagcatggtaaaccactgagaccccttttgctggggtcccgctcgtccccatgagaaggaggtgggccattctacctggcagtgctgtgcactggtttataggtagcttgtggcttccaagagtccgcactgtgtgaagaagaaactattgcagaagaaaaatgcctctacttttctcttggtgcctagctcagaaggaatggagtccattgtcattccaaatggcatttcctagaatctgggtcaccctgcaactccctgagcatgtgtggctctgagccctgccctcgtttgccagctgctgaggctgcgattgtgatgtggttctaggcaggttcggggtgagcaaagcccagggtgcgacagggtgatgcaagccacaggaggagtcaggacctaaggccgggctaaatcttgatgccagcattgtcttggttgcttcctttgcagccctgaagac

SEQ ID NO: 372010 - DNA, 530 bp, Homo Sapiens
tcgatcgagctcggtcctactttccacaggttatagcactatagttcctattagtttagttttgtaaattaaaaaaataaacagccaatacaatagtatcagatatagcatgaaagtaactttagaacaaaatcccacatttccatttatctccctaaatgaattttaccactttaaatactgacaatttgtttaaataaaatattaatttgagggtgttggaaacacagaaattattgctgaaaacatcacattaagtaactgagtttgtaataagtcccatataaaagccagctaacccaattttgcaaattgcttggaattgcagatgaagatattaacaattcttttattaaaggataaagtgaccataatacccaaggcactacgctgattaaggcaggtgcaatggaagataacccataagcttcataattccttggataatagatcagtgattcactgtaatgtgcttattaagcaaaatggaaaattgggtcaaattagacagtgagatggagttgtccata

SEQ ID NO: 372011 - DNA, 537 bp, Homo Sapiens
ggcaatactccatgtcggtcatcttgcataacagagaaccatgtgatactcttctccagatccagttcggctcctccctctacagaaacaagctggatcacataatcttcctctatctcaggtacctcatctggtagcaaatgaacatcaaagctagcttcactctctccatcagcaatggtgaaaaatccactggtggaaagaaagtcttcagtaatgtcaaactcactacttaattcccagtaaaccataatctctccaaaggtgcccttgactcttctgacaaagaaggtaatgagcaggggcccttccagagccagaggctctgaataagtcttcttagacaaagtttcaggagcaaactgaacaactccatttgggtcaccaaactcttgtatggttaatgtaacatctttagctctggagtctaatttagcttctcctttcacaagatgaagtttaataatgaatgtctcttcaacttcaatttcttcatgaggatagattgtcagaattatggttctcccctgtgaagta

SEQ ID NO: 372012 - DNA, 526 bp, Homo Sapiens
tttccacaggggccatgtaggtactgtaaataagtgcaggggtgaaggataataggaattggtggagaatatggcaagctggagaacacacactcacacacctcgtataaactgagtggctaccgcagtgggttatcactgtgcagtaattctggcccagggttgccagaactctcggactttcaagggaagctagaaatggggatattttaaatgtgagatctcccaagttttaaatgctggcaactaagcaacaaatttttaaaaagaccatttgtgttataaaataaaataaaaggcacatcataaggccatatacggcctgtgggttaggtttgcaatctcagagtaataaaagaaataacctgaaagtttaaagcagcatagactgtggccagcaagcctaggcgtttggggctcactcacctcggccagtgccgccatccttttattgaatccgatggcatgagaagaaagaacttagactctaaaaaagcgataactacaccctgggaaaagtacctgt

SEQ ID NO: 372013 - DNA, 518 bp, Homo Sapiens
  misc_feature (461)..(461): n is a, c, g, or t
  misc_feature (508)..(508): n is a, c, g, or t
tgaatggctcggtccaggtcagagaatcatgacagatatgcaaagagggataataaggagaaagcccttccctttcgagaagcccttccctttcacagcccttccctgcgattctgcagtgaaaagtgatgcccagagatccacacacagaacccttctaaccagccaggtcaagacttatcatcttatctcctctggcaggtcccctgtaatcaaaagagaggaagtgtctatctaaacaagacccttttgggtccttaggattcatgggcaaaaatcatcatgggcccccatcaggaaaaggaaaatcaggcaattaaaccaaggccaaggcaacttaaaatgtattaatgtggggacctggacttcatgttgggggagggcaggatttcaggacacttcacagatccaatcttggcaagtttttctctttcttttaaggtttgaggctggcttcaacnttttatgggaactgttggaaatttttactttaaccatttctttttcnaccccacata

SEQ ID NO: 372014 - DNA, 226 bp, Homo Sapiens
ccacagggacgtaaatgaggaggaaattcacacctgaaactattcccagtcctcaacattctctctcataatctaagcatttcttacctacttccttctctagaaaagctgataacaagactatgtccatagctgaaggtggatcttggtatatgggaaaatgcaatattctcatagaagcaggtcatttctattccctgtgaaaagtaggtaccgagctcgatcc

SEQ ID NO: 372015 - DNA, 715 bp, Homo Sapiens
  misc_feature (310)..(324): n is a, c, g, or t
tgtcgagctcggtacctacttttccacaggaagataaaagcaggcacgcacaacaggaatgctctgaaggagacagaaaggcagaagagagcaggaggaggaggtccaaggaactgaaaagcgccacaaggtaatgctaagaatcaccaggctccaaaatatccaagaatattgcaagtattgctcccaaataatcacaagcattgcctacagaacataggtcaaagtctttatatcataccaacctcccctcccaactcgtcctcacttttctgggttcatttgcagttacggacatatgtgttccttnnnnnnnnnnnnnnngcatcttgctatgcaaaaacccaccatttgtgaggaaaaatggaattagggcacaacactgaaaaatgttgtcagtgacacacacacacaaaacaatctagtgaaaatggtagtaaagctctacacacgagaaatggttaagaaatacaagtaactgtgatactttaccttgaaaaaggcctgaagcttgctctgtggaagcgggcctcagtcagtttacagattgtgagttattgagaagtggaggcaaagagagtgaatgctgtaacatcagatggacacaaatgtggctcacatacaagtcaactgaggtgactgatctatgtggaaggtgtgtatattacatggcttggttcagctggcctcactttttgcgttcacctaatatttc

SEQ ID NO: 372016 - DNA, 215 bp, Homo Sapiens
aaaaaaagagtcctttctttcctatcttgcagaatttgcctacatgagccctttctgagctccgagcattgtagcgacgtgcttttgtttctccttctaatttctcagtcattaagtgaattctccggcccaatgttctgaaatgtcaccagggtcacctgagtcaggaggagctgaagttcccatcaaatattactacctcctgtggaaaagta

SEQ ID NO: 372017 - DNA, 464 bp, Homo Sapiens
ttttccacaggcgtatttataggacttaggagcaaaggtaagttaagtgggaaagggtaccaaaagaacaatacataatgagacaaagcctcatggagtttaagggaccagtattatatatattttcaaggacaagattaatgcagggaaattctaggacagagaacagctaactcaaacttttcccctttgcttccctctcaaattgcttacatagagaactgtgccaatacgaaagaaataaaggatatgctggcgtaactgaagaacaggcaactaaaaagttttggaagtaaacaaatgatatatgtataaaattccacatgctgaaagcaacttgggaggagcaggaacttcttatacattttgtagtacgcgaaggcacgaagacacacaatacacaaccgaggacatcatgacaaaagatgtgcttaactaaaatcacatggaggaaggacgccctg

SEQ ID NO: 372018 - DNA, 658 bp, Homo Sapiens
ggggttttgactacactgatctgaagctctttcttcttcgttaaactttgctgggaattaagggatggaagaaaaggggagactgtggttcaccttcagtgatatgtaattgggaagaccaaacttgcacctctgaacaaggagagaccaagacgtgagaaaggaggactcaggaaggatttgaatgctgcgtcggatgtccctagactggagaacaggcacggcctacttggcaagaaagcagcttcagcaaagccacagaaatgaggctaagccaagagcagggaggacggccagccatttggggcggagaggacacatatgggagtagctggaaataaatctgacttatagatacttagtaagtggctgtataattctttttaaagaacactgctcacagacagtggcctggtggagagcgtgacttgaatcaataatttccaaccacgttgatgttccgagacattgtaattgttggtttgatttcacaacgttccactttccccctccgtatctctccaaagagctcatcagaacggcatctgaggcctgaacacatcaagttttccctttgtggggctttgcaaaggcttcttgagaatttccaactctaagataaaataatacttgggctgaaaatctaagcaccatgttt

SEQ ID NO: 372019 - DNA, 455 bp, Homo Sapiens
ctggtcctactttccacagggatctgagacaggttgtgaggactttgatacggagtcataaggttcaagccaagacatctgaatgggcgaaatgaacgtgaaagcagtacatgttcttcctcaaactttcttggaagggtcagaaaacagaagattgaaaaatacccaatatctaacatcgggccattgagttcgtccaaaaaaagcagaagagtatttctgaaccaaagaaacagaatagaaagagaggatgagaatggagacctgctggccgtgcatcagctatttaaaggaagaaagggctggagcccagagttaaccaaagcttagccttagaccaaacagggcttcccagcacaggtttccaaggaaccctttctgctccagtcctctacagtgagaagagcccagaataacactgtccaatggagctgacatgagcttcagcaccagaa

SEQ ID NO: 372020 - DNA, 492 bp, Homo Sapiens
actctagaggctcccgtatattccagcaggtatctgaaacaggtcgtgactgactaagactccggagtcataaggttcaagccaagacatctgaatgggcgaaatgaacgtgaaagcagtacatgttcttcctcaaactttcttggaagggtcagaaaacagaagattgaaaaatacccaatatctaacatcgggccattgagttcgtccaaaaaaagcagaagagtatttctgaaccaaagaaacagaatagaaagagaggatgagaatggagacctgctggccgtgcatcagctatttaaaggaagaaagggctggagcccagagttaaccaaagcttagccttagaccaaacagggcttcccagcacaggtttccaaggaaccctttctgctccagtcctctacagtgagaagagcccagaataacactgtccaatggagctgacatgagcttcagcaccagaaagggtgatatggacaccaaatattc

SEQ ID NO: 372021 - DNA, 604 bp, Homo Sapiens
tatcagattatctaaagccaggatataattttaatgcttattctttgattgctaccctctcgtttctggcctccacgaaagggatactgtcagaagcctgagagaatggtacttctctttcatggaggccatttaatttgacaaagggaaaacatgaaactgagaattctatttagagttctgcctggtggtagctgatcactgaaatggagatgccttttgccaaagccgacttttggctactcagacctaacttgcaacagggaaaagtaaccatgtatcttaaaaagccatgattcattctatatttctacctgcaccccatatcatcctcctgggtcttcattgttctctaaaacttccccttcaaagactttacagaggcaagttagttctttgtggacatggtctcaagtaattctttggacatatatagatgaacagtgcggaaagctgtctatgggttgaatatgctatacacattcgccaattgtaagtccagattccatccagtatagaggtacgttcatacttaatcaaagtagctagcctagtttctctacaaatggaaagaggagctgcttgtgtcctgtgaaagtaggta

SEQ ID NO: 372022 - DNA, 570 bp, Homo Sapiens
gtccacttctgagttgaaccttagtccctgctctccaccctcaccctccaccattcacctctaactcaagggaaatggctgcactgaggagccaaaccataattgagggcactggtacagatttggcctgattagcatcacagaaagtgtatcttgaattccagtccaatgtcctggagtcctctgaggctctctcacatgtgtctgtgaacacagtctggggctgccaccatgtgacatgtgccacttgccctcaatctccagatccacccaggcttctgagtcccactctcctcaccagaacgaaaatgctatgctatgccagcatttcctgttgtctctgtcaactctggaaagcccttgtggactgcagtgcaacttctcttgggttttgcttgacctcttattgtggctcatactcactagggtcaggaacatgcatccctggaggcaggtcagaggcccttctgactactcagtcctgattccatgctgggtcatagtccttgggtcaggcttgtatcccttgactctctattgcccaaaagtgactccttctccactgtgaaa

SEQ ID NO: 372023 - DNA, 236 bp, Homo Sapiens
tggagccataccactgacaagtatgtccaaaacttctttgatcctaagaattacctggacaattgcaaaatatatagattcccacaccctggctcagatgtactcacaatcaggcaagtttttaaaacccaggtttagtgggtttagtgagcactaccagccagccctgagcattaggaaattgaagtttttgtcctgattttgcttctgtctctcagactctgagcaatttcact

SEQ ID NO: 372024 - DNA, 525 bp, Homo Sapiens
  misc_feature (49)..(49): n is a, c, g, or t
agccccaaaaataagcttaaaataaaatgcaaaatgttttcatttcaanacatattttacttgagatggtgtgaaaattaaagacgggctggcactgtcaaggtgtttttatctaacatatctgaacagggcaggaggctccacccgaagcatgctgctgaggggaacgacaccacgcagcctcccggcccagggagagctctcgggaatgtgctccaaacgacagctccctggagatcatgtcttgatttctttctcttttcaaggtgctatttcttggcaccagcatcatgagaaaatttaactctcacctatcccagctgagcacctataccctgaaaaaaggaaaggagtcaatcttttaacatctgcacagaaaatgggaaggaaactttaaccggagacacacaagccggcatgcttgagaaatgtatcagcatcttgagtgcagcagagcgtcctctgcccccgccgccccgtctttaagcaggcacttgacgatgaggtgatggcccgggaaaagta

SEQ ID NO: 372025 - DNA, 716 bp, Homo Sapiens
tactttcacaggggagattagcagtagatcacactcattctgctccaagttgactgatggagaaaatctagctaagagagcaaggcttacagctgtcactgacaagccttctgcttcctttcattgcccagcctctaattcctgagattctgtgaaacttttgcctgcatagatgctatgcaaagatggaaaatttaaatttttagtgttcaggtatagtcattttctgctctgtggaaagtcatacaggagaactgatttgtgaagagaagaaaatcaggattaaacatgtgtaggctgttgtaaattgtaataatgaaactgcaacatattgtcaccttctctcctctccccttctcctttgcactcttaaggggtcccactctcagatacacagcctgtttctcctgttgcctgcctcccactggcggatgattaataactcacaaagacattgtaaatgaatttagtttactacacataaaataacttttcctgtagataagtagttgaaaacttttgatcaggaattttcttattttgatagctttaattccatttctccgtatctttgcaactctcactgaatggtgatcagtgagattggtctagtgaaccagatatatagaggatcccatgtatctgcccagaaagtagggttctgatcttctgggtgaggcaattccaagtggtctttggagccactgtggtaagta

SEQ ID NO: 372026 - DNA, 552 bp, Homo Sapiens
tactttccacaggggattgccacagctgctagtgggctgacctatgtccttaagcgaatgccactgccttggcacaagcaaagagttaggtgcatgtggtggacaggtggcctgcgctctgttcgccagccctcctgctgggatctagacccagatgtaaacagtagagggagtgccccttccacttctgccttccagaggcccagtctagagtggacgaggattgtgatttatgactttgattaccctgcattgaggaattatctagggctgtaggattccaaaggatcctgagcaggaacaggattctttcttccagaccagagctcccagggtcaggtctgttctgttactgttgaatggggcctggagcaagtagatttgtcatgtgctttctcacaggaatagataaagtgggccaaatggtgagaaaagcacagcagagctggctgagttatgatgtgggtgggtttgtcccctaggatgatgtgattttttcattcttagaaggttttcacctgcatagtatagaaccaagtccccagctggaga

SEQ ID NO: 372027 - DNA, 115 bp, Homo Sapiens
aaattaccagcggtcgatatagcacagcgaacctagatcttttctttgttgtttttatgtgcaggaaattgctccactagaaataaaccttcttttccttacctgtggaaaagta

SEQ ID NO: 372028 - DNA, 382 bp, Homo Sapiens
tatagaaaacaaaaatacagatctatttacactagttgccacaaccactacaacaaatggtgtatatgcacaatccccacggagcagccccttttaaatgagccactacatgactcaaatagtcataacataacaaacaaaactaacgacaattccaagtatgacgttcttggttcaactcacatctgttgagcatcttcaaaatacagagctcttagttacatttgtaacaaacctggttgtagatttatttcatctttgttgtttaaagttggatgtgaccacccctttccctcaaagggtgagatacaaagcacattaaaagtcactgtaaaactgaagttacatcctaacctttcccttttcacttaatttccagtct

SEQ ID NO: 372029 - DNA, 473 bp, Homo Sapiens
tcaaggatagaagtcagaagatcggacaaacagtggtaaaactgtaattatcctaagccagaaaaaggtgaattgttttaaaatgatagttatttatggtaaattgtgacttatcctgggtaaacagcagcatggctctggtcttgagacaacaagccacatgcaaatagctataagcaagattatcagaaaacctgagtatttcattgttttgtcattaatctcaccatggatctcattctactttccctttagggttagcttccacaggcattagaaaatacagaacctgttgagggccaaaaaagtgatataaaaagattaataataataatacctttggaaaaaatcaaaagaagtgaggtttcccagtctaaaatgagaagaataaaggttaatgtagtaaacatgttcatgtattgaatattttacttagagaaaagtttgcagtcaccatccccctgtgaaaagta

SEQ ID NO: 372030 - DNA, 275 bp, Homo Sapiens
tactttatccacaggcagagtctggggaaggagggagagagagagaggagggttcctaatagtacggtgagaaacttaaaaagacactaaactttctctgcttccctacgctggccttaaagcgcaggtaattccactgctctgctcttcacatttcaaacaacctttaccatatgcatactaggatgaacgccataacacattaccactgaacttgactaaaaacaacattgacgcacggcgcccaacttactacaaatcgactgcgacacaca

SEQ ID NO: 372031 - DNA, 514 bp, Homo Sapiens
  misc_feature (440)..(453): n is a, c, g, or t
tacttttcacaggataagtcatgagtccagttagtgtaaaatactcgtcatgggagtaggattatgggtttataaaggcaagagtaacctgaacatttataagtaaacatattcaaagatattctggcctattttaattccaaattaggcatgtttcacaaactttttaacaaatttttaagtagtcataaaatttcacttcccagttcttatcactttttaattttaatttctttggattaatgtcatcattaaaataggaatacatattggatttttctgactaaaaacctttaaaagaattttttacagaattactgtaagacacaatttctagactctattttataaaattttgctgatttaatcagtgattatgaaattaaagtgacaaaaataagcattacattttactgtattatagtagcaccagtcaaaannnnnnnnnnnnnnaagtggccttatggagacattggcagcatcagcccgggggaaaagtagggtaccgagctcg

SEQ ID NO: 372032 - DNA, 510 bp, Homo Sapiens
tcagggagcgtcctgggggagagtgcccagagttcaagaacctgggtttcaagtccagcttcattatttataacccgcgtgaccttgagcaagtaggttaacttgcccagcctctaactcctcacctataaatggaaaagatcggcaatagcattggcattgcctgggcagtgagccctcagcaccctcccaaagtctgcaagggtgccacactcctggtcctccttcccagcaggaaactggagtaagttgaccagtgaggggtcaagcatcttccctccaagggcacactctcaagatattgaggcatctgcttgaatccttctcttttcctcaaccttttggaaagtcatgctgactctacggatcccaccatcccttgtcactaccataaggtggcagtgtgttttctggctcctgaaaaaactaacactgattccatagcatatccgagtggctgatgaaactgctgaaaagccaatacccctgtgaaaacggagccagccatca

SEQ ID NO: 372033 - DNA, 552 bp, Homo Sapiens
tgagccggtacctacttttcacagggaaagggatcaacacctgtgacacacaaattatgtcttattctgagccaggagaattaattaattaatttctaaaaaacaataacaaatgctgtgagaattaaatgctttcaggaatgctgtcctaaaaatggtcaaaatctaaggaaggattatttgtaatctaaaattcaggagataaaaccaaacatacaaataaataatccagaaagaatcacaggcaaattatgtcaacctaaaaagattcaaaaagccgtaaggtctagaagcctgtgaattttatttttaatggctcaatggagagaaatgttatctcttcttggtaattgattcctgtctccagaaagtcagaagcatcatttttatcaaacttgtcataacattatccacttaaaaaaatgtgaggtcaataagaaagggagatgggttcactcccaagccaatgcaattaaagcaacaacaaaacagtaagctttcctatcctggacatttaaccccattaagaacaaaaactactcctgtggaaaa

SEQ ID NO: 372034 - DNA, 345 bp, Homo Sapiens
aacctacaaaaactgcttacaaacagaatctatctatggggaaaaaaagcaaaataaacaacacaacaataaaagcttttattaatttgtgtgatacttatctgaatttgactatgctatattatgtatgacttatgccaacacatccaaccatctgtcccctcctaccaaccattaacaagctgccattaaataaaatctgcagtacgtgaagagtcaaaattattgaattcactgttcaagtaaagctttatcagatccatagtaatccaagcaatatttatatgtctgaattgctaaacaagcaaaatatgggccaggtaggactgaacccctgtggaaaag

SEQ ID NO: 372035 - DNA, 439 bp, Homo Sapiens
tatttcacaggatgctggtgagtagatatgtgaggcatgcgggcattcaggtgctcatcaccaactggaccacagcccaggagcacgacagcacccagaaactcttttaacctcacaggctcaaatccatgaaacatttcccaactttaccccagatcatcacctaatggtagagctatgtagaccacacagtggctccacctctaattacagcttacttcacctgttttatctgaggatcagaagctggatcgggggcacagccagtgcaaacagaggtggaagatgggccctggagccttgaccaagaccctctgcttgtaggtctcagggttcctaccatgttccttctaacactaacttgcagtcagaagaacacacttcagtctacaggttggcctgctttctctcctttccatggctttttccccctgtggaa

SEQ ID NO: 372036 - DNA, 479 bp, Homo Sapiens
tacttttcacagggcaggactaacaaaatggatggggtgaaaaatgggaacagttagaaggattcagtgtttcccaataagatttaccagatgcatgaggttataactgaacaaaaaggaatacaaagagaacaagctggaggaaaagaaaaacttattttttgacagattgagtctgatgttgcctaaagcacatcagcatcagggtagttatatcccctgggctggtaaaaatcgggcccaaagtttaggaaaatgaggtcagggttggaaccctgggaggtgacgttatcatacaaggaaagcaaacagtgaaagggctgagaaggtaccaccaacatttaagagaaagaaagaagaaataaaatgaaaatggaagaggagctctgcaacatcacatactgagaaacaggtacagtgatggagctggaactagaaaaaagtaatagccttagcaaaagtcacccctgtgaaaagta

SEQ ID NO: 372037 - DNA, 460 bp, Homo Sapiens
aggagtgtaacagaaaagttggcacagctgattgctacctgtcctccttccaagtcttccaagacaaaaccgaagaagttaggaactggcactacagcaggattggttagcaaggatttgatcaggaaagcaggtgttggctctgtagctggaataatacataaggacttaataaaaaagccaaccatcagcacagcagttggattggtaactaaagatcctgggaaaaagccagtgtttaatgcagcagtaggattggtcaataaggactctgtgaaaaaactgggaactggcactacagcggtattcattaataaaaacttaggcaaaaagccaggaactatcactacagtaggactgctaagcaaagattcaggaaagaagctaggaattggtattgttccaggtttagtgcataaagagtctggcaagaagttaggacttggcactgtggttggac

SEQ ID NO: 372038 - DNA, 688 bp, Homo Sapiens
accctacttttccacaggaagatgagaagcaggataacgatctgaatgacatatttcaaagagtacgcaggctgcagctgcggggtggagaatggattgtgtgagtctcctctttctcccccgtctttcctttgagaatatcacaggaagggcagcaaagcgctcaccctcacctttcccttactcagtgagactctggactgtggactctcatgatagagataaacttttattttctgtcttgtttaggccactgttaggctgaacctcttttatcctttgacctaattatcaatgtctgatcctagttaataaagctctcacttttagctgctcataaaagctcaaactctgggaaccactagttcataccctccttggcctttggcatattctattcctccttttgtctctaatgttttgcttgcatccttggcacaaaacacccacccaatacctaggaggtgttccataaacactgaagaggaggaggaggatgcagcgcctagaggtgtcttgttgttttcagaccttgttagtcatcaggtgtcagaagaaatctgtaatgtggatttcatcatgcaaaatggctcacgccttgccgagtggcactcagcccaggagtgcgaacggggagaggagatttcagccagaccctgatctcttgttacctcacctgggaaaagta

SEQ ID NO: 372039 - DNA, 635 bp, Homo Sapiens
tctcctctcccatcctttctcagtagatgacttcgattcccattgcactaaaagactagaagctatcggaggaaagtttctgctgagctactccttgccacatctcagctccccgtgtctgtgcctgtggctgctccataccccctcgctatggaagagctaccccagatcttacctcgggtcacctctcgacctgcagaacggacccacccacgtgcttcctcagggtcaaaaccccaataattcttccctcttgttctgaatattcaaaccttccctgttgaccacatgatccccatcaccccatggtgaggccagcattccctccatctttcagaggaatatgcttaccttcagctacagacttaaaaggtccttgtcatttcctcataagcacacatgataagtgagcagagagaacctcctgcctatttctttcttctttccggagacagctcagctgaatgcccggtccattccctgaaccacagaggttgaacgcagaaaccctggtctagacttccctgcaatgtccagtctgctggctaagggctgtttggcttttgggaattcaccaaaattctctgcatcttagcttcctgtggaaagtggggatctctaagcgactgagggtg

SEQ ID NO: 372040 - DNA, 435 bp, Homo Sapiens
gcaggtggctaagtacaatcagaacaagtaggtatcataagatttagtccagagtcaatttgagaagaaattactttagtgatatgaaatgaaaccatgctatttagtcagaatacttctgagagtatcccctgtccaagcatttgctgaattcctatctactaattttcaggtggaacagtatggttgcagagagtccatttggacatagatacactttcatgcattcatgtctttaacaataatttgtggccctactgtgtttgttcactaactcctttgaacctaccacacaagctatatgtgtattttccttgtaatttgggaggtccaatgcttcattaagctcacatgcctgaaactaatgaagaaaatagctcgttaaccagctagtataaaagtagccaccaaatcaagtcaatcacctgccttaaa

SEQ ID NO: 372041 - DNA, 677 bp, Homo Sapiens
cggccctacttaccacagggggtgtgtgaatatcctgatggaaccaagtctttgaaactgggagactttgggcttgcgactgtggtagaaggccctttatacacagtctgtggcacacccacttatgtggctccagaaatcattgctgaaactggctatggcctgaaggtggacatttgggcagctggtgtgatcacatacatacttctctgtggattcccaccattccgaagtgagaacaatctccaggaagatctcttcgaccagatcttggctgggaagctggagtttccggccccctactgggataacatcacggactctgccaaggaattaatcagtcaaatgcttcaggtaaatgttgaagctcggtgtaccgcgggacaaatcctgagtcacccctgggtgtcagatgatgcctcccaggagaataacatgcaagctgaggtgacaggtaaactaaaacagcactttaataatgcgctccccaaacagaacagcactaccaccggggtctccgtcatcatgaacacggctctagataaggaggggcagatttctctgcagcaagcactgtcaagacagcggcaggcctgggatggagcccatctctccagttcctccctcagtggaggagatccctgtgcctggaagcagtcccgcccccacctctccag

SEQ ID NO: 372042 - DNA, 664 bp, Homo Sapiens
  misc_feature (182)..(224): n is a, c, g, or t
ggaggatggcagacatggaaactattatctctgattaagcagcataagttccacaagagatatcatcattgatagggagaatagacttcatcagagtgctctttggcattggggcagtggggctctgaggaacacctttacttggaccagaccttgaagtaatggtgggatttccaggacannnnnnnnnnnnnnnnnnnnnnnnnnnnnnnnnnnnnnnnnnnaagcacacagtcttggcaatatagtgtccaggcaacactcgaaagtaaagtggctgaaggtgagattggaaagaaaggaaaatcattttatttgaacccctactatgtgctgggccatgtgagacactttacaaacatgactctctgattcttcctgtaagccatatcttacaggcatgaaaaccagggctccaagaggtcaaaagggtcacatagacagatgcgtacaaagctgaagccaaacacagctgtgcagctccagggcgtatgcacctcacatcaggcacacaaatgcgaaggaggctggggcacagaaatccaaaaaagaaagttaacaagagcaagatttttatatttatatcttctaataagccttcatccatcaacaatttttttaaatgctgctttaaggttcacttgctttcattcataaactggaa

SEQ ID NO: 372043 - DNA, 457 bp, Homo Sapiens
ggacctacttttcacagggcaacttaaatgattttcaatcaataacttcatctaagagggatgttgaagcaaaatatcatactcagatactgaagaagcgcagaatttttggttgcttcctcccttgtcaagtcagtcagctgatgctttctcaagattctcacacgtggctttgatacaggatttgaatgagtctttttctgagccagtgatacaagaaatatattgtggaagtgtcttgtcttaattctgcaatcgcttctgtacatgtttgaagtcctagaccccaggaggagagacagtcaaattagccaaaggtaatttgtgaagactggccatgggaggtggtggctaaaagtcctccggcccctgctgtctgagcatccccacagaaagtcctgggccgcactgacagctgagaaagaacatctcagggcttggatcccctgtggaaaag

SEQ ID NO: 372044 - DNA, 195 bp, Homo Sapiens
gggctaggacccacttcactgctcaaggacctctggcctgcttgttctgtctcattctcacctctcttccacccaagtgtcagaagtggtagcataaccattgggaagagtaggcctgactccttcattatcggtctctcagtggctctccatgtttctgtgtgtctctgtctttcttgttcacttctgaggcag

SEQ ID NO: 372045 - DNA, 553 bp, Homo Sapiens
gaagagatcattatatactctacctaccagcacccctgggacagcaaagatggacaacaggccatggaccgagagttgtaaggagttctaggaaggaactcattagtatatggggcaataaattaataaataccctaccacccagccctcctgggagagaaaacaatagaatgacagagaaaggcaacaggatgtggtctgagagttcacacagggacctggtaatcttgaaattataagaatctacagaaaatacgctacttgaactttctggataaattagatggcagtgaaataaaaacactctccagaacttgggagaccaagcactggtgtgcaatgaccatcactgccatgtggatggaacatgtgcaggatgctgggccaacacctgatttcacaccaacaaatcattcctgccagatgagtggattcgcataaataaaacctggagaaagaactgcctcaaagccagatgtcccaggccttacacacttgtcaagaaccacccacagatatgtactctaggattaccccctgtgaaaagtatgta

SEQ ID NO: 372046 - DNA, 694 bp, Homo Sapiens
ccgacgtacagttgcggagggcattgctttggacccagatatggaatcttttctggacagactgggatgcaaattttcctcgcattgaatctgcctctatgagtggtgctgggagaaaaaccatctataaagacatgaaaactgggggcttggcctaatggactaactgtggaccactttgagaaaaggatagtgtggacagacgccaggtcagatgctatttattcagccctctatgatggaacaaacatgatagaaatcatccgaggtcatgaatacctttcccatccctttgctgtgtctctatatgggagtgaagtctactggacagactggaggaccaacacattgtccaaagccaataagtggacagggcagaatgtcagtgtgattcagaaaaccagtgcacagccatttgaccttcagatataccatcccagtcgccagccacaggctcccaatccttgtgcagctaatgatggcaaaggcccctgctctcacatgtgtctaatcaatcacaataggagtgctgcctgtgcgtgcccccacttgatgaagctttcttcagacaagaagacctgctatgaaatgaaaaaatttcttctttatgcaagacgttctgaaatcagaggagtggatattgacaatccatactttaacttcatcacggcatttacagtcccgtggaaaagta

SEQ ID NO: 372047 - DNA, 455 bp, Homo Sapiens
tattttcacaggggttacccttcaagttatcctgaaagacacacattgacatacgcttttatttaactctactaatctttttactattttctcgttcccttgtgttatgtatctcttcctttcactatcaaggtccatttcatctcccccaaagcaaatttttacatacggtggctaatataggtattggtggtaaatgtggctgatctggtaacgtgctacttcccctgatgaaacccagagcagtttcagaagcctcaaattctgagatctccctaagttcaaaatagatggctggtagaaaagcattgacattaaccatgaaaatatatattggttgtattgtccccacttctatagacatatattacttttcaaaatgtcagctcaaggaccagaaattttttctgaggagaaagagaaagcattgcctttacaaaagtttccttgtaaag

SEQ ID NO: 372048 - DNA, 526 bp, Homo Sapiens
tacttcccacagggggaggaaggtcagtgttagctgcaaagttacagaaaacgagcagcacattaggaaatgataaacataaccttgcaaagactcgcttttacaaggcatcaagggttcaggcctataaaatgtggtgcatggtgtcaaaggatatgtgcttttaaaagaaacctggaaatgtatttaaacatttgcacatggaagcagatgggactaaaaaaggaaactacgttcttcagattacattgcctccaagtctgggcagcaatttaaaacaaaggcacgggtttagaaggagatttaatatcaatatggggatctttggtacagacacacacacatctgtgttgacaggaccaaaaggaatccggatatcagaacgtccaaataaaagagaaaaaagtcttcatgagatgaaggcctgcctggagaagtctgatatggtggggaaaattcccttcccctaaactaagtcgctagaaaagacaattgaagtgccctgtgaaaaagtacctgtggaaaa

SEQ ID NO: 372049 - DNA, 363 bp, Homo Sapiens
  misc_feature (154)..(163): n is a, c, g, or t
ggcgcagctcacacagtaatgatatgacaggtggcggagctcacacagtaatgactgggggcggggctcacactagtaatgctttggcaggggtgggagttcatgctagtattctttggcctggggcggggctcgaactgtaatactctgtcannnnnnnnnnctcacacagtaatgctctggcagggggcggagctcacacagtaatgctctggcagggggcggagcgcacacagtaatgctctgacagggggcggagctcacacagtaatgctctggaagggggcggagctcacagagaaatgctctggcaggtggcggagctcacacagtaatgctctgagaagggggcggagctcacag

SEQ ID NO: 372050 - DNA, 523 bp, Homo Sapiens
cttttccacagggcaaacaaatcagctctgttgcctgggcaacacgtttctttcctgtgttcatccagttccagataggggtccattttaaccacaagtaaagctatgtagattatatcccctaatgaatgatagagattttatcaaatgtgagtaatgaaaattgcctctaggagaaattgctctttatagagcaattgagtttagggttgagatgcaggattacatgaacataatctctccatacctattgaacattcattaggaaacattctctgagcacataagtaatgtgtgatgtatacagaaagatacagatccatgctctccaagaattcatggtaagagggggagatgagcaagaaaataaaaaggggaaagctgataatactttctcataagaaaatgataagtattctgttttcctattacaacgggccacagtggtatgagacagttaattctcatctctagcatgtggtctactcaccaagccatgtctatatatacctgtggaaaagta

SEQ ID NO: 372051 - DNA, 424 bp, Homo Sapiens
ggtcggtacctgacttgccacaggaaaataataaaagaatatacaaaaagtagatactgctaagagagcgttctgtgtgttctgagattctgtattcatctatttggcatccattagtctaatcacagggtcaaactcacgcacagccaaagctgtttccgtctccccagccacccagagcccattctctgaaccacctccttatctaactctcacacacagagccaatatgtctcctaccctaaatcacccagagctaggaaccagacaacgagggacggccctctgccccagggccccccagaattatccaaaatagccaatcctcagatgtttccctggccctgtctggcctttcccacagaagcccaacaaaggctctggcctgggcgttcccccagctcctttctgccctgtggaaaag

SEQ ID NO: 372052 - DNA, 513 bp, Homo Sapiens
aaccgcgtgtagcggtcgactctaaggacccctgacgtatccacaggctaggaaggaatcagggaacttataatcatggtggaaagggaaacaagcatgtccttcttcacgtggtggcaagaagaagaatgagagcagagcgaagggggaagccccttataaaaccatcagatctcatgagaacttactatcatgcgaatagcgtggaggaaatccctgattacctcccactgggtccctcccacaacatgtggagattatgggtactacaattcaatatgagattcgggtggggacatagccaaacaacatcaaccggaatcttgtattgcaagtttttattgaattttaaatcatgaagctaaacacttctttgataaacatctagaaggtgagaagtagctcaactctggagtaaggctaaactgggtctgaatatgttttatattctctggactttgaaatatgtctcttgataataaactagttagtctccctgtgaaaagtacgacc

SEQ ID NO: 372053 - DNA, 410 bp, Homo Sapiens
atcattgataaaatcatagtaaacgtaaccattcatgattcattctgtggcaagatactcaataaagcttaattatgtttaccaccttgaactagaacaagaaaagaaactgatatatggtagacagattttcaatgcacaagggtataacttttaaataaacttctgtctgcttcattttcccctaagaaattatatgaacaacgttaaattgtgatgatgcaaattgttaggaattttaaatatagcatttttacctatcagtattactttattatttttgtctcctagtagcactaaacgtgttggcctatagaaaataaaaggatgacaacccgtactttcagtaaacagttaaagagcaaattttagttataatatatttatgggccaggtaaagtggctcacac

SEQ ID NO: 372054 - DNA, 555 bp, Homo Sapiens
  misc_feature (334)..(498): n is a, c, g, or t
gcagggacccacagtactggggtttaaccagtattcctgttgcttagaggcactcaatcttgatggaagcattatttgcattatcggttactccaaaaccactactggcccccaaagttggtattgtctctgtttgttaggagcttgttgttgttgttccctgccacattgatgaggtggatacatattcagaaggtgatgctttaaaaacacgaggaaatggaaaatcctgcattgatgccttcatttaagggggtgcaggtaatgtgttgatgaagcgtgtgagctttggaatcagatgacctggttttgaatcctgatttccaggctttgnnnnnnnnnnnnnnnnnnnnnnnnnnnnnnnnnnnnnnnnnnnnnnnnnnnnnnnnnnnnnnnnnnnnnnnnnnnnnnnnnnnnnnnnnnnnnnnnnnnnnnnnnnnnnnnnnnnnnnnnnnnnnnnnnnnnnnnnnnnnnnnnnnnnnnnnnnnnnnnnnnnnnaatcattcctccttgaatgaaagtggttccagaaacagagccaaagagacactcaga

SEQ ID NO: 372055 - DNA, 461 bp, Homo Sapiens
gctcatactttcacagggagtgaaacgacgacctgacttgtatctcaaaggaacattctgactgggatggacatagggtagtagaagcaggaaagctggttgagaggctattttataaacgatggtagtttttaccaaggtggtagcacaggaggtagtgaagggtagtcaggtcatgagtatattttgaaagtagagctaactggattcactgataaatcaagagatacatcaagaagactccaaggttttagtctgggcaactggacagttcaaattactgaactgtgaaacactagggactacagaaatcaaaacttgggttttggatttggtacctttgagatatttattactggatggctgaatactgcccacccttcccaaacaatgttcaggtatccaggacatgagacttcagtatcaagaacatattaatgtccctgtggaaaagtaaaagt

SEQ ID NO: 372056 - DNA, 622 bp, Homo Sapiens
aggaacatattgcaggagatgtacatcaaacttttgaacacggacatggccctgcccagagaatatcaatggtgctagtgaccacttcttgactcatggaattactcaacatttttctcaccactgtcagcatgagtctttaaatagtggaaggcccagatggaggagaggaaatgaccacttccaaatgcaaaagcagaaattcaaagctgtctgctttcctatgaatatagaattactacctccagaaacctagaaaaagcaggggaaggaccaggatgcagcagtttatcctgggagtagtaaatgtactctaatgcagtggacacagtggactgtacagccaggggaagagagtgggtcagagcattctgagaactggccttggggctttcacctcttatatcaattgcacatagagaaatgggcagcgacagatggaggtgactgggaatagtacaacgtaagtgggtgggatcattgcacctgaagctgagcaagtccctgactgatgtgtagagtcactaagtacagaacaattggagggtaaaggcggcacaggcaaagcccctccttcaggtgccatcccaggatcagtcaagctgaagcctgtggaaaagta

SEQ ID NO: 372057 - DNA, 533 bp, Homo Sapiens
tacttttccacaggagaaaaacgttggtccctataaatgagagtcattttgatgacatcgtaatattcatgaggaaacaatgtagtatgtctcctttgatactctctgatttcagcaaaaggtgtataagtttagttcaggttttctctctatacaccatacatacgtgtgcacatgggcactcacacatccacacatgtgtgcatacacatatacagtcttcatagagatagatcattccacccccggccccatttgaaagaatctcactgtccttataagctacttaagagaattctactaccacagccttactatttttagaaagagaaatatgcagtgttaccagttttaacagttgttatataatcccagttctctgcatgattctaggcactggaagtttatattgttatttattcaacaaatatttatcgagtacttgtgttctagatattagaaattttaaaaagtgcggtgaacatcaacttacaatgtagtgagcagtgggaattaaataaaacagttgcatt

SEQ ID NO: 372058 - DNA, 879 bp, Homo Sapiens
  misc_feature (442)..(442): n is a, c, g, or t
  misc_feature (466)..(466): n is a, c, g, or t
  misc_feature (667)..(687): n is a, c, g, or t
ttctacttgagtctgatgctgcaatcaatgagaaattttcatgtattaaggctagaggatacagtatatcacattcaactgtttccaataaggttatttattgctattcaattcacatttcccttaggttttggcaagattatagaatttattcctcctacatggtagccagccaagtaaatcacattgcatacttccattgtcacacatttttcttacccagcatcagtggctttatttctctgtccctcagagtatcttaaaatttagctgtataagctgcccttttgtaattctgcaatttagtattattgcttccttccaaatattttcttaataaaaaatgttgaaaagaaaaggagcgcaagtcaggtggttttcaacaataaaaccagagacgaggtgatatatattagggacaaaacatttttccattgtagangaaaaagtaccagttggatattgnaaacaaaaaacaatactatctctgctaacagggtctcacagcacttcattataaatagagaagcataaagagcagcattaaagcagcctagtggattcccctaaagacagtcatggtgaagaaggctcatccctactgtttcatgccaagcattctcagcgagaagtccaaactcagattatcctgctctataactcaggnnnnnnnnnnnnnnnnnnnnnctttaactgactttggttggacaaaagactcccctgcctccaccacccatttgtcttttacacctttccaatgaaaaaaaatcttggtgatacataataccttactaactatattatactgttgctgtattatattgtactatctatagtactattatactattaacataccttactactatgtaatacaat

SEQ ID NO: 372059 - DNA, 420 bp, Homo Sapiens
  misc_feature (406)..(406): n is a, c, g, or t
gaacacacatggccagagtaggagagagacagagagcagggaggtttaaacaatcagatctcatgagaactcactaactatatagtagcaaggggagatggggctaaaccattcatgagaactccactcctatgatccaatcacgttccaccaggcccctcctccaacactggggattacaattaaatgtaagatttgggcagggacacaaacacaaaccatatcagagtatgttgaaccatccttgcatccctgggatgaatcccacttgattacaatgaatgatcttttaaatatgtagttgaatttggtttaaggattttgcatctctgttcaaagatactggcctgtagttttctttttttgttgcgtctttgtctggttttggtaccagggaaatactggncctgtggaaaagta

SEQ ID NO: 372060 - DNA, 153 bp, Homo Sapiens
agagaacagtattggaacaggcatacctttcttttagtttccggtgtcagcagcaatccttagttttgtttggcttataggcacattcctccagtatctgcccctgtcatcatgcgtgttctccctctgtatctctgcgtccctttctccttc

SEQ ID NO: 372061 - DNA, 607 bp, Homo Sapiens
aaggaactctcctctgggggacatgtgcactgtctgtttggcctattatgagctctcctgtgactttggcacagatacaggactcaaaggaaccatggggagttgaggtgtggtaccatcacccagagcaaaagcccttggtggctgcattgttatccagggatgaaagattagcctgtattttgcctgagggatatgatttacctctgttagtacctgtacctgctctgtcatttcaactgtaggttaacatgctctaactgcatttggactgggcccacacctacgctgaggtgaccaagtttccatctgctggatccgcactgcccttccaacagcagctgcagatggcttgccttggcacatacattcagtatctgcagagaactggacatggctggagacctggggtcccatggccgatgtctgtgaggcaacatggcaagctttgaaaaaggatgctgtaagacccacagcacacccgccccctggctggcctgtagtgtttatgatgggtggggctggctagcgggggaacatgcagtaccccaagcccaggtactgtggtacatagagccacattggggcaacacccctgtgaaaagta

SEQ ID NO: 372062 - DNA, 338 bp, Homo Sapiens
  misc_feature (209)..(269): n is a, c, g, or t
ttgcaggggttcccaccaatttggaaggcattgaagcttgcaccttttcatgtacagcattaaaattttacctctctctgggatttaccagcttaagagtccaactcacttccagtgcccaaaagggcacccaccagaaattccagtaaatcctcatttgaggaagctctcccttgtttactctgttaccacattggggaaatttttannnnnnnnnnnnnnnnnnnnnnnnnnnnnnnnnnnnnnnnnnnnnnnnnnnnnnnnnnnnnctggtagactaggtttatttatctgagcaataacttctatgttggtttcagtggctgggaattaaaaca

SEQ ID NO: 372063 - DNA, 697 bp, Homo Sapiens
  misc_feature (327)..(369): n is a, c, g, or t
tatgttaggacgaaggatttattccacaatataaactgtaacatttgatacaagctaccaaaaaataggggagaaaggaagggacagggagaaagccaaaatacagctgtggcaattacttacagagaagtctcttttctacatcactagttcatcagtgacactagaaactagacatttgtgttctgtacatcaatcaatcgctaaagcaccaacacactgtttggaagtttgttttgttttgttttaattccagccactgaaaccaacatagaagttattgctcagataaataaacctagtctaccaggaagaagaaaagtggannnnnnnnnnnnnnnnnnnnnnnnnnnnnnnnnnnnnnnnnnncttaaaaatttccccaatgtggtaacagagtaaacaagggagagcttcctcaaatgaggatttactggaatttctggtgggtgcccttttgggcactggaagtgagttggactcttaagctggtaaatcccagagagaggtaaaattttaatgctgtacatgaaaaggtgcaagcttcaatgccttccaaattggtgggaacccctgcaaaaaaaacagtcagcttttcaaaccacaacaaccacaaatagctcttaaggaaaaaatacaaaaagtgtcaacaaattttaataagataatttaatcttattcttcaaaagaatcctga

SEQ ID NO: 372064 - DNA, 424 bp, Homo Sapiens
tactttccacaggggctactcgccctctgccggtaccagcggccagaagacctttgactttacagtaacacacacagttcatattctctcctttctcaaagccaaacttctcatctggactcagtatataattctctcctcgttctatgtcccagaatctgagggcagcctccccgacggccatcacgagaaggctgccttcaatcaaagcgatgtctgcccggcggccggttttcccgctcagcttgaccttcatcacttcttctgctttgccctcaggaggcaccgtgtacagggacagccggaggttctctgtgaccaccaccagtgcctccctcttctccatgtagaacagcatctgaatcgtgctgtctgcggacaccacctgagtggtcttgcccttctcatccacccctgtggaaaa

SEQ ID NO: 372065 - DNA, 425 bp, Homo Sapiens
gttcacagggggtgggtggcaagaaagacatatgctgaaaagtacaaagtgactcaaatgcacgtctgttccaagattctttgttatttagattcctgcattttcttcctgcatcttactcaacacccccatcactcctgcaaagtattacctgacttttagagtctatagtaagagccccacatgttttccatgaataaggctagttttatagtgagctctgatcatctgacaaaataatatttaattgtaagaaatgttttcaataatcatgaaaattcttgtaagtctaacatgggccaacttctattcgggaacgtaatcatgtgtgaagtccctgtggagtaaattggaataatgtgagtaactaggaaatgcaatcattctatccctagttaggagatggatgagacaggaaagctaag

SEQ ID NO: 372066 - DNA, 431 bp, Homo Sapiens
  misc_feature (55)..(67): n is a, c, g, or t
aaaccaccaagaaaagatctaggttccctgtgctatatcgacccctggtaatttnnnnnnnnnnnnncttaccaatttaatcagtcagctttgcttacactaaaggctctaaatctgccccaaactactggttcttctaagataagactctaagaagagactgtacttaactcatataaaggttctcaggaaattgagtgtgagtgccaatgtaatagtctgcctcctccagttcttctttcctagaagatgcttgtgctgtttagttttcttctttttcctttgtataatttctcaatgctcttaatggcattgttttcttgtttgtttgtttttgtgtttcctcatgagcttatgtcttcatgagaatcaacccaagatgctatggaatcttatgtagaaattatctgtatctgtcctgtggaaaagta

SEQ ID NO: 372067 - DNA, 533 bp, Homo Sapiens
ctacgtttcacagggaagaaaggttggaaatagtattcccagaatagcatgaagatgtgccactaaaatgtcccttcaaacaattcatgatgaaattgtcctacattactcaaaatcgaagattctcttggggatgggggtggagagcaagagtttaagaactgtggtctcttgaatgctagataatctgtatttggccaggaaatctgaaatcacttcagtatggtaatcgttctccaactttgaaagtgataaagtagaacactgaaaatgaaaccaaagcatgagggcaagagcaaaagctacagagaacgacgattcatgacagaaagagcctcttggggtataagggcaaatgagatgcctaggttgagagaagaggttgtagttttagtaagcaaaatgtgtgaggctcagagccaaacatcactgagtttgtcttaaagtctttgactattcctgaatctagacaggcagtctgtatttgtcgattatttacctttataaacaaaaggatacatcacacatcatcc

SEQ ID NO: 372068 - DNA, 519 bp, Homo Sapiens
tacgtttccacagggtgcttgccaaatcctgtagtgcttttctgatcacttcttttagatctccattcataatggtttcaatgttcctttacaaccttagttgattctgctgttgctattttctgcataatagttatagagctgtcaaggatgctgtatctccctatgcagttatcctggtgacatttctagattttgttcagcttccctgatgggtcatagaaatgagcttctcccctgtttcaccacctgccccctgctcccctagccagcttgtctgctgtccaagtccttggggaagctgcttcctttctatctgtgtcccaggggcctctaggggcagagatacaggagagaggcaacagacattggccaccactacccaaaatatcaacaaaaacaacaaaacttcttatgttgaaaatctggaaaagaaatgcttgaatgtggatgaaactgactgtaaaacacatcttgttcccctgttcacacactcactatgccagtgggatagagtga

SEQ ID NO: 372069 - DNA, 500 bp, Homo Sapiens
aaggatccctatttcacagggatggtgttacttgtgtgaaggcttatcttagtgtagacacgtatgtgtgtaaacaagaaaactcaggaaggtcacacaaataggtagcaacagtttactctgggcagcagagtagatgaggggtagcaagagtggtgagaatttttgtcttatctgcattacttagattttaaatgttaaaaatataattatttatgccatttaaaaatatttttaaataggatttttgtaaagagtgaggtggcggtggtttatatctacctctggatttaagcaaataaaagggagagaaaaaatttcttccccagattaataacccagcatcctatgcatggaggtgtggtaatctttctgattatctaccagtgtgagggaaaataatgcaacgaagatttcaggaaataaccatgtattccatcctggacaagaaccatctgaaaacctctgcatttcaggtcttaattacctgtggaaaagta

SEQ ID NO: 372070 - DNA, 640 bp, Homo Sapiens
tactttcacagggtacatgggccaaaatagagagaccgactcagtccaatgaaccagaaatatcctcaccgcagcaaacaagctagtgatggaaaagaggaaaattttcccttcaaggtctggacatttctcaaagacaggccactcagcttatataagccgcatgcaccactaaaggaacacaaccaaggccccatgaatctagaacaatcttgccaattacgtgttaattgaaagttatgtagaggccatccacatgcccttggggaaacttgacactgtacttattgaattgtctgttctggaacactgacctgggcaaaggggctcaggcaacactcaaaggacagtggcaaagtcattccacattccatgggtatcaggtcagagtttccacccttttttgaacctttcctccaaataaataggcagagatggtgtttagggacattctgggcttccttgtattcattagttcatgttttcatatatttatgtacttgtaaattgacaaatcttgtcttgaatatacatttgctaagtatcacctctgtttcaggttaatgccaggtgctgggaacatctaagtggttagatacagtggggtgctggtaagtgatgccaactggcttattgtcgg

SEQ ID NO: 372071 - DNA, 499 bp, Homo Sapiens
  misc_feature (45)..(53): n is a, c, g, or t
tcccctactttccagggaaggggagatctcaagaaggggctcagnnnnnnnnnggctgaggaaggagggagaaacttgagtaggatgtacttttattgtataactatggaatcctcttaataacctctgaagacacttcttgagtcatttccatgtgtgagaagttaactgtaaaatcacagatgacatactgttcgcaactaagaggtcttcagggttcagggacttattatagccaggggatcacaggttaccaacagagttcttccaaagtgtaaatggagtccaggagctgctgtcaatatgtcttaatgtaaaataatatttgtgcatttaatcataataaagacagcataggctaactagtgggttaaactataatttcttcgatgtgcaatggaattaaatcagttatatcagttactgcttggtaaccagagacacggattgaatggcaattgaatcctgaataatcccctggggaaacaaatgattactc

SEQ ID NO: 372072 - DNA, 611 bp, Homo Sapiens
taacttttccacaggttcaacgaccgaacccgcttccggccctcgctgcgcctcaaaagttctcagccaaaaccagtgatagatgctgacacagcccttggcactgatgatgtatatgatgaaaaaggatgccagtgtgatgtatcagtggaagacctcaccccaccacttaaaactgtcattcgagctatcagaattatgaaatttcatgttgcaaaacggaagtttaaggaaacattacgtccatatgatgtaaaagatgtcattgaacaatattctgctggtcatctggacatgttgtgtagaattaaaagccttcaaacacgtgttgatcaaattcttggaaaagggcaaatcacatcagataagaagagccgagagaaaataacagcagaacatgagaccacagacgatctcagtatgctcggtcgggtggtcaaggttgaaaaacaggtacagtccatagaatccaagctggactgcctactagacatctatcaacaggtccttcggaaaggctctgcctcagccctcgctttggcttcattccagatcccaccttttgaatgtgaacagacatctgactatcaaagcctgtgtaagtagggatc

SEQ ID NO: 372073 - DNA, 537 bp, Homo Sapiens
tctctccaaatcagatatgcattgatattgtcactcttcctgccccagtgatgtcacaaataaccacttgacttgcggtggccaatgaaatgtgagtgaaggtgaatcatgtaaggctttaagagcctgcacgtggtcctgccattgctgttatcctgctgacgtgaggccagcacatcccagacggcggctgttccttcggcacagatggcagagaacaggcacagcaaaccctcagtggatgtagtgtgaatgagacataaacctttgctgtggtaagccactgagatttttggagttgtctgttactgcggaatgaggtattatctagccgaaggtgaccaatatgtcccctcaacctgaccttggcccttttacccataagattcatttgggaaaccaaagttaccaagtttcccatctcatttcaactgctatttccatactgcaagcgaacgacagaaaaactgttaagggcaatctgtattataacatggaaaaaatagctgctttgtatttggcatctgtcgacgcatc

SEQ ID NO: 372074 - DNA, 214 bp, Homo Sapiens
tccttcactcatcaagaatttggatcccgtaccacttagacatctacttaatctggtctcagctcttgagccaagtgttcatactgaacagacactgtacttggcatccatgttaattaaagcactgtggaataacgcactagcagctaaggctcagtatctaaacagagttcttttgcatctttattaaatactaagattccctggaaaagta

SEQ ID NO: 372075 - DNA, 450 bp, Homo Sapiens
aggacggcgttagggatctcatagaaactggacattctctttccacccatgttggtgcctttttgctacccgtctgctgtggctcctcagccaagctctgccaaatcctgcaggccagccgccctttctgtgcttctgggagggaaggggaagcatcggtgcgctgatgggggctctgggctgaccagtgctccttgttgtgcacatttgggctcgcagtttaacctctctgcgccatagaattggtatgaagatgaaaaatattatctctactttctaacattttaaaaaaagctttctatgtgtcaggcactatgttaagcaacctgcttcccttatttcatttaatccttacattagtctcatgaagtaggccttacgattatgtccattttacagataaggaaactgaggcctgaagttaaataaattgcttacccgggaaaagta

SEQ ID NO: 372076 - DNA, 456 bp, Homo Sapiens
  misc_feature (226)..(226): n is a, c, g, or t
tattctgcacagggtacagtgtatattggctggatacatcatgcaagggatgctgctgttctcgttgaatgccactacaagtgggacatatgcatgtccttttgtgccactatggttacaattcactttggtcactaaggtgggttttaccaggcttttccactgtacagttattcttttccccttcatcattcagaagcattccttggagagatactttaaaatntatgttaatatcctgtctgccatcaatgtccgtttcaattcgttgtatttttctgttttattcagtggtttataatctgctcttaaattgttgacatccttgctcaaattgtccttgtggacagttagggccagtgggatctcatccaggctggcttctgtgtccctttgacatgtccacatcattctttaagtgctttcttgctttctggcaacagatgctccctaccc

SEQ ID NO: 372077 - DNA, 614 bp, Homo Sapiens
aggaagaagaggtagggttggtaggagaaacgcgatcaaggttgtaataatgtgatggatgaatacaggtaagcaagaacagcagaggtcgggctgtgatctgagtgcaaaaaggcctggacagaaggacataaggaatctctccccatttctccagtcgtcggaaataattgcttaagtcaggtaaaactgtaaagtcgaatgttccatttgcgggccatttggacccgttatctagttggtactgtggacagactgaattgaaaaaatagacaaggcgcttagggcgtgatatcttgcctgaggcctgaggtttgcaggtttctatgaggtagcctagcgggctgtcctttggaaaggaagactgagaatttcccataagagggtaggctcaggagaacagggaaaaggagaccgtcctgcatggctggagggagacgataaaagaagcagtcatcaccgctgcctttttcgttcctggaacgggatcaaatggcttagaggcgaccccctaagaccagatgatcagcgagtgcctggcacacgccagagccttcttggaccaacgttggattttcgggccagagaaaccaagagaagctgtgtggattttt

SEQ ID NO: 372078 - DNA, 308 bp, Homo Sapiens
ttgactgtatttgtgagggtttaattctggactctttttcaccaatctacgtggttaccgtcttgtgtcacaccatcttgtgtcacagtatctcaattcttgtacctttacagtaaatcttaaaatcaagtaagatgagtcttccaattttttgtttcaaagctactttgccttttcatctaaattttacaacaatcttgtctatatctacaaaaggtcttgcttgggagttgacttagaattcactaatactatagatatactagggagatttgaaatcataactagggatgagtcttctaatccat

SEQ ID NO: 372079 - DNA, 461 bp, Homo Sapiens
tacttttccagggtgctggggtggatcagaaggttgagactccaactgggagagatgtgtttctgctgctcaaatatttcccaagtttgcaagacatctccagcctttggagtgccttctggtttgaggagcagggatggccatccaggtctcaatgagactcagttaactcctctcatgacaaggcagccatatctcaccatccagtagagctgcctgtgatttttttgtgtgtgcatttattcaatttgaagcaatactcctttggtgaaagaatgccccctgggttgaggtacgtaaagtaaatatgcggaaaaaatcagaaagttccttaaaagaggtttattatatcactcaacccgtatctccccacgatgctacgatgactattttctttgcctgtgtcaggcttgaaagctttgtcctgaggtcaggcctgtcctccttcctgtggaaaagta

SEQ ID NO: 372080 - DNA, 536 bp, Homo Sapiens
aagcttgttagagactcagcacccaggtttctactgggggctagtcactctctgtctagcacataccaaaattccagactccaggaggaaagcaggtattcagcataaaccatatggtttgtacaaagagcttaggcagtcttctcagttttaggaatgatggagactctcccgaaatccaagttcccacatgccagccaaaagccaacgtagcaaacaggtctttctaagaatagcagcggggcctgctgtattaactcttttctgcacaaaaaggaatgtggagatagcatagaactagtcactgcagaaaccagcaatcatccctagagctggagagagaaaagacaaagtttggagtatcagaacctagaagtatgctggacaagtctccaccaggcagagactcatccctgtaagagaagggagctgttcagcttctgctggtaccatagagggagccggtgaggctgtttccgggcatgctgggacaaaggtggaagctggaagcaccacactgacctcgtggaaaagta

SEQ ID NO: 372081 - DNA, 155 bp, Homo Sapiens
acagaagagctaggactttgacacccccattaggtggtggcaacatgtttggtaaaattgtgacatattttaccatgacttagagaccttatgcccaccaaggtggtagtattaggaaaacatcaacatattggctatatttttctgccttcaga

SEQ ID NO: 372082 - DNA, 502 bp, Homo Sapiens
gctgtatgctggaatctcagagaggctcaaaacaagactagttagtagtgatagcaacagaagttgttcctatttggagaagatagccaatctgcccagaggccagccacctgcctataactggagcagactggctggctggctaggacctggtggtgtccgacgtctctgttcaatctgcgggtaaaacagcccctgcgtaatggactgattaatctccttatctcacggagcacacagtgtaattacatcagagaatttagatccccaagcgcaacatcaatcaactcagagagagcagcttcaccctcccttccccaacagcctggggaaaaaaatagatcttccctccctgctccctttcttcatccttccctcaaatgagagatcaggactaatagtgcctgggcaaatggctgcctggggagaaggtagggaaggaaggagagaggaaggggctattttcaggtcagctacctcccctgtgaaaagtagtaccgac

SEQ ID NO: 372083 - DNA, 634 bp, Homo Sapiens
aatctctatccgtaatccttatcgccttctttctctccattgtgcttatcaccgccatgacgtattatgtattatattaactgtagttttggaatataagctgcaggtgagaaagctttgtttctctttctcaggcagtgcctgacattagagtaggagcttaataaagtattgaatgaaggggcagatgtagaatcgtgagaatttggaaaaaggctggaatatgtggtcctaagatgtactttgaatgatttaaatctgactgagaaaaccagtttgaggttggcagagtagaagaaggagggtattttaggccgagaatttggtaagacagagatgggattgtcagctgtatggtgaaggtggaggagtactagtctttcaggaacagagcaaatgtaatagagcagctgaaaataggcttggcgttggggattaaggtcagatatggcagtctggaatttacagagggatgtgatgaagcaggcattactagctttgaagtaacaggctgcggctggatttgaggaaaattgatctggcagtagaggtcaatatgagactagaaggggaaaagccaggggcaagaagatgagctaagaagcaattacagcattttgcctgtggaaaagta

SEQ ID NO: 372084 - DNA, 135 bp, Homo Sapiens
ggcctggctcacgtaaggctcaaaaccatttgtttatgaacattactgtgagctccagagctggatctgcatggtccagctccagcaactgcatcccacctggaaactcctatgcatgcctcaagacccaactca

SEQ ID NO: 372085 - DNA, 388 bp, Homo Sapiens
cctgatttaaatatcccttctattatgttcccataggatcaaatccttaacacattataactgtttgtttatttatccgtccctcactgtagactgtaagctccataaaagcagggactatatctaactcaccattgtagctccagcacctagcacaatacctagaacacactcaataagcacttatttatttgtttatttttgtgctaggaatcttgtacagaatcaataagcatttatttaaaagaatgaatcaatgaatgatacagaagtcagaagaaaggaagccaactctcctaggaaaagaacaatttgccattaaatgaattgaaagtacatgagaacaaatgctaggcaggagagtccaccttttccccctgtggaaaag

SEQ ID NO: 372086 - DNA, 629 bp, Homo Sapiens
ggggaatggtgacacatcccttctaggaatgggggtagtcttcttgtcccgctcagccagccaacactgcccactgggagggagaggataaccttcctgggggagttaccttcacaaactgcacatcgctgaggatgtggactgagtagtcaggcatgtagaggttgttgctgctgctgtacagctgggtgttgctgcccccaaagtcactgcgctctcggtttggagactcagagcgattcaacccactgcagcgagaaggggaccggtttactggggagcctgccagagagtcccctctgctgacagcgaaggtacgagacacagagacaggcactaaagagtcagtggccaaggatttgtgagttgcgaaagggaagatataaacacaaaaggaaagagacaaagaacaaagtgggtgagacagtctgttcctggatcttcacaacatcacatttctctgcaaaaaggaatcttgactctgaaaacacaggaatcacatcctcttacaaagtcacactccagaaagacaagaaaataaaatggattttgctgaaggtcatctgaaaagatgtgcaacacatcttggaatcagatgtacaagcacaagccgagcctgtggaaaagta

SEQ ID NO: 372087 - DNA, 560 bp, Homo Sapiens
tgaagtgtaagtaagagtagaatcatagtccagaattctgtgccagttttggaaaagatgcttattagatttctcttatgaactgttgagaaaagagataagacaatcagcatcatgtgctttggggaaaaggagtatttcaggacagatcctgggactagggacaggccagaagaagggcagaaactgagagacccaaggagataatgaaaatgctctctggatgctccagagatggtgaaagatggtctctggagcaagtggcttgcaacacaaaacattcttgcagctccaagagcagcctgagcaggctaggcttagacagtagtctgtctttgggaggagctcaaaaaattcaaaatggaatgcaagagctgccctaagaaccagttttcctttctcctaggccactgacctaattcagccgataaggactcaatcagcacttccctaccaggccacatgagctgacccaaatacatcctttaggagaaactatcaaggatcccatcaaaaggcaacacgaacacttccgataaccagagacctgtggaaaagta

SEQ ID NO: 372088 - DNA, 438 bp, Homo Sapiens
ctcgatcggaagcctctccccgttagctctgccatggatgtgtggtctgggcaccggcctaacagcctggtgtcggatgtgatctgtgatggctgggacactcctggaggctgtccacacctccacaaacaccctcaaagttctttgagcacagaggctttacgttctccttcacagaacgtgttctatactggattttctgatggttcctgataagtgaggtagaaatacacaagacatttctggcacgtgagtgcaactgaacagagtggttaggaacagggctctgggatgagcctggcctggccactccaagctatgtagccatgggcaaatcacactgtcactctgaccctcagtctcttcatcatgcacatggagaaccatactcactacctccacggttgtgtttatttattaaattcctgtggaaaagta

SEQ ID NO: 372089 - DNA, 443 bp, Homo Sapiens
aatgcaaaaatataagagtgtttataatggagaaaaataaatcatagaaagtgagtagggagtgttggagagagaggggacgtgtggagttggaattttataaagagtagtccaggaagatttagataagttaagaatcaaaaaatgtgaagacttcaatgagtagagaatcaataaaagtgaaaggtcatatagacatctggagataaaagaattccaggcagaggaaagaacagatgcgaaggccctgaggtaggagcaggcctagcatatttgacaagcagcaagaggaccagggtgccggagcagatcagcaaggagaagtgtagtagcatatatgatcagagaaataactggggacaaatccaccaaacttcacagggcacggggatttactttgccttttacttggagtgagattcaacatcatcccctgtgaagta

SEQ ID NO: 372090 - DNA, 471 bp, Homo Sapiens
agaaaaaacaagtgaatatgaagacagatcagtggaaattatccaatgaggactaaagaaaaaagattgaagtaaaaattaacagatactcaggaatcttttagctaatactgtacatataatcagagtcctagaaggggagaaaagggagaatagggcagtagaactatttgagaaaataaacgctgagtatttcccaaatttggtgaaagacatccattaatagattcaagatactcaaccaacaccaagcaggataaatacaaagaaggtcagccaaggtgcctcacagccaaactgttgaaaaccaaaaataaaaagcaaatctgaaacatctaccaaagaaaaggacaataggatgatccaattggcagctgacctctcagcagaaactatggaggccagaagacagtgaagcatctttcatgtgctgaaagaaaaaaatgattagcctggaattcccctggaaaa

SEQ ID NO: 372091 - DNA, 681 bp, Homo Sapiens
tacttttcccaccaggggagtctcttccaaattcttccggtttaggggatatttgtaaggcgcgttcatcttgtgaaccttttggtgcctggcaagatgtgagcttcgtgtgtaactttttccacattccatacatttatagggtttctctcctgtgtgagtcctcaggtgtctaacaaggtgggagttacaagtgaagctctttccacacacagaacagtcatgatgcctccctaacagggggtggacgggtgtagtttcccgaaggttcacaaaactattcacttgagaaatattagtaccaaatcttctttcattaagtctacctggattgtcctcaaagactatttcccaatctggagtctggtgaatttctggttctcccaaaacaggcctgtgtatatcctccaaactcagatcttcctgctccagacactcttcctcatctttactcctatctcctgtgtaggtaaaactcaggatttctggctcttgagtctcctgaggctcttggatatctgggacccaaggctcttcctctctaacctgggagatctcatcaggtctggggattggaaatgacagagagacaacaattccacagtcttcttccaagacatattctccatagaactctttctgtgttgggtccagatcactccactggcctgtggaaaagta

SEQ ID NO: 372092 - DNA, 529 bp, Homo Sapiens
tacttccacagggggatgcacgcatgtgtctatgtgtgtgggaaacggagtgttgcactttttgagtagggttggttaaaggaagcctcactgagaagatgtcattggagtaaaggaagtaaggaatgggtcatgtggatccctgaaagaagagaattccagacgaagaatagttaacgtataaatgttctgaggtgataacatgcaaagcatgttcttggaataagtagagctgtgacttcaacagaatgaagaaaaagattagaaagagatgatatcagcagggtaacaggaagacacatcctgttggtctttataagggattgggagacctttgacaactgaagagttttcagcagaaaaggattgccctggctataatgtttagaaattttggggaagaaaaagctagggtcattattaaaataatccagatgggggattatggtgcttggacctggtagcattggaggtgatgagaagtctgatttggttataaatttgctgctagcatgggatatacagtcca

SEQ ID NO: 372093 - DNA, 336 bp, Homo Sapiens
ttcaaagtgttttacattcatgttgcaaaacacttttaaaaataagaaaagagatgtagataaacgtgctgaagatgcaaattaatgaaaccagcttttgtgcacaaatctctgcagtttccagtgttttcagcttttgtctgagccatttttgctgtcggctttgcagactatctctttctataaaagtaatcaggcgtccgttggagagttggggtctttcttcacactaaaggcacatgtcccaggcacaagcctcaggatccttatttgatcctttttaatacgaccagctcttaaatttccgaaccatgttttccctcctgtggaaaagta

SEQ ID NO: 372094 - DNA, 370 bp, Homo Sapiens
caaatccatcaacacaaggacaatccaacaccccaagggtgttattggtcagttagagccacaggatagaaacagtctcacttttaattcctaattaagataattctatagcaaatgaatgtgtacatttctaaaagtatagttttctaaggatactgagtaggattaagtagaatttcaaagtttctgataactcttctaatagatttgttcatgttaagaggtactagtgaaactcaggatttctcctattatcacagagtgtgattatgacataaatatgaatattgaggaaacattttaataagctctttaaaatgttagacattgagaaaaaatatatttctgagaagtaaagacctgtgaagta

SEQ ID NO: 372095 - DNA, 634 bp, Homo Sapiens
acatcaatagacagatgcctcttctggatgagttcatgggtttcagcctgagtggaaatattcagttatagatgagcatgtgattttcacctgtgtttagatcaaagagtctgaagtttctgatgaagtgttatattcgctttcaatggtatctaactggccataaacatgtgggaaaatatcaaacgtgaggcaacttgactgaagtgaacagggaaggggacagatctatgttggggtgaagtgtgagataataaaatgcatacatttaatagttaagaacatctaaaggccaaaccttccggagatgcaccaagcagccattaaaacaatatgatttgtgtatgaggaaactgattaatcagtagcgaaaccactcactaatgagtttagtggccttcaatatgttttttagccttgctagacctccttgtagttggttagctcatgttttatgatcacacaagtaggagggaccacacgcaataatgtccaggaaggaggacacaaaccagctactaaaagaggatcatgttcactcctacagaacagaacagaaccgtacaccccattcctctgaatcaccatttagaaataaaaatgtggtcaatctagacagtatattttatttgtc

SEQ ID NO: 372096 - DNA, 478 bp, Homo Sapiens
tattttcacaggtgctggagctttgtccatgttcatccattgtttcctcagtggccagccatgactggcgctcgctggttcagtagtgttgagtaatggcgatcgtgtgctcctgtatccagcatcctgcttgtcgtgctttatatcctagatcatggcgcctctgtgtggattagagttagctttgcccaaaggccgtatcgtacatgtgactgctgcctgtgttcttaaagacaggcagggtttgggatcccacagcttcactttgtaaaccattttcgtgtcttgcgtctcctgctattcttggtgagttcttgtcttcagtttgactgaaatttcttttgctgcacttgatagcatctgtctctggtcttctctgagtacacggcaaagtggctagtccctgttctctttgtaacaactcactgggcctcagaactggctcacagtctgactgtttcttgccctgtggacaagt

SEQ ID NO: 372097 - DNA, 459 bp, Homo Sapiens
ggactcacgctcccagatttgcaagaacagaggaaggcttatcccacatctcctaccatagccccactctagtcagcaccactcctgccccacctgaaaccagcttttacttagaccagaggttctcaaccgtctatgtctcacttgtggcgtacactaaaaagtttacttaaacatgctgtgttcatacgctgttgatccatcagcaagtcctgttagctctacctccaaaagatatctgaaatctgtccatgtttctcccatcaccattactaagtcctggaggctataacctcgtcaaaaccagtgtcattttttgcctggaacactacagaaaccacctaacttacttcctgttctggccctcttacagtctatttaccagatcactcaacagtttttaaaagtataaatcaggtcatgccatttccctgtttaaaataaccctgtggaaaagta

SEQ ID NO: 372098 - DNA, 606 bp, Homo Sapiens
tacttatccacaggtactctactgcacaaagcaccgtgacgtcccctaccttccaggcaatagcagaaaccagaagagacaggcggtagcaaaaagggagggtggagtggagggagagagggatagaggccaaaaaacaccccatgaggcagcaagggcagctgccaaggcttcagttaacccaggacggaaacaggactcgccacctggccacggaggccaaagggctgcagaagggcgtgcatgcagaggggctgacttcagggcactgaagacagcacaagctcttgacggggccaggatactacacacacagtgccaacaggccagcacacgcggaagcagcagtgcaggcatcccgctgtggatgtaggctgcttgaggcagtgatgggtcggtgtagcaggcaggaggagcaggtggaaatgtgaatgccaggccaaggcagcatatgggccaggctgattgaaggctgggcctatgcctggttcatcttgggctccccagcccctagcacataataatagatgctcaataaatgcttgcaaacagatggactatgcttctaggtcactgggaaacactgaagctatctcccctgtggaa

SEQ ID NO: 372099 - DNA, 458 bp, Homo Sapiens
tacttttccacaggtaagtttaatgtaacatagtgctcatgactgcagatgattcgtagaaaatccagcctcaaggacaccagaacactgggattcggtaatgagtaaagccttgaagacacctgtttagcaggactttataaggctaaaaacaaatcctctgtccataacagacaacagatcattgagaaagaatgcaaggcttgtattgagtctctcaaccatttctgtgtccttctgaaatcgtgaaactatatcactagcaatcgtgctgacaagagctgcaatgtcatccatgaaacgttctggaaaacgacttttccttggagcctcaagtttatcattaaagtataaatggtgcaccatgctctttaccattaattcaaaaaagaaccaggcttgttgcaaagctgattcccgaacgctgacactgcaaacaacccactgcaaagccagct

SEQ ID NO: 372100 - DNA, 559 bp, Homo Sapiens
ggatccctgaaggaggaggtataaaggtgggagtcattaacatacagacagtacttgatgtcataagagatgatcagataattactaagaggcaaaatatagatgagaaaaggattgagccgtgagcactcccaccctgaaagtctggggagttgagaatgacccaacaaagaatattgagaagtaaatattgaggaaggaaggaaatcaagtaatcagggaggcaaataaacaacgtgttttccaggaggaaggagcagtcgagtgtgccaagtagtactttaggtcaagaaagatgaagactgagaattggtcattggatttagcaacatgactatcgctggtgatcattgagcagttttggtagagtgttgggggtgaaagcctgaatggagtgggttcaggagataacaggaggagtggagctggagatatcaagtagaaggggttctttcaaggaatttcaaagatatggggtaatggctggagggagacgcgaagctgagaggagatattttaaggtgggagaaataatggttgcgctgtggaaagtaggtac

SEQ ID NO: 372101 - DNA, 576 bp, Homo Sapiens
tagtcggtcctacttttcacaggcatatggtctctgtcccacctacttggttctgctattatagctcaaaagcagccaaataaaacttcatttgtaggcaggtggcccacaggccataatttgccacctcctactttaagcattcaagttttgtctgatttttcactttcataaagcttgttgtgatcaagttttgagtataaatttttttcagcagttacattatttccttaagatatattcctagaagtcaaattattaggaaaaaaataaagggcatccttaacgttctcattatcaaagtgtttcccagaaaggctactcgaattgacacccatagccacagtggctgaggaggctagaatagagccctaccagcattttacatgcctgttcactaatacgtgtaaaaagacagcctcatgatacgctggaaaccacagcttcatacacataaacaaaaaaaggactggaaggagatatgccagatgctggcagtggctatccctgtacagttcaaagatgggcaattttattctcaatgagcatgcatggcttttttttcaatataaaaac

SEQ ID NO: 372102 - DNA, 756 bp, Homo Sapiens
tacttccacagggtgggatatctcccaagaaatgtttctcagccttgacaggacaaaagacatacagagtaacagcagggcagggagcaactccgtgcctgaatgtagcgtcagtctttcctactgatctgggctctctgcgtgaggctcgttttgaaataagcttgagtgagcaaaagaggactctctgcagggtttgaatttaacggtagcccaaagacatcactttacctccaagccaggcagggataggggaacctctcagaattactagcaagcttgagttccaggtggacccctgtttgtggcagcacaagcatcttttttactcagctatggtcctcagagggatgttgaatattatttttctcctgtctgcatttgtgcagagaacagagcagagaaactaatgaaatgcacagagcttcaagtgaatttaaagaagcctctgcattatgaaataaggcaatgatgacctactcttgcttttctttccactacccctaggctcctgtgatcagctgagtgctcgttaattcccacgttcactaaaccatcatagttctgctgattctcagctttagagggaaactctacagtgaactttttcaattagcagtcatcaattactggtcagaatacattataattgtgaaaattatgctccattaatctcattaaatgtgcctaaacctgtaacttgtatagttcgatacataggttggctatattactttgcctgtgaaaagtaggtac

SEQ ID NO: 372103 - DNA, 170 bp, Homo Sapiens
cctctcgggcaaccggctttctcagcatgaggacgcattttctctctctcttgttctattgtcgtattaaactttatgctcttaaactcactctttgtgtgtgtccatgtcctgatctattctcaaccaagacaaagaaccagagaataccccagacaacagaccgagtg

SEQ ID NO: 372104 - DNA, 342 bp, Homo Sapiens
gggggggtttgcattgactcttcgtgttaaactgaaagaaaattaagtgtaagaagttgaagctgctgtcatttgtgaaaacttaatgaagctcacgaggaagccctttttctgtagttaccttgccaattaatgtgctggtgaactgtgattcacagccacgagagagctgtcattaaaatgagtccagagcagttgagaggttttatgatcattaagaatgaaacaacattgaaccatgaaaatatttcattgaacataaactatttgactatccttgagaagtgttctttttcatacctaacccaagataaaatttagtcctgtgaaaagtaggtacca

SEQ ID NO: 372105 - DNA, 546 bp, Homo Sapiens
tgggtttgtcttctaaatagcgtgcatgccaaagcccttgggagcacctttcacgaagcttaatattttcataagcaaagaaaaggacctagtccgtgactgcgtatgagtcacgttagtttggttttcttcaaaggctgactactccagttgctatctctgtgtgacacagtgtcttaggatgactatgttattttgctcatgatttcatagatcaggaattcaagaagggattagctgagtggttcttgccgggggtctcttatttgttgcagtgagatgttggctgagcctggagtcatctgcaggcttggctgggctgcacgtcccagatgatcctctcacatgactgatggtcactggttatctgctgagttctcagcagagatgccagagctcctacacgtggcaatctcagggcatctaatgtcttaaacggtggctgacttctcccagagggagtgtccctaaatacttggcagaagccgcacggccttttctgatccaacctcaaaaattaaggcatcactattgctggactgattg

SEQ ID NO: 372106 - DNA, 530 bp, Homo Sapiens
ttatcacaggcatctagaagagtctctactgctcagtgagagcaatctctcaggggaaaaagacaagtctcctttggccatagccaattgcccgatacttcatttatgctctcaggagactgtgcattaggttccatagacctgcacagaatagacatgtggcttgaggattggtgaaattgacaacttggctacaataccctaatttatgtcagatacagactgtatggaatttttaaagtgtgctgctcagaaaggagcacaaaaaatttgcctctatacttactggttcctagcaccagtctctctcatggacacatggaagagctgttccaggatcacaggccttggaaagtttgggctttgagttcctggctagtcttacctccctattaatttgcataagaatttctggcccagtaaggagatagaacatagtgagtgcagggacagaagacctagttttcagttttgtttttcctcctcatagtgcctacaagcacgtaatatcctgtgaaaagtaggtacga

SEQ ID NO: 372107 - DNA, 818 bp, Homo Sapiens
  misc_feature (727)..(727): n is a, c, g, or t
ccggtacctacttttcacaggaaaatgccaagcatatcgccagatagccctttgtctgtcaaacaacactatcaaaggacaccacaccatggtcagctgttcaagatgcagcaaagaataggaaatgacacctttataacccaacctatcctatatggggacatacttttcacacctaaaggaacctaagctgtagatgcatccagaaagaaaaacaggtgctgagcctaatatgtagaattataacgtgaggcaaactcctcaaaggccacagcaagggggagtaagaagctaacaggcaagaccacctacacgtgcttccgccaagtcaggctgactctaccaatgctcacggccaacgtaaggcagattggggttgatgcctatgttgtggagagacacagacacctaacatctgcagtccaactgtccaacacctacttccaaatgcacagtgagcatttccttggtatgtgcttgaatagatgtaactcagagcacataaatgagcttcgtaggcttcagaaaggatgtggagacactcagtcctagctgtggaaagactcagtctcagtgctgtccacacatacaactcagatatgtgcttggaaataaaacatcattgtcttttccagttaggaaagaggagcaaccttgacccttctaaaacccagggaaagcacttgagtctctaaaggaagggcaggtcaaaaacaaacataagcantgaaagggtcaacttacacctaggtcagttcttacagaggccttctttttattggcgtctcttccatatataacctgttcgcctgtgaaaa

SEQ ID NO: 372108 - DNA, 173 bp, Homo Sapiens
  misc_feature (153)..(154): n is a, c, g, or t
aaatggcggtacctactttccacagggctgtagtttttagagcatctttaagatggctgtttaagtctgtttctagtggatctgccatctaccctttctcagggtcagtttctgttggatttgtagttttcttttggatggaccatacttcannctgtttctttgtgtgccct

SEQ ID NO: 372109 - DNA, 617 bp, Homo Sapiens
gtccatcacttccaacccacacccagttagagtaatgaagccacagtcatccccacttcatagtgagaccagagcactcaactaaaacatgccttgcttcctttggagacatttcttccaggtcccccaaagctggatattttagcctcttctgaaggcttctaaaaattctgggtactttgttgttctccaagcatcttgttgaagtaacatgtgcttaacatcagaaagagaagttttgtctttaggagagttgcacatttagggcacaataaatatacagtaaatacacaaagtggctcactggctgggaagacttcggggtctctaactgcaggggctgggggatgccaatctcctgcagcacctgcttggaagtagcccagtcgtatcagaagtccaacatcaggatttataaagttccttggcttcctgtaggtggattctcaaagtagggagggtgtcccagactgcaaggtatgagactattctccagacacaagacttcccctgcttatgccagaaatttcagcatgagcaatttgctagtttaggaacagcacaactttaaggttttaaatacaactactccatgccccctgtggaaagtaggtacc

SEQ ID NO: 372110 - DNA, 549 bp, Homo Sapiens
aggaacttaccatctaaaatatctgctatgacacagatattcacgcacaaggaaggctgtagcacctgcaaagaggctacataaaatcaagaaatcatttctaatataaacagtaattgcatttcttctggtaggtgaaatggctccagcaacaggaagtgaaacgaagggtgaagagacaggtgcgaagtgacccgcaggccctttacttcaacgaccccatttggtccaacatgtggtacctggtgagtaggacaggacctctgtctgccccaggacacttgcactgccaggtctctgaaatgggttaatttccctcaacaaagctaaattcaaacaacatctccagacagacacacttcaccttgagggtgtaaaaccactaccgcaaggctgtgcagtaccggctttcctgtggattttttctgaaactttctgcagcacactctgggatgggggctcttcgagaagggaagtgatttgatgcagcctgtatgactaaatggcaaagcccagcccatggacagagctcctgctgggaggcagatg

SEQ ID NO: 372111 - DNA, 494 bp, Homo Sapiens
aatgactgaaaatgttacaggccatttaagagaaaggaagtgttaatttggattcggcaattatttatttatagtgctcctaaaacctgcgaactttttcttggaatattctgtttggttcactggcatgtttccttccagaattgcaccaatctggtacattagtataaccacatggtctatggcttaaggccttttatacaactacacctctctctggtctctgcttgcatacttccagcaagaggaactcaccatctcatgatgcagtccaattcatctttggacagtgctctaagaaggttctttaccgtactgagctgacatttgtcagcttgcggcttccattctctgttagtagttctgaaaaagtccttaggtctatcttagcattttgaagctcttccaaaccatcttcatgcaggtctaggacaccccatgatgtttttgtttggtcatagatcttttcttccacgtataatcttggaaaagta

SEQ ID NO: 372112 - DNA, 495 bp, Homo Sapiens
gagatgttgctagctttcaccttcaccaataagcaaacctactaatacgcttaatagttagtctctaggttagtatgcatcacacttcacagctgaaactgtaactgtgacttcttttggtctcatcacttgatccaaataacagatcccaccttcccacttcctacactgaaagacttttaaagaaggtagtagacgtccatgggtgaaatgtgggttaaaggagttagatcaagcactgtttaatgaattacaagtctctaaagcagaattcacacttgagaaccctgtaaaataatcataggatgggcttcgctaatgaaagaggctgcaaaagacgaaaaggagactgttagtgtgattttaagcacacaggctttagactgttgcacatcaacagtccttatattcatgtaatttgtttctactaaagaaaagctcagctctgatgacttgtttcttattaactctgctgtgtagtccctgtggaaagta

SEQ ID NO: 372113 - DNA, 478 bp, Homo Sapiens
tacttttccacacgggttcagttatcagtggtcaactgtggtccaaaaatattaagtgaaaaattgcagaaataaacaactcacaagtttccaattgtgtgacgttctgggtagcatgataaaatcttgagccatccaactccattccactagggacatgaatcatccctttgtctagtctggatacaggctgtggatgcagtagtgaatccacactgtttgcactctccgcctgttagtcagttatctagtgactagatatctaggttatcagaccaactgtcccagtattgcagtgcttatgttcacatgaccattattttactttataatggccccaaaatgcaagagtagtgaggctggcaatttggatatccccaaagagaagacgtaaagttctccatttaagtgaaaaggtgaaagttctcaacttaataatgaaagacaaaaaattgcatgccaaagtcacccaggtcta

SEQ ID NO: 372114 - DNA, 497 bp, Homo Sapiens
aagacacttgtccttcctaaggtgcctaattggcatccaaggagggtagagtggggagaacccaggagaacctttcttcaacaaatgtcagtgtggtggttactctcacgccatggacagtgtgctttgaaaggatgcactttattctcaccattgtgtaaagttcctattgactcatgaagtgagttctgaaagtttgcattcaatgagctatctccaaagaacctatatacagttacagcatgcactacaatctgtcttttcctcttctttacccaaagattagctctaatgttactacttttattaaaccttccttgatttctccatagtaaagaaatttcatgtgtccatgaagccttgtgcattttagagattttaccaagtatctgtattcaaatgtattttggatagattttcagcttcatgtgaatattattcagatacttagcacagcatttgaacataaaaaatgttcagtaatatatgtatagttg

SEQ ID NO: 372115 - DNA, 436 bp, Homo Sapiens
ggctggtgaaaatatccttaacagttccaatctgaggttccagattgtatttttcaagaacaactaagggtggaaggaagggaggttacaatgaggatgaagaacaagtaggagtaagaaaccggcagaaggggacagaaagatggtgtcttcagagagatgtggagaggaaaatggtggcctgggaagagagaagatcataagaaatggtaaccacagtaacatgaataggaaaatgatggtataagcaaaaaacacagattcgaaaataggaaaaattattttgtaaaacaatatttatttctctcatgttgcccaagccagaatgcagtggctattcacaagcacactcacagtgcactacagtcttgaaccccagggctccagtaatcatctcacctcagccacctgagtagctgggactatatgtgcgtgc

SEQ ID NO: 372116 - DNA, 553 bp, Homo Sapiens
cccccttttccacagggtgccagaggaagcggcacttcctctccttcagcacatgctacctgtgctctcagaaggcccacggctgggagggaggcaggtggaggaggccatacaacttgccaagtcaaacacaccggaaggtctaattttagtccccctagccttggcatcgtctctttcagcaaagatatttttcatgcactacaataaagtgctttgttccagccttgctggatacttcacaaaggcccagcaaggacagcataagcctaaatcagagctggaaacacatcaaacacagggacctcacagaagagggtcagcattcctctcgtaacctttggtaagtacgttctttccatccagcttccaaaaccctaagaaggaacacttggttgtgcttctccttctacgcaactcctcttcctccagcttcttttttgtgaatcttctgttggctcctcatcaacaagtgtgttttctccttcatgccagggatttgaaaacctactccctctttttgtccctgtggaaaagggggatcactctagag

SEQ ID NO: 372117 - DNA, 559 bp, Homo Sapiens
tcgagctcgtacccttttccacaggcaaaaccacatcctccaaaactggagagacagacagctggatacagagaatcacaactactgaagcagaaaccgaggaccagaaacccctgagggaaccagtacccgggtaggaaaatctgagctgtaattgaggagttgctggaggctcagtgtggacaagtctgagacctaaaagctccagggagagccagtcctaaggaagcccccgtagttttgtgagatttacttcctggagctctaccaggtcctcacagtaaatatttgagaaaaatcctcttacgctgtcagctggagaagggagaagtgaaacattttgaaatacaccaaggtatcctgttcttaacaaggcctgccctcaggagaaattatttctcttagaaccaaacctaactggggaatgggaaaaatgcagctccagtcaactctagccctccacatggagaaaaggaaattcctaactccacctccctctagacttccagttgtgggaagggaaataacttcagccctctccagccatccctgtgaagta

SEQ ID NO: 372118 - DNA, 510 bp, Homo Sapiens
tactttccagggaggcaagcaccctggcatctgctaatactctgctgcagcagccataccttggtcccaccatcacagtgggctgctaaccttgaggagccagagaacaaagttggggcccactacaagtcttgcagagttacagcatgcagaccaggagttgggagctaagtgttggccccctacagtctttcagaaatgaagccagttggtttaatcaaccttatgccacaatcaaactctcaaggtcatcaaataggataaaaggggcaaaaaatccaaaggtcagcaacctcaaagattgaagatagataagctcacaaagatgagaaggaatcactgcaagaaccctgaaaactcaaaaagccagagtgccttctttcctccaaatgaccacattacctctctagcaagagttctgaactggctgagatggccaaatgacggaaatagaactcagaatatggataggtatgaagacactgagcttcatgtgaccctgtgaaagta

SEQ ID NO: 372119 - DNA, 293 bp, Homo Sapiens
ggattttcagcaggtctgggatgttcttggaagtcaaggtatgactttcctcctttcttatgttttatagtgccaccccacagaaacatttttaaataacagagagtaacttcaatggaaagagtcaattccgagatttctgagcttattagcaactctaaataatatgtaatgcaactcattgtctaaaatgaactctttcttgagcataaatactctaagaacaagtccaagctggttttcattatttttcagctccagagaaggaagaagctttccattttttaaggctt

SEQ ID NO: 372120 - DNA, 549 bp, Homo Sapiens
tattaatgttctattgtagaacccttaaaaggaccttaaagatgaaccaattcaacttcactcatttactacataaatgcctttttcaaattcttcatgtgacagaaaaatgagttgagctaacaaaatgaaggcagaattgttaatctgataacagtagtatgaataattcaacagaagctagaactgtgtggataagaaaaaaaatgtgagtgaatggcaataaattcaacttaattctgatactgagtgaaaacacaaatttcaaaatgaaacctacagtttgatgtatttatgtacattttaaggacacaaaaacaatttatatattgttcctggacaaataacatgtaaaagtattttttaaatgcctgagactagtatacatcattcttaggatagtgtttttttctgggtagggaagaagggagagaaggaaggagaaaagaagatgggggagaggataacttgaactgtacttgtaagtatttcagagatagaagagagaagtctagagcaaatagattgaattgtttccctgtgaaagta

SEQ ID NO: 372121 - DNA, 394 bp, Homo Sapiens
agctctcaatcttcatataactaacagcaaatcaaaactctaacaaaacatggggctcccactcatcaacacatcattcacagaacaggaacatctaatggttaataaacacatacatagggtacctactatataatagtaataggcaatataaaattaaaacactgaattccattttacatccattggagaggccgagtatgggtgagaatgtggaaaaacaggaactagtaaatcatgtgagggtgggtatggcccagtgataagtaatgtgacaacagacactaacggtaaagatacatatacgaacctaaaacctggctagttcacatggagacacacaacacagagaaacacttgctcatgtgcctatgtaaacgtgcacaaggatact

SEQ ID NO: 372122 - DNA, 538 bp, Homo Sapiens
tactgttcacaggggatttccccttatcaaaccatcaaatctcatgagacttattcactaccatgagaacagtataggagagaccgcccccatgattcaattatctccaactgggtccctcccacaacatgtgggaattatgggagtacaactcaagatgagagttgggtgggggacacagagccaaaccatatcaaggagttagttggaagtgaatgagaggcatgggaatggagtgatatagcgcctggtgatggattctaggctgagatatgtggaccaaaaggacaggaaaaggtaaggggtggtgaaagggtgatgggatcaatcgtgttgtaagtcttggtggacttaaactgattgatggagaaatgaatattagagagagtaagctggaaactcagggggtggtggacagagtgtgacacgtgaaattgtgattatggaggagttgcagttattggcaatgacaaagcttttggattcttacctgatctcctgctctcacttttcaaaggcctgggttccttttcttcat

SEQ ID NO: 372123 - DNA, 475 bp, Homo Sapiens
tttccacagggatacaacatacacaagtcaataaacacaatatatcacatcaacagaatgaaggacaaaaaccatatgctcctctcaatagatgcacaaaaagtacttgataaaattcaacatcccttcatgataaaaactctcaacaagttaggtatagaaggagtatatctcaacacagtaaaggccacatagcacaaaatcatagccaacatcatactgaaaggggataagttgaaagctttttctccaagatccaaaacaagacaagaaagcccactattaccacttttattcaccacagtagtggaagtactagccagagcaattaaggaagagaaaaaaataaagagcatccatattagacaacaggaagtcagattgtccctatttgcatataaactatcatatatagaaaaacaaaagacttacagtcacgatggctcacacctgtaatcccagcactttgagaggg

SEQ ID NO: 372124 - DNA, 472 bp, Homo Sapiens
agcttttcacagggagatactgggtgttgataaaaataaaagtcagttcctgagaggtgaagaagaatagagcgcctcaatgcagtcactgtcaccttggatgctaaccattccagagggcatctgatgatcaattcaacatcctgctgtttctcttggcaccccaatcaggatcctggagtggctaccacaagactcacctatatcagaggacactggatcaatgtaaaaagctgaaggatactgattagggtagaagtcttacatgtttggaccaaatccaatgtggacaaagtagctgagcagcaggaagttgaggggtccacagctgagcctggtgtactccccagagcattctccagatggctcgaattaccactaactgctgatttgaacagtttaaacttgggggtggaggttcatttatcaccgtggtgtgggttagcattctcaaattactttctgcatattc

SEQ ID NO: 372125 - DNA, 632 bp, Homo Sapiens
ttcacaggtagattactgggtgttgatagaaaataaaagtcagttcctgagaggtgaagaagaatagagcgcctcaatgcagtcactgtcacctcggatgctaaccattccagagggcatctgatgatcaattcaacatcctgctgtttctcttgacaccccaatcaggatcctggagtggctaccacaagactcacctatatcagaggacactgggtcaatgtaaaaagctgaaggatactgattagggtagaagtcttacatgtttggaccaaatccaatgtggacaaagtagctgagcagcaggaagttgaggggtccacagctgagcctggtgtactccccagagcattctccagatggctcgaattaccacaatcatgcttcaattaaaactgtcataaaacttgggataggggtttggaagaacagggcattgaaagtgcagagaaaatgtagagtgtatagaggtgactgaagagggtgatagaaagaagtgtccttccaccaaaacatccatttcttttggttggaaggcaaggactggaaaagaggggtgggggcagcaaatgctgtcccttttctttcctcataaatcttggagctagactaattggacagtttgctgataa

SEQ ID NO: 372126 - DNA, 739 bp, Homo Sapiens
cagagatgaaatgtgatgacattcaaatgggattccagcacgatgaactaattacaagtacgcacatgcgttcaaaaaagaatcgacatgtctatggaactgggaacaagaattggaggcacgaaccagtagaacttagtcgtaaccaggaggacccgatgaactccaatcagatgtcatcagacttaagccagaagctagaagaattgcagagacactactcaacgctggaagagcagagagatcatgtgatagcttcaaaaacaggtgcagaaagtaagatcacagccctggaacaaaaggaacaagagctccaagcactcattcagcagctttccattgatttgcaaaaggtcactgctgaaactcaagagaaagaagacgttatcacacatttgcaagagaaggttgcatccttggagaagagactagaacagaacttatcaggagaagaacacgtgcaagaactcctgaaagagaaaacacttgctgagcagaatttggaggataccagacaacagctcttggcagccagaagcagccaggctaaggccattaacaccctggagactcgggtgagagaactggagcagaccttgcaagcctctgaggagcagctccaacagagcaagggcattgtggctacccaggaaactcagatacaggagctcgctgacgacaaacaggagagcagccatgtgcagcagcagggccctgctctggagcaggtaccgagcca

SEQ ID NO: 372127 - DNA, 546 bp, Homo Sapiens
tagcaagtgggaaaagcgtcatgctgatattcagagacatggactgtggttgcatggtgagtaaatccatatagacacatcttctatgatgtgcatagagcagtcttattttaataaagggagatgcctctctgactttcatatcccaattttgtcctctgaaacccagctcttgccatctctactatttagtgggaaagaacttgggtcttttctcttctgagacttcatggaaatcttggtttccctcattcctcctcttctcaagcaagagtccaaggataacaccccatcgttatggaaggtgtccatgttagtcacttatctctaggttactctctgtcgcccagtcctgagtggtggtgttttttggactcctgctgtgatctctggaggaggaaagttcactcattactgttttgcttgacctcctcccaaccatgccttctggttagaattacgcagatagtaaaactactttgtttaccaaagagctggtatatctgcttttctggacctgaaaccccctgtgccctgtgaaaagta

SEQ ID NO: 372128 - DNA, 394 bp, Homo Sapiens
gagggcttatggttccttcatcaaagtcatttgacatttgctccatacgttcatcatcaagctatacaagtagaatgacaaggttactgccatcactaaaaacaccttagtaaccttcctgaagggcatactccctctgtacaaactggtttatggcaagactgagcaggatgagattatcaggttagacctgactgctgtagaaggttttacagataaggtgttgtgaagtaggaccaaggaaaagccagctgcaaagtaaagcttatcacagtatatcagtctatatttttcaatctggttcaatttgactatagtataaatatgctgtttgcaaaagaatttatttgttgcccaacattaataaattacacatataatgtagagttatgaa

SEQ ID NO: 372129 - DNA, 453 bp, Homo Sapiens
tacttttccagagcgagaataatgaagcatctgcctctatgagtaagagcgcaaaagagaaaccaccccagatcgataacttgtaagtaaccagcatgaaaaagggccaaaaagcttttcttttctttcagttcttaaataagcttttcctggctggctatcactattcactgttggacgtgattaagtaaaaacaagaagacagaacatttactaggcaatatgttgtttttattttgtatatttactataaaaatgtttgaaatgcctttatcatctgctgaaaagtaatcatagaattgacattattgcagatggtgtgagagatttttaagattaatgatagtagatatgagttggaatgtaattgttaagcttaaggaaagaaatctagcatgtagatagagtgtgcttggtgtctttgtgcctgttttatagaaggcacgttacctt

SEQ ID NO: 372130 - DNA, 197 bp, Homo Sapiens
  misc_feature (118)..(127): n is a, c, g, or t
attgtaatattgaaaccatattccttcaacatcctaatgaagggaactattcactaacgtctctatacgttgatttataacattattctagataatgcattttaagttaacttttgtnnnnnnnnnntcctaagtttttctttttaagaatatttgcttgggcttcatctaatttttaccttatcccctgtgaagta

SEQ ID NO: 372131 - DNA, 569 bp, Homo Sapiens
ttttcacaggcgtttatttttacttaatgtattagtcttcaggtatcacgcttgaaattattaccctgccatttaatgtataagaatttattcttcttcagtatgatctcattctcattccctgttcttaataaaaggaggacctgtgtgattataggtccttggatctcacttaacttaaaactgttgtttggatggactcagctcatttaggtaagctaagtattcagcttattcaaagctttaaagcttcctcacagcttttggagacctcctctttcccttatgctcaagatagtacttgcacgttctgtcagaggactggagtgactgatgtaattcctcttacccagtctttgggtgatagtctctgttcttgctgtagcctagcatgggtttccatgcatgatgagtgctgccaggaagcctttctatcttaaccactatgctcccacctctgctgtcactggggctactgattctccaggacctaatttcagcttccatttgctcacctgcctgggcggtccaccttgaaatcatctgtatctcacctgtgaaaactccga

SEQ ID NO: 372132 - DNA, 479 bp, Homo Sapiens
tactttccagggggggtggtgatacaaaatttgggtttggacataactgcgcttgagatgaaaagagatcctgtccagatagaaaagtctagcaaccagtgtgacaagagagataccaatttaggagtcatacctggatgtgatagttgatatttgacaaagaatactattaccaagagataaagcacagggaaatgaaagaatactgagactagaactctggggaaacctacattaagggaaatggaagagtaaaatagagatggaccctagggactttatcaaatacaaagactgaaaagaatcacttaaatggaaattcctggcaaggattatgcttttcattcttaatgacaactgtatatctgtacattgaaccctcaccatttatctgcactgttgtggaatctgaggctacattaataagacaaattcctcattcttctggggcttatatttacctgtggaaaagtaggccc

SEQ ID NO: 372133 - DNA, 314 bp, Homo Sapiens
aggaaaacattcattctagagtcagggtccagaaccgtggtattcattctttcttcaccggtctgtgtgcacccaggcattcccagtcataaccagtcatttatctgttcgatgccggagaaatccagaactaacactagatcatggggtgtggtcaagtcctcaaaaagaaaagcattgaaggtatgggaaataactagatggtgcctgtcctcatgggtctcattttctccaggggaatgataaatagcatgaaatttgtcaacagataaagaaaacaacagagggtaattggtgaagaatgacgtggtggg

SEQ ID NO: 372134 - DNA, 803 bp, Homo Sapiens
tactttcccacggctagactaagaaggctgcaaaatctatcactgttatgggctggaaagccaaccaggagagccttcttaggacttctaaagggaaacattctggatgaacctcttggtcttgtaagaagggaggctagttatgtttaactataaacacatggcagtaggtgtcagcgatatgttccattcgaagactatatgataaacatcatttttggaaaaggaaactaaactaagaatagataacctgagaatgccatgcaagggctagagcaacttcccatccttctgcaagcatttagcaatcagctttcccctttagctgaactcctctcatttcatgcaatatgtaatttatacagagatgattcatttgcaatagtaaataatcacaacattctgaaaaaacaacaacaataacaaaagactagaaatataggaggcctacaacaagcacctaatttaaaactgcaacctcttcctatccccaaattggccctcctctttcctgctctgtttctaaatattttttcctagcaattaccaccttctaacttactataatttgcttgtttattgcttattttctgttttcctcccatagaatagaagctctaagagggcagcaatttgtgtctgttttgttcacagacacatacccatgcattgagaacatgcctggcacaagcaggtgtgcaaaaatgctggccgactaaagaaagtcatggatgggcttgtcatattgcataaacgtcctattctcagatgaccattgagtgcctcatcactgactacaagaa

SEQ ID NO: 372135 - DNA, 525 bp, Homo Sapiens
tacgtttccacaggcagaggatggggacccattgtaggcactccaggcaaaattttacaggaagaaatagccaagaagtgacaatgtcaatgctttcctattttatgttctttccatcccattctctctttcctcatctctcaacattcttctagtcattgtgctccattttccctccactgaggggtcatattgaggtaaactagaaggcagttaaataactataccccagatgtgccaatcaatggtcaaatattgacctggaagaccttacctaatgaattgaaatagggtcctcccacttggtcccagtctgtaaatcattttacccaggtccagaatgaacctatatagcatttactcattaaatgagcagacaacatgtgattgggtgggtctaaggagactttgcagttttgttgttgttgtttataattgacaagtaaaaattgtatacatctgtagtgtacaacatgatgttttcctacaagtatacatagtgaaatggctaaatcaagctattta

SEQ ID NO: 372136 - DNA, 561 bp, Homo Sapiens
ttcacagcgacaatgtaaagactgatattaaaaaagagacctttgaattacattgaagagaggattatacacatgcaaagaaattattaggcctatgtcatttgtggttttatatgcatatattcaaaacgcatagcccatcctccttgagaccccctaaacatgttacgaatttgaagtgtctctgcattattcaagtgaggcaggaaaaagttactctaagtgatctttcttttttatattttatttgaatacaattctaataatttgacattaatgcagtaaagggttaacctagcagcctcaggttactccagccctgcacttttcaaagagaggtgtcttcacgtactggcccttccttgactagctcctgggaaatgacctgagctcgtggaatttccagtttgataatagtgttctagtatgcctgaggccttgggctgcattttgttagtttgacgagatagtttatgctaacagtatgaatcatggcgaatgtctgtttttgaatggctgaagccctgggccatgaggtatcactacacccctgtgaaagta

SEQ ID NO: 372137 - DNA, 855 bp, Homo Sapiens
ccctgcatgcttgctgctgcacgtctgagtcttgaggatcccctacttttcacgggaggaaagagctgattcacgagagtctgaaacgacagtctctatatacaactgtcatagtgttgatagaagagcagtgaagttgtcctgggttttaataccttggtgaagcacggtttcattcattgagatagaaaacacagaacgagtatgctggattgaagttggggaagtgatgttttgaacttgtctcgtgactgacattcgcctcacatgtcagataagatttcaaggctggagatgcagatttacaatggaatcaatggcatataggtggtagtagaagaaaacagaagatgagctgccacagggcaaacgtgcagaatgagcagagggctgagggctgaactgtaggggaggctaaggtttgagaggaagggaggacagtaaagagaagtccaaatatagagcagctggacaagaaagaaaatgaggagaaatggataactcagaaaacaggtgggcaacattttaaggagcagagagtggtcaagaacaccaaatgttgtgcaaagtccaagaaatgaaagagaatcctagataatggacctggtggtcattaggagaggacaggagtgcagggggttgaagatgaaaggaagatggcgaggtgcgggatgtgtacgaggacctgtacttcaaggagctgcctgctaagaccaggaataagatgaaacacacccaaacctagagagaagcgaccaaaagcgttcatcgttttctgttttcataaagaatatgaaagacttatgcatgtttatatgttgaaagaaaaggatcattgagacctgtggaaaagat

SEQ ID NO: 372138 - DNA, 567 bp, Homo Sapiens
tatttccacaggggaagaatattgagaagcctttcccttgcctgatgccgagttagggtccttatagcggaatggtgcgctgcattgtgtgccgcatctcatcctggctgctgcgtggcgccaggaggctgtgcacactgtgtgaactccacaccagcacagtagggcccttctaagttccaccgaagttggctctaagcaatacatggtgtgagctcaacaaaacgggaaatgttgataaatgaagctgcattttcatgcactacccttgttatgcaaccagtagtgataaggtggttttgcttttggtgtaagtctcatgtttgaaacttgatttttagtctgaccaatgatgtatttggatgtaggagaaactgattcaagacaattgactaatggtggaggttcacctttgagcaccttattgatcactttaaagattaaacaccaaagttttaatatatttctactaaggtttcttttccctttgtatgagatgtaaaatgatacccagattcctgtatccaataacattatgctgctggttcgatcagcccctgtggaata

SEQ ID NO: 372139 - DNA, 499 bp, Homo Sapiens
ttttcacaggggatctacatgctctgactatctcgggatcaggtacaattggtggctgtcgcaattagcccaggaactagaggaggagagtgactaaagaccgaatggataatgagtgggtagccacccagttggttgtgatcattcgtgtgcaatgagataaaggcctcagtagcgtgcgccgctgctgtgctccttacccgctatgatgctctagctatatgagccatgatgcatttactgtcatcaagaactgtaatacttctggaatccagacagaatggtctcctcctctcacaatgcttttcctctgtgctacaaaattttctgcctctgccccttcatcttctacagacatcaccagcttcttgagcagtgacccaagttctctgccaaaggtgccagttaccagctcagaagctaagacccagggaagtggcccagcggtgacagccactaagaaagcaaccacgtctctgggtctttgcattgagattgg

SEQ ID NO: 372140 - DNA, 455 bp, Homo Sapiens
tacttccacagggcccacagggagagaacagcagttcatgctggctgcctcgtctttccaggcccgctgctgcccaggcttctactgaccttgttaggtctgattctagaaaatgaaggcaggtactcaaaaggtacagttcacccagaagaatgtaaatgtgactgagctaagcaaacgtacagctgagtcttagtgttgggggaagtagctttcatgaaggcaaagggagccccattctcggccgtatggcttgctcttcagccgttggagtgcagctttttcagaggcgtggactaaaatgacctcctaaggtgcactgaaaatgttggctgtagatctgaggagagggtccatagctataaaaatatttgcaaggggattgtaacccctcgaagtttaagaacctctatgttggaagtctctgcctatccctgtggaaaaggggtaccgag

SEQ ID NO: 372141 - DNA, 510 bp, Homo Sapiens
cagtggtcgtggtaatggtgatgtgaaaggggctcagcaggtactctctgattgttaattggaacgtccactggtgaagcttgcacagtggcattgcaattgcttccctgtatctttttaattttttcacccccttgttcgcatctgaaacagaaaatgtctgttcaaccccttgatcccagcaattagctaagtggtaggcagctggttatctgggggctggctcaaacactgaatcatctctgttcaggtctgaatgggaagcttctcgagcagcaacacctataattagtgtgtagttgcaagaaaggttttttgggagtggcaggtctcaaagcggtgttcccagataagcagcatccccattatctgggaaactgtaagaaatgcaaaatctagggcccccaccccaaacctactaaatcagaaactggggatggagcccagcaagattttaacaagccctccaactgcatgccaaagtttgagaaccactactgtggaaaagta

SEQ ID NO: 372142 - DNA, 480 bp, Homo Sapiens
  misc_feature (420)..(438): n is a, c, g, or t
cactgagtaagcaccaccaaggagctactgaggtagccaagttacacccttggcctccaagatggaagtaagcaaatcgtctccaccacagttccccacttgtccttgagactgccattctgactggatgttttcctcacggggaaaacagactaaaaaaagtattggctacagaacttgacccagaagcagcctatcagaaagtcagtggggaaatggattctttcaaaacacttgagtgtatgtgacctgacgtacctgcccctttgaaggaaggtggtgcatgtaggaacctcagccctttctgatacagaactgagcctatggtaggagagagaggagataaagagagaaatgcatgtggcaatcactctggctgcagcccaaagtaacctgctaaaccctccatttcttttctcnnnnnnnnnnnnnnnnnnnaaccaggggagagccataatgcaagccatcccgggggaaaag

SEQ ID NO: 372143 - DNA, 551 bp, Homo Sapiens
  misc_feature (428)..(476): n is a, c, g, or t
tatttccacaggggcaggacagacccagtgtggagcttccgggtgcccagagtattatgtctcctagctatgatgtgtgacaacaccatggggtatcccccatcagtgacaagcaccaaacccagagtgtccagagatgttatggggtacaggtcacatagacatgactgagcccccatgtgcctaaccttagtctctagcccctccagagtcaagctgatgccacacggcccaaggtgccacactaagtcacatggtcagcatagatcctctctaggaggattttaaaagttgtttacatcctacattcattagggaagacctgggtgttcacctctgtatgactctgctcctttaggaaaccttccgtgacatatttcatgagagctattcatttctgccagcactctgtgctggaaaagcccatnnnnnnnnnnnnnnnnnnnnnnnnnnnnnnnnnnnnnnnnnnnnnnnnncaagaaagcataagaaacccagaatgagaagtgaagtgggtgaatcaggatgggggagaggtaggatttttgcag

SEQ ID NO: 372144 - DNA, 573 bp, Homo Sapiens
  misc_feature (250)..(285): n is a, c, g, or t
caactgatgccacacggcccaagtgccacactaagtcacatggtcagcatagatcctctcaaggaggattttaaaagttgtttacatcctacattcattagggaagacctgggtgttcacctctgtatgactctgctcctttaggaaaccttccgtgacatatttcatgagagctattcatttctgccagcactctgtgctggaaaagcccatccagcctgcacatcccgcacatgtaccttggaacttnnnnnnnnnnnnnnnnnnnnnnnnnnnnnnnnnnnnatgagaagtgaagtgggtgaataaggatgggggagaggtaggatttttgcagagggactagttggtgcaaagacaggcaagagaaacaaacagaaagggagtacttggaaatgggcagatgacacaacaatgggatgcttttctccagaaaataaaatggaaacctgaatttgacccctgtatagaccctaccatcatctaccaaaatggcaccactgacatggtatagaatcatccaacagcttactgtttattctggaagaaatgagcatgacttctatttcccct

SEQ ID NO: 372145 - DNA, 541 bp, Homo Sapiens
tacttttccacaggtcctgggcagacttaaataacgggcttaatgtggaggtggttttgtacactctggtgcctgtgctgttcctagcttttccaccagcagtccacactgctgagggttgccttctatagtagtcccctcttagcctcagttgcactttctatggtttcagttacccacggtcaaccatggtctgaaaataggtgaatatgatacaattagatgttttgagacagaaagagcccccattcatgtgactcattacagcatagcattataattgttctattttattatcagttattgttgttaatctcttactgtgtctaatttgtaaattaaactttatcacaggcatatatagggagaaacagtatatatagggtttgatactacccaaggtttcaggcatctactggggatcttggatgtcatacaatacagtagtccccccttgaataaagtgaagactacttaaataaggggagactactgtattgcacaacaccaagagtgggaaactgacgaaagtggcataagt

SEQ ID NO: 372146 - DNA, 815 bp, Homo Sapiens
tactttcacaggtctaatctgtgccaagtgctaaatttgaaaggaagggatacttttctgaatctgcggtcttccttggtgtcagttttagatagacaccaaagatcaccaagtgtggagaaagccaaagtggttaattatcaattaattacacagacacagggcgcccaagcaggcagaagcacttcctgggtcctgaaagcacacacatggctgaatcagaacgcgggctgtttctccctgcagatgggtcgtaaacgtgtctccaaattgctaatcattaccccatacctcctatcgcagtcaccaggaagcacatatcacacatacttgcatttgtaaatatgaacttctccctcacacccatcaaacattttgagggcacagcaaggagggtgtcacttgaagaagtcaagtcattgaggccagcggcctggatgtccccacagggctgaggggctgcaatcagttcccatttatccagggcttctctggagctggacactggctgctccctccatgcccgtcagctctttaatcctcactccatctctgtgaggggatcctcgtgtgagccccttttaggacaaagctcagagaggcccagggccaaaagtggatacaaaccccaccctcttaagaagagggaggatgaatgcaagcacagagcctggtatgcagcaggtgcttaataaatgacccctgtgactgttatcaggaggtctggtcattactgcttccgaatctacacatttatccttcaggcagcagaacaaagcagcgcagaaacaccaagaaaaggctcaaaccctgct

SEQ ID NO: 372147 - DNA, 512 bp, Homo Sapiens
  misc_feature (97)..(155): n is a, c, g, or t
  misc_feature (190)..(251): n is a, c, g, or t
  misc_feature (316)..(343): n is a, c, g, or t
tacttttccacaggaaagtcagtgaggtcatcttgatggatgcctgaccagttcttccagtggtccctccagcttctgcagggcatcctcactaagnnnnnnnnnnnnnnnnnnnnnnnnnnnnnnnnnnnnnnnnnnnnnnnnnnnnnnnnnnnttagtttggcccattttcaaatccattgaatcatnnnnnnnnnnnnnnnnnnnnnnnnnnnnnnnnnnnnnnnnnnnnnnnnnnnnnnnnnnnnnnatttaacaactcactgagaagttttaccagagtcaaaaggtctcagtgagcatgaaggacgacannnnnnnnnnnnnnnnnnnnnnnnnnnncatagacacggggtctcactttgttgaccagactggcctggaactcccagcctcaagggatccactgcactcagcaaaaaaatgacaatttttttaatgaaacacaaagtaatagccaggtacctaaatattggagtcagggtatctttgaccaccctgtggaaaagta

SEQ ID NO: 372148 - DNA, 139 bp, Homo Sapiens
actttaaggtcattgccgtgtcgttgaaagtagattgatttagacacactgaggaacggtactatttaatatcatctttaaaaatggaaatagccttaatgatatatactatcaagttattacctatttacagtaaata

SEQ ID NO: 372149 - DNA, 676 bp, Homo Sapiens
gaaccaggacaaactcagtgtgccttgggtaaggagggtggcgacactgattttaactgtcaaattgatctagagttgtcagatgggataatttaaccctcaaatgaaggtgatttatcctatgtattgtaatcaaatagtcatctaagtcactccccatgagctctggtaaatcacttttagtacatattgaaagtgaccgtattgtattttattgcagaattgcgtcttatagtaataactaatgcatgccattggcttttgctctagcaccgaattacactcacttggaggcacatggatccaggtgggcactgttgcttccatttgcttgtccacagtcagaactgagaggcaggtaggaaaactgtactgctgcagtctttgtagattagctcaattcagagacacctgtggtcttgtgaaatgccaaactttactccagtggcatttgggtcaatgtgaactaggatgggcctagcaattctattaggtgaatgacaagtgctttgtaatgaaacagaaggactttatttaaacagatataaggactggacagaaatcaggcttaaattgtaccttatctgggctcctgctgtaaccttgtaactggtcttaccacttgtggtctcaagactattttgtcctgcagcccccagagcatctcctgtgaaca

SEQ ID NO: 372150 - DNA, 426 bp, Homo Sapiens
gtcggtcctactttcacagggggaaaaatgatttagctttgtgataggatagaagttttggggtttcctctcattcccttgtgtgtaaatcatatacaaccaaatgttttccttatagactttaagtggttcaaagaggttcatagaaggcatgtgcagaagagacttcctgttaccagaccacgaaaacagaatcaactcttacaacacttaatctcttacacggaatcccttgctgcaaagatatttttgctttacctggattatatgtgtttatgtatacatgaaaatactaatttaaagtatacatatttacttgcatgaatgtctgtgtgtacttgtgaatctctcagtcagtattccccaaaatacatagaatgttaatgggttacaagaaaaagaaattgcctagccctgtggaaaaga

SEQ ID NO: 372151 - DNA, 403 bp, Homo Sapiens
ttgagccactgcaaccggccgtgaaacattttaaaaggagttgtacatctatatcttttttgtaggtgaagtttggaaagtaacacgatgtacaatttcatgattaaagaacataaaaagcactaaaaacctgtgttagcatttaactcaaatatagcagcataaaaaatatagcagcataatgttaatgaaactgttcaaatgcagacatagtatttggctgttgtttttcatttagtgaggattgctttgaattgcttcctgaagtcttccttgcaaccttctacattcatttgtaagaaaaatggctggaaaacagtgcatctgtgactatggaacagagtaggccagagtttcatttcatcattaacattgcagcacaaatttgtcagcctgtgtaatc

SEQ ID NO: 372152 - DNA, 702 bp, Homo Sapiens
  misc_feature (11)..(11): n is a, c, g, or t
  misc_feature (28)..(28): n is a, c, g, or t
  misc_feature (78)..(78): n is a, c, g, or t
tacttttccancaggggtttcaggcatngattgtaccacgtgcaggagatggtgttactgattcctctcataaatagnggtaacgcatataacatgcaagtgtggaacacttttgaaagcaaaagtgggcaacaaaaaactgaaaattattattaccagataaaggttttgccaaacaataaaataatagattcatatcacacagtgagcaaaaaatcactgtgcaagactgttcacacaactctgctttgtagcaagttattgaagtctgtttcttgaactctgtacttgtgtcacttcccatgcttcccactgacctagcagccccctgactgccccacctggagtttgagattggcagcagttgcagtgtggaagctgcataaggagctgagtgtaatgggagacctttagctaaaattaatttcgtaatcaaagatgtgtgccagaatcttttcttagaattgagtaaacctgataagctcctgtaagagaatcttggtatccttttaaaactttctttgtgacactcttgctattggggatcagcactaaatgtgtggagggtagaggtgtaaacaatacgttctcccctcaaaaagtccgaacaagatgctctgcttttcccccagctgactctcactgatgcacaatatagttaatcatcccaatagaagagtcagttgtgcctgtggaaaagta

SEQ ID NO: 372153 - DNA, 474 bp, Homo Sapiens
aaggatcccctactttccagggctgggggaatcacactacttgatttcaaaaagctataaatttactaggacagtgtggtattggtgtaaagacagagatacagattagtgaaacagaagacagtccaggaattgatcatgtatgtaagttaattcatttcaacaaatgtgtcaaggtaatttaatagggaaaggaaggacagtcttttcaataaatggtgcttgaaaaatatgcaaaatgaaacaaaacaaaattaaaggaacctagacttttaccttacactacatataaaacttaactcaaagcagatcacatacctaaatacatgggctaaaactataaaacttctcaaagcaaacaggagaaaatcttcatgaccttaaattagacaaggatttcctagacagaatgcaaaaagcatgaaccataaaattaaaaactggtaaaatggatttcatcccactgtgtaagta

SEQ ID NO: 372154 - DNA, 515 bp, Homo Sapiens
tactttccaagattactaatatcttgcagaaaaccttactggtgtgtcgacttcgattataagcactcggaagaaaaataacgtagttcgtaataacgaatatatttactttaaagcaagacaatattctgcaagcttgtgtgataaaatatacaagatcttatgtgtttttatgcttgggcagaaatcttcatgttctacctcagagcctgaggagaacaagtttattttctaagttaagggcatgtgagtagaaacatttgacaaacagtggtctggcttctaaccagttctaatccacaaagttaaacaataagagataacaaaaacagaacaaaaagaaacaaataacagtggcaaatacttatgctgttcctgaaagactactccataggtaataaaaactataaaaatggtcagtagtcaaaacagtctgactaagccaggtctgctcttcacgtggaacatgggctattaaaccttgctctgagatatagctcggatttctctattcc

SEQ ID NO: 372155 - DNA, 561 bp, Homo Sapiens
atactctcatcattgctgtgatcaagctctcggttcaggtgttgtggtcaggtgtctggcctctcggtaatgctgtatggcaggatggataaacaagctcaccgctcggcacacagcaggtgattaaccaaagtgtgtgtctggatcaatttctaactaaatttacagttcatagaaactctttgtagtgatcaaaattgctagtatcaacaacaggagcaaacagaagaaagagtgtcctgctgtaaagagctgctttttccagtcgacatccccacctgatctatcagcaggtgaagccttattttcaggctcgttttctctcagaaaataggctattactatctctagacagtgcagaagtgattacattttaatgcagacctctcagatttaactcaaaagtacctaccgaatgaagtacctgagccgcttttatagcaaagattggcctaccagtcggccatctgagaacatgctgtctttgttctgcagttaaggaccagtctcaccaagtaaaattgaacagtcagagtcccctcccagtggctgcttttggca

SEQ ID NO: 372156 - DNA, 540 bp, Homo Sapiens
taccactttcccagggacatgacacagtggacaggaccaggctagggtagaagttcccaaaataaaaagttttgaatcattgcagaaagcagtcaacacagtgggaccaaagatacagacagtcaataaaacagaaaatcctgaaagcacaaagaaagattgaggaagaagttaacagaaatgagaagaatgagaaagaaggtgaaagttcctcaacctcccaagtagaaaagacagattcctttcaaatatgcctaaaactggctacttctggggactcttaggctgctgtggccaagactggaagttaattttcaaaaacattaaagaactggtggtagctaagaaagtggcccacactgatattgttattaaatgtaattacatcagaaggatattcttacatactttacctcctaagtaccattttagcagacatcagtggaaaacacttcgtagagaactgcaagtttgctttaacagaggtgtaaaaaatgtttacacaacagagctgcgaggactaccgcaacggcgacagcg

SEQ ID NO: 372157 - DNA, 656 bp, Homo Sapiens
tactacttttccacagtggagcacacagggtgagatttagaaaaagaaccactgccatctaccactggccatcagcagaggtaggccctgggtggccaggagagtcagaactgggatgggccagtccaagccccattgctggaaactctacacatcacacatagggcctcacgtagggcctaaataggaggccctgcttaggatgaaacactcactaggagagtgagcagttgaggccacggcagcaccaaggagcatgttgtctgtgcccaggttggccccacctctgtgtagccagagtgagctccattgtccaggtttgatatcaagaccagagtcaaggttggtccaggtttctgcagcactgacagaatacactcctttcggtacctggtccgcatgtccctccgagcatgaggacagccaggacagagtcactgtgagcctgagagatagtttgtccctgccagtcagcactggccagggaagcccaggcagaagcctgccaagcatgtcttatagaaaccaaaacagatacctttattgcatactttgcacatatgaagaatatatctgtataaaattataaagacttttgtccagacattatatttttcttgtcacctttattccttgtaccatgccctgtggaaata

SEQ ID NO: 372158 - DNA, 353 bp, Homo Sapiens
gctgtctcttacgtttccacagggagggatcaaaggtgactcttggcacttgccccacttctccacgttcagtgggtgggagccgggttgtctggtttgagcacctgggtgaacagaggagtcagcaagtaaaagagggaagaaatagtttggtgggggaaatcaagtgttacactgacaatgtgttacattagagatgtttataagacatatacatggaaatgtattgtatatacaagaccaaagtctgaaaagagtgaggtggagatagaaaaggaaccctcgctgcatctttctctcatcaaaacacaccactctagtgctactattcataaactcatcctgtggtacag

SEQ ID NO: 372159 - DNA, 425 bp, Homo Sapiens
ttttccacagggctatggaacacacctgatgaatcatttgaaagaatatcacataaagcatgacatcctgaacttcctcacatatgcagatgaatatgcaattggatactttaagaaacagggtttctccaaagaaattaaaatacctaaaaccaaatatgttggctatatcaaggattatgaaggagccactttaatgggatgtgagctaaatccacggatcccgtacacagaattttctgtcatcattaaaaagcagaaggagataattaaaaaactgattgaaagaaaacaggcacaaattcgaaaagtttaccctggactttcatgttttaaagatggagttcgacagattcctatagaaagcattcctggaattagagagacaggctggaaaccatgtggaaaagtacccgtgaaaagta

SEQ ID NO: 372160 - DNA, 560 bp, Homo Sapiens
gaagctgcttataagcatgaaatcaaacactgtgctcaagtgacttttcacatagtaaatacagatggaaggatatgtaagagcaagtacatgactttgccttagaccttttttttaactcatcatgtctgtcaccaaacatgacaaatatttacccttccaactgtatggtggactggttctaattaaaaagaaaaataatctttgaaaacctgtgaaatcatgaagctgagttactgagccccgtcactgagaggcaggttagtatgtggttaagagctttgaagccaaacttcttgggatcagcttctagttctgtccttaattgtctgaccttgggcaggttaacaaacctctgtgtgtctctgttttcttagagataataataataggtacctcaaagggtttagagaagataaatcaatatacatgcatattatatattaattagaacaatgcctggcatatgtaagagtcacataactaataaacattaaaaaccgccaaactcaaagtttcaggatacctaggtgccaaagtactatggcatcccattattt

SEQ ID NO: 372161 - DNA, 563 bp, Homo Sapiens
tacgttccacaggtaaactggctcctaacaaagatcagtttcagcttatattttgtttcctcaaagagtccttccctgactacctaatcataccatctatcctcactcaagttactcagtagcctaacagtctttctcactttggatttatatattcattaatttgtcggttttatctatctctattagactgtagtttcatgacggtcatcttattatattcccagcaccaacctgccatggtgcttgccattcaggaggcattcatatatcatagtgagtaaatcagtggaagaacaaacgctacccaattccattcagctattcaacacacacttgtttaagtgccagtgccttgggtcatgtttttcccttgaggtagaatgctccttaacctattcattgtgcctattcaaaactcactaactcaaatgcctcctccagactctcccacctgatatgttattttctttgagttcccatagtacctgaactataactccttctattgttactcctattcactattatatttatctttatcatttatctccctgcacact

SEQ ID NO: 372162 - DNA, 446 bp, Homo Sapiens
actaaggatcccctataccacagggtctgtgtaagtatactctgtgatgttcatacagtgatgaaatcacccaaagacacatttctcagaacgtagccccatcatgaagtgacgtgactaccagagatttctggaaaagcactcccaaaagtaatgagatgtgtatggcaatgttaactgaacctgtttgtattaaaaagtaaatccctatgaggaatgtggaaatgtccgtcaaagcattgtcttttaagtaagttccaagatccatgaattaacagaggcatatatttaaaatgaaatttaatgagcacttagtgacttcatttgttcaagaatatttgatttcctattgtgtgcatgggaggtttacaaaagacagactgtccctatgcttgtgcagcttacaatctatttaactattagaggccctgtgccctgtggaaaag

SEQ ID NO: 372163 - DNA, 395 bp, Homo Sapiens
gacattgttaacaagatccccttggcaactgtgggatggttgtattgaaggtatctaatggtgacagtaaacaggactgttgcaacagtcttcatgaaagggattggagacatgactgatgtgtggcaatggagacggagagacctgcacagaaacctgcagcttgtggctctgtttggacctgggatcaacagcacctgctaatggactggatgtggaggctgagggaaagggaagatcaaagttgtctcctacgtcagccacttgagcagctagatggatgatggagcactttatactgcctggggagaaactgagggagttgggaaagggcatggacttgcaccttacacgtgttaaatgtgagatacttgtgggcatcccctgtgaaagta

SEQ ID NO: 372164 - DNA, 753 bp, Homo Sapiens
ggcatagatgagctagcctgcatgtcagcagctgtggaagctgtcagttgctatgtgttaagaacaagtctagttgtgaggcagaagctctgctgtggttgtgccttgcgccattacctgcctttgacaagcccaggggacagcagtgctttgcacgtcctcatgttgaagtcccacttgcaggtagttaccttagaatgccagatacgctgtcgggttgatccagttataaaaggctcatatcacagacgtttatattgaactgtatgttattatgaataaggaattcttatgatagctagaaatcacatgctttggaactaaaaatagaggacttcctctcacgttccctccctgggcctgtgctgcgtcgtcgtgctgcgtatttggatactatccttcggagcgccacactcgagtgatgtggctcagggcagtgtgctgaccttggtgagaggagagttgctgttgcttgctggctctggtttagagaaaggtgccgtgccatgctgatattagaatgctgcctatgaggtggaatgcacgcttccgggtgatgcttgtaatagccacttaggatatgagcatctaggatctcggcacagagggattcagcgtggtgggagatgcgggaagaaatccgtaatgacagactgttgtcattactgcttggaacctccccatggaccaactgataacttgaagggaaaataagagtttagtctggggaggtatatgatgtcagcacggatt

SEQ ID NO: 372165 - DNA, 524 bp, Homo Sapiens
taagccttagcctgggagagaaacctcatgaattgtaacgagtgtggcaaggcttcagccacagttccaatctcatcctccatcagcgcatccactctggagagaaaccttatgaatgtaatgagtgcgggaaggccttcagccagagctcggacctcaccaagcatcagagaattcacacgggggagaaaccctatgaatgtagtgaatgtggaaaagctttcaaccgaaactcatacctgattttgcatcggagaattcacactcgagaaaagccctacaagtgcactaagtgtggcaaggccttcacgccgcagctccaccctcactctgcatcacagaatccatgccagagagagagcctctgagtacagcccagcctcccttgatgcatttggcgcgttcctgaaaagtcgtgtgtaaaggaagaatttgccatcaagccatttcccccttatgtttctaaaattatttcagagatgtgtgctcctggagggaaacagaaatacagcctcaacagatta

SEQ ID NO: 372166 - DNA, 494 bp, Homo Sapiens
ggactcggtcctatttacacagggtcaggttccgaagctgtacattagaggctaccagctggtccatggcccggacagagtaggtgatgtccccagcattcaagtgatttcttgtccgttcagccagctctctagcaatgttggcagctgtttcaccagatttcaacttctgtgttatatgattgacccaaggagaagaacagttgctgagatctggaccttggggatcccaaattccatcaggagcaaggcatagataagttgatacacctatagttcctgcagggcatggctgctttgctatctgtccttgacgagtcttaaaccacatgatttctcgggcttccacagcctcacagctctcttcgagagctgggatttgggacgatgctgatggaaggtgtgtggtcatgtcatcaagtacctcgacagctggagatggggtactagtactccgcctttcttcttcctgacactgacggggtggtactcct

SEQ ID NO: 372167 - DNA, 476 bp, Homo Sapiens
actttggaaagccaagtgatgggaaagcagcatggaccgatgccgggctgacttccaaaaaatccaaattagaaagtcacagcgactcaccagcatggagtttgtctgggagagatgagagagaaactgtgagccctccatgctttgatgaatataaaatgtctaaagagtggacagctagttctgcttttagcagtgtgtgcaaccagcagccactggatttatccagcggtgtcaaacagaaggctgagggtacaggcaagactccagtccagtgggaatctgtcttagatctcagtgtgcataaaaagcattgtagtgactctgaaggcaaggaattcaaagaaagtcattcagtgcagcctacgtgtagcgctgtaaagaaaaggaaaccaaccacctgcagtgctgcagaaggttcttctcaatgaatataatggcatcgatgtacctgtagaaaactctgcagatgggac

SEQ ID NO: 372168 - DNA, 378 bp, Homo Sapiens
tagttgaacagggcacaccctggggctgagtctccagggccccccaactgtggtagctccagcgatggtgctgcccaggcctctcggtgctccatctccgcctccacactgaccaagtgctggcccacccagtccatgctccagggtcaggcggagctgctgagtgacagctttcctcaaaaagcagaaggagagtgagtgcctttccctcctaaagctgaatcccggcggaaagcctctgtccgcctttacaagggagaagacaacagaaagagggacaagagggttcacacagcccagttcccgtgacgaggctcaaaaacttgatcacatgcttgaatggagctggtgagatcaacaacactacttccctgtggt

SEQ ID NO: 372169 - DNA, 523 bp, Homo Sapiens
aactgtatgttgacgtcgactcgtagaggatctcctactttaccacagggtggtagttcccaggctctgagaggtattttcctgcaaagcaaggtctaattttatagttgagcattcttttgtctgagccccctgttcatggctagaattacggagatggcttttaggtccctgacccaaattggaaagagattataagtagttggtggcagccaggctagtgtccattactgactgggtcacagtggagtgtccagatgctgaagaggcaggcattttagaaatatcttcttggaggtggggggtggctaggtcactctgtatgtcagagacccacggcaatctgtcttctgatcagctcccaggagccaaggggtcaggggaaagccagccatgagggcttgggcttcagtttgacttaaagagcaagggaaacagaaaactgctgacagtggaaaaaccctggcaagggagaccccttgaatttattatttcaagcaaataaaagcaaaccataaccatc

SEQ ID NO: 372170 - DNA, 618 bp, Homo Sapiens
  misc_feature (264)..(297): n is a, c, g, or t
  misc_feature (310)..(397): n is a, c, g, or t
gctcagtcactctaagatccctttcacagggaataattgctctgtcaatgaggcagaagataatgcatgaacccagaagacacactggacacctctttatattgccatatccagtgggagtgttaatgaaagacgactacatttccaaccaggcaggacccagaactcaatcctccaggaatgaagatcagatcgcccttaccctctgcaaaaacaaaccaaaacaaaaagcctagcttgagaccaggtgcagtggcccacacnnnnnnnnnnnnnnnnnnnnnnnnnnnnnnnnnnggaatcacttgannnnnnnnnnnnnnnnnnnnnnnnnnnnnnnnnnnnnnnnnnnnnnnnnnnnnnnnnnnnnnnnnnnnnnnnnnnnnnnnnnnnnnnnaacaagcaaacaaaccaaaaagcctagccagctgagggctggcctgaggtaaggaggtatgaaatgaattacagaggggcaagtcagaatcacagccacagcccagcagcaagtggcagaaccaagaacggcaacctccactcgtgtttcccttttgtaaggtcaacatgcattagtttccattaatatccttgcttgcctgtgaaaagtaggtccggctc

SEQ ID NO: 372171 - DNA, 455 bp, Homo Sapiens
actttagaggatcccctacttgtccacagggagaagagagaatttccttaaagatttccaaatatatgtagatattccccctttcatagggtggagcttaatcttctcctttttgaacgtgggctagattaagtgactcctaaagaacagagtatggaaagggaaaaagtaactttgcagtggagaaacctggcagacttaaccaagtgatcaatgttaatatcaccagtgatgtgtacccccgataggatgtgaagtgaattgtactgctgtggtttccaaaaacctgtaatctcaatctaatgagaaaaacagacatatttagaatatgtgaacagtattcttcaaaatttccagaaaatttttctcagaaaaacaggctgagaagtaaccatggacggcagaagactaaagatacatgcaactattaataaatgcaatgtgtagcctgtgat

SEQ ID NO: 372172 - DNA, 735 bp, Homo Sapiens
gtgtccacaggaatctcatctttatgtcacagttcgtcatttagaatatgtggatattaatagcacttacgtactacctggctatgtatggagtaaatgaactagtgcatgtaagggacatataacagctcctagcacctaggaattactatagaaatgctagttactattaagaatttatttagagcgcctgagatctctctcatatcggaagtgtgaggatcttgtaggcattggtcattccttaatgtttttatatttttttccccaaagcaagcttagttactgctggttaaaagaacagagtgactttcatataaaagtgactaacacagcatctgacaattaatgaatccagtgagtgactgaatgggtgaatatggagtttatggaatagtagttgacacagaataggcattcgctaagtctttcaagatgaagaggcatagtcttcatcaccgaggcatccgctggccttacagctggatcacactgagtcatcaattgctattattgaggtattctgcggttgtggtctcctaggtcagattcttcttgtgtgggatttcagggtccagggaccaggatggtctagagttgtcaaaaagcatcctggagaaaacacgtgaagtgagcttcaagaatagaccagtaatcaagagcctggggaggagagagggcctgccagcgcacagcttgggtctcctttatcgacttgatgctgtgtgacaatca

SEQ ID NO: 372173 - DNA, 210 bp, Homo Sapiens
ttttccacatggatatggaacgtaacgagagaatgtcagaaagtctactgccaaactacaaaaaatgctgaaagttaagggacactcaatacaataaaaagagccatacaatttttgaagataatttgacaaaaattagattttagtgatactggtttttcaagtgctctgaagcataaaccaagagagaaagaataagacaggcatcag

SEQ ID NO: 372174 - DNA, 457 bp, Homo Sapiens
  misc_feature (230)..(263): n is a, c, g, or t
  misc_feature (274)..(325): n is a, c, g, or t
  misc_feature (348)..(396): n is a, c, g, or t
tactccacagggcaacaaaaccaagcaaattcaagacaataaataaagcgctctttggactgcaaatgaatgtggcatcaatactataagaacactaaacttttcaataatgttgtctctaaaatcaaaacacctcctacattttagtatacaagaggatgtgcataggtcatacacaattaccataccatatcatgtaagaaactcacctgggcacagtagcttacgcnnnnnnnnnnnnnnnnnnnnnnnnnnnnnnnnnnagtatcacttnnnnnnnnnnnnnnnnnnnnnnnnnnnnnnnnnnnnnnnnnnnnnnnnnnnntttttaaaaaattacccattcannnnnnnnnnnnnnnnnnnnnnnnnnnnnnnnnnnnnnnnnnnnnnnnngagacctgtctcaaaagaaagggaggggatcggggggacttaagtatcccctgtggaaata

SEQ ID NO: 372175 - DNA, 518 bp, Homo Sapiens
  misc_feature (501)..(501): n is a, c, g, or t
gggagcataaatatacggattattagtgacgttctgaaagtgatctgaactacttagaaggaaagggataggtaaaatacggggcatgttggcccagacttcactcggaaacagaaggagcttccctcccctgggagaggacggcacatctgccgcactcctccatctgcctgcctcggggcactgagcccaagtcggcggcagaaagctcaggcctctacacagcagggcttgtctgaacacaaagacacagggtcctgtaggcccagagaggctgctgtgcgcagacggggcacaaattccactccccaggcagcctcccctcatctggaaacaatttgcttttcctcctaccacacaagtgagttaaagcagagggcctgccctcacccctctcccagggtgaccagctgaacgcctgagagcagccaaacaacaggaacagggtccccctgcccatcacccccatacgcctgtccactgttgtcctaaatgaccggnccttttgctctggaaat

SEQ ID NO: 372176 - DNA, 670 bp, Homo Sapiens
cggcgaggtactttccacaggggcaagccattgtgcccggccagaaaatgaaatttaaaagctaccatttataaaagcaccaagaactatcatgtacttaggaataagtctaacaaaagtgtttattatctttctggagagaactataaaactttgaaagatattaaagcagacctcaatggagtagatactggactggaagacttaacattgtaaagatgcaaattcgtccaaacagatcataagttcattgcaatcccaatcaaaatccaaacagatttttctctggaaaattgctgattcttagaaaagctgattctaaaatttgtaacaaatggaaacaaatggaaagggctaagaatgtccaaggtggaaggactcactctactggatatcaagacttttagcaaagcaataagaagaatgccactgacgcaaagacagacaaacaatggggaagaaaacaacttagaaattaccttgcactgagtctgaaaaatacaaatttttctataaaaagtgctaggataactgggtagccatataagcattagaaaatgaattaagagagataactttttaaagaaaacatcaattaggaatcacattttcttaaaatcctaaaagctttccatactaaacactatcctgtggaaaagtaggtaccgat

SEQ ID NO: 372177 - DNA, 1089 bp, Homo Sapiens
aacaacaaacaaacaacatagatctatcacagcataaagtaggaagtatttcgttaccgtctagttcaactggttaatgcagaaaggaactctggtaattccagttttaaagtaaaattttggacatggtaggatagattatttgggcatagttgtgatgtattgttccagcgaatatggttttgttggcaaggacagccgtttaaggacctgtatattttctttctatgactctatatattccctgtgtgtatttgttgtctgggtaaaactggcaaattgtaccataggtataaataatagagaatgtggaagaatagtgaatagtgtcagagatagttaaaagtccatacaatagtagagaaggtagtaagtaatagtggcttggactaaatatttgttgaataaatgttttaaaaaacaggctacctacaatttgtgttgaagatatgaatgaatgaagtttccacacctttatgtggagacctgataagtaagcaacaataaggaagggtccccaggttggggagagccccaagttgagaacaataatgaacaattattgtatgaacaattgttagagacagctaatcacaaacaacctgcgggcacaatgacctcattccacacgtagcacccttcagcaggaccctataaaactttcctccagcccttgcctcttggcaggtagccccttctctgctgagctgcccactgcaacatattttcacaatttctctaataaatctgcccttctttacctacaactatcttggtaaatggctttaccacctgcaaaactgaccctaggttgttgctacccgatatggttcggctgcgtccccacccaaatttcatcttgaattgtagttcccataatccccatgtgtcgtgggagggacccggtaggaggtaatcgaatcatgggggcaggtttttcccatactgttctcgtgatagtgaatacatctcactaaatctgatggttttataaagggcagtttcctgcacgtgctctcttgcctgctgccatggaagacatacctttttgctccttgccttccaccatgattctgagcctctccagcc

SEQ ID NO: 372178 - DNA, 351 bp, Homo Sapiens
taacatgatacaatcgagctctgtacctgtgggtagcagaactagggatcagttgcaggttgtaagccatttaccaatgatagttgtaggtaagaagggcagattattagagaaagttgcgaaaatatgttgcagtgggcagctcagtcagagaaggggctaccgtgcaaggaggcaaggtgctgtgagtgaaagttttatagggtcctggtgaagggtgctatgtgctgaaatgaggtcattgtgcccgcaggttgtttgtgattagctgtctctaacaattgttcatacaataattgttcattattgttctcaacttggggctctccccaacctggggacccttcctta

SEQ ID NO: 372179 - DNA, 359 bp, Homo Sapiens
tgacatgatacgaaccgagctcgtgtacctgtgggtagcatcaatacaggaagggtccccagcgttggggagagccccaagttgagaacaagtaagtgaacaattagttgtactgaaccacttgttacgatactgctgatcataaacaacctgtgtgtaatatgttttccctaaaaacgtagcacccttcagcaggaccctataaaactttcctccagcccttgcctctttgcaggtagccccttctctgctgagctgcccactgcaacatattttcacaatttctctaataaatctgcccttctttacctacaactatcttggtaaatggctttaccacctgcaaaactgaccctagg

SEQ ID NO: 372180 - DNA, 581 bp, Homo Sapiens
  misc_feature (350)..(363): n is a, c, g, or t
ggggccgctgcccaagaaccctttcctggagagctgctccgagaccgcgcagcgccgccgcgtcttctccttttccactcctctctcctaatttttttgatttaccagcgttcgacatcgttatctcttcctctagattaattgcttcgctcttttgagcaagaaaactctgtgtggcatctttggtactatggggaacgagaatccagcattatctttaataaaatccagaaacatttttggttgtttcctttgaggggtacgacgcagcacgctcacttttttccccttctcgttggccttggtccttcagtttcacaaaatgtggatagtgacttaaaaataccttnnnnnnnnnnnnnngagaaaaccattagagtaaggggaaagcacttcctaaagagttgaagaactaattggtcggtacaaattggatattgaattcataagatgttaaaatggactggatttttggaaattttggttgcttttaacaaaattagtgctagctttcaagtgaattacaaccttaaatttgagatttcctttggtgacacatggaagttaaccctgtgaaagta

SEQ ID NO: 372181 - DNA, 662 bp, Homo Sapiens
ataggcaattgataatttctccccagcgaggactattactgtggtagaggacaaaggagtggtaggaactcctatttggctctcctgaacccaagctgatgcaatccttcaagatttctccatctgcataaagcacatacatggtcacttcaatattcttttgtacactctttcctcctctctcgaaatcccccttctccagggttaggtacaggtcattgcggatatcacctggcataatgacatcaggaaatcccaattttcttgtaattgccaatcccctattaaatatcatgggattttctctccgaatctgttccatgtctccacgaagaagctgcagagaaatgataagaccatggctggcgctgggggcagagtacttggcactggactttcggatgatgttctcgtggatctgggaccactcactctcgttgttgcacattctgatgttttagtgtcttccttctaaaggtcaattcccggagaactgcaaccacgtaaccatttggaacaaagtttaggaacagagactaggaattccttatcctagtacagacaccttgataaaacaattggaaaaagattagggtcatctcttgaaaattccatttgacacttagggagttcccacagcactggttctaccccgtccctgt

SEQ ID NO: 372182 - DNA, 410 bp, Homo Sapiens
tacttttccacaggtcttgcaggaggttcagtgggaataggatagacaaggtccctgctcttgtgactcttatattctggttgggaaaactgacaatgaacaacaacagtaaacaaagaaataaaaataaatccatggtgataagtacccttatatggaatagagaatggtcaggtaggtaggtgaaaagagactgcacattagatagggtggaacaaatgaggtttttctgagatggtgacatttgcattgagagattaaagagttaactaaccactcattactttgtctaacttttacaacaacctgagataaaggtaacattagttcagcaggtataagcaaagaaattaattacccaactaggttaaataatttctctaagattacacagattttttcaatcctat

SEQ ID NO: 372183 - DNA, 529 bp, Homo Sapiens
cttttccacagggcagagaagctatgggactaggatttatagggtaaaaaggaaggagcagagagagagcaagggagctcaagatctttagagtttggttccaagtctttggccaagtactgacatgtacatgcatgtatatgcatgagaggaaacaacttgagaccagggaaagctcacacaaagctgggaataattctttctccaatgaaccaaagtggaaagatctcataattaacagggcatgtgtagtcttcaaaagggtattgtgttggtggtgctgaattagacctggactaaagggtattcttgacccactgttagaaatattaaaggcaaacctggaaaaggagcaaactgattccaagtcacttaactgcttgccagaacaaagtctgacattctttgaaggaatacagcaaaatctagcacccaaaaatataaacattttaaggtctggcattgacttaaaaattactagcatgaaaagaacaagaaaaaaatgtaccctgtaacctgtggaaaagta

SEQ ID NO: 372184 - DNA, 529 bp, Homo Sapiens
caggggtcaggtgagagaaggcatctgagcaggaggagcaagccaggcaatgggagtgctgatcagctcatcacagcactggcctaggagcacttgtgccattgctccggcacattcctctcctccctgctgccttctgccttcagtcagtgtaagcctcatctcctcgccaggttctggacttctctggcctttgctgggtgctctggtctgtcacccatcagcactacttggtaagcatcacattagttagtactaacaaggaaatacccctactgcttggtactctcttcacatgtaagtaaaaccagacatgaatgtctttagccaagttcaaggacaagactaactcttttcctaagctaagaccacatcatctggccctgatacttcggaatttgcaggagcttctaacccccaacaacacttcttttaggttgctgtaatcattatttatttaaaaaaatctatctgtgcaacctcttcatgatcgtctgatcaaaagagggtattaccccctgtgaaagta

SEQ ID NO: 372185 - DNA, 636 bp, Homo Sapiens
ttgcagagttacagcttcatatagagatgaaagggtccttcttctggtaatgccaatcctagaactgatttttattgacccatctagtgttatgtctcacctgcttggccccagttagtgtggtgggctggaggataagaagatagaaggaactgacagatttgatccatccacatagtagcccctgttagaaccacactgttggcatggtggagggcaagtatttaatccctaaatggagaacttggttttatcagaagaatcacgagaaaggggtgctgcacaggaaatcctacacgtccattacaaattaatttctccctctctaaccttatgcttctcttgtctttcttttccgcaactaaagtaccattagaactttctttcttaactgcctgactccaacgtcttttcctctctaaatatattaacacagagatctgatttcataaaaatgaataaataagatttgtgtgtgtgaaatcattacccatctacactacactcttccaatggctccattcacttcctgttaaagtgcatatttcttcttcctccagaagcctagactcatacttagcaattcaacctgaagaagagctttcatttcaggtccatattttacctgtggaaaag

SEQ ID NO: 372186 - DNA, 528 bp, Homo Sapiens
cgcccaacagatgtttgctgaataaatgacttctccgaaatgtaataatacctgataatatgtttagcctgatcaatattaattaagtacaacagacagaagtcccagaattgtcatcaaattagtagaacactttgggagggataacaaattgctcattcattcattattccagtcactggaaaaacagaaatgaacaagtacatatgatacctgtcctcatggagcttgcagtcaaagtgaaggtgtccactcccctgccccataaccagaaccaaacagtgcctgtgggtaaggccaaggtcacctggcccccagttctccaagctaacaacatgtgaattatcctcaattctttcttctccctcaccttccaaaacaattacccaatttgtcatcaagacctcttgagtctacctgaggaacgttccaaatgcagtccaactctccaactccactatcattcaattcctcatcctacatcatctgccacttgagaactgcagcattctccccctgtggaaagta

SEQ ID NO: 372187 - DNA, 776 bp, Homo Sapiens
catgaaggcacaaaaagggaacctgaaatccaattgcaataattactcatgcaattggcctctttctatgtggcattatagaaacctcctgagtaacacagtttatggttttacaaaagagaactcctacatcattgcatggcatggctaccgcttccttagaccattcagagaacgatccccaagtatttttcataaaccccatagggtttcctacattaaaataaagtgacagagatcacgccttgaataatttcacaattccagcaatgagttgtactacttccaaatgacgaattttctgctccaaataatgggacaaagggcatcatcacatggacacagtcaatttcacagtgatggactcacacaggtggatgatctgaggcacaagctgtgattggtcttaagaaaatgaaaggtagagttgggtccaaaatccacatctcacgatttctggtccttattcatccaaaaagttgaactgcttcatatcagtgtattagacacattttaaatctttctcaagagttgctctgggtgcagcatgataaggaaaaccaggtatttggcttgatagcagatattccaggtataggtgccaagcttatggtaagcttctcaccgtaggatatctgagatctgttgccacaaagaggactatggtcctatgatgactactatagttcagttttcaacattttgggaataatttgatcataacctttccttctcgttacattataagacaggaatttagagtattccgtggaaaa

SEQ ID NO: 372188 - DNA, 441 bp, Homo Sapiens
ttttccacagtggcttgggaactttgtgtaaatactttcatgtacaattctctttcttgctatcctgagattaagaccacaattatgcaggcttaaacctaaaataaaggaacctttgcaaatgcattatctggccttacatgtttaatcacacagtattctgtgtgctctttaatacctaaactgaagaacaaaggttgtaccctctgatgtttcacaatatgaaagatcttttaagacatatattagacaattggggaaatagaattaatttttaatgacaatagcatagtgtttctccatctaaaaccagaggctatattaaaagcgtcacattctaaagaacttaaaatttcaaaagagtcagtcaccatttcaaaatatctataatacctgacataaaattatgatatgcatgtcagactctcaaaagtaatcctc

SEQ ID NO: 372189 - DNA, 343 bp, Homo Sapiens
aggaaactaggtcactctaattaattaaaattttgatacaaagaatttataagatgaatgatagatgtgaaatttactttctgttttcataaagcatcatttttgctgtcttgttctacagtgagcaatggttctatgacttaaaacaccaaagtgatgatatatgatgatgtagcttatacatgtgtttctgtgcgtctgacctgagagaactttatatggttttatctggaaataggagatataaaaatattcattaacctgaaatactatgtggaatacttagatagagatgatgaatagaaaactagcataattatttgtgcctgtggaaagtaggtcc

SEQ ID NO: 372190 - DNA, 472 bp, Homo Sapiens
ataggagagagtggcccggattccactgcacagattcttcacttgttagaagccactaggacttaggagtttctaagcttttgcttttaactacatgtgcaataataatatttggataggcacattttaggaactttgtggcaaattattctgttgataagtagattattatgagctgtgaaatatcaaggattaccaaaaaagggggcaagggataagaaagaatccatatttaataaccaaagaaaactttaaacccggagcaaaacaatgttcctcaaatgcaaataggaaaggacagccatgattataacgttttgctcaagcattttcttctttgttcctctaacttaacagaagttgaaacaagtgaaaataggaaatttccatttagaatacaaatcctgtaagtcacagagcaagtcggaaaataataaacaaacaaacaaacacccatgccctgtggaaaata

SEQ ID NO: 372191 - DNA, 552 bp, Homo Sapiens
ttgatagaattaggtcttgcctgatcaaagccttggagctgctgggtgattggacatggactgtgttctccctaggcatcttgtgcttgtccttccagtgctgattgtcctcggcggtgcccataggtgactctgtcttccgtaccagggctgttctgtggagccacagactgtgtgcctctctgttaccgctgtctccagcaccttgaagggtgcatctgctgctcacagaccttcagtaagttcctgctgagtgagtgaacacacgcttgtttgtaaggattagtgcttctgttggcagtgggatttgagaagcagggcacgaggagagagcaaggaacacccgggaacctaccctccctcagcctccaccttgttagagttcctcctgataggaagtggcagggaaacgcagtgaatctaaggaggggcacgtgtctatgtttctgattgaaacacttttcttttctgtaattgaaatagctgtggacgctggcttgagaaaatatcccctaacttgcagtgtctagcatcaatgctgtttcaaatctt

SEQ ID NO: 372192 - DNA, 533 bp, Homo Sapiens
aaacatcagagccagcagagccagcagtgtcatctgtcctgaagtagaaaaaaacagctatcaattaaaacaatcacccaccagtataacaatgaagagtatcaccatgaaccaaggcaaataaatgatcttgccaggaaagagatttagaggtgtaaagagagagctgagaaactagaaagccaatttgctgaaaagaggttcagtgtttaagattagttcccttatcgctttcatctacactcatgtcttttactgttttgtcctaagcaaatgtggtcaggaaaatgtgcgagttatagttaatgttcttaaccaatcaaattactagccgagtgtaatggtgcactcctgtagttccagatactcaggaggctgagggttacttttagacaagtattttatatgtattattggaagtattattaataggatctgttgttacattttctatctagttattgttgcaaaaccagaatacttaaaacatcacatgtaatttttaaaaaccctctctacctaatggaaaaata

SEQ ID NO: 372193 - DNA, 511 bp, Homo Sapiens
gttcacaggcaggtctgggatggatgtactgcctttctcagagctaggctgggaaaaacatttccttgtcatttattttttaaatgtcaggagattttaaaacttctaggagagcagataagtgataagaagaaaatctgggtcgtttttgtgcatacaaaggggccattctaatagtggtttcaaggggtcttttctagacaaaagaggaggagattgttttagtagccctctcttcctttcctggggagtttgaaactatctagttttgaaatctaaaaatccccaagctcttggatctggtcctttttacccccttagccatatattccagtttctgctaaaaaaagtctgcctcaagatataagtgacatccaactgttggggctgttttctcttttcatagaaaccagagcttctggggttctgagatgtctctagcggtcactgacctaaccattagcaactgggttctacaaataatgtccctggggaactcaataaaattatc

SEQ ID NO: 372194 - DNA, 486 bp, Homo Sapiens
atctgtggctatttaccagagtaactgggaaaggaaaatactcagacctttcaagggctgtggctacaaggtctgagctggcactgatatgtggggaccccaaatgctaccatggcctcaggttagagcaccgtttcatactgggcttaacaggtccatgaatccattcttgagataacttcctccacttgagaaatgcaaaattggcataggtatgcttaacagtcagctaagcataccctcacattggttctatgacctgtgaagtaagagccaatatggcagaaagggccaaacacaagctcctgaaactgctcttcctccctggcaacacaaccctggtcaaaatagtaaatccgaagcaaaactgcatcccaggagaaaatgcagtgatgagtaccaccatcaaagacttaggaatgcagaggtggtgatgcccatgctaaccccctcaactcacctggtagactccccctgtgaaaagta

SEQ ID NO: 372195 - DNA, 319 bp, Homo Sapiens
cgttatcacaggagattggagatattacaactcagaataacttgccactattgtatatatataagagggagaatcatgacaaaggtgattaataatatttttaaagttcttgactatcacatttgttttttaagaaatatttggagttagaacagttggtaggaatcctatctcttctgttccccagcagttaccccagttacctcactaggtttagttcctgctccctccctttaccccttttcacttagggttggtaatagcttacagttattactagccccagtatagttcactacaacttgttgctttacctaaa

SEQ ID NO: 372196 - DNA, 479 bp, Homo Sapiens
tttcacagggaaaaagagagactgagtcctgatgacatcatttatttacctagacctaggtgcttgtgaatagagccctactgtgctgaatagcttctgtctgctcttttctattctgctccctgctctgtgaggtaggttcctttgctctcttgcttttggttgggttcaacaaatgggaagcaccagtgggagattagaagttgagaggaaaatgaaatgatgttatttatttccctggctcctttcctgccatgtcatcatcagttggctgtgttcctctactaaatagtaccttatcaggaatcctatctcttctgttcccaagcagttaccccagttacctcactaggtttagttcctgctccctccctttaccccttttcacttagggttggtaatagcttacagttattactagccccagtatagttcactacaacttgttgctttacctaaacctgtgaaaagtaggtccg

SEQ ID NO: 372197 - DNA, 466 bp, Homo Sapiens
tttccagagtagtttccagagtaggtgtttaacttcacagggctcaggctcttaaccgactgaatgaggtcaccacctcccgtcaggtagaatgtgttaaacattttgaactcttgagattaaggctaaatgctactgggattatatttacttataattaagcaactctaagcagatcagatgcaagttattaataaggaaccagacaaatgttgtctaaggcaaaatttgcatacaacgtaataaatgattataccagttgtttactgtggaaagtggggtcccatgaaggaaaacagcacatctcttagccttccaggttttcccctatcatggtataaaaacttacttgaggccaggcgcggtggctcatgcctgtaatcccagcactttggaggccaaggttggggggatctcttgagccaggagttcaagaccaacctgcaacatagcaagtccatgtctc

SEQ ID NO: 372198 - DNA, 381 bp, Homo Sapiens
tatttccacaggacagggctcagctaaattgtctcgctcttcagagaggccttccttgacaaccttatttaagtgttgttgccaaacttttcagtcccttgttattttattccatcttattttcttcagatcacatatcactatctaaaattatcaattatttatatgtttactgtctttcactatgcacagtatgaatgaaagctccatgaaacaggagcattctatacttgtctgtgctatacctcttaatttggagaataatgcctgctacatagcctactacttttaatttaatttatttttgtttatttcaaagtaaatatcttcctttgttttttatatattcatttgggacaaaaagagcgaaagtcaatgctc

SEQ ID NO: 372199 - DNA, 459 bp, Homo Sapiens
  misc_feature (17)..(17): n is a, c, g, or t
agaagagacacaaatgnctatcaggcatatgaaaaggtgctcaaccccactgacctatagagaaatgcaaattcaaactacattgagatatcatcacaccccagtaaaaataccttatatccagaagagaggcaataaaaaatgctggcaagtatgcagagaaaagggaacttttgtaccccacagggtgaagagacatacccacagaatgggagaaaatatttacaaactatctatttgaccagggcttaataacaagaagatataaagagatcaaacgactataggaaaaaagctaataatccaatcaaaacacgggcaaaagatttggacagacatttctcaaaagaagaaacacaaatggcaatcaggcatatgaaaaggtgctcaacaccactgaccaatagagaaatgcaaattaaaactacattgagatatcatcacacccctgtggtaata

SEQ ID NO: 372200 - DNA, 882 bp, Homo Sapiens
aggtagggtggctcaagatcttcgtcagcattccaggcctgacttggcatggagtccatggtgtcagtgcgaggtggggcctccgaggagtgcccaaagttactctcactcaaggaggacacgccgctgctggcactgccggacagcgtagagttgctgccgtccagacctgactgggggcttgtgggggaggctgggatagggtggagaggagactttttcagccacagacagattgggatcactgcagggtttgcaggctccgaccacttgctggaacagggctcgctggaaattcggcggctgtccgttctccaggatggctgctggatacatggcactgcttgggcggtcaccggtatgtgggcagcaacaacatcatttcacgggcatggcggtacttatctggcagagagggagagcctcgggcactggaaggggcagaggtaatcatctgggatggtgctgagtgagtggaactcaggctggaggaagaagggcttgcctgggacgaggacagaacagagacgttggtgactgagccttggtacctggggttgggatacgcgagctgcatgtggtggtacaggtcctcaggagcatcacccatggagccgtcacccagcatcaccatgtttcctgcttcactgtgccggtgggtcatcttgatgctctccggactcatggggctatgggatgccagaacatttccccgtggggtgctggtgcctgaacatgcaggacttagcttatccaaacctggaaactcatggtagagactggcccgcatcatctggaactgatcaattagcttcttatgcagaggccgcatttctgggtgcacaacttctcatgaactgctagcccaaccccgacacgata

SEQ ID NO: 372201 - DNA, 470 bp, Homo Sapiens
  misc_feature (227)..(227): n is a, c, g, or t
ttaatttttaaaaactcagaaacaagatgatcacttagaaatatgaaattgaaatttgcatgggactccagctaaaacatctttgcaaacttgcgtagcacagttgaagacagtgcatcagatgtattatatgtaacatgatggaccagccaaaatggacaatgaatagatatttttatttcgatcaactgaactgcatattacaaggtgaaaaaagaaaactccgnattacttaagactggttcacaaagcaccgttataaattggatactggtcctgatctgtagggatttcccccctgggcccattctctttctaatccagattattctctaagaaaaagttaactgaattaaattaattgattcttctgcagtgccgctaaatggtctcaactgcagatgagccaaatacaggtcttttctcaccaggcctgcactccgacccctgtgaaaagtaggtaccgagcc

SEQ ID NO: 372202 - DNA, 219 bp, Homo Sapiens
ggctcggtacctacttttcacagggacaacaggacaacacaggcagtatgtggagggcaggggaactgggtttctcactggtgaaaggagaatagtaaacgcgaaaggcagaaaactaggatgaaccttgtggcatgagcctggattaaaggtagccaggtgaactcctgtcaatgtatataaagaaatataaacagaaatgtggaatgtacatacaac

SEQ ID NO: 372203 - DNA, 551 bp, Homo Sapiens
agtgtcccagatgaaagcttctaaacagcaaatgttccaagaaatagtagaagctacacagccttttttacatagctttgcaagtcatatagcatcactttgggaacattctactggcacaaggctgtcattaaggacagacaagattgtagaagaaaggaattagactatcccttttcataggaaaatggtaaggtagagtgataaaacttctttgtttccccatgacttagggggttaccatgacatgggtctttccattttaaaactaggaaagtcccaggaaaactagaacaagctggtttctctatggcaaggtcacattcaaaagaacattgggaagaagagatttttgctcaaaatacagtctgcaccccagatgagaactaagggacagagctgtaactatgaccagccagagtctagatcagccaaatcacaggcattggaacgatgtttcagccggcatggcccactttttaactcgagttgttctgtcggcatttgtccactgtagttcaggagagaaggagatgcgaccgatattatac

SEQ ID NO: 372204 - DNA, 584 bp, Homo Sapiens
gactacttttccacaggcacagggtgcatgagcagttgccacgagaaggcaagaaggaactgctgttgtctgaggtgtcaggctgagagcaaaaaattaaaacaaacacagctggagtgagtgggtggaggggaaatgcttgagcgggggaattcaagccctgggaagcttcagggagttactaaaatccccttactacccatgttgactagaggaaatgaggcagcaggctcagatttgtaggcagcccccatctgccgaacacccattatttcaacccgggggatggttgacgtgtctttgattaggatttgattgttcacattgcacaaaggatttggggctcaactttttaaagcctccattaaatatttaagtagctggcccccagagcatttgaatcagaatttgatttatgacacattgatttacacatcacgtttaccgatcagatcctctctgcagggaaggtggcattgtggcaaggagattcagtctgtcagctttggagagcagaccaggaaggttatgaagggttggggaccatacctgtcattctggaccagttcagttctgggaaagtt

SEQ ID NO: 372205 - DNA, 464 bp, Homo Sapiens
tagatcgagctcggtacctactttccacaggtctctttgcaattaaagaattcattctagggtattcaaaaggagctaattattctaaatcataatataattgggagtgcaattgagaattttctatggctgactggttgaattagaaaagcaaatccaaaaagcactcagtatagggaccctcaatgtttgcaaaatatcaccagtcctgccacctttccccacactccattgatttttaagtatgtgagtctccccaagatcacttactcagaatgcctcctttgggtctcttacaagagaaccccaaaacaacctttaattgcttatttcccagagtctatcaaaaacccagttagcagaaataatatttacaaagaatggcttaaaaatatcagttttgccaaaagttttacatctcagtaaacccagaccatcagagacctggatgccctgtggaaaag

SEQ ID NO: 372206 - DNA, 455 bp, Homo Sapiens
tactgccaggaaaacagagctgaacatgggtgtggaatgttctatgtgttgctgtatattctaatcatttttatagataaagataggaagagacattcacatatgctgattgaaattatgtttggaattagactttctattaaaatcaaaataacacatgtaagcctcttcaactgtgttataaattctaatggagggaactcatcaagggcaaatatttttatcttgagccttgttttctctgatgattagtgcatttattagaagattaactactccttttaaaaaaaatctttaacaaaaattatctgacagcccaaggaattctcaagttccatttcagtgttcaggcaaaccaaattattatatttccagatttcctcttcttttgctgccattcacaatgaaggaggaaaaagcgactcctttgatgtgcctgtggaaaagtaggtcca

SEQ ID NO: 372207 - DNA, 470 bp, Homo Sapiens
attttcagtttatttttcagtaaactatcagatagctataacttacagaggacccaagagatgaaaggggtgaccaagattagtgacatttgaatttggctgcagaaacccaacggttcaattatgtctgtggagtgaagtccgtatgaccaaaaagggcaaagcccaaagggtcccctacttctcgccaccacccagaaggactcatgggccacccacccacaaccattagtgagtctttctaacgaggacacattcctgagacctagtttggtgtcactgccttaactactgtctcaatcaggcaagcaggagcgactgttaaacccctgactgaccccagatcccaccagaacggcatgcctcaaccacgccggggttaagagactcctgctctgtcaccagtggtgtgtccaacatgtttctttgaccccggaaaagtacctgtggaaaagtaggtaccgagctcc

SEQ ID NO: 372208 - DNA, 535 bp, Homo Sapiens
ggtcggtacctacttttcacaggtctttttacaactacaaattacttaaatgcttgacaacagacctttaacaaaaaagttaactgcaccaagtaaatgtcaataatactaagttcagaaagctgtatttttgataaatcaaattcatcttgtgggaaactgtcaacaaggaaaatgttcagttggtaattttcagttggtgtgtagagaaatgtaattagcagatcatttttaaaactggagattagagcagaaatatagctatgggattaaaacaagtcagctggtggcagtattttctcttgtaacttaggaaacagttaacctctcaaagtacctttacatccaataactcaaaaatgttactactatttgggcaatatgtagttgtggataaaatttactttaaaaacacaagatataaagtatgaatagtttatctgtataggacattgagcatttctggtgtgcttatccgcttaaagtttaaattaccagcagaatttgttatactttggggtccctgtgaaaagta

SEQ ID NO: 372209 - DNA, 911 bp, Homo Sapiens
ggaggggagcgtggggccgacagttttgggggtgaaaaggcaaaaggcgggtgaaaggctgcctcccgagactctccttgcttggaattctgcccactctgcggagttagcagtcacgacctccagcacaggatgtggtaccacagattgtcccacctacacagcaggcttcaggacttgctgaagggaggagtcatatatccggcccttccacagcccaacttcgaaagcttacttcctttagctgtccattggcaccatacagcctccaagtctctgacttgtgcttggcagcaacatgaagatcattttgagctgaaatatgctaataccgtgatgcgccttgattacgtctggcttcgagaccactgccgctcagcatcgtgctacaactctaagactcaccagcgcagctgggatactgccagtgtggatttatgtatcaagccaaagaccattcgtctggatgagaccacactctttttcacttggccagatggtcatgtgactaaatatgatttgaattggctggtgaaaaacagctatgaagggcagaaacaaaaagtcatccagcctagaatactatgggaatgctggaaatctaccagcaagcccaagttccatcggtagatttgccagagcttcttaggaaaccaacgagggactgaagaagtttctgcaaaactttctgctctatggaattgcattcgtagaaaatgtccctcccactcaagagcacacagagaagttggcagaaaggatcagcttaatcagagaaccatttatgggaggatgtggtatttcacttcagacttctccagaggtgacactgcgtacaccaagctagctctggatcggcacactgacactacctattttcagagcctgtggaaaagtaggtccggctcatg

SEQ ID NO: 372210 - DNA, 487 bp, Homo Sapiens
ttccacagggccccgttctacacagaaagatagtcatgatactgatgatatcctgagcttcaaattaacacattatcgtcaagattcatgtgtatgaatacttctcacaacaatctgttggctaagacaccacaacctacttttacaaaacagattaaaatccttattcatcctataaaataaatatcccaccagattttggtttacctttttaagtgctgtgggtcgttttagttttgcaatttccttctcttttccattttttgctttagaagaagcaatgtccacagaattaaaggatgtcaaacagggctgacttttggttaaaggttttctattagtagagtctttagtgtgaaaagaagctgcagtaaccactaaaaacaaagaggaacattagtttcaccattagggccaatcccacatactttcaaaatttccaataactacaaaaacaagaacatcctcctcctgtgaaaagtaggta

SEQ ID NO: 372211 - DNA, 606 bp, Homo Sapiens
ttgtgaaatttccatccttcataagctgaatttcaaaagatagcctgtcatctctagtgtttattcagctgatatttctaagcacagctgtaagaatactgagagggtttttgagctgctgtgaataaaactgttggtggagggcaagctagagttgttcaaagaggtgacatgtgagtatacagcagggtctttcaagggattgcaagaaggtgcatctaccaaggccttcaactcttaaggagtcagttgactggaagagacttgggaatgtccacttatatcattccatttcagactaccttagattaatatgggttttgctggttcctgaggacccagatccaaagggcctaacccaggctattggtctttctctggcaagacacacccaattccctaaatgcagtggaggtcagcaaataggtttcaggacactttattaaaaatgtttagttcccagagcaaacttgtagccacagtaatatgatgctagtggcttctctgtagttcattgctaaccaccagggcagatgcccaaactgccaggtcagtcagtctcaagatgtggcaaaggtaaaactccttgtcctgtggaaaagtagg

SEQ ID NO: 372212 - DNA, 516 bp, Homo Sapiens
agaagaatgctccaggtgcatttcaagatagctactttccccatccacttgcagaaagcacaagaagactattctcagatcttcactatagaacgtagtagggctcctggagataaaattcatgaaaatgtgagggctcctctaaaactgccctcttctggagtttttactatcaagcttgtccacaccatgcctccagcaatttttcaattacagtttgtttttctaccctgatactggctccagtggtaatttctgctcctgagcttctgcttcagtaagctgtggttctctttagctgcctatgtgctcaatttagggaatcgtggttttccctgtgacctcagctctctgattcatctgagaagagttgctgatttttcatttcttcttctttcctcattatgaggatgggaatgataaattccaaatgctttacatgctggagtacgacacagaagtatcagttgccttaacatacaagctcttgttttttccatttcccctgtggaaaaa

SEQ ID NO: 372213 - DNA, 531 bp, Homo Sapiens
atgagccatcgcgcccggccagagggctattctttgtcttttatttgctttgagtctggtataaccatgtggcacatacccctgtacatgtttgccaagactgctatatggtagagcttggaattctttggagctttatcaggtaattgcaagtcccccacctccaacaaagcactctctaggtcaagaatcagcaaatgttttctatagaggcccgtaaaattaatattttatactttgtgggtcatatagtctctgtttcaattacccaactctgctgttgtagtgcaaaagcagctgtagacagtaagtgaatggatgggtgtggccgtgtgccaataaaactttatgtacaaaaacaggcagcaggccagaattagccctgtgggatgactcacatgagcagagagttctggcatcaactttgttcggagagatactgacatacttctactcaagtaagtcaatgtttctgtctcaactggttgattgacaacatacaaactgacccttagaaccttacaccaagga

SEQ ID NO: 372214 - DNA, 667 bp, Homo Sapiens
ggtacctactttccacaggtcatcccttcaacgattccaatgaacgctctataacctcaccaccgcccaattagactcactgttgttgggaaccacaattactgataagagtgttatatccttcaggttatcgtcagatagaaaaaaggaggagaacccttcttgtagaattcagaacagatagtggtccatcagggaacagaccgcctcccacccactccagtggctgcttcatgtcacatgctgtcctctgcagcgagaaagccagctccctctaggagtagcactagttttaatcatgtgctgaacttaggcagagataataggctagtcatggggtgctcctatgaccctgggcttgctaagctttaattacatcagatatcgttcctgccttaacggatccataaccttggagaccagatgcctcttgatacttttcctccataagacttcctcaagagtcactgttttgatgacatttgagtcctgaactaagaagctaaaaacctgaattcctaggtggtctttgacagattccggagtgcctgcatgaagtgtgggagggccagaagtgctgggagcatttccgaaggggagttcacagctccatttacccagaggcatcctgattctccccagtgcagagctagcctagggaccaacc

SEQ ID NO: 372215 - DNA, 455 bp, Homo Sapiens
tactttcacaggaccagagaaggaaaaggggttagtaatgttgagtaaaatgctcaaacaaaaacgtcaaagtctgcttaatataatgcttaaagacaaagggccagaattctcatcgctgtttaaaagttgcaaaagggctgctgccccctctttctctctggaaatgcaccctctcaaccactagtggtaatgctcttttgacaaacaagaaaacttctactcagatctacagcttctactaactgggtaacaaagactcaaacgggttccagtaggaagaaggaaggaaaaacacaaggctgaacatgacattcccctttacacacaccacttatgcacttccaaatactttcacacgtgtttcttttcttctctactttcaagtgtagagtagagaataacttcccctgtaaagtactgagagggaactctgtggccctggagacacccac

SEQ ID NO: 372216 - DNA, 359 bp, Homo Sapiens
tcggctcggtacctactttccacaggctctgagttgagttgaaatttttctcactaaatgcatagatttattatttcttatgagcatcatgacattttacaaatgtagctggaaagtccattctaaatgacatggagtcaacccctcagttgcagaggtatctcaactcgggtaagagagtgccccggagggagatgagtagcaagcctcagtaatgggatgaggcaggaaacgcaaccatccccgagtgctccccacggtgagagaagggtcctcttggcacctagaacagccttcggccaggtcagctggctgagggagacacacactgagatggctggggttcccctgtgaacaag

SEQ ID NO: 372217 - DNA, 501 bp, Homo Sapiens
  misc_feature (357)..(417): n is a, c, g, or t
cctagtttccacaggctcggaatcttccattttatctaagttgtctaattagttggcttataattatgcatagtatccccttataatcctttttatttttgtaagagtaacagtaatgtttcccttttcatttctgattttaaccctttgagtcttctttttttcttgatcagcctagctaagtttgccaattttgttatcttttcaaagaaccaactttgtttagttgatttttttgttacttttctgtcctgtatttcatttatttccacttgttgccttttgattttaatatttagttcatttatatttaatgtaattactcataaagtaggagttaaacctgccattttgctnnnnnnnnnnnnnnnnnnnnnnnnnnnnnnnnnnnnnnnnnnnnnnnnnnnnnnnnnnnnngtgtgttaaatagatatttctagtatgccattttaattccattattgtttctttatctttttttagtggcttccctgtggaaaa

SEQ ID NO: 372218 - DNA, 326 bp, Homo Sapiens
tgtcaagaccattcaatggggaaaagacagtctttcaacaaatggtgtcacaacaactggatatccacctgcaaaaatataaagttggactcttacctaacaccgtatacaaattaactcaaaataaaagacctaaatgtgagagctaagactataaaactcttagaaggaaacacaggggaaaagcttcatgacattggatgtggcaatcatctcttggatacgataccaaaagcatgggcagcaaaagaaaaacagacacattagacttcgtaaaaattcaaaacttctggctcggtgcagtgctcacgcctgtggtcccagca

SEQ ID NO: 372219 - DNA, 953 bp, Homo Sapiens
  misc_feature (74)..(74): n is a, c, g, or t
atgttgttgctgatgagctggttgcccttcatgaactcctttctcgttaccgcggttctctgtgaccaccgggnaaggcatggtggaccgtggtgcgcaggatgctcaccagagactggatgcgggtgtgcgggtagacgtaggtcaggttgggctccatgatgtcgctggctctcagcttgtccatttccacctctgtctcccattccagaagcggcacgcctcgcaggcccacgtggatatcataaatgcccttattgaaaaagtcccctgtccatttggccaccatcagtgtgaccatgatggggagcccgtaggtgatctcattggtggactcgatcacgatcaccgtgaggctgatggtcatgcggaccaccccgcaaaagaaagccgttgcaccactcagggcaaaggtccccgaatagatgtggcccaatccaatgtagctttttaggacattggccaactaaacgtccaaaaggcagctccacacagcagagaaggcacaaaaaggccacttggaacagaaatcccgtatagtccaacatgcaagcaagaaatagagtcacgaaggacacggccagactgacggggctgaaagtaccatcctgctggaagagctggaggatggccgacatccctgcgggttgaacaagagtgtgcccatgtcatggtaggtatctttgggacctaaaaatgtcttgatacttgaattcacatcttctgtgacctggagtctggaatgagtcattaccgatttgactcgaagaggacatctgtcggcattctcctaaccaccatcgaggccacaaacaccaccacggtggttaccagagacaacaaggacggctctctaagactctaggaggcaaagcacagctgttacaatgccacagaaagaagctctggtctcagaaattcaaaacataaccctgcctacccccagccgattt

SEQ ID NO: 372220 - DNA, 489 bp, Homo Sapiens
  misc_feature (111)..(161): n is a, c, g, or t
agttgaccaatgattcagacaaaacaaacaaaacgcaatatgctggcacacacctatagtcccagctactgggttgtttgagataggagaatcacttgagcctggacacannnnnnnnnnnnnnnnnnnnnnnnnnnnnnnnnnnnnnnnnnnnnnnnnnngggcaagatccagtctcaaaacaacaacaaaattgtccactggattaaatcccatgagtgagcaatgtagacagttctggactaattgtcctctggtaattactcaatacttattaaagttttaggtttgaaatcagtttgttgtctctatttcaaaatcatgtcatacgtcatatgatacacaactatagtaaatctctgttctatgttgtgatacacacaaaaaagtttaagattctaagttgtatagcagttaaaaatatgagaaataagcactaaacatttatctaacctgtggaaagtaccctgtggaaagtacctcgccgcg

SEQ ID NO: 372221 - DNA, 459 bp, Homo Sapiens
tgccacatacatgccccttcagttgctgttgtgaggaagggaacagagagagaagcagccactgcttctgcatcttgggcctactcagctcaagcatggctttgtatccctccacttagattaactcatataggaaagatcataatcagtgctgcagatgccaactctctaagttcagaacccttgggaaaccttgctgtgggggggtcacactccagccagcagtgtgcatgtttacaggaaaaaacaaggtacatggtaaggatttttttctgagggcaaggactttcatgttattaaaccctaagacaagtgctagacgccactgtctcataatactttgcgtgaagcaatatgtaaaggacggcactaccccattacttctcagaaagacatggtttcacctgtagactccagagtttacatcttgctgcccattgagcaatgtcctgaaaagta

SEQ ID NO: 372222 - DNA, 509 bp, Homo Sapiens
taagcaaacatattcaataaaaataaaacaatacagacagaaaagactggaataaattactaataattcaatgcaaagatacatgcattaatacatccacaaaaaacaatagcaaacatggaaccatgatctccccaaacacacaaagcaaggaaccggtgactgaccctaaaaagacaatgatagatttgctgaactgaaaaattcatgaggctttcaagagcagaatacttcaaagagaatcagttagctcgaagacaagctatttgaaaatacagtcagaaaagaaaaaagaatttaagaaatccccaaagattgcctacaagatatagaaaactatctcaaaagaccacatctaagaaatattgatgttcaagaggaaattaagcaagaacgaggggtagaaagctttttcaaataataccagaaaactatccaaaacttgaaaaagatataaatagctcaggaatgtcacagacccaaacagattaacgcaaatagactccctt

SEQ ID NO: 372223 - DNA, 465 bp, Homo Sapiens
ctgtgcagtaagtctaggactgtcctatgattttggaaacatggcaccaggagagagaagggactagctaggaaataaaatcatatataagagaacatttaaccggaagtaatgccatgatcaactggtccaactttgtcattagatgatgaaacagacctcatagagggaaggtgacttgcctaggtgacacagccaggtgacattacagctgggattagaaaaggattctcatggcttctggtgcacataacatacaacatactgctttgctcccaaaaacaatgtgattctattcaggttattacagaggtaatttcacttataactactgcctctacctccacttcaaaaaacggtaactgattaattttatttaaagcagaccaggactgtttccaccaaattataataaacaattcactctggcaatatagacaagtccatgagatttaattgggtata

SEQ ID NO: 372224 - DNA, 346 bp, Homo Sapiens
tggaactaattaagtgaaaccaaatggcacagagaaagagagaaacccagatagagattaattacaaaggaaaaagtcaaaaattaaaagttgagctcagcaacagcatgccagggatagaagggaatatttggaggacaacatgtgggttggcacttgagccaccctgaccctgagccatgaaagaccctggaggcctgtgcatatcctggagaagaaaggactgcaggtgaaacaaaaagaactgtgcattgagctctagagcctgcgggtgctgctggaaccccctgactggagtacaacacacaagagatagccctgactcaaactccagtgcaggctgccc

SEQ ID NO: 372225 - DNA, 630 bp, Homo Sapiens
taggagacttctgctagtaggaaatgagacagcttcagagaagtcgtgaagacaaacgactgtaggtgttaaaaggagtgaagaagtaagagcaatgaacgtagaccccttcactgtttataaactcagtatgaaagaacgaagaaaagacgggacacggggagtagcacagaaggaggagtcattagctatgtgcttaggaagggggacatcctgaatgtttttatgcagataaaaggtagagagaaaacaactggacatgtgagacaggaaggaaaagaagtgaccctggagacaaagaaatgctggcaaatgaatatagagaaatatggtgaggtgaaaaaagaaagagaagccctagaatcaagatgactagctcccagatgtgttttgttctagcccacacagtatttccaaaaatgtgacttcaacaggtagagatttcactagaaaaccagatatttgatttttctagagaaaacagaagatggggcaatactgagcccagctttccccggactccaatgagtgctgcccctccttgggcaaggccagcctcctgcaagtctacaacagcccccgcataacacccctttcatttcaataatttcgatggcgcctgtggaagta

SEQ ID NO: 372226 - DNA, 449 bp, Homo Sapiens
  misc_feature (358)..(358): n is a, c, g, or t
tacttttccacaggaaaaaccgatatgaataattcaaaacagtactatgcttcagataaggagagtaaaagattaatacacaaacagatcttaattatatggcccctttaagttaacacatcttactctagagagaaaatgccacacaagtcaaattctgctaatttttaatgagatttttaagaaggagctccagcagaaatataccaagatataaagaaaacatggctagaaagctgaaggtatacatgattttgaaaggacatgagagaagaatgttttcccttcttgtctccaaatacacgaagcagaaatgcagtggtgcagtggatgttagtgtctttagtaaccactaacngatgggtcagggaactcactacatgttccactgtactaaagggaggaggacaaaagaagagtccaagtcattccacctcaatctttgtaag

SEQ ID NO: 372227 - DNA, 244 bp, Homo Sapiens
ccacagggcagaagtatcaaagacagggtattttgataaaatcattatgtgtcagacaactggattattttatttaactaagtgagataaaaaatgggtttgccaatgtgcatcctgttattcttataataccgactagatttgtcaaaataataatgaagtacagacacacaaatgcacccatcttaaacattttgtgtttcttcttagattgaacaagaatgtattgagtactgtttgtgag

SEQ ID NO: 372228 - DNA, 477 bp, Homo Sapiens
atgagccaccgcgcccagccttaacacatcgtttttaaacaccgctatgtgccacacaccctgctacagcatgtacctaagtaagatgttcaagataaatccctgtcctagggttgtttataatcttgtggggaaggcagctaaacaaatacttgcacaaataactacttagtcataattgaaagcgctaccaaggaaaaggtaaggaatcatctttgacgctttctcctcctgcattgaatcaccaggtgctgttaattctaactccgaagtctccagattgtcctcttctctccacttcactgctatcagtatctcaacttagactaccgaaataccttcctaactggctcccctgtgtctatccttgcccccacagtctatttaccatgctagatccatagtgatcttttaaaaatgcaattctgcgtgtcaccttcctgcttacaacacttcattggttttctattgcccttg

SEQ ID NO: 372229 - DNA, 529 bp, Homo Sapiens
ggctcggacctactttccacaggactgaggaagtagagagcatcacagaacagctagggaaaagagtattctaaaaagaaagaatagcaagtgtaaatgaagtacccaaggaatgatcttctatgagaaggatctgggttggaaccagcccttcttcaggtcaaaagtctataatgagtccctatgctctatggcaacaaatctaaattattcaacccaactttccatgttttcccaaaataatcagcctcactatcctatctccctagcacagttcctctgaagtaactagatcaggctcactaatattccctgtgctaagctcattccatctccagatggctattaggttcaacccaatgcctatcatgaagcatgacacgttaacatagagttgggctctgatataagggacagagactgggtcatcaaaaaacaatgccataggaggaatctgtctcaataattgacatgggatccagttcctctctcactgagtctgtctatccccctaccctgtggaaaagta

SEQ ID NO: 372230 - DNA, 572 bp, Homo Sapiens
tacttcacaggttgtagttatggtaatggtaaagtctagggcagcagctctccgacattttggtctcaggactgctttacattgttaaaagttactgaggactcccaaaagtttttggtcatgcctctcaatatttaccatattagaaattaaaacagaaaagtttaaaatgcaagaatatacaagtacaaattcctttagtggcctctgaaaaactagtatgcactcataacagaataaaagtccaaaaggcaaataatgtttttatatgattatgagaatagttttggtctcacagaccttctgaaagtatttagagaccccccagaagccactgggccacactttgaggacagctggtctggggtgtgtctacagaagtgaggatcccaggtatagccagatataacaagtgaatgacaggacaacatggaactgagaaaccaagaaaacggaaggacaattcgtacgaatactgaaatcaacagaatgatctgtactaagggggaactaactattcagtcaccagcaaaaacgacgagcgggaaagataaatagaagggacagaggag

SEQ ID NO: 372231 - DNA, 588 bp, Homo Sapiens
ggaagttgggcttcctgatcgtgcacaggaaatggaggagatttaaatcaaactagattattgttctctgctggtggtcttggtaactaagatgccttcacattgctggatacaattcttattactcttatgctctgtgcttgttcatcgcctgactacttcaaggctcaatattcttgtaaaatataaagtgaacattatgtgactactctaataataaaattactgtgaaaccaagtcctcaaagagaaaaggacataatgtttctactagacaagccacatactaacatgtcattcgaagttaaagttctaagccagattaattcatgaaccagatagatattccagggtaatctttagcatatggtgtattaaatcaatcttggtagtctgttccttcaaccctgtttggtttgaggtttaaaaacgtggaaaagaccacgtattagaatgcaggccagttaaagactaataaaacaataatagttattataaccattatgttagttatatgaccagttctctctgagggcaagggagtgtgtgtagcctcaaaccacaaagggtcacatcctgtggaaaagta

SEQ ID NO: 372232 - DNA, 577 bp, Homo Sapiens
tgaccttgatctctggcgcataatctgtgtcgagtggtctctgacattgatacaagaagtcatgagaggacccctccctgtccctcgccattactaccttaaagtactgatcctctctgagttaatctgccaggcctctaattttctccctgtgcgcccatttcagaactgtcttgagtgacaagttcctgatgccttctagatattttgcactattgaaagtgttccataaagtatattacatttgctccttttaaaggaatatacaaaacgacctcatatcaaaaactgggagaacagacgaaaaagaaatcatgccataatcttccagctgtaatacaatcacaggcagcattttggtttctctttcggtcacttatgtttcctctcctagctcctttcttacacttgccttgaacttggttatttgggcacctcgggaacctcctcccctgccaacactggctagcactgaagcccaagcactgctctgttgcttcttcctgagggctccgtgtctgagcacctttctgctgggttgaagtgcctcctcattgattctttccctgtgtaagta

SEQ ID NO: 372233 - DNA, 145 bp, Homo Sapiens
acaaattaatcagcctcaggcagctctttgtagcaatgtaagaagggacgaataaagataattaatgcaaatttcattgggagagcacttgaaccatgatatatacatatctgtatagagtcttcccccctgtgaaaagtaggac

SEQ ID NO: 372234 - DNA, 615 bp, Homo Sapiens
  misc_feature (11)..(11): n is a, c, g, or t
  misc_feature (29)..(29): n is a, c, g, or t
accatgtccancccacaggggaggaaatnccgaattgccaaaccttttatgttggtttgttccatgccatgtttttcctcctattcccccgaacatccaccccattgtccatacctgaaaagaggtccaagatgttggccaacttcccgttattagatgcaaactttcaatggggacactttagggaaagatggtagctgagcagtagcccaaggaggtttaaaaaagcagagacttgtctaactttatgatgagtaagtcataaagttagctaaaccaaccaaagggggagtgagggcaaggaagttaagtcaaaatagtcttagaacagagaagagtggaaattatttaggggtgattcttgtaaagtgagctaggtttgggtagaaagtattagcatgtgggcagtaccatagcctgagatctcctaaagcatcattagaagatcccattggggacagagggtcaagttttgcttggtttaatacttaccattccacactagctttcaaaatagagtttagaggttgtttaaatcaagtgcagttcaacaacagaaaggacactttcacttgctgtagtaggaggcgatgtagaaggcagagcaatgatgcc

SEQ ID NO: 372235 - DNA, 709 bp, Homo Sapiens
aagagatagcatttcctgaaggcttcctgggtgccaagcactgttccattccttttcatgttgggattaatttaatatttaaaataattctaccaggaagctaccattattaccacaacttcacaaatgagaacaccgaggcttagaggggttgggttgcccaaggttacagaggaagaaaacaggggagctggatctgagccaaggcatcaactccaaggtaacccctcagtcacttcactgtgtgtcccctggttactgggacattcttgacaaactcggggcaagccggtgagtcagtgggggaggactttcaggaagaggtgggttcccagttggtgacagaagaggaggctgcaaagtgaaggagcaggggctccaggtctggcgacaaccagggaagggacagggcagggatggcttggaccacgagaggcacctgagtcaggcagtcacatacttcccactggggtctaccatgtgagacatggtgtgggatcctgggaaggagaccaagcctcatttcaggttgcttatggccaaagacaggacctgtgtacccgacaacccctgggacctttgccaaaaaaacaacaaacaccattcactcactcatgttagataaacactgagtgaagtcactggagcccaaggactgtgcgaggtcagcgctcccaatacaagaagctgcacccctccttggtgcctc

SEQ ID NO: 372236 - DNA, 467 bp, Homo Sapiens
aatagattatctacataatgaagtttgactttttacagtaaataaaatacctatttattaatatttccaaatattaattagatgtaataatactatatatttgttacaatgccttcatcagaaaatttaataattaagaagatacttgaagttcattcaaatggcacttgcagaaatgcaacttaatttctagttctatcatatctgtctccaaaatggacatatatgacagcaaaaacaaaattctctataaatctctccattagttacattactatgtaactaaaatagctagttctataataaaaggattttatgtgccaaatcctgaccaagagagaaataaagtcattattgctgcaaatccaaatggaacctaacccaaatgtagggaggggcaaataaagtgaaaacatgttggaaggtggggtcaactgccttaggacaattctacatccagcttgaca

SEQ ID NO: 372237 - DNA, 510 bp, Homo Sapiens
tactttcacagggcttgcatgtgccccaagggtttggaaggttggagaactaacaaaaagcaaagcgccatcctgtgtcgtttcggcaggtctgtgttctgttaaaatatggaagaattaacagaagaacgaagaaataagggcagaaactccacaggggagtacttgtctaaccctgaaaaagttcaaggctgttgttcaaggtctgaattcttcccttgagatttgcttgtagtccttaaagtcatcttcagatctatctgatcaaggcagcatccgcggaaaattataaggtgggtggctgcagtggagcctgtcctggctcaggggagccggtgaagagtgatttttttcccttggcgttgggggatcagagggggtgccctctgctatgcaggaagccctccttgcccactagatagttgtcattcctcaggagatactctgtgaggggccggtgtgttttctccatcttggcacttaccctcagaccctcccctgtgaaaagta

SEQ ID NO: 372238 - DNA, 532 bp, Homo Sapiens
tacttttcacagggacttatggatgtagaaatctatgctggtaacatttattttttcttcatctaagtttctgtttttggagccaggcttctaattacaaataattgtatttgacagagaagaagaatatcagatcctgaagggccagaatgattcatcctctttaaggggaacatgtaacataactttggggaatagctatagatactaaaggggcaacataaaacatttattgattacaaagtgtatgaagacccagttgcttggcagagtgatatcatttagaaaagtggtagaatctcattcgtacacacttcatgactaaaagagctggttataccgttagattgttaaagctagaaggaggctttcaggtcactctatgcagcgattttcttctattaataataaaatggagatcagaagagtgaagtgactttttccttgaaacataactcttaatactaaaaaaggcaagtcagggagatgtgggccctaattttgttgttattttcttacatctagtgtacca

SEQ ID NO: 372239 - DNA, 570 bp, Homo Sapiens
gtggtctggctactaatgtctgtggcattgctaacactcctaagggtctgtctgtggctcccatatacaccctgttcagccacatggcttctgctgaaacagccccctctctgtcctgactggctaatattactgtgatagaaagattttaccaaacatgctgcctgtcgccacttggctgacacttctgaaaagtccacaaatttagcttcatacatatttgtatccaaaagggattacaagatcgtggaatttgcttctcttaatgtttaggtgaggaagatgaacagggagcagagggtctgggaaaagacaaccacttgtcaccagcactctgtggagcgacttacttaccaggcatctactgatcttaagcttccgtgtttggccttgtgagggatatgacgatatgtaaataatgtaaggccttcagcgactaacaggggttgagctcagttcatacagataacaagctggcaagtcgtgtgccacaagtgatacctgggagcttatcacaaaggttctgaagctgtgggaaaaaaaccaaaattattccctcgtggaaaagta

SEQ ID NO: 372240 - DNA, 504 bp, Homo Sapiens
tttacagttatcctcagtgggaggagcaagaaaaaataggtctatgccatcatgtctgaactggaaattcctgtttcttgttttaatgtttgacagcacggaaacgtataaagtaggctgacattactacattacttgcaattcatataatgctaattgtcatggaaatgactctaccatagcataagtttcgcaggcaagtgctgtttgccttgtaatttttggttgaatccattaaaaacattatccaaaagaaagggagacagggaaagggagaagaagaaacagctataaaccacctacgttcataatagaacttgtgggaccttactgattgggaatgcttgtgaaacaccaaatatgtcataaggagggagaacttaagggtaatctaaacatactgtgcaacctgtttcaacaaaaaactgtgctacatgcctattgtatacaacggccttgggtgacaaaaatgtttgaccaactaccagaccatgatcctaagcc

SEQ ID NO: 372241 - DNA, 451 bp, Homo Sapiens
gatctaactaaagatttgtatttcttattttacttaacaattacagtaaccccaatgcagtattattcactgttggatttttttaatgtgaaaacttaataacccctgtggataagaaagtaagaatgattcttaggtgctttaggaccaaattaatcagaatctaatataccactttgtctaggtgtcatggcgcctaaaatatctttgagaaagctaaacttagctctcaatctcagatgatctacttaagaatttggaaagtttatattatatcatttgagaatggggattctcgcttaaacgaaacctgaaggatgggcatctatcattcaatatcttaaaaagaaagtttagctagacatttacaataagaaaacgatacacctaaaataaactagaacactcagttatcaaatactgaccgtacccctgtgaaaaggaccgctcc

SEQ ID NO: 372242 - DNA, 471 bp, Homo Sapiens
cttgaaggcaacaacatttaaattccaccactttgcttcagcaagccgtgacgcttaaaaacaagggtgtcagaaaaattctggatgaaaagatcagttcatgaaagtaaggaaggaatagtgttgtgcagctatagaaataacaagagctgaatgacactcaaagtttatgtgtggcattttcaaaatgcagtaaaattcattttttaaaataagcacagatttacatatgttaaacacaatttgaatacaaattcagaatgcaggaagcagtcaatatgggaacttgagtgtgggtacattacaaagaagaaaggtaagaactggtaagagacactttagccatagcaggccagaaggctgcacaggtgtgaaaccctcctggtgagagggtgagcagtgagctccaccaccacttctcaaaccacgtgactctgggtgagtcactttctcagtcttagtttccccctg

SEQ ID NO: 372243 - DNA, 306 bp, Homo Sapiens
aatctcagttgtctcttgtagccagttatagttggattatgttttttaccccttctgcctatgtgctttttgtttggagtgcctgattaatttccatttaatataattaccaataaagtggaatttacatctgctattttgctctttgttttctatgtgtctcattgtttgttggggtggttattcctctagtcctgtagtgctgccttttgtgttaaatagatattttcaagtgtatcacttaaatcacttgttttgtactgtatactttgttcatttttgtagtggtgccctgtgaaaagtcgc

SEQ ID NO: 372244 - DNA, 448 bp, Homo Sapiens
ccttctcaggtccttcagaatcttcctcatcgagagtcagttcaaactgaaacttctccatcagaccctggcagtccctgttctgctcgtccactggtggtgagggactttgaggtatcatgctctgataccagttcctgttatcttctaaggtatcgagaatgtcctgagcatcaggctgtaccaaatctgcccatgtctcccacaatggatggacaatgtagtcgatgaaaccaacctgggatttttccacagaagctgtgtgtttatcacacattgggctaatttccattcccctctcccgctctttgtctccctgctggaaaaattcctccatgatgcggtctgtccattgccgatacaattccaaggacttggtggggttgctcaggtctgcacagtgtaccatgttgcgaaggacctgaatgcgatcggtatagttgtctag

SEQ ID NO: 372245 - DNA, 381 bp, Homo Sapiens
acctggtttaggattaatattcgttttgttacctccttcaagctgttatcttctagaagaagatgaatctgcaaaacttattatatttactataaaccataataaaaagtcctgttaatgccttttggtgatttgatggaaagttaccctgggctcagttcccacttgatctaggtcacagggaggaaaagtgaggttgggaattgatattcttttcctatactttctgggtttgaatgcatctttttatctggtaaaactttgataaaggtcaaatgagatccagtcatttcaatggtttcctttttctttatttgtaaaattccctatttgactcacacagataatttgttgaagtaaattacccctgtgaaaagtagt

SEQ ID NO: 372246 - DNA, 389 bp, Homo Sapiens
taatagtaatttaaaggtttatatggacattattgtgtgaagattagtttttacttctctgagttaaattcccaggaatgcaatactgggtcatattgcattagtgtgctgaattttataagaaaatgtcaaattgtttcctagagtggttttaccattttacattaccactaacaatgtgtatcagttatccagttctctgtatccttgttggcatttagtgttctcactgcttttttattttagctattgtaatagacatatagtgtatcctattgtcacttaaaaacacttttatttcttctagactttaggttgtttataacaattttcattttaatttgcattttcctatgatattgaacatctttttatgtgtttatttgcca

SEQ ID NO: 372247 - DNA, 160 bp, Homo Sapiens
acaaaaaaacaaataccacatgttctcacttttaagtgggagctaaatgatgagaacacatggacacatggaggggaacagcacacactgggccttattggagggaggaaggtgggaggaggagagatcaggaaaaatgagtaatagggtattagacgta

SEQ ID NO: 372248 - DNA, 599 bp, Homo Sapiens
  misc_feature (401)..(448): n is a, c, g, or t
  misc_feature (450)..(488): n is a, c, g, or t
catgaaagtaacaggtgagaggttcctatcagctgttaatcagttaaccaacagtgggtgagcatttagccagtgccagggacaagtgacaggcactgaagataccaatactaaaggtgtggttcttgcccttaaggagttctccaacctagtgggggtgagatataactaagcaacacaatgtgttaggtgatgtgatagaggtaagtatattccttatatctccttaggtaacatttcagaaccggcgaatcctgggtgacaagcctccggtttctctctaaggtactgctgtccagtagaacttcctgtgatgatggaaatgttctatgtctgctctgtccaggacatggtagccacatgtggttactgagcacttggaatgtggctactatgattgnnnnnnnnnnnnnnnnnnnnnnnnnnnnnnnnnnnnnnnnnnnnnnnncnnnnnnnnnnnnnnnnnnnnnnnnnnnnnnnnnnnnnnnccccctgaggaatggtagtgtgagcccacagtcaggctccaaggaggtcctgagttggatcatagaaagctctggtcaatttgcgcctgtcctttaacctgtggaaaagta

SEQ ID NO: 372249 - DNA, 136 bp, Homo Sapiens
tacgtatccacaggctatggtaggacttgagggctgggtatctcttaccctgggtctcagtatgcagatataaagtcatgcattggaggaggctcacatgtaaaactgggatggggctgggtgcattggctcatac

SEQ ID NO: 372250 - DNA, 504 bp, Homo Sapiens
  misc_feature (192)..(233): n is a, c, g, or t
tagaagggtggttgctaggggccagggaaatggagagttgttcaacaggtataaagcttcagctatgcaagacaagtaaggtctaaagatctgttgtacaacatggtgcctggaattaacaatactatatcgtgcacttaaagatttgttaagagggtaggtcttgagttaagtgttcttaccacagaagannnnnnnnnnnnnnnnnnnnnnnnnnnnnnnnnnnnnnnnnngggcaggaggaaacttgtggagatgacaggtatgtttattaccctgattgtggtgatggtatcaaagcgtgtgtgcatatacgtcagacccgatcaagattgtattcatctaaactatgtaacaactgtactgtctataaagtctggtaaaaaacacctgtacctgtttgtttttacttcaacgtggctataagaaaatataaaattacattacagcttgcattctatttgtatagtactgtcctgatcaagatgccctgtgaaaaagtca

SEQ ID NO: 372251 - DNA, 577 bp, Homo Sapiens
tacttttccacaggacctgtgggggtaaggggctggggtgtggactaggtttgcatctcagagaacatttggaagctggaattagggagctctggtctggttctcttgtccccatctcttgctggtgatccagcagagagaagaaaatccctgttacactcctctgtttgctctcatcagaaaactaaacagtggacaggcttaaagattatcccacatccaggactgggaaggctgagctgggacggccaagacaggcctgaaagccagcaggaaagcactgcgtgtctaggggagattgtaagattcaaagggcaagggccacacctatcttattcactgtatccgaggccctggcaatttcttagggctcggtcaataatgagccctatgattaggagtatcctctccatcatgtaccccatgaagtatggggactaacatatgcatagacaatcaactgtttggaattatccacagaggattttgaggtttggtttggttttagcaacaaatgcacttttttatccttgactagcccatggataaaagcccataataacctgtggcaaaataa

SEQ ID NO: 372252 - DNA, 389 bp, Homo Sapiens
acttcacagggagtgaatggggtcataaaagtcaatgcagttgcctatttagagaatcctaccttgcagaatgggacctttggtgtcagggtgtgaacaataactttatttcaacataaatacatagtaagcattactaaaatttaaaaaatccaaaccctatcactaccggaacttaaaatatattagaagtggatataagcagaaattctatctagatacataacactatcatagtataacatttgaattagaatttaaaattttgcttctctttcttattggtgttcagtttagctcttaataatttagtgtttgcctagtgctctagttaatcttcagaaataaacatgcactgtaggggctcactccttctggtatgctgaggt

SEQ ID NO: 372253 - DNA, 532 bp, Homo Sapiens
acagggaatgtcaggtttcaaggagctgaactctgtgaggtaagttttacgtatctactcattgtaaataaaagtaatgttttaaaagatgttttgccttgacgcagaacataagcaagttccctgactcaaaatattctacgctccactacttcaattgttcagttttcgtaactccccagatccttcaacaggcatccaggtctgcccaggatgcagcccagagatttctggtttgccctgtttagaaatccaaaaagtctggctttttacctttagatagttccaaaacaggaaaataaccctatttcttaagtgttagtaatatgagaggtaataaaattgattagatgttaaaatacacaaagtatgagatggttaaatcagacacacaagaattggagattttaacctgtatcagatcttcctgtacaccaagggatagacataactaactttgagacacaatgaagcgtgaagtctgagaccacctggcactcatacctcactgcgccagaatgttccctagccc

SEQ ID NO: 372254 - DNA, 484 bp, Homo Sapiens
accaatcttatctgctgtcaggtcaactggacacacttggaaaatgcctacatcatgaacttcaagactctgggacacaaaggactgttcttgagcagtgacttctttagttatgtcgtttttttattctacttttctgtgtttacagtaccgtgctctttttctggtccaacttcagttgacttctgttgtcagtgtgtctcttggtttttcttttgtttgtgtattgctgtgtttggtcattttagcttatatttgtctcgtttgctggatctttttgtgtgcgtgtgttcctgagtttccaatcctccccgccatcaaccatggtaaatcaaaagatggtattcaacccttcaaaggcccaaagcctgcggcccgcatagcaaacagccttgagaacacagcgtattgagcagcctacagagactggcatacacctgaccctactaccttccattcacacagggaaacaaatatgacaggc

SEQ ID NO: 372255 - DNA, 419 bp, Homo Sapiens
  misc_feature (47)..(123): n is a, c, g, or t
cctgacctttacttacttggtcctaatagcagcttccccatcttttnnnnnnnnnnnnnnnnnnnnnnnnnnnnnnnnnnnnnnnnnnnnnnnnnnnnnnnnnnnnnnnnnnnnnnnnnnnnnaagtgagagttacttacataactaaatgtttacctgccactaaagaagaaatctctgcatacataattttttccactggctcttctttttctcctcttttgtacaaaaattctgttatgaatgacctgggtcattctccctgcctgactgacatcctggagtgtgtcattgaaaaccttcactttgctggcatcttcccaaatttctcagacaccctctctttgaacctggagcctcctggggaagtattaagagccaaccagctatgaaaacaatgtgctcttccctgtgaagta

SEQ ID NO: 372256 - DNA, 155 bp, Homo Sapiens
  misc_feature (142)..(142): n is a, c, g, or t
atggaaaaaacgaagtgaaatctgttacagtagctcccttcaatttgtgctatacatacgtcttatctctttaacatgaccaagagcaacctgagggaaggtacctagccatgtgtctcctagcttattttaataaccctgnccctgtggaaata

SEQ ID NO: 372257 - DNA, 560 bp, Homo Sapiens
  misc_feature (85)..(96): n is a, c, g, or t
  misc_feature (548)..(548): n is a, c, g, or t
ctggtttacaggtgactggggtaggccaggtgtggccccctccctctcccttcccagctgctcctgctttctggcatagcacgcnnnnnnnnnnnncctgcctaaagaagtcactgctgcttcctaacaggaggacggttttgttgttgttacagtcggggatgggattatgcatggaggaaaaacacgctttcttgattttcttctgtaaactgcaggtggggaaaacaaaacgagtaaataactgttctacaaacacctcatggggagggaggtcgtgatatttacaagaacatcggctttctgctggattcccatttggagggatctaataaagatgcaggaggcatttctgctcttcctaacacactcctcggaggaaacgctgtcacaggcgacgatctaaagccaatcagagcagaattctgccatggccgagccccacagggtccactccctctgcatccccctggggtggttcccgggcccctgccacagcttccccggcccacatcagcaccacataagtaaagacatggcctcagatncctgtgaaagta

SEQ ID NO: 372258 - DNA, 229 bp, Homo Sapiens
accacacgcccacgcccgttcgcaagcagtctaagcgccggtccaacctgttcacttctcggaaagggagcgacccagacaaagagaacgaaaggcctggagagtcgagcggacagcattgggagcggccgagccatcccaattaaacagggcatgctgttgaagcgaagtggcaaacgtgaataaagagtggaaaaagaaatagtcaccgtgaaaagtaggaccagca

SEQ ID NO: 372259 - DNA, 532 bp, Homo Sapiens
ttacttttcacagggaaacctcccaagttcctgcggaccctcagaattagacatcatcacgcttctgtagagcctatcccattgtccactatgattgtttgagcccagcatgtcagtccttcagttgggggaaggtctaaggaagcagcttcgatgtgacactcacaaagtgctcaagtttgaggactgcttcgagattgtatctccaaaggttaatgccacctttgaaagggtcctgctgcgactgtctaccccgtttgtgattagaaccaagcctgaggcttctggctctgaaaataaagacaaggtgatggaagtcaaaggacaaatgatccatgttccagaatcaaattccattttatttttgggctctccatgtgtggacaagttggatgaactcatgggccgagggctacatctctcagacatccctatccatgatgccacccgagatgtcattttggttggtgagcaggcaaaggcccaagatgggttgaagaaaaggatggataaattaaaggcaacttcagaa

SEQ ID NO: 372260 - DNA, 210 bp, Homo Sapiens
tacttcacaggaaaggaaatagaatataaggataatcaaagaaattatggcatgttaaatggtgcagggcattgctcaatagggcaagaacacagaatatatgaattgcaatatcatttgcggaggctggagaggcaggtggggggcccttgtttgccttaaaatgcctcattttccagagacaccacagaagacctgtgaaaagtaggt

SEQ ID NO: 372261 - DNA, 586 bp, Homo Sapiens
ccctacttttcacagggaagtcttcatttgggaaaaaaacatgtaacttggcaactatttagcacctcttcttctctggcagtgatcagttaggaaatcctttgctggaagcatctactcagaattttaaaaatcatgcagttcttgctgctgaaatttatgagcacgtagatgagagagagtatgtatcatggatgaggacggggagagcaggagcaggagtgccccatgagagccacaaacaggaaagttacaggagctggcccgtgtgcaccactgccttgtcccaaccacacagcagtcccagccacacgctttccacatagccctgtggggttaatgacatcactcctgatagtgcccacggcaccattctctatggccatggtgtaaaaatgggtttataatcaaacaaaatatccagatatatggttcaatatgcttcaatttgcaaacatcacttatctaaaaagtttttcaaagaagtaagattaaatatttgatatacaaaatttactgaaaagaacaagattatataaaatcagcttgcccataagactgggtgtacccacatgccctgaaagta

SEQ ID NO: 372262 - DNA, 366 bp, Homo Sapiens
ctgctgtcgtagcttgcctagacaagacaagcttgcctagaatgtctggtcttacccctctctaattcattctctatactgccactagtactttgttaaaatacaggtgtaactttcactcccttacttaaatccttctctagttttctgttgccctcaggatgaagtccaaattccctaacctgatttataaggccatctgtcatctagcctcttgcttaattatatatctagtcttatctcttgctattcttcctcttgtattctatgttccaaacattgtgatttttcctctcagttcctcaaacatctgtgttctttctctgcatctttgtgcatgtttattttattcccctgtggaaagta

SEQ ID NO: 372263 - DNA, 510 bp, Homo Sapiens
aaacgatgaaaccactacaagaaaacactggggaaaatctccaggacattggcctgggcaaacattctcaagcgataccccgaagcacaggcaaccaaagcaaaaatggacaaatgggatcacatcaagttcaaaagcttctgtccagcaaaggacacagtcaacagggtgaaaagacacgcacagaatgggaggaaacgcctgcaaaccgctcctgtcacacagattcacaagcagaacatagaaggcatgcaattaactcaatatgaaaaaatctaataatcccatcaaaaaaacgggcaaaagatctgaataaacgtttctcaaaggagacacacaaatggccaacaggcatctgaagaggagctcaacatcattgatcgtcagagaaatgcaattcaaaactaccgtgagacatcacttcaccccggttaaaatagcctttatccaaaagacagacaatcacaattgctcgcgagggtgtggggaaaagggaaccctcgtacccct

SEQ ID NO: 372264 - DNA, 459 bp, Homo Sapiens
  misc_feature (447)..(447): n is a, c, g, or t
tatttccacagggtcagaagggttgataaaacaaatagccaaaaggtgcaaattattagccaatacttcagagcaccccatgccctgctcaggtctacccattttgagaaagtattgtggaatcagtgagatgcccagaagaggccctgacttgccagcccatgggccagaatcagtatgcctactactgtaagccagagggctactgacgatgagaatatcttaattgtccctggtgagagaccaaaaaagcaccccatcaattctagagttaaccatcttcactagcccagagagttgccttgctcaagtaagtttactggggtctctgacccttgacatgacaaacggctttccacagtggaagacaagtggccacttgaatatttttgttcagtgtcaccactgttgggtgacttctggcagtggctcaggactccagatctncctgtgaaaagg

SEQ ID NO: 372265 - DNA, 535 bp, Homo Sapiens
  misc_feature (13)..(13): n is a, c, g, or t
  misc_feature (241)..(260): n is a, c, g, or t
  misc_feature (276)..(333): n is a, c, g, or t
cacaaaacagaanatcaagaagtagatccaaaaatttgttatctagtgatatgatttaaatatcaaaagaaacagcctgcagtgtgaaatgcttgtctctaggatgcaggcaatggttgggagtggtgggggtgagtggctacagaagcaactgcagattttcataataagatttatagaattatttcagttttaaactatctacatatacaatctgattttaaaactctattttttaaannnnnnnnnnnnnnnnnnnnctgtagtaacgtaacnnnnnnnnnnnnnnnnnnnnnnnnnnnnnnnnnnnnnnnnnnnnnnnnnnnnnnnnnnggactataagcagagtaaatcctcatctattttaacaggaattaagagcaaatgtctgcagtttgcatattgttctaaaaatcacagcataagcatttaatttagaatacagaagtacaggcatatccattttactgcacttggcttaattgtgctgtgcagatattgcattttacatactgtggcaacctgtggaaaagta

SEQ ID NO: 372266 - DNA, 856 bp, Homo Sapiens
gactaaggaggacagggagaggtgtgcccctttgattactgagttttcttatctgggtctcaacttgctcatctctaaaattccttcaatgggttgagaattgctagtcaaattagtcaccagtgcctgggcttttttttgtttaatcaagtgagattcctaccatgagacttggcagatgttgtttcccctggcagtgaggagtctctggagctgatgggttggcttaggtctccactgtctattcttgaattctcctttatctcttatcagagaatcttcaagggctatggagaacattttgtccttccacagatatttgcagagtactctttggggtctttagtggggactgaagtcatggaatgttctagagctacatccctgattctgtctcttgtcttctattacaacaaggcctgaagctggttcattaaatgcacttgctcttctttccacatcccccatagcatcctgtgcagggctggtgcacattaggagctcaacaaaaactcggtaactcatcagcacagtccagctcctatgagcactgctgcaccctctgtcccagcggtggacaatgtctgtgaggtgctctctgtccaggcatgcgctgccccaagaagggtgagctccctgtgcataggaccatggacgctgagcctggctgagagcaggatcttgcacaatcaatacatggctgactgtgggactggcctgtagtcaatgtggcaagacaaagaaggtgggcacattctgtgccctgatgcccaaggcccagtcttcagccctcctcagagcctcacgtacaagacgcgccaggcatctgtagccaactcccatagtccatggacct

SEQ ID NO: 372267 - DNA, 267 bp, Homo Sapiens
  misc_feature (185)..(185): n is a, c, g, or t
tacttccacaggggaagaagtgtcttcctcgtccctggctaggatagccagtggcaatattatttttatatccttctttaaacaattacttattgtgcacctactgattgcaggctactgtggtgaggataaattgccaaccaaagcagaaaggtctctgctctcttggaactaacttagcatcntagtggcatagagagacagtaatccaataatcagaaaaataaatccataagtaccaactgtgatttattttaaaagtcaaga

SEQ ID NO: 372268 - DNA, 425 bp, Homo Sapiens
gggggattgtcttagactagatttaagacaggtgaaactgagatgctttcttagtttgtcttagacagatttaagtagctaattgaccgattgtgaagttttccggttgctgataaaactattgagcgggtacagtcgagtagcaacctgtcatccgtgggattggtgcaccatttttctcaccgtggaagggcagcaaaggtgtttgctaagtaaaactgagtggatgagattggtatggaaatcatggttgatctctgagcgggatgttagtgtttaagatccacggagtcaggcgcaaaatgagcacattcctctcagtattcagaaatgagtagataatttctctcgtctttgatttttgtcacaatggtgaatgggcagaaaagggaaagatgctctactgcactgtcgattttgaccgg

SEQ ID NO: 372269 - DNA, 451 bp, Homo Sapiens
gaaatgaatgaattctccctttaactaaaaagataattagatcagtctttctctttgcagtatgtagtaagagctatataaaaaagtagctgtaatttagagtgaataaattaaaatctgtaaataaaaaaatctgtgctttactaagacagggaaagcaaaccagatgggaagaggagaaattaaaaggagtctgacaaattccacccaagcaaaagatgcagacaatgaagacaacttcccccaaagagcattaatcagatttcttaagtgattaacaatttgtgaattctgcaaactcagaacaacaatcacaagcagagagttagtgaatcaataactaacgcagacaaacagtattacaaaaccttagatacctccttacaaaaagctccatgacattcactacacgtacaggaattaccatacacataatctataatacaacctg

SEQ ID NO: 372270 - DNA, 790 bp, Homo Sapiens
  misc_feature (43)..(43): n is a, c, g, or t
  misc_feature (66)..(66): n is a, c, g, or t
  misc_feature (79)..(79): n is a, c, g, or t
  misc_feature (91)..(91): n is a, c, g, or t
  misc_feature (96)..(96): n is a, c, g, or t
  misc_feature (130)..(130): n is a, c, g, or t
cccataaacggaaccaaggggaccccggggtaaacctcctaanaaccctttaccctaaaaaggaanaccattaaacccngtcaaattatangtatngatttacccctaaatgggttccaacatataatangaaggcttgtaaaaagtctgttaccaatttggataatgccataaatgttcatatttatatacagttacagcaggcccagaaaacatacatacactgcatcctgtaaggtctgtaaatcagggcttcggcaatgcccattttgctatagactcattcatgttttttaggaatcagaatcatttcaggagaaaaccaactaagtagactttaattcttctctttctcattcttgccctttgagaaacccaagtggaatcatcacttaattacttactcaaattcaatgaatcaaatccaatccaatcagtgagaagaatagcttatctttcaaggtaatactttaccttagatctttgagggcatgcttcccatacaaagagcatcagaaaatcagggcaatcatctagatctcacagatcttcaacataggactctaggttatgagagctgaaccacatagctatcagtttcagtttttacttcctattgagtgtgtagaaacacagcctatggttttgctgtctgcagaagttaccataccctatcaaaagacgagtcttttgataggcagactaacagctgctctctcagcagaaactctacaagccagaagagagtgggggacaatattcaacattcttaaagaaaggaaggggatcc

SEQ ID NO: 372271 - DNA, 377 bp, Homo Sapiens
aatcgctcggtcctgatttaacctgcacacaggaaacaaccagaaaaaatccaaaccatgaatcaagccatgtgcaacgtaggacatctagttccacaaagtgatggggggatgagcacagggttcaagtctgatcattggcagaagcctagtcataatagggttgcctgccattcactgagtttcacccagctggtactaagcccttgcatagacgagaccatcattattcaacagcccaatgaaataggtacttagccgtcccattttacagataagaaactgaggctaatagaggtgtagcaacttactcaagaaagttaagttgcaaagtcggaatttgatcccagtgctaaccttgaagccctgtggaaaag

SEQ ID NO: 372272 - DNA, 482 bp, Homo Sapiens
  misc_feature (17)..(17): n is a, c, g, or t
  misc_feature (50)..(50): n is a, c, g, or t
  misc_feature (55)..(55): n is a, c, g, or t
  misc_feature (73)..(73): n is a, c, g, or t
  misc_feature (83)..(83): n is a, c, g, or t
aaccctaaacttcctgnaaaaaaagtgcccaaaccccccctataaccccnaagtnccctaacctgtaaaaaangggagggccnaaaagccccctattccaatggggcctgtttgaaaaaaaatgatggtcctcatcctatgcaagggccttagtacccagctgggtgaaactcagtgaatggcaggcaaccctattatgacctaggcttctgcccaatgatcagacttgaaccctgtgctcatccccccatcactttgtggaactagatgtcctacgttgcacatggcttgattcatggtttggagttgttttctggttgtttcctgtgtgcaggtttaatctcaacctgtgatcccttgaaagctgcaattttatccctccccgtcctcctccctctcaccccaaggccaagtttaatactgtgcattctgaaatcttgcaatgttgatgatgtaaaataaatcttctctcctgtgtttct

SEQ ID NO: 372273 - DNA, 453 bp, Homo Sapiens
ccacaggatacttttcacagggcttcactccagtgtgagttctttcatgtatgcgaaagcagtggtgataactgaaggttttcccaactgctttacatttacatggttgcttttcatattcctgatactcatttggtttctgtccagtgtgagatctcatgtgcctattaagggacgaatgatgaatgaagtctcttccacaaaagctgcattcatgtggttttgctccagtaaaagtttccttgttgatattaacatttggcatctggctagtggtttctccacatttgctacctcttctactttcacagagtctctcaaccatatgacatctgtaaaaaatgaatagcacattattagtggctttttaattattttgtatttattagtaggtatgagaattacattttaaccattttcagaaaaagtataggatatctcccctgtgaaaag

SEQ ID NO: 372274 - DNA, 670 bp, Homo Sapiens
tacttttcacaggtaactggcacccagctggggctcaggaaacggcagcaataattattacaacacacgtgaaggagtggggaaattaaaatgctgcataaactcaacatattattattagtcttcccatatctacactcatagaacctcaattaaggcataattaaagattagctaaggttaacaaggttggctgcccacattttcattcttggtttggtcttcagtgctgcttgtaacttttattcaggccttaggcaagacataaaaatacactcaaacacccagccacgttaaatgccaatgagattctgcaacatctaaacctggagaacactgctgcagatttgctaagtttcaatctcagaagcgttcaggaggccaaggaggttcactctggggaggcagtgcaaggtagttgcactggaaggcagccagccacgtgtaagctgggggtctcactcggcatcccaggacctctgtttctgtagtgcgagggtaagaatacctgcctctggagaagaaagaacatatgttgctcctggcaagtgctcaataaatgtgagcacctctctccccttctgtgctttataaagagctcagggccttatatttggctatctctgtccaccaactgcagatacaaattaaaaatacctccctgtggaaa

SEQ ID NO: 372275 - DNA, 422 bp, Homo Sapiens
tattccacagggtaaaattgtaaagatccaagataaactttgtgaagtttaaaagctcatgctataattacacaccaaaacagaagcaacttctcaaagaaatctgctatactcaactaataaaagaaacaattagagataagggcatgatataatagcttttatctgtccaaacaaaattgaattcttacttgtaccctccccttctaaataaacccagaaacacaggaggaaaataagaacaaaaggacagactttccactctgaaattatgctgctagcaacaactgctatttgtcccttttatgcctgctcaaatgatgtcacagtttggtcccaggttctgggaaatccaatcaactctcatcctggacacttatcagtccttcactcagttgccaaactgatcactgaatcctagc

SEQ ID NO: 372276 - DNA, 424 bp, Homo Sapiens
  misc_feature (223)..(296): n is a, c, g, or t
gcagcgaggaggcccggagcatggttcactaacacatgttataatatgtgggttatcaatacacatttataaatacacatctcataaataatgaacgctcttcctgtttcaatgtgaatggaacacagcctactgatcagaatgctactgagtacaacaaagagaaattgatgaaaaaatattgttcttccatggtaagggtaggaatatctatgcgcacgcnnnnnnnnnnnnnnnnnnnnnnnnnnnnnnnnnnnnnnnnnnnnnnnnnnnnnnnnnnnnnnnnnnnnnnnnnnctctctgtctctcaatttgcccctttgagacctacgctgcttcccacgcaatgatttatgcatcttatgcaagaaaaggcagctggttcttatagtgggttttttaatgtgctcttctttgtcattca

SEQ ID NO: 372277 - DNA, 381 bp, Homo Sapiens
gtccaaggagaaaacaagacttaattatctttagttattgctaacgtgtcttaaaatagtcgtgacgaatggttataagtagtaaccatataagcaagcagtcctgtcagactgttccagcacagtatttcagctcactgcttatatacaggtggtagggttcagtacagtgcaaaatcacatcaaacttgctcaaaagttacattcaagcagaatctcatcaaggtttaggtgtaagagtacatctggttatggattacagaagcataatcactaatcccatcagacatctcatgtgtaagaaaaggcaaggactggggtcatttaaggaatgtagtgactcaggcaagcgatgtggggtgccctgtgaaaagtaggtac

SEQ ID NO: 372278 - DNA, 402 bp, Homo Sapiens
  misc_feature (353)..(353): n is a, c, g, or t
gatctccacagggccagggttgctacttgcacccagaatctagtgattttagtcagatccatggaacagagcagcttcgtaatacattgtcaagttacctgattacaaactctcatagatgttggaactacctttttactccccatactttgtaagtaatgcttccagattaacctgcaaatcttgtggagccaaagcctctcacagtgctgatttacctcccccaaaatgcccccaaacccccatgcaagtttacagccagtagcttggtcttattctcttggagccctaaaattaagcctttcattcccctttgctaaagcatctcactcccaggggcagccccagcaccngggcattgcggggaggtgctctgctggcacagctgtttccatcagggcc

SEQ ID NO: 372279 - DNA, 401 bp, Homo Sapiens
acagggttgttaggtggagtattctgtagagtttatagtgttcaagtcttctatttccttgatcttctatctatactatccattactgaatgtgaagtattaaggtttctaactattatttttgaattatattctgcctttcaattctgtcagtttctacttcatatattttggggttctcttattaggtgtacacatgtttataagtggcatgtaattttgatggattgacctttttattgttacaaaacattctctgtagtagcaattttttgtcttaatgtctgttgtttctgctgtgagaatagctgcatcaactctcttttggttactttctgcatggtataactttttttatcttttactttcagtttatttgtatctatttaatctcaagtgta

SEQ ID NO: 372280 - DNA, 883 bp, Homo Sapiens
  misc_feature (321)..(321): n is a, c, g, or t
  misc_feature (388)..(388): n is a, c, g, or t
  misc_feature (504)..(538): n is a, c, g, or t
  misc_feature (761)..(761): n is a, c, g, or t
  misc_feature (827)..(827): n is a, c, g, or t
  misc_feature (846)..(846): n is a, c, g, or t
  misc_feature (861)..(861): n is a, c, g, or t
  misc_feature (869)..(869): n is a, c, g, or t
gctcggtaccctactcttccacagggcaattctcattcttacggcaactgtttgggaatgacccttcagagtcagtccgtaactccaggagctccaatgtcatctcacacttccagcacccacttctatcatccaatccacagcaatggcactccaatccacacacccacacccacactgactgtctaccgacaaagaccctatttcctggcaaacggcctcctgaaccctgacttttcgtgtacatacttgtaaacacggatttttctgggttatggtttgctttttccttttgtccccctgcccctgttctagcttgtncttcttggtttgctttcaacctgcttgatggatgtctgcagagtgctctctaagagtccacctcagngcctcgtgtgctcagtggtcatgggaaggagcgaaggaaccatccttggttctcccagcttggttgtgtagcaatccctcagcattgtttttctcagcttcttggcaaaaattaannnnnnnnnnnnnnnnnnnnnnnnnnnnnnnnnnngaaggataaactggcttgcctgtggaccctccccggctctggggccagtcgagagccactgagggacccagcactcagagacacaacacacatgtgtagctgcttctggctgagtgtgtttcctgtcaccaatggcctgtttggctggacgatgcctcggcttgaccttttttgaaaagtgctggttagttcccgcccctggtaaacctggggtaggtggggnttctgttcttaactcgaggggcacctggggatccagggacggtttttagggggctctggctgcccntgttaatgaaggacagcgntttccggaggcaccngggaactnggtctttgggtagc

SEQ ID NO: 372281 - DNA, 414 bp, Homo Sapiens
gggaaagaaaacctctcagagaagagtaagtagcaatggagagctctctcgggaggaaacgtgtgggctttctagggtgaaacaagaactgctaatacttactctggtcaacagatgctgacatagttctggactcaaacagggcatatgttaaacgatagtattttttagttcttcaatgtcataatcctgatgtaaaatgggttcttcaagccattatggccataacctgggtatggtctttgattgtatgccgtttggatatctatgccaagtggttttggtgtcccgtatcatccgcattttttaacgaacgaaaaaaagtacacatgtctgaggtacgtgtttcttaccatgagccctgttggagtacctcttctgacactaagtaacagtgtgacctgtggaaaagta

SEQ ID NO: 372282 - DNA, 578 bp, Homo Sapiens
tacttttccaacgggagggggtttgaattctagacttggggatacaagttttgtgtgagtagcacatggctgggggtgagtaggtgtgcggagagaataggcgacaagaggaaggacagaataattaccaggctggataatccagccttgcacaacggagcgctgctgataaaaaggggtcgtgcagtgggttttgtatctgttgtggccactttaataacagcgtctccttgaggatagagaggcatcaccaccacgctcctcccatgaccctgcatgatggttcttcagtgccccgtccctgcccgacatcacattacacattcacaggcttattacctgtcgctcccactaacgagtaagctcacaaggatgaggactttgtttcatcctcattttcccctagaggatggaacagctgaaatgaacagaaaataaagaacagaagtatccctaaaacagaagccttgctatttacacaagaaacactgaaaagagacatatttggaaagcttgagaggaaaatggcagtcccgagtcaataaaaggcacacatttaaaactgccttcctctcatc

SEQ ID NO: 372283 - DNA, 656 bp, Homo Sapiens
aggcctccatggtggtaatcagcttcaaaaaggctgctaaatggggaggaaaagggaatatcaaggagactgggagggaaagggagatgtaataggctccaaaattcaaaattcaaacaaatgaatcaattacatatgggagaagatgcagcaaagtgtgaagaacaagacagtacaaggtaggtcaccaagcacagactctgcaagtcctctatcatgacagtcaacaaaccaaaattgagtctaacaaatatttaatacttaaaaaacaaaaatagagggatataccatggataaaactgatctaataagctctctcttgattcaagggattattctttagacctcctaggaaggaatcaatatgcccaagccttgcactgcttcaggtacaaaactgtgggacccaacatgtatattaatcatttcattggctatgtttccatttcaagctgagcagccaacctaactttagctacaaaccaaactccaagttcattttgtaaatgccaagtaaaatgacaaattgctgatctcatccactgacatgagtgccaccagcccttcctatctagacagtgactggttacattcagcccatgctggcactggcttgccatctcttccacttccccttcctagcctgtggaaaagta

SEQ ID NO: 372284 - DNA, 300 bp, Homo Sapiens
gagaaggtacttattaaataaatctggaacatccattaaaaatgtttataaatcattttaacaatatggaaaaatgggatattaaattagtagaaagaggatacagaagcatatctaaaatacgaccctatatacatgtgtcggtatattacaatgatatttataaaaatgcagatacctaggacatatatgcaatggttctcttttggtggtgggcttatggatgatttaatatttctttttatacctttctaatttttccactttttcagtgagcacatattagttttctcagttctc

SEQ ID NO: 372285 - DNA, 234 bp, Homo Sapiens
tacttttccacaggtacactcttcctttggtgaactcattcagactatggctctaatacaggatatatgctgacagacttccaaatttatacctcaaatctagacttctttcctaaacttaaaaaatgcctatttggcatggatgtataatcagtgacataaactggagtatctaacaaaaatagcaaatttgacatatctaaaacctaattccaaatctccccttgaaaagta

SEQ ID NO: 372286 - DNA, 261 bp, Homo Sapiens
  misc_feature (159)..(159): n is a, c, g, or t
tagtcaggctcggtaccaactgagaactgtggtgtgggggaggactggagtgtggggcagagaagattgtagtcacaggaagtgagcccctgtggttgggtgctggctgctctctgccagtgtagaggtggccactcctctgagcagcaggctgcggtngtttcattttgcctcaaggacacagtggctgggtctttgaagccctgtgataaaatcttggacacaggaggcttggcacagccacctcctctctcccagcat

SEQ ID NO: 372287 - DNA, 655 bp, Homo Sapiens
tacttccacagggatgaagcagaaatgaggctggctattgtttgagaaaaatttaatggcctaaaagggttggcatggccttcaaaagtaactaacagacccggccaaaggaaaccaagagagctcccctcaagatatggagcacacatcagtctccatatcctttggggaaagcctcctacttattccagtgcaagtcacaggtgccacgccccctacagcagagggccatattccagccttgttaatgctgtacagtgataatgtgtggcaccaccataccaaattaacaaagtgcacaatgattgtgtccagcatcatatcatcactacggcaacctgttgatgataatgtaagccaacctgacagaaggtctgtaagctggttaccagcgggatatggaacagacacatgcaaaattccaacaatcccggatgacacagcccacaggcttggattatatcatgcaacactacatactcttagtgctctttacagagatttgagagataacacctatgcaagggctgttgaaaacagatttaatacattcaaagctgttgcaggaatcagtgacacgcacatcaattacccacagcttggtgtttctgcctatgttgcaaaaaaggtgggatacctggtgtcgtaaaaccct

SEQ ID NO: 372288 - DNA, 485 bp, Homo Sapiens
taacagtagttgtctccgctgccggcagtgctggttttcttggcattaattgggctatttgggtccaccagaggcatcaccgactggagccgagtgaaggcataaggccaggcatagctgagggctgtggggcagtgcttgggtaagttctcctgccggaggaagctgaagaggcagaggacccaggggtctttgacagactgtgcaaatatccagacatgggaagggcttttcacatcataatggctattgaccaggactgcgttccattccaccaaccactgcagatccacattgtgggtgagtggtaatgttgctgaatccgaaactgctacatgaataaaactttctagaatggaagaacttagctgatccatgacatcaatcatcggcctgtcgtcatcctcaggctgccccagggcaataaacaacgctcgaatttccttgagtattaaaacggacagtttgcgtgtggccacctgaca

SEQ ID NO: 372289 - DNA, 920 bp, Homo Sapiens
caacaatgatgatgactgtcaaaatgatgatgttaaattgggtccatgatacatcagttaaagctgaagtgctgttttcagaagtgcttactgaaaagatagtctgcagggttgtaggggtaaaagtactatttataacaggggtgggcactgatgtggtcaaagaggcattggaaaccaaaatggtagaaccttcaggtgttggaagaataacttctttcttgatgcaatttccctcgaggtcgtgaacataaccttctaggcagttctcacaccaaaacccagtggtgttatggaggcagttgatgcactcaccactctcgggcttacaaatctttggagttttaactgggtccacatggccgtgacattggcactttctacagatgctgtcaaaactgtaatagccattttcacatttattgcagttcgggcctatgtaaccatctttacactggtcacattcaggttccaattcactcgattttatagagcagctgcctgtagatgtcactgctgaacaagggcagcgaagacattctttagtggcatcaggactctgataaaatccttctttacattcttcacagtgatttcctttgctattttcctggcagtttaaacaagcacctgtgagggcatcgcaactggcagaccgattattgcattggcagggcaagcagccattcttactaaagccataatatccatcttggcatcggtcacatatagagccaatgacacccactttgcactggcatttcccagaactgttgcacggtatgctgagagctccatgtggactacagacacatggctgacagagcccagaagtgtaatttaggtaaaagccctctttgcaggtttcacagtgaagcgcctgataacctggccgacactcacactgccctgtggaaata

SEQ ID NO: 372290 - DNA, 340 bp, Homo Sapiens
ttaaaatttgtgaacttggatgggaaaaacattaccccctagctgaaatttagaatttccttcaattatgaatgtaggcaacaaaacacaacagtataaaatacctgggactgtcctagtaaaaattatattacaaatattgaaatatcttaaaatccatctaaattcagcattacttcaaaattatggcagttgttagagttaccaatagatgtaatttataggcatttgtattataaatttgtttttaatactttgataattacttaaaaataatttgttttatgtattttatgcctccatgaacattattttgagaagggatccccctgtggaaata

SEQ ID NO: 372291 - DNA, 509 bp, Homo Sapiens
cagggtatgcacactgagtataactgaccttatgagaacatcattctcactaagattatgatgtgccttctcacgtgggaactgtacataatattgcatgtacacttgggaggatgtcctgcctgtgatgttgtctttcaggggaagaagaatggttgagaactgagggtatattaaacatttactcctccagatttttcaagatttctgttaagccagatcagaagaaacccatctatttggattgcatcactctaacctggaaataccaatattttctaagcatggcaagtgtttccaagcattcagaagtggagagtgtaggaaatccactgcagaatgaggtctgctcgtcatcctctcagtctcaactgctctccctccttcatctctctctgtttcattgatatagaaatttagatctgtaaggaccatcagtgtggtgaaggtcacatgacgctgctgctgaatccatggagagaaaaaggataaatttccagaactcaggt

SEQ ID NO: 372292 - DNA, 533 bp, Homo Sapiens
tactttcacagggtctgcctgagaagcgaccaagagcagagacagacaggcaaagtgaagcctattcctggctgcgctttccaagttccagtaaagaggttatgtgactttattcatggacttggtattttaaaatattaacgaagttccacaaacacatgtacctcccagccctcaatgatgttaaaccccagagttccccctagtttaacagctagtaaatcaagttttaaatttaaggaaaatgaagtagcagaaatttaatactgttgatcttataattatgttttattttctatctttaaaaggcattattttgaactttcaccttctgatttaaattgtttcaaaggatacaacgaaactgtagctgtttatcagatagaagaaatggtttaaggtgagaggggaagtaaaatttatcagggatttaagtaaatcaagggaatggataatgagtgtttttccccctatatcgttaaccgggagttactcccagaataataagcaatgttgatgcctgtggaaaagta

SEQ ID NO: 372293 - DNA, 566 bp, Homo Sapiens
aaatgttgcagaagaaagaacagataaccacagcaaacccttggacaagaagtagactccacagaggaacatgttcgttgacctcaaaaagtttatctcagctatgattataagccaattttctttcagtttgtacttttgtctacattaaagacactgataaatgatataagaaaatagttaagcccacaacatctaatctgcataccaaggcctcatctgcctccttacagactcctatcttcactactcaactggtgaagggagttctaatctgcttggttatattccaggacaccaattctgctagagttaccagcagttggaacactgagcatacaaaggtcatagagaaaggtgcgattctctcttccttctttgctactgcactagtaagagaccagagtcttcacctgctgttggtcccacttccctctacttttctccctttgcctatcttttcccttcctaaggaacagctttcctgcagatagaggctccaggcaactgttttctgtccctgattctctttccttttttctcctccttatagcctgtggacagta

SEQ ID NO: 372294 - DNA, 589 bp, Homo Sapiens
gtcctactttcacaggaaggtaggagtgagggtgaggtggtagtgaaaattaaagactttcctgacagacaaggtagaaaagctgaatgagctcagatctttaaacaaaggagagactcttctacatcatttgggctggagatatgggggatggctaagatgattttcagagaactctgccatgtatcatgagatcagttgtataactgttccaatgaacatttatatttagggtagctgggagcaggaggtgattagcaggtcttaggatcaggtctgctcactgatatataagaatacactgataaaatcaccatgatgatccttatggagccccaaggagatagatcttaaaagagaggctgagctccacagtctttaccatcagtaaatccctgtcccacacaaagtcaagtcagctacataatcaaatccaaaatgtgttcaaatgatgaatcttcacttgccccaaagtggtacaaggatagctttagagaagacagctgaccctaagtgctaggacggtcactcccctaaatgaatgagaaggtgctacttggctgggatcagaaatagagctcaagcatca

SEQ ID NO: 372295 - DNA, 674 bp, Homo Sapiens
  misc_feature (66)..(88): n is a, c, g, or t
  misc_feature (348)..(349): n is a, c, g, or t
atagagatagtaacagggtgttctaagaaagctacttgagaatgagccaccgggaggaagaaaggnnnnnnnnnnnnnnnnnnnnnnncatccatggagggcaggtggggataaccaagaaagaaaaagacatgggatccagaaaacaggaaaatcaacccagagagaagggaatctgagaatcacagtgggacatgcagtaggcctacaaaacgaccagtccaggatggaataaaaagggaatggttctgtgggaaaaagggactcaatagaatacctcaaaggattcacagtttgagagaaactgaggaaatgaagaaggcaagcagtacaagggagaaaaagaanncaaaggcaattcagcacaacatcagggaaaaagtaaagctgtgccacaaaacatgtgcaaacatggtgtacaactcagctccacagtaaatagtatttaaaacatcacaaaatgtaaacactcttgattgatttttaactttgagaacagaacagagcatataaatatgagaactaaatatacttgttaccgattagtacaaacttaaagcacaaaggtagcagttgggatgtgaagcactgaacgaaggagaaggaggattaatattgtcatcttttaaagagggatcaagaaatactagtaaactccctgtgaaaagtaggac

SEQ ID NO: 372296 - DNA, 563 bp, Homo Sapiens
tactttccacagggggagttgaaaataactgatatcaaaaattcactaagaggggttcagtagcagatttgagcaggcagaagaaagaatcaccaacatttgaagatagatcaactgagattattcagtctaaggagcagaaaaagaaaagagtgaagaaaactgaacggagcctaggagacctgtgggataccctcaagcataccaacatacacagaatgggagtcccagaaagagaagagagaaagaaaggagcagaaagaatatttgaaggaatattgtcttataaggtctgggctataaagaaaaaaatacttgaagaaataatggttgaaaactcctcaaaagtgataaagacatgaatgcacatctaagaagctcgacaaactccacataaaataaacctaaagagatccacactcaaacagattataaccaaattgttgacaaagaaacatagaaaatattgagtgcagcaagagggaagcagctcactacatataagtgatccttaataagattattccctgattcatcagaatgagggatgatgtatagtaaca

SEQ ID NO: 372297 - DNA, 558 bp, Homo Sapiens
  misc_feature (380)..(448): n is a, c, g, or t
tttccacaggcataaatatatataccttggagaaccaccacgtctgtgtataaagaaactggcagtgttctacacacagtagactacataacttttactgttatcatcttatctccctgaaggtaacacacattcctatgggcaggaacaatttcatgtatttcccttgaatcaccttactgctgtcagcatggtgataagtatacaaaaaatacccaacatgcaattttctttgaacttttaacttctgccattaaaattaccctttttctttactgtaaatggttatcctctgattttctgaaaagggttaggtttggagtctttcagttgtgtcttgtttttcaaatgcgagttttcttgtttttgttttttagagnnnnnnnnnnnnnnnnnnnnnnnnnnnnnnnnnnnnnnnnnnnnnnnnnnnnnnnnnnnnnnnnnnnnntgttggctcaggcgatcctcccgcctcagactccccagtagctgggactacaggcctgcaccaaatgcacaaattatttcttaaatccttcgtagagactaagtcttgct

SEQ ID NO: 372298 - DNA, 413 bp, Homo Sapiens
gatttaacactagggaaacagaaaactatacctgctcaatgtgtccccaatgtcctgcaagagaaaggaaaaaaaataaccatgagaagtcatttaaaacttcggttttctttcacagatgtttgttgaaaaaccaactacagactggctctcatgggagaaattagggagaaaaggatcactggaacataactcagtgttgaggagctaaaaggcaggcagaggaaaatgggatgcatactatttgctataccagcatttcccataccctccttcagtacccaccatccactggtcaaggacctcaggatttcaaatttactaacttaagcgtcctatgattggacctcaagcttgcctacctgtccagcttgctttctttttattatgaaataatttcccctgtggaaaag

SEQ ID NO: 372299 - DNA, 196 bp, Homo Sapiens
cggtgcgggttatacttcacgctcttcaggacatggaattaaaccagataataactttaaaacagataatgaaagaaatctaagaacttaaaatatataaatttccagaaacaggtgaagaagacaacaagcttgttaaaaagaagaaggaccatttacctcttgcttaggtaggtagtaatactatatcattgaa

SEQ ID NO: 372300 - DNA, 415 bp, Homo Sapiens
gaatgtcattacgttggctgaagttctggtgacctaagatagctagatgggtttctaacaagcagtcagcattgcttgctttctgataaatacatttgtcattttgtttcccttcggtctttttaactgcccatgatatatttaagtgttctgacttgcagactctgccagtactatctagcttctaattgtaaatgtttatatcacggaaattgaaccagtaatttcagatcagggacaacattattgcgaagaatagaacatgttcacgacagtataaaaagtaaaggaactttcactatagactttcagtatgcaaaatgtacacataatagcacaagacattcagggcatatctagagaataaatacctctgcaaaatctctgcttatatataagaataagctcctgtgga

SEQ ID NO: 372301 - DNA, 470 bp, Homo Sapiens
atctggaatgagcagctaaatgtaagctttatcattcttgaaattcagaagcttttggggtgatgctaagccagaaaaagaggtaatctttcaaatgtttgtccttgcaagtcctatgttgattttcaatgagcaacagagcaaattcatttgtttacaattgtagctgaaacaaccaagtttgcttatgtgacatgtttacagtttgatgtaactgtagatatcagaggctaacatttcttctgtggtccttgtttttgtattcactgttgtttttgggtttccttaaggacttcttcctaaataaagtcttagatgtgcagtcctttaaattccattaacctgttattatacaagacccctactaatttgagtgtaaggtgtgggatagccttatgctttgttctcaatgttttagttagtctgtgctcctgggcttgaccttcataaatgcttctcccctgtgaaaa

SEQ ID NO: 372302 - DNA, 566 bp, Homo Sapiens
caggatcagcatgaaggaagtccaaactcatcaggtgaactactttccaaaactccatttcagaaatgatatatagttaagttctcatacgttaggaattagataatacaatttttcgctaaaaaaatgaaacatagaaaacccgtaatctgtatcttcaactgcctacccccatcttcatccactttactctacaaatatccatgcactttataagttcacatgtcctacatagaatgatcctgacctggtaaacatcttagcctaaaatggcaaaaatggaaagtacgattggagatgggatacttttcccaagcttttcatagaacacaatcttttaaacaggctaattcttgaaaaacgtattccaactcattgttgtaatctgaattttctaatagctttagatgaacacttttgatattccatgggctgctcttgatggattgaaaattacagatagaggagccaagggattaaagaagctatcaaaagatatcatttcccacaccctctacacatagttaagactcacactgctaagtggtaacagaccctctgtgaag

SEQ ID NO: 372303 - DNA, 518 bp, Homo Sapiens
  misc_feature (508)..(508): n is a, c, g, or t
tgagccggtacctacttttcacagggatatcattacttgtaggccccctctagtgacagagctaggaaatacatatacctacctctatttccgtattgatgtatctgcatatatgttacaaaatatgaattcatatgagtacctccaatctaagccaacaccacatggctcattctagccctccccattgcctttgatagtgacagtgagaaacctggttcttcttactcatgacatatttattttcttgttcagtcctggaatgaacataaaggtagtttcataattgttaacacatacctctgtggaaaaaaatttgctaactagtgtacaatatttgctatgtttattttgtttttcatcttatttagttaaaatactgtttttgaaagttattttggttaattcttttcttctccactctctttaagtggctgtcatttatttagaataaacttctgtccatcattactgtttgtattccatttgtgttcttcccaccctgtgngaaaagtagg

SEQ ID NO: 372304 - DNA, 497 bp, Homo Sapiens
ttgcaaaagtccatggtagaagtgtgggttcctggggactatcactcactcatcatttgtccgaggtatgggggccgtcctctggtctctatgccatcccaggtgggtggttgtcttgtctcattcctctctttcattcgtgggttgtttccttgatgaatcccaatgtgtccacctgaatgttccagttaaaggtctagggtttactcaccactatttcttctgtccgtgagagcagtgcacgctagctccttctagtcagccatcttggctctcccccatatttaaattctaattcaacaatagggattagaggatattttctgggtttatgaatccactgtgtttatataggggtctttctctaactcagtactctaaatttttacaaggttctcacctatgaattcaaagtttaacctgatagcataaaatataaaattactccttactgtctccagcgggtctggatatctaaacaacctcccctgtgaaaa

SEQ ID NO: 372305 - DNA, 642 bp, Homo Sapiens
  misc_feature (178)..(178): n is a, c, g, or t
ttatcattgatgtcaagtatagtgatggccacatagcctcttcctacttgagatggattctggctctccattgcaaggactgtgatattgtgaatagcatttgtctctcgatccaaagacttggcagttgtgatgaccccactgttggcatcaatattgaagtatctctccaagtctntgtttctgtcaattgagtacctcacagggctattggaagaatctgggtcatgagctgctacagtgccaatgatattcccaacctgggtagcttccgacacctccatagggtacaagggtgaagagaacacagggggctcatctacgtcttccacaattatcttcacagttgtcgtgtcactgaacggacccaagctcagaaagcgagggtcggcatctttatttgcagcttctatccgtagcgcgtaacttgttttggcttcaaaatccagctcctgtaaagaaagtcgttaggaaaattaaattaccggttaaacagtcagcaaagcagagccttttcatttatggatgtcaataagcttaggaaggactctgtcatgtaaatgcaccatcagcatccaaaaatactaaataacaatgccaatcagatttcttgttgctttcctgggtcacaaaccatggttc

SEQ ID NO: 372306 - DNA, 542 bp, Homo Sapiens
aggggtcatattcttaacaggaactgatcatccagctagggtgtcttcatattgctgggaatctggagtaggcaagaaaagattagcagcctggagaatttcctgtctagcctgctggagtaccagaagatagtcgcctagagggctggtgtctgtcaagaggttggggcccagcaagaaagtacatccgtatgaaagttcaaatggactatatcctgtagcttcttgaggataggctctaattctaaggagggcaaatggtaaaagtgctgtccagtcttttttaagttggaggctgagcttggtgaggtgtgtttttaaaagaccattagttctttctacctttcccaaagatgaaggatggtaagggggtatgaagtttccactggatgctgagagcctgggagactgcttacgtgacctgactaatgaaggccggtccattatcagactatatagaggtcagaaggccaaaccgaggaattatgtctgacagaaggggaagaaacgactgtgtgccttctcagaccctgtggaaagta

SEQ ID NO: 372307 - DNA, 604 bp, Homo Sapiens
gagctcggtaccccatccctaacctcctctcgagccccacagcaactggatgcttctgcagctgcagcccctgcctctctgccacctgtcatcacctgctgctcccagttgccactttgtctttgcttcctgctggtggagccccccctgtgttctcctttggttcttcatctttgaagtcatctgctacggtcactggggagcccccgtcatattccagtggctccgacagctccaaagcagcacccaggccctggcccatcaaccttctcttttgttcccccttctaaagcctccctagcccccacccctgcagcgtctcctgtggctccatcagctgcttcattctccttaccatcattcatctttgggaaaggtagaaagaactaatggtcttttaaacacacacctcaccaagctcagcctccaacttaaaaaagactggacagcacttttaccatttgccctccttagaattagagcctatcctcaagaagctacaggatatagtccatttgaactttcatacggatgtactttcttgctgggccccaacctcctgacagacaccagccctctaggcgactatcttctgtatcacgca

SEQ ID NO: 372308 - DNA, 953 bp, Homo Sapiens
ccaactcgctgtgctaacagaatccagaagtcacccatccgaaaggcactggcccatgacactctccacttccaatcttaaatcttttacttcataccttgtctcagatctctcctggtaccccttccccacgcccttagataatccatctcaattcctcatgctaattgaggagctatggctgcaaggcaccttccaggatttcacacctacacaaatctcctttttctccttttgccttctctgcttatgggatattctgagtccccacccccaatcactgacagctgggcccccttcatcagcctcacacaccacgtattaagtcagtcacaatctcccctctcctctaactgctggatttgtctttctacacacacccaatgattcacggctcttccggctgacctacttacatggacacagtccaacgtgagcttacacatttcttacttggctataccattcttggctgattcattcctgaaaccggttcataacctggaaactcagctaaacacctttccttcaaactcagctctctcagcatggtttcaggtagggctgttgccctccttcacctaatagcttctggactaacatccatacaaaccaacacagcatcatctaaaccaccaatatgggggtaccatttctactcaaacttccttcatatccccaccccccttatgtctcagccgatcctaccctaatccaacccacgccacaatggtgggacaggttccccagtccctatgtggtcttatttttacccttgcgctccctgtagaccatcaattctacaccctaattacaaaatcatatccacctctgcctggcagaaggtgttatgcttttctggctcgcctaccatccacacatccctacacctcaccaccggatcctcttttctttccttccatccaattcctggcttccccggctgccattgg

SEQ ID NO: 372309 - DNA, 533 bp, Homo Sapiens
gaggaatgggcaggtcaaatacagaatgaggtttgacaggctagatgtcaggaaaagccttaagggaggaggtgaccttaagctgcagtttgaaagataagttggccctgacagataatgaggataggctacacggcaggtgggagtgagaactgcaagatcttctaaggtgatcaactgaaggtactatgcagtattttcagttgatttcagaggtatttcctagtaccagcaagcaagcagtttgctaaggctgaattttggggtagggaggtacagcaacagccagggctatgtatgctatgctaagaaacatggctttatccacaaacagttcttaatagtttctgaacatataccctatttagaatttaaaagtgactaaaacaaacaaacccaacagctaaggtgcactgattacttattatgagtcaggtactttacgtacacttctgatttagttatatatccacaaaagcccttaaacaggaaccatttctatgagaaaatggtggctatgaacctggtacttt

SEQ ID NO: 372310 - DNA, 447 bp, Homo Sapiens
tacttcacagggctcggatggaactatttctctgaaatcgatttactacaacatggaaaatcatatgaaagtcatcaatcataggaaaaaaatgtcaattgagtcaaagcagaagaaagaacggaaaggataaaaatgaaaactgcaacagactaaagtcattgttggagaaaggctatttttaaaaagacttaatagttaaaaaaattaaatccctgaaataggagacaatgaagcaaaacagcgagctttggaggggaatacagaaaggaagagagctttcactaaaaacagccacatgccagacacggcccaggtgctttactccccctaacagcatgcgatggcacaggttcccctttccagattaagaaactgaggctgaactgaggaaccgctctttccagtgcacaggtaggagtcccaagccttgggttcgcttcccct

SEQ ID NO: 372311 - DNA, 460 bp, Homo Sapiens
  misc_feature (71)..(138): n is a, c, g, or t
ctctttcactctcaaaagagtttaggtttgggtgataaaatatgacttctcatgtgttgggagctctggannnnnnnnnnnnnnnnnnnnnnnnnnnnnnnnnnnnnnnnnnnnnnnnnnnnnnnnnnnnnnnnnnnncgttcatttattcaatcaacattgattgagaacctattatgtgctaagctggatgctggatgctgggacacagacaaaagcaagtagttagacaacaaaacaactgcattgcaatgagtgctatgaaggaaagactgagagggttatgctataaaataatagagcaggggcattgactttggacagttctgggaagagccaaagcttaggaagactgcagatgaaagcagtggagatgccctgggaatgtctactgaagcctgagtcagaacaaacgtagcattttgagaaaatgagaaaagtcctgtggaaagtaggtacc

SEQ ID NO: 372312 - DNA, 544 bp, Homo Sapiens
tttgcctgtgaaaggagagatgaaaatgatcaagaagtgtgtaagagagaaatttcccacgtagaggaaataaagaaacttcacagagcgaggttgctgtgagaagcaaatggcataatatacattaaagcactctgtaaattataaaattatgttctaatgttagatgattttttccaagaatagagccaaacatgtggcactctaaattcgacaccaagaaggacagttgaattagtctcttttagatataagaacagaggtcctctaagaacacggaaaccaaggaaacacacctcttgccccaaacaaggagatgttaggtagtgcaggttcccatggaggaaatgagggaagcagaagcttgtttggagatcaggctgcactgaacacacaggcagcaggctgtgactcttcacgctctgactctaccattttaacctggctcctcctggggcttcagaactaagtgagccctattccttccggacatatcttatctctttgccttttaagtatttcttcatgttcaacttgtctctat

SEQ ID NO: 372313 - DNA, 573 bp, Homo Sapiens
atgtagggggtttgatgcagaacacaatgaaatgaggaaaggagaaaaacaagggaaacacagagagagtaaaaaggccatatcaaggctttcaactgctacttgaacatctttattcgctctagttcatccttcctatctcagctggaaaagttagcaatatctcacagactaacatggtattagaaacaatagccagcatcattttgaaattttccatggaagaaggtacacatgcctcatgcagcaagggaggtcactattgtggaaaaaggatcaagggactttcgaagaatttagagaagaaatgactttcttcatatttccccaccccagactccataaaaaaagaaaggagagaaaaacatccccagggaaacaaaattacctctaacaaaaatttcaaaatcaagctaggtattttcttaagggaacccatcctattgtaacttaaagccctctcagtcttttctttaatcccacccccacccatgcctttgtggttattcacagatatgtagaccaggaataagaacacttcccctgtgaaaagtaggtaccgagctcaatcgt

SEQ ID NO: 372314 - DNA, 521 bp, Homo Sapiens
ttaatataaaagggggatgacccacaccaatttcagggtagaggttacttccaggtgggtggtgagggtgggtgtgagaggatggaggagagaagctatcatagtgtatttctttgagagagagcaattccaaacatatatggaaaaagttgacattgatgacagctagattacaggcattgagctggactcggctctggtgtggtaaaaactaaagccctaaatttcaatggcacctacattattcctgctcaccatccactggcccacactaatcatgcgaccccaaattaaccacaggggaggccgggaagaaggcaatgatggattatttagtgaacattcatttggctctgtttcatgagtacctgggcatgtgtccgaccatggtaggtacttttcaggatatgttcaagatttcttaattaaagtgaagataacgaaaaagaatcacttcctatccctaacaaaaaggagagattcaccgtcattctagagaaacctgagccaactcaccctgt

SEQ ID NO: 372315 - DNA, 680 bp, Homo Sapiens
tcgtgtggttgtaaacctactccggtcaggatcgtgtggtatgtaacctacgtaaggtcaggatcgtgtgtttgtaaactacgtcaggtcaggttcgtgtgattgtaaactagtcaggtcagggtcgtgtgattgtaaactagtcaggtcaggttcgtgtgattgtaaactagtcaggtcaggatcgtgtgattgtaaactagtcaggtcaggatcgtgtgattgtaaactagtcaggtcaggatcgtgtgattgtaaactagtcaggtcaggatcgtgtgattgtaaactagtcaggtcaggttcgtgtgattgtaaactagtcaggtcaggatcgtgtgattgtaaactagtcaggtcaggatcgtgtgactgtaaactagtcaggtcagggtcgtgtgattgtaaactagtcaggtcagggtcgtgtgattggtaaactagagtcaggctcgggggtcgtgtgattgtaaattacgaaggctcaggtatggagtgatggtcatctatgtaggctcgggagtcgagtgattgtaaactagtaaggtcagggtcgagtgattgtaaactagtcaggtcagggtcgtgtgattgtaaacctagtcaggctcaggctcgtgtgattgtaaactagtcaggtcaggctcatgtgattgtcaactactcaggtccggctcgtg

SEQ ID NO: 372316 - DNA, 229 bp, Homo Sapiens
gaatatcaagagctctgggattggctgattgacatggagtcccttgtgatggacagccacgacctgatgatgtcagaggagcagcagcagcatctttacaagcgatacagtgtggaaatgtccatcagacacctgaaaaagacggagctgcttagtaaggttgaagctttgaagaaaggtggcgttttactaccaaatgatctccttgaaaaagtggattcaattaatg

SEQ ID NO: 372317 - DNA, 563 bp, Homo Sapiens
gaatacccactatctggatttagcaaatattcacattttgccatatcaatttcaattctttggccttattttaaatcctcacttcctttctccttctctaggggtcacattatttcctttcccagcaaagttagctcttggtgctgccaaattatattgtttgtgtcagtgtcttaggagttatatcattgaactagaattataaggtaacttatctgtagcctattctagattcttcacttgttgagaagaaaaacttggcctttgtaaagacgttgtccccagcccctggtaacatgccagtgctgcaattggttctcacaggttttttcttgttgttctgatttgctcctttgtttgttttgaatgaagggatgacttcacagtagaaaaatccaaggactcaagggttatagataacacattgacagactttcttcttattgaggttcaatatttttaatgagtattttagcacaggattgtagagttatttaattcaacagtttgggcctcccaatgttcctataactaaaagctttgaagtaaccctgtggaaaata

SEQ ID NO: 372318 - DNA, 534 bp, Homo Sapiens
  misc_feature (447)..(479): n is a, c, g, or t
tactttccacagggtgtacaatgaagcatgggtgggaggtctcaggaatgcttataattatggccgaagggaggcaagcacagtcttaccatggcggagcaggagagtgaatggggaattgctacacatattaaagcaacctgacctcatgagaactgtctcactgtcatgacaacagcaagacggaaagtctgcccccatgatctaattcacctcacaccaagtccctcccccaacactggagattacaagttcaacaagagatttgggtggggacacagggccaaaccgtatcattctccaactaaggtgacctagcatagagaggtttcccaggagtgggaatgttagtgctaagacaaactgcgatgagttagtcaccccacctccaacttttatattgcattctttgtttctgcaatcttgtgtttaatttccaagaggccnnnnnnnnnnnnnnnnnnnnnnnnnnnnnnnnnagtattctgttccgattttatagaggcactatcttatctatctgtaaaaatattg

SEQ ID NO: 372319 - DNA, 444 bp, Homo Sapiens
  misc_feature (59)..(146): n is a, c, g, or t
cacagggtgcagagatgatggatatctatgtgcaacagaatgaagttgaactccttgcnnnnnnnnnnnnnnnnnnnnnnnnnnnnnnnnnnnnnnnnnnnnnnnnnnnnnnnnnnnnnnnnnnnnnnnnnnnnnnnnnnnnnnnnagtaaatctttctaatcttggattaaatcatggtttcttagatataacactgattagtcagggttctccaaagaaaaaaaccaataaaatacatacagacatataagaggagatttactatgggaattggctcactcaattatgaagactgagaagtcccacaatatgctgtgtgcaatctggagacctaggaaagctggtggtgtaattcagttccagtctgaaaacccgagaaccaggggagtcactggtgtggcttctaatccaagccctaaggcctgagccctgtggacgagta

SEQ ID NO: 372320 - DNA, 190 bp, Homo Sapiens
ccacaggggggaaatgaaatactagagtctgcctggggagcagcagggccagaccgagcatgtctaggagtccatgtgtcccagtggggtggctctcgtgggacctttctggcctagtttattctaaatccgttacttcccaacctgtgttctgcagaacgtggtacagtggggtggtcaaaggctatct

SEQ ID NO: 372321 - DNA, 460 bp, Homo Sapiens
agggggcatcattcccacgcaaattaaaataggggtaactctcagtaggtgttgcaacaaaatccagttgtatcactctacaaattattcatcagagtagttggggcaatacccaaattgactctgccaagaaaaaacaataatattcatttagtacaaaacaccccttacacaagaggtccttttccttctagctccagaaatacatgggcaacagtcttattgattataggtggaaaaagaagaaataggactgaacaaagcattttattaaacatttttagataaaatccaatggctgggaggtagggaaggggtcaaaataaagaacatttgatatttgctaaatatttctcttttgttctatttatagaaaataaagtagtctatcaaagttttcccaaagattatgaggtttaacaacttgtccattgtagcttttgttaagacctgtggagta

SEQ ID NO: 372322 - DNA, 279 bp, Homo Sapiens
tactttcacaggaacactgattagtatcctaaacccatgaggttgggtcagttcaggcaccaagaaactataattttctcttgaaattctgattatctcaagttcctataggggttgtatcacaatgaatacaggtccttttaagagatttggtacactaaaatagctagattctgaaaatgcagaaacaaatgtgcagagacaggagaagtctagagcagggaaaagtcgagacaattccaaatgctcttgttggctgaagcctgccccaacaacaac

SEQ ID NO: 372323 - DNA, 495 bp, Homo Sapiens
ccaaaaggtggaagggacagtgctaaattgataagctgagcaaaaaaacaagagtctgggctttaattccagagtcactgggaaggagccaacaaaggtttctaagaaatagtgactgacaggcctcagaaacgtggctcgaggacgattaacctgcagcagtgtagagaatgcacattttatgaccctatctttgtaagattttcactatatgcctcacattgcaaagagattcacaagtggaataacatataaaacatatttctcttacatcagttatacagtcaattatcaaggaataaatgatatttaaaaggacatttaaaatcagcacatacttaactaccattctctcccgtctgtgcacacatgttttagggaaacttcaaaagaatgggagaaagaagggaccaaagtcaacaaaacacagacgtcataactctaaaaatattcaatattattgcagcaaactgctcaataagtgctccctgtgga

SEQ ID NO: 372324 - DNA, 1132 bp, Homo Sapiens
  misc_feature (11)..(11): n is a, c, g, or t
  misc_feature (24)..(24): n is a, c, g, or t
  misc_feature (49)..(49): n is a, c, g, or t
  misc_feature (65)..(65): n is a, c, g, or t
  misc_feature (90)..(90): n is a, c, g, or t
  misc_feature (126)..(126): n is a, c, g, or t
cccacacgggncaaacagggggantttgaatccccccaccaaaaggcangggccacccgtggcancccgctgtgcagggccctggaccanccagaaagggactggctggcaaccccctagcccacnccgtcgctctggcccagtagtagattcctgccttatccaaaattaacttgagaagttgaactgccttctgtgtatgtagaaaaccctctttggagaattttcccctaatacaagtttacattcaagtctgaactgggtagattttaagtaaaatgagtagtatatccataaaagtctccacttatcttctgctacagtcattttttgttgaagtacaaaatgggacttaggggactttcccacgggatgcctcagaataccaacacatgcaagggtttcttatggacatttaagatgtgaagggcaagagtgaaatggggaaaggaatacagagtaactcacagaaacaaaacagagatctcagtaatcaaaatagttgctttgttcctaagaaaccctctcttttgttaatgggtctgatttttaaaaactctcagaggcctctaaagcacttgtttacacatagcccttccccatgtacagccagggtaaggacactgcagaaggctgtaaaagcttgcacaaagccggcctccagatgatccctctgacttaaaacctcttaaatcataactgcttaacaacatgactttcatacgtacacaagttttgttgttcctgtattcatccacacaaggggttgattaagaaaaaattccctcaggtacagttcatcggagtttcactgaagcccgtggaggaggctctgatgtttctatcctgagctctgtgaactctgcttgtcctttgcaagcccatagacaaacaggccattcaagtgctcaatggtccccactgctgttcatgagaaccacagagaaagagggcctgagagatgagatgcaggctcctccaggaatgaagagggcttcacaaccatcttcactcgtcattgtctgcctctgatccataattctgacatagacacctactgcatcctttgatttctgcattcagaaccagaggccaaagtgtagtttgctttttcttccctgtgataacagta

SEQ ID NO: 372325 - DNA, 599 bp, Homo Sapiens
tctaatcagaacctcaagtgtatatataaaggtactgtacaatatataaacatttacaaccagtacatccacattttgctcagcattccaaggccacattgctaagtcagtatataatcagtacagagtttacttaggaagaaccacataggacaacatatgacatcaaagttatgtcacagttaacaaaaataggattcgttatcactaattgtggactacagggaaaataataaataatttctgtggtactaaattcttagtatttatcaagcctcctaattttgctctatctgaatagttacaataggtgggtaaatatagttctggatgaaaaggggatttcaaaaatctcactctgggaagcatgtcttatctacaggggctaattgagttgttgcgttaaagagtttcccagtcagactcccagagggaaggacctggacctaatgtgcttcactacaagatgaacccaggtgacagaacaagtgtgttcacacactccataaaatagttttattctcagaaggtgcctttattatatagatgctactgaatgctgcttcagggaactgaaaaacctggatctattttaggaa

SEQ ID NO: 372326 - DNA, 541 bp, Homo Sapiens
tactccacagggaaaacagaaccaccctcttccttcttggatattgctgaatgctggtcttgtgaacagtaaaaagcattaaatggcatagttgtgccaaataaagtttccaccattcagaaaaggacttacaatagtttcatacatgtgctgctggattatttaatgaacaaataagtcacagttaacggcttgacaagtaggacgttcgctacacttgtacaaaaggaacaccactgatctttcattagcttccttccccattactaggtcaaattacattacaaatgagtgaaaccacatggttgctttttcaaaacagattaataacgtattacatgttcttacgatcttaacaagtcgcagtaacaacaaaaattccagtaacagatagaagtcaaatcccataatattaaatattggtgacgatgcataaccaaaagaacccttgtacttctttaattacagatgggctgccttccctctgtcactcaccttatgtctggcagcaccattacatagatcccacaaatactttgct

SEQ ID NO: 372327 - DNA, 410 bp, Homo Sapiens
tactttccacagggccactctcgagatttccactcttgggaccagagataaatctttggtgtcccaggcgtttgatcaaagctcttctttccttcattatcctatcaatatgaatgaacactaccatttaggtgtcagatatgtaaagctaatctaaagacacaagttttcattatcttcagaaagatactaatacattttttaaaattccgagcttctcagaaaatgtagatttaaaatataaatattaattacaggcaaaatatcttaaagttgtgattctcagccctgactgctcattaaaaatgggtggcaggggtattttcaaatgattcctagctcttccagatggttcttaaggacagccagggctgagggttgagaatccctgtctttcccccctttccccc

SEQ ID NO: 372328 - DNA, 609 bp, Homo Sapiens
tacttttccacatggaagtggatttcaaaatcatagaatgaatccaaccagatggaaaaaacaatcaggtcttggagacaagaataaacagggctctcctagggaatgatgggagttcagtttggatgaagcaaagtgtcattccagggggcatgaggccggcgtgcctgggagcccgggtaggctggactttgtcaagggaacaacagagaactggagactcccggccctggagcgaccttccaaggtcatccagcctgaccctctcccagggtcatctgacctgaccctctcccagctgcgtccatcccgtctcacaccttcctagccatggtcctgggcaaatgattcccctagccacttacacacccatttctgctcagctgtagcaaaatcagtcagattaaaaaataagttttcaatacaagtgccttcgaggtcatgatgtgcttatgtactttatcaaaatgtgtatcacctactcctagtccaactgcagtacacacgtctttccatatccacgcacagcatatccttcgctaagatgctgctgatgcaaatacacatcactctgcactgtaggccctgtggaaaagggggatctctaga

SEQ ID NO: 372329 - DNA, 490 bp, Homo Sapiens
tttacacagggatgagtgctatgaagaaaagcagaataaggcagagagtgatggaggctgctgctgtgatagggtaactagggaggacctcctggagaatgtaatacatgcacagagatttgaataaatcaaggaagcaaatattaagaatatatgaacaaagagtctccagggcaaagaaacgggaagtgctaaagtaagagcttacttagtgtgttagataaagggaaggaggccagtgaagtggagactagaataagtgaggggaagataagagatggggtcagagaagtagcaagaaattagattatatttggctttatagaattacttttaaaaaattccttaatatgccttaagtgtgaagggaaaccactggaatgttttaaacagtgaagtgataggatctgctatgtcctgaattatttttggcataaagtcctttgaagcttaaaagatagattttcagggatccccccctgtgaaagta

SEQ ID NO: 372330 - DNA, 361 bp, Homo Sapiens
tatttgattgtatatatacttaagtaacaaatggaaatgggtggtaaagattcataattataagcaaattcgaggcacataaaaattccacaggctagacatcaaatatatgtatagaatttattttcttctactgttttggaatttagagtacagatgatgttttttctataagataaatctgtgtacacctattaaataaatttagaatataaaagtcatttatgtccttaaaagtcccttccttgtattccctgcttctaacaatgatgctcattataaacagaaagttgcatatgagtatataaatcattacactacttggaataaattgtttttattgactttccctgtggaagta

SEQ ID NO: 372331 - DNA, 485 bp, Homo Sapiens
tctggattttgagagccaccaaccagaagctgagagatctgcccccaggaagggaagccgagcaccagaggaagtactccgttctccacccctggaggtctaaggtctccgtctggcaagcagagcctcccactctgcatttcttcacagagctgatttgtaaacaggagcgtgagtcattcggcaagcatgagtccatttgaaagatcagcccaattttacagctaaggctatcctattcagtccagccacagcaatgactcaccttactgccttccaccaaaggtgacttggttagccctccaattgtttctagaaggaacccagcaacatgagggtttaatccttgtctgctggctttattttctaacacaatgctgagagcaaagaggcagagttaccaaagtgcctcagagaatgcgttgggaaagaaatgtatccatggttgccacagaccccctgtggaacagtaggggacctctaga

SEQ ID NO: 372332 - DNA, 542 bp, Homo Sapiens
tactttccacagggtaactattcagtacaatcacttatcctcaggtgtggggaatacaggagaggacaacaacgggcagagtaactgagcgtaaatggagctctatgctgtagtgttggagacagataaataagcgagcaatttttaaaagtatgatagctagtaagtggtgtgtgctgtaaaaggttgacagaatggtgaaggagcaagaggggagggagagcctgactgtcagctaggctagttgtttcacctcacaagctcagtccttaactttcctcgaggaaacagaggtagtaggtgatgctaagactctccaaacctagtactctgagttgtctcttttggctctgtttcttggaaccactttcattcaaggaggaatgattatagtggtcaatatttattgagtgcctgtgatttgccagcctgctgttatatatgcattaactcttttaattttcacaacaaccacaagaagcagtataatcccattttccagatgtaaaacttaggcttgacgaggttgaaacaaggacggg

SEQ ID NO: 372333 - DNA, 372 bp, Homo Sapiens
caactttgcttttaacccctatgatatactgtctggccctataaaattgagggccagaccctgtactgtagtgaaccctccaggataatgccacactataagaacatatcgagatggccaactggccttccacttctgtcacccaacccaacaatgtaattctattttaaaattgctttttaattttatttacttttaaccactatagtcctgattccacatcctgttatgtacctcatgctctattctacctataaacaaaatgaatagaataaaaatgtataaagatgacaataaacctcatcaataatggacatcaccaaaattcttctggctgactgcagcacactaagatcctccctgtggaaaata

SEQ ID NO: 372334 - DNA, 239 bp, Homo Sapiens
aagcatgccctacactgcctcattgtcaacatgtcgatcgtttgtcctcacgtatcctctccctttgcggtttgggggcgtggaggtatgtttcagtgaggtaggaatggttctgctgctgcctctcagtaatgtggatgtggggagcatctgtccccacatgtcagcattcctgcttaggccttagctgtttattccgcggaaatatgaaaagtttcactcaacccctgtggaaagta

SEQ ID NO: 372335 - DNA, 565 bp, Homo Sapiens
gtagtgaaaagaactggattttcaatgttcactttgcaagaggcaagtaggaaggagactgaaagctgctcgtaaatcagtaaatcagttgctttaggccggacacctgccctgtcagtctcagctacatccaaatggaaaaatgggtgatctaggattaccctcaggcgatgccaatggccaaggcactaaaaggtcacatctattattgctggcatttctttccccactgggctgtttttttgagtggatgtcatactcatctcatacagaaggcaggtccatcatgctagagcagtgctgtcaatattagatctaatgaaatacaccctatttttcttttctgcaaacttcattatacctagctgccgctaaaagatgattcctttttttccttactactccaacattacattttagggacatgaatccttaagcaaagtttcattcgccacctctgattttaaagttaaaatgagtcttttaaaaacattaaccaaaataaatggcacagtgagtgccatacccagaagtggctacataaagccactacataaacagcgct

SEQ ID NO: 372336 - DNA, 255 bp, Homo Sapiens
  misc_feature (106)..(117): n is a, c, g, or t
tactttcacagggggaatagtgtagttgcactagaagtggagagatcttgaatgcaagacatttctaagttagaattattaggatttgaacaatttttctgttggnnnnnnnnnnnngtggtattgcgaaaaagggtataagaataaaaaataggaatattccatgtttgtgacctttgtgtgtatttccctaaggccctaagggcctataacaggccaggtttcctctctctaccaaacagtactccattacta

SEQ ID NO: 372337 - DNA, 441 bp, Homo Sapiens
ggggagcttgaagtgcacatatgatgacctaggacttgcctcacaccaggcaaaacacactgcctcttgggagttctgcagaagctgccatttagttgagtgactttacctgaacatcaggaaaataaaccttcaggaggttggagctgggatatcgtgtgaagaaaaacattagtttggccttcttcaagtgaccagggtttagaccctcctggatttatctcagtgtcaaggaaaatgaacactttaaaatgccagtttatcaattaactagtgaattccttgttcctgtggtttctatttgatttcattttgtttttctgattggaattgtgtatttgctccatttttctgtctctggaaactctggtcaaataagctggatgacatatgtgcacagttaagtcacagaatgtaaaaatcatctcccgtgtggaaaag

SEQ ID NO: 372338 - DNA, 558 bp, Homo Sapiens
  misc_feature (201)..(270): n is a, c, g, or t
tactttcacagggtgtcaaagaactggcaagtcctgcttcagttcctttatgtacatacccagaagtagcattgctggctcacatggtaattctgtttaacttattttgaggaaccaccaaaccgtttttcacagtggttgcaccattttgcatacccaccaacggtgtacaagggttctaatttctccacatccctgacnnnnnnnnnnnnnnnnnnnnnnnnnnnnnnnnnnnnnnnnnnnnnnnnnnnnnnnnnnnnnnnnnnnnnntgttatgaagtacactcatagctccatgctgtggatgatctgtcttctctgagaagttagaagaaaactggagtgatctctgtgttgtctgctgcacagagaaacatgatcagctggagtctttcttagaaggccgctgtcacttgattaataaccaacacggaaggcagaggcagagcagaccaacaaacgtgctcctggtttcttgtgcttgtatttgaatactgtcttcttatttttttccacgcgagggcaatattaaacacaggcaagtcactgtgatcttta

SEQ ID NO: 372339 - DNA, 418 bp, Homo Sapiens
tacttttccacaggcggggaccgatcggcagaggagcggggtacctagcttggggtcccgcagctagggagtggctggtgcgtagaaagtgctgggtaaatgcccgtggtgtggagtggccttctgccatctgggctgtgtgcccctgctcccaccatgctggtgctccttggcggagtctccggtgtttaacagatcacgttcttaataaattacagaactactgagtcttgggtcaggtaggccttcccgtgctccacaactgtagctttgcctctgagaagcagttaagcccttttctcaatgcaagcctaagagaatctagctctgaaagccttttgcaaactccaggtggaaaccttttgtgatgcagcttgttagactgatttttgaaaatgggctctacttgcatttttgt

SEQ ID NO: 372340 - DNA, 554 bp, Homo Sapiens
  misc_feature (513)..(513): n is a, c, g, or t
tatttccacaggggggataatatttccctccccagtaatctagttacttacaaatattgctggttacaaatgcgccggactccctggtggtggtaccgtatcactgctggtacaatcctgcttcaacaacaaattaaaatactaagcttgcatgtagaaaaagctcttaatgctagtagcactggacttacgttgttatcagatgaatttgctcaggggcgtactgttgtgttgcaaaatcaaatggcattacacatccttacagcagcccaaggaagggtttgcgccttactgcatgctgaatgttgtgtgtatatccctgacaattctcacaatattactctccttgcccaagacatgcaaaaacaaagcagttagaatataaccatgggcaccccatcatgaatcggctgtccgactggcattggcgttggccgtggtgggtgtggtttttattaattgtgcttttaattctcctgtttaccctgtatctgtaatctatatcaaatatgncttccccatgtatctttacacgttttatccacaactgagta

SEQ ID NO: 372341 - DNA, 427 bp, Homo Sapiens
tactttccacaggggtgccctaaagaagacagaaacgtcaaagtgctattttttggcttatgatgtcaatttttcaggattgaagtggcgagcgtcccacagagtttattgcaaactattatgaaggtcttggagttactgttggtatgactcatttatgaaaaaaatatgatttcagtaactgcaggctgtatttgtaatgtgatagattttcatttaatctctcacctctctataatttgcccaactcttaaaaatgccctgaagcttgctttctcttcgtctgggagccccgtcctcggtatgtgtcattaccaactaactactaataacaaatcgtgccaatatgtgtctctcttccagcctcttgctgctctcctcggctcatttaattacttctggtactgatctcccccagcctgatctc

SEQ ID NO: 372342 - DNA, 597 bp, Homo Sapiens
tactttcacaggataacgtgaaccccaatatggcatcatcctcttctacctatccatagaacctccttgattctacttctttgtttcgtctttgcagctttagtcaacagaggctgttcccacagttcctcatccttccctcagttatctatttctgtagctctgggtcctgaattacagcattttctaaccctttgatttggctctcttctgctctgaaaagcattggctctttcacagttactgtacagtatccccactgtggcattttctgactcccatgctgggccatctcatcccccatcaacaaatcaccttgctaccacatggccttttggtaactgacttttatgtagaataacatacatgtagaatgtgtgagagaacaatgcaggcaggagcttggctttgctctgcactgaatatttagcactagcatagttctctgctgtacaaataggaagtcaataatacttgttgaattaataaatatttatacagtgcaatttaattaattccaagtttggcatcttctaaaattcacataggaactttcaatgtggccaaaagccccacatttcatagcaaaatcatgaa

SEQ ID NO: 372343 - DNA, 265 bp, Homo Sapiens
ggggagacctggaggcagtgagcctggttcaaacctctggcagcaagcgtctagaggcgtttccattagtgtcacctgcactctgggtgagctacggccaccattcagtgcatgcgttctgggaagacttggcggagaattgaaacagtcattccagctttaaagagtaggcctacagtgaacatttttcttcccatccttggcttccagttcattaccctggaagcagccaatgctatctatttcaatgtttatcccttcgaaa

SEQ ID NO: 372344 - DNA, 407 bp, Homo Sapiens
tactttccacaggggaggagatggatgccaggagaggtgagatgattcttattactcttccagggtgaggttagtgatggacactgggctggaacctggctctgatgtcctcatcccgtgatgcacagcagggtaagaggcactgaatgtagcaccatggcttattggagggaggcatccatgtgtagcttgagtctgaggatgagattctattgttgaagtcctacaacatattaataaattggcagccaactagactctcacagtttcctatggtcttccctctgctgagtgctcgtgggaagctgagttcagctgcctcacatttgtgggagtctgttagcagtgtgtaggtactggctgagggttctgtgtgagtgatcccttggaaaagtacctgtgaaaag

SEQ ID NO: 372345 - DNA, 254 bp, Homo Sapiens
  misc_feature (152)..(152): n is a, c, g, or t
ctctatatatatgatataattgatttgtgtaagtgatgatgagtatgtttatatgttgtattatgttaaatatatattttaatatgtgtattacagctgaaaagaataatctagtaagggttatatctgatttcctgaggcctcattagcanaccaaaagttgcatttaaaaattacaaaagcatatctccatcgagaaatggcctttttatgtagtctacttttccgccagtgtggagagacggggatcctct

SEQ ID NO: 372346 - DNA, 470 bp, Homo Sapiens
tgtttttcttctcctggccaataaaggaaaaccataaaggatattacaaatttaaacaagtgtgggaagtgtgaaaatcatttagaaacccaaggaatggctattcacattgcaagagtagttcagctattgagttgtctatattaaagctttttcttttctccttttaagcaagtaacttctataccatcttagtaatgctcttcaaggatttcaagacacagttcagccaaactgcaaaagaaccattaaatgcagaggtaccttgttagttctcccccttactacttaatacaggcaaagaaagaagtgagacctaaaacataaatgtattcttcactccctcatacccacactgtgtagttttcctggttcacagcagtgcctgtgtagcctcattaatacctccccctcttctaacaaacaaatctgtttcaattacgattcctgtgaaaagtaggtaccgagct

SEQ ID NO: 372347 - DNA, 487 bp, Homo Sapiens
gaatgtaaatgagctaagtgttccaaagtactaataacagagtaggtagtatcaccctaatcctaataccaaaaccagagaagggcataacaaaaaaagaaaactgcaggctaatatgcctgatgatcatagatgcaaaaattctcaacaaaatactagcaaacaatattgaacagcatatcaacaatataatccaccatgatcaagtgggtctcatacctgggattcaaggatggtttaacatatgtcagtcaataaatgtgatacaccacataaacagaagtaaaaacaaaaatcatacaatcatctcaaaagatgcagaaaaaaacatgtgacaaaatccagcataactttgtgatgaaaactttcagcaaaactggcatagaagggacataacttaaggtaataaaagccactttcgacaaacccacagccaacgtttatactgaacaaggaaaagatgaaagcattccccctgtggaaagta

SEQ ID NO: 372348 - DNA, 437 bp, Homo Sapiens
  misc_feature (205)..(249): n is a, c, g, or t
aacattcttctggatgtgctggtgaggatgtttctaggtgacaggaatatttgaatcagtagactgaggaaagcagatggcccctctatgtgactggccctcatccaatcaactgaagacttgaataggaccaaaagactaatagggaattcctcctgcctgtcggtctgagctgagacatcagtcttgttctgcctttggactnnnnnnnnnnnnnnnnnnnnnnnnnnnnnnnnnnnnnnnnnnnnntggaactctgattggatcttctggtactcagaccttcagactcaaactagaactacaccattgactctcttaggtttctagcttgccagccacagatcctaggacttctcagcctctataattgtgtgagtcatttccttataagaaatctcttcccaaatagatagatacctcgatatctctaatct

SEQ ID NO: 372349 - DNA, 512 bp, Homo Sapiens
actgtttcacaggcacggccaaagctgtgtgccccagaggtgtctgtgtatcttgtgcatccgcccttcacccaagtgctccaaggatcactcctgcgacacttctcctgtagggactcccatgcgccctccctacactgcagtgtcaggcctgctctgggactggcaaacgctgatgggctccggaagcagaaagcaatctatccctggggagagggaacacgatttgaggcggtgcttttcaactttttcttcagccctataactctttgttcaaaatgaaaccttctctagaagcctaggacatcaagcagataagcaagaagctgctcaggcccaggctgggggtgagagccccagggtctggtcctgtccctatcctcagcccctgagaaggcagctcagaaccaggtttgaacaccactgatttaagcaatccttagccctggtggtgggggtcttagcaagaggaggtccctccaagacaaactgtagttttttcctctaagacc

SEQ ID NO: 372350 - DNA, 652 bp, Homo Sapiens
  misc_feature (250)..(250): n is a, c, g, or t
actcggtacctactttacacaggtcatgctggattactataggcagagcagagtcacccgcagtggcagcctgaaagggcccgatgatcccagaggacttttgtccccacgattagccaggcggggtgtgtcatccccggtagaaacaaggacctcatctgaaccagttgcaaaagaaagcacagaggccagcaaagaaccaagtccaactaagacccccacaatctctcccgttattactgccccaccngtcatctccagtattggatacaagtgacatccgcaaagagccaatgaatatctacaaccttaatgccataatccgggaccaaatcaagcatctgcagaaagctgtggaccggtccttgcaactgtctcgtcaaagagcagcggctcggggagctagcccccatgattgataaagacaaggaagccttaatggaagagatcctcaagctaaagtccctgctgagcaccaaacgggagcagatcgccacattgagggcggtgttgaaagccaacaagcagacagctgaggtggcgctagctaatctcaagaacaaatatgaaaatgaaaaagcaatggtgactgaaaccatgacgaagcttagaaatgaactgaaggctttgaaagaagaggctgcaatcagga

SEQ ID NO: 372351 - DNA, 263 bp, Homo Sapiens
ttgaattaaatcaatggctcagcaaacaggtttccatctaaatattgagcttgcaaatacaagacagcagcatgaaaatatgcttactgtaatgttaccaatgtgtatgtgaaacattattattgataaagagaatgaaataacattggtttgggtaagttttattagcctaagtaatacatacttaaactgaagcccacattgggctactgatacccacacaaagagaagcaggcctgagggatgcaccctgtggaacagta

SEQ ID NO: 372352 - DNA, 482 bp, Homo Sapiens
cataggaagtgctcagtaatacatcctgaataaatgactcaaattctattcttcctgctaatgtaaaattgaactttatacaacacagacaacatctcattttacactcttactgtcctctaacaccaagctagtcttgcttaaaatcaatcatttcccattgcttttagactataatctacattcccggcaggacccaaaaagcttctcatggattcaactctgtttaattttccagtctcacctttcaccatccctttccatattctaaattctgatcacactaaactatttgcagctcttaaatgtatcatgctctcttgaacctctaaatctacatctgtttcttctgcctggaatgccctgcctaccctgtttaccctggctaactcttacttgtccttcaggatccagcaaagctttcccacgtggggttagatactgttagtaattgctctcacagtcagtacctgtggatacgt

SEQ ID NO: 372353 - DNA, 751 bp, Homo Sapiens
tgactgtatccacaggtgaggaggggaaggaaactgagggttcaacttctccattggtgaactccattggagttcaacaactccaaccctccaagtgagggtccagttctcactcagtgcctttgtttttggccctttgggtttcctatgctgggctgggtgtccctgagactggaacctctctgtttcaatctccccagacagtaaggctcatgtctccgataggtgggggagagttgctcaccttctaagagagaagcaggagagatcttcatgctctgactgctttttatagattttcaaccagtcctcttactttcagctgtacctgaacacttcctgtgcagaggtactaggtgcctcagttcctgaggggaccagtggctctgctgtgaggactggttccctcttgtcggcttctcctcctgcctgcagtaagggctcacctttctctactcagccaagtcagttattactcatccattttccttcttccaaaagtttgctgaactgtcttgttcagggtcatctctttcctgctcctctttgtcctcgtaggtttatgtctttgtagatccctttatggttatgtttattgggtttcagaagacagtgaggaaaaatgcatgttttcaatcacccatgtttaactctgagtccactctaacatttttggttttaatttgcttttgtctagcccctagtagtatcatatgggagctggtttggttaccctgtgtaaaagtcaggg

SEQ ID NO: 372354 - DNA, 451 bp, Homo Sapiens
gcactataggaaccgtaagtgtttacagtgacaatgggggctggtgagggtcttctgattaactattctctgcaacaggaagtctctcttgactctgggtagatttgatctagatgggagaggcaggattgtaggacctgggtgcctccacattgtcttcctggcttctgatcaccacaggtgaatttccactttcccactgtactccagcaccctcccttcagcactccagtcaaatcttaactgtttattcatcgtcttagtcctttcttgtgtgaggaaaatgagagccgaggatctctagtcactcatatttctgatgtcctatattctgcatttttgaaggatgcttttgtgaggtacacagttctagtttgacagttatttactttcacctcttttaacataatctttgaaaatctttgctttttgatttctggatcctgtgtaa

SEQ ID NO: 372355 - DNA, 451 bp, Homo Sapiens
tactggtccacagggttataaaatgctgacatcaccagtaaagcgagtgcaaaagtcaaactgcaatccatataattttttgaaaaagaaacacaaccaatattcatatgtaatgaacagattcaaacctatctcttatcagcaacacttccgaggagatgtaaataatacctgctacactcaaacaaaaccatcttacccccttttacattgacttctatgagtcatgtagctttaaacacagtgtatgctatgagatgatctgtaaatatccagcaagtattgacaaagccttcctgaaattaattctatatgtttaagactagccaatattttaatttcataccttggctggcttaagagatgacatgatcactctactgtaactacctgaggttctgttctgatgttttaatgtgttccatctgccctgtgtcttagtagggtaccg

SEQ ID NO: 372356 - DNA, 399 bp, Homo Sapiens
  misc_feature (372)..(372): n is a, c, g, or t
cgtttgtcacagggaagtacctgtggaatgttctggaagatggtgtcattaaagtttttaccgctgggagcctctcccttcccatctgctgctctttctactatgccgccttgtgttgtgctgacccatccaaagtgcttcataaatttgtgggacgccaaatacaaagcattgtcctcccttctgtggacatattttccttgattgtggggtgcccttgtaagatgctcaacaaaacctggcaagttttgtagtaggcattggcttggaagaaagatggacagccagatgtgttaagggtaggaagagtttgcttatttttggttttgtttagatgaatgtgatcattaaatttataaaaatgtaccagcnagtgaccctggtaaccctgtggaaaag

SEQ ID NO: 372357 - DNA, 570 bp, Homo Sapiens
cagggtctgaaataggtggcctgaatagcctcccagtgctgtatatcccgtgagtaattctactgcaaacttctgcttttctccagttgcctttggaagttccagaggcaaaactgtgtccctttagcacaggtacctgggttgctaagggggcagtgggctcagagtatgggttcgctttgcggttataattttccccattataaaaggaagatatgtgtagaaaatttagaccagagaatagctctgaagttgagggtcaagaatcagagaccttgtctccatgcctgtgtgttgggctttgacttggcaccacactgcttgttccctgcctaactcactgagtgctgctctgggctacagcgcatcctcatggggctcttggctgcctcctctctgcacagcctctgcttccttagatagcagtgtgaggactgtggagaaggatctttggtctgagctcaaatgattggctcctgattgtcctgtggtctagggaattcctggggaagtcggagcctgagcaccagcactgaagctgggcgtgggaaggaagatgaagactctgtc

SEQ ID NO: 372358 - DNA, 518 bp, Homo Sapiens
atcaagtatagtctatccagaccatggaacattccccagccataaaagggaatgaggcctggacacctgctacagtgtggagggaccctgataacatgatgctgcatggggccagccggccacaaaagtccatatagcgtccgtacagcgtatgattccatttacatgaaatgttcagcacagaccaattcatacagacagaaagtagatgcgtagttatcaggggcttggaggaggggagaatgaggagtatcacacaatttccttgtaggtgatgaaaggttctggaattagacagcagtgatggttttgcaacaatgtgactgcactcactgcacagagcactgaactgtactctttggttatttaaattaagaatttaatcaaaaacactgtaaaatgaaaagacaaaacacagtgcaggaaaagatgtttgtaacatatttaactggacatagtccagtttctagaatatcaaagaactcccacaaatgaacaagtcaaatacctgttaacaa

SEQ ID NO: 372359 - DNA, 481 bp, Homo Sapiens
cacaggcacggggaggcaaggctgagggaaacctccataaacaaaccttgctgaacgaatccttatcttcctagtcacttctccacaactaactgccctagcccatgctcctttgtctggtcacgttttcacaatttactttttgtccaacttcatatataagcattcagttccacctgcttctttggatcttccttttcctacgggaactccaatgtcagacatgacactgatgcttcaaattcatcataatacacgtgaaatcccagtcccagtagtcccaagtgactctccaaagtgatgtcgtgtggtatgtgattaatgatgctaaagtaggcatgaatcaaatggcttctctgctgcggcagtaaaaagtaagagaagtctggagtagctttctcctgggaacctctcattactgtccatgtagttgtcaggcccagcagacacactaagagggtggaagtgccctggaaaagta

SEQ ID NO: 372360 - DNA, 651 bp, Homo Sapiens
ctttcacagcgacgatatcattctggtataggagggggtggactaggagtacgtggtcctttgcttctcacttggtggttgtgaatttctctgctggtccaacaggggagaagatactgcagatgtcttcctatctttcttgctagctgaagacgacttcgggcttgattttcgcttcggagatttgctagacttccttagagaaggtgacgggaacaattttgatctaaccacttctggtgaaacctcctttttaatgataatttcttctctcttctccatgttttcttgttccagcctcattaattccctctgtatcttctgacgcttcatttccaatgacaattcatgaacataatcataattaatatctccattgtcagaatcatctctattagtttcccattctacattttcttcttcactttctggagttctttccttagtgatttatatgtcttccttttccctatgtctccctcttgaagattctttcctaacaggtgaggatgactcctctgtatttcgtttctggggctcagtgtccacgtcttggcgcttgttcttcattctttctctaagatcccctgtaggtctttctggtgaccttctataattgctgctataacctttaccacgaggtgaagggcc

SEQ ID NO: 372361 - DNA, 549 bp, Homo Sapiens
ggggtggagtgggttagcgatcccatacttgccatttccctgactttgagtggaagctcagaactcccagcgttgcctgcttaatctgtgccgagattgcagaaacctggcctggcccctctacctttgggagggtaatcatttcagaagcatattgtgctcacttctgcagtcaggcatggctagatttaagcaaaacttttttacttctttattcagtgtttgctacttgttgactcaccctattcttctaagaaaattctcctcttacttttccccaacgactgttttgctccctcctggcctctccaccactgatttcttcctggcttctacgtgtgagcatctccatgaatctctctgcttctgccttcctctatctacactttctctctagcagtcttgcttgccatgatgactagatcgatatccctcagcagtgactcctcaaaacccatcttcaaacctgacctcttgagccaaatctagggctacatttccggatgtctgctaggcatttcctgctgggaaaccaaatccaacctgttt

SEQ ID NO: 372362 - DNA, 638 bp, Homo Sapiens
tagaggatcccctactaccacaggggctgcaggatttaataaaattccacaatacttccagtgttaacaatggtgtatgctgggattaatcccacatgaaataatcacaaaatgataccagttagtatgatgcactgctatcctacctcagccgtgcaaattttaaggacagtcttttttggataagctcccaccagtagataaactccacaaagtctggccaccagggagggtcaattaccaggactacattgtttctctagttcagatgtgcagaatataagggcagtgtgaagtccagcattacaaaaacagaaagcaatttagtaattagtgaaagtattacatggacaaaacaatagctgggagatttgtttaaaggaataaactaataactttgttcataccaacccatttcaaatatgggaaaataatttttaaacatttaaataaaactagaattaacgaaataccttggatacactggctagacaaaagattcctggtcctgactaacttgagaatctcggcaaataagtcagttaattacaaggagccccgtatgctgaatgcagttgcccaggaaatttgcttaggtcttgcttagtcaaatttgagagacagctcaactaccatac

SEQ ID NO: 372363 - DNA, 562 bp, Homo Sapiens
tattccacagggtagcttgaaccaccttgctgaccaatcttaggtatcatggttacctctgtggaagcacaaggtgggtatttgtttagacttgatccttcctgggacaaagtgctggtcaggatagtaaagggagattaaatgtacttaaatgtgcttccagaagacaggtatgtcatcataaagaagaaagggctattagctcctgacctacttagaaaaagtgtaactaaagtggaaccaggaattgtgtgagatctgcctatgtcctgttctctctctctcagggagagcagagggcaggaggtttcaccaggagctcacctgactctctcctaggcacctatatttctgactttccttagatacaaccagaaagctaacacacttagatacttggagacatttgaaacaactcgacagccagttcactatccttggctacccaactgtttgggagagtaggaatgctccagaagaaaattgaatcggcaccactttcccattttgacccttgagaaaagaaagaaagaaaatcagcatttattgagtattggcctct

SEQ ID NO: 372364 - DNA, 504 bp, Homo Sapiens
ggggagtatccttctgccttctcttgttcctgactttgctgtcttgtaaaaagttgttagaaacaaccaccttctaaaaggcctcactggttctaggtgttgaacactgtggctattgttgccctgggatggttgaaatggagtcatttccccagagcagggcaaggcccactgaagcactcagtaagcagttgcttccaccttgaagcagaggcgcttggtaaggcagagcacctgaatgctctgtattgcagggaggatttgcaagtggagtgtgcattttttgttctttcctgtagtggcagttaacttaatggtctctaaaacgttctgtgcaatcttaagatgttaatatttctgccaaaaaaagtattctttggtcaaatacatttgggaaagccagcacatcctaggcccctcctaaagatttgctgggcacaaagtattctgaaggctctacaaagtcctgtggaaaataaaccctttaagctttgtcaaaaaaaa

SEQ ID NO: 372365 - DNA, 496 bp, Homo Sapiens
tactccacagggcaagaacaaacacttagctttaatattggcatgcgttgttaaacatttattacaagtacttcttatcaggaccaacaagacttctgcttagcaataatttgccagccctttaaagttgtttatgaatttcagagcacttaaatggcgtttttatgtgaaggttttgaaatcgacgggagaaagggcaaatgcgagcatctgatttgtttgtaccagtgctgcttggaagaggactgggctttgaggagacactcagcatttcttgtcgcgtgtaggattgaatgggtgcatcaatcaaatggtgctgggattagcggttggcttgttgggaagaaaacagcgcattgtgtatctcagtggcagttccattggcaccacagccaagatgatctttccttgctcaggtttgtgctgtgcactccggacattcagcttccctgactcctaccccgtggaagtttgtttctgacttgtttccagatac

SEQ ID NO: 372366 - DNA, 524 bp, Homo Sapiens
tattccacagggttcaatgtgactatgttttggaataaagttttcccaagtgagctgtgtggaattcagtccgcggccagagctaacagtctcaccaaatgaaagagaagatactgtgtctattacctcatacccataggtccaaactctcccaaagcaactacctcctgtgtcttctgggtcttacctagggaatatacccaacggggaatcaaaatagcccaaagcacataaaagagatgggcctgcacattcttcctggggtgcagcatgatgacattttggagccaacaaggcatggagagccagacaagccaagcaaacagcaacaccgcaggggggctggagataatggaccacagaaggcgcctccaacaagctgaccacatccatctgaagctgcagaggccctcgcagctctccctgctctttgaactgctaaagcaagaagtacaaaacggaccttccatgccaggtgcaagccttcacaccatcaaatagcagggcctagactgcaaattgag

SEQ ID NO: 372367 - DNA, 485 bp, Homo Sapiens
ggggctgcaggagataaggacacaaaggacatttctgcacccaaaccaggacctctaaaaaaggcacctgcggctaaggctggtgggccaccaaaaaaggggaaaccagctgcaccaggaggcgcagggaatactggaaccaagaacaagaaaggactggagactaaagaaatagtggagcctgagctctcgatagaagtatgtgaagaaaaagcttcagctgttcttccccctacctgtatacagcttcttgacagcagtaactggaaagaaaggctggcttgtatggaagagctccagaaggctgttgagctaatggaccgaactgaaatgccatgccaggcattagtgaggatgctagccaagaaacctggatggaaagaaactaattttcaggtgatgcaaatgaagcttcatatagttgctttgattgcccagaagggaaatttttccaaaacgtcagctcaggttgtaaggcctgtgga

SEQ ID NO: 372368 - DNA, 531 bp, Homo Sapiens
cttttcagggctgtagctgcgctaggtattgcattccagaaagctccttggcttttaatgtgtggttcttcttttaagtttatcccatggtatggtctctgaagttcttggccaaattcttaaagctggactggccatctttccagtttccctccatcctcttgtgctcctctaagttctcaacatccattatttcatttactcaagaaatatgtattgggcacccatcaggatacagggatgaacttgtgaaacacactgaattgccaaaaggaaaaatactgcagttttagactgtggaataataacaatgaccagaactcttaggtgaaaacatcttagtttcacatggactcaggagagactgtcttttcttttgcactgcttataaggcattaggagagtaggtataatcacgtttaggtttgaatcagttagcagctgtgctggctcttctctgaagtgcttgccacaaactcagatttctgtatttatgctggaattacctcctttctcctcccctggaaagta

SEQ ID NO: 372369 - DNA, 476 bp, Homo Sapiens
gattaagtaacttgtccccaaagtcaagaggtagtcaggggcagctgaacataagagtactcacactagctgtcactgacacgagagatgctcaccgagcaagtcccgggtgtgcagggcactgaggaaggagcatagctgcagcaaacagtgctgctgccctccacccctgccccaggctgagttaccgtgtactttcaatacttcctgaaaagtttttcttcaaaaattattttctctagtttctctttaccttccttcctgtgtgacttgtgtgtgtagaaagtctggagagcataattccccattgtcccctgattgtcagaggaccccttcttcggcaggcacgctagtctgttgagtacccactgttggtgcaagtgctgtgggcgcaccagaggagggagagattacttcaatccaaggaacaacgtaggtttccagcaataagtacctgtgaaaagggaccggctcga

SEQ ID NO: 372370 - DNA, 402 bp, Homo Sapiens
tccacaggccatcacagccaatatttgaacttgggatctgcaccctctagtcttgagttcattcagccactcctgtaactgcctttctaaattatgatacttcctctcctttcttccaaatgtcccatgttggtaagataagcatagtaatcaaaccagaatagtcatttgagaaaagtgtgtatttcaagtgcacagctaaaagtctatttgtctgatagatttttataaaaagatgtttatattagatacctcctaactcttcataaaatggttctcacaaactttgtgacatcttcccagtatccatcagggtatagatattaaagacttttaaagtaaactttgaaatctcctaaactactctgggattaacaaagtgtttcctcccctgtggaagta

SEQ ID NO: 372371 - DNA, 540 bp, Homo Sapiens
  misc_feature (314)..(421): n is a, c, g, or t
ccgggcaggtctttccacagggcatatgatactatgtcatggagttaatgtgacaattaaataacttaatgaatgaaaaactctcagcctgacttaatataaaattccccacatagggcagctacaaagtcagtatcttagtcatttattgctgtaaaacaaaccacaccaaaatttagtagctttaaaaaaacaactcttacttgctcacaactctgtggactggctatttgaactgggctttgccaagcaattctgctagttttactacaaaggactgcaggaatctgaaggcttgactaagattggacagnnnnnnnnnnnnnnnnnnnnnnnnnnnnnnnnnnnnnnnnnnnnnnnnnnnnnnnnnnnnnnnnnnnnnnnnnnnnnnnnnnnnnnnnnnnnnnnnnnnnnnnnnnnnctgttcttgcaatggtgagtaagtctcacaagatctgatggttttaaaaagaggagttccccgcagaagctctctctctctttttgcctgctgccatccgtgtaagacgtgacttgctc

SEQ ID NO: 372372 - DNA, 548 bp, Homo Sapiens
cttagtgactttctgaagtttatatatgtagtcaatgataaagctcaacatcaaaatgaagtgtgtatcctccaaaaccccagcctttccccttacttcatataaatgttcatctctccttaagcatatttttacctacttcgagtttccctgagcctctctgaataagtggaatggcaagaacacaagtcaggtgccaacataatcacaacaaaacagtggtttggctccatgcacctctctctctagtcctcctctctcatcaacaatttaaaatagcaatgttcaggcattcattggaaatttactgcaatttatcacttgctataatgagtgaactatcaggtatctgaaagtttagttcaatagtgcatactgagcaccttctgcatgccagacgccaccctgattgcttagaattcatggatgaataatacgcttatctgctgctgaaacctcatggtttgggaatggagtggggatgggagatttcactgcacgttaaacgcagtttgggggtgtctgccatgctgttgtttcttctcaaa

SEQ ID NO: 372373 - DNA, 174 bp, Homo Sapiens
tggtagggatactccaatagaatctgatggttaatttctcagtcttatttctccatgtaaaggtattttataaatgaatgtgtaacagtgagccaagtacctgaaaagtttttaattgtcccatccattttagaagtttataaagttgatcaagtaactttttctatgtggatt

SEQ ID NO: 372374 - DNA, 455 bp, Homo Sapiens
ggaggtacctatgggcttggccttgccccatgcatgaaggtgagacagcagattagcaatgattccacaccaagtgtcactgtactaactgctctttcacactctggaacttccttctctttacctacaccaccttcatacatgatctgaccatccctgcggttttagacgccacctaagtgttaatgactccctggtccaccagcaccttccttgccctgaattttctacaatatatgttgataggctggagcttgaaagacacagacatgaagagtcagccactagcaccccactcctcaccacaaacagatgaggctaatagatgatagaaacctctccctatcagctggggtgaagcctcatagtgttttcagagcactctagacagttacaaccaaccaatcataattgacacatgagctgaattatatttgctatcctgtggaaaagta

SEQ ID NO: 372375 - DNA, 415 bp, Homo Sapiens
gaagtgcttggaacagcagctgccatttggaaggtggtaactttgaagttgatatctaccaggaaagtgatcacaagggcagaactctgacttttcccattttcctaagatctatttctaaattcagtagcattggctctctcagtctaacggcagtcagtccactgtctcggtggtggtgttttttgaatcattaatcagaatgaatagtctatggtacagataatacatgctgctgagtttcagaggacggaggtgttttcttcagatgcatgttgaggaaaagattcacacagtaaaaggtacattccatctgaaaaaaacgtagtgggaaggggcgcaaagagctgctcagtccaaccagaatgtatgtgtctaccatagaattacagtaatttaaccctgtggaaaagta

SEQ ID NO: 372376 - DNA, 662 bp, Homo Sapiens
caaactgatggcaaaacccgagtttgcctttttggggtccccgtattaatgatgggacatgaaatgggaatggatgaagaggtcccttcacttggcctggctgacagccaagtctcttctagtgctaacccataactaaacacattttctaagaacagggtcttcttgtaagtgtatttgtttttcctgaggtattctttccctacaatctctactgttacttcattggctccacagcttcagtttgtaaaagaaaaaggcacagagagacttggacacagacggtcacagatgcctctggagctgaacaaagtcttctgctgcaggctgatttacttattcctctgacacagtttctgcaacaacaaaaatgtgcacttttcactgttgcctgacaccttcatgatgctacagcaggagatagatgcaggagattataaagcaagttgaaaaacaacatttttctgactcaaatataactaacactggtccagctgagcattactaaaatgattaaaataagaagcgtctagtggcaaccaaaaagctgtgggattttttaaaaagtattttctttaaagtgttttcacagcaaagatgcaactttccattgctatatatacgctggtcataaactgttgcttgtttgttcacacttcttt

SEQ ID NO: 372377 - DNA, 526 bp, Homo Sapiens
  misc_feature (174)..(220): n is a, c, g, or t
ggaaaaatcagagaccaaggaagcagactagtgctccggcagagccattttcatcaagtagtcctactcctctcttcccttggtttaccccaggctctcagactgaaagagggagaaataaagacaaggcccccgaggagctgtccaaagatcgagatgctgacaagagcgtgnnnnnnnnnnnnnnnnnnnnnnnnnnnnnnnnnnnnnnnnnnnnnnntaaccgggagtcaaggaaagagaaaaggaaaaagggatcagaaattcagagtagttctgctttgtatcctgtgggtagggtttccaaagagaaggttgttggtgaagatgttgccacttcatcttctgccaaaaaagcaacagggcggaagaagtcttcatcacatgattctgggactgatattacttctgtgactcttggggatacaacagctgtcaaaaccaaaatacttataaagaaagggagaggaaatctggaaaaaaccaacttggacctcggcccaactgccccatctgtggaaaagta

SEQ ID NO: 372378 - DNA, 166 bp, Homo Sapiens
tactttccacagattaaacatgggccggaggggaggaaaaatgaaaggtgtaagaggggaatgataagggagagaaaaaaagactccagtaattaggattttaccttaagttattaaaaaagatgattttattgtctaataagtgttcgattttatccgccgccgt

SEQ ID NO: 372379 - DNA, 105 bp, Homo Sapiens
gttacaaccctatggaagaagggaccgccactccaatcatgtcacaaaaactttaaatggcaatcgcattcaccgaagggcgaaggacaggccgagctaaatgca

SEQ ID NO: 372380 - DNA, 430 bp, Homo Sapiens
accttgaagctatctggaatgagcaacagatcatccattatcaacgaacatatgggatctagttccagagataggagacagaaagggaaaaaatcctgtaaagaaactttcaaagaaaagcattccagtaaatcttttttggaacctggtcaggtgacaactggtgaggaaggaaacttgaagccagagtttatggatgaggttttgactcctgagtatatgggccaacgaccatgtaacaatgtttcttctgataagattggtgataaaggcctttctatgccaggagtccccaaagctccacccatgcaagtagaaggatctcccaaggaattacacggcaccacaggaaacgcacacgtcaaagctgacactgacacctataacaaatggaaaatgagagtcaattccaaaatgctgtgcaaaaata

SEQ ID NO: 372381 - DNA, 532 bp, Homo Sapiens
gctacttttcacaggggaaaatacataaataaaagacatttctaccttatacccattttccttcctaaatcatcaaatatcccagtttcaataatcatctttcaatcaaatataccccttccaggtcctaccagacaggatgttccctgaagtactcccattctactattatttcttttgacataatcagtctggtatgtatgattcctaaaaagtttcaagaagtatggaatcagactcatttccatatttttcaggcaagactttcttactaagtgctccttagagcacagcatgatatactacaataatagtaggtgtggtgcgatatcaaatataacaaacaaacaaaaaacatatatggggttacactcagagattgagatacataaaataaattaatccttttaataagcttagaggtaggcattattataatcacctatttctcatttaaaaatgagataaactaatgggcagaaaactgactcactgactcagttaaacgaattcagatgcccggggcacagtc

SEQ ID NO: 372382 - DNA, 329 bp, Homo Sapiens
tacttttcacagggggggaaaaaacagaaacctcaagtttgtagcttctcactacataaacatgtactaaattctaaatttgaattttttttaagtgtgccataccatctaatgaatggaaggcaatacaatgtagacctggctttaaggatcaatttcaggggctgatctacggggggactgatatacaggcgtgctaagaagtttctgcttaccctcagaaatacctctcctaccaagcaaactaacgcctaaaatttgagaattttattttcttagcttagacttttgtcttcttttaaaatacaaatatccctgtggtaaaagta

SEQ ID NO: 372383 - DNA, 245 bp, Homo Sapiens
tttccacagggacagaagtactctctcagttgctttagcataactgaaatagcctgcctcattaagtatcactttccttgcagtcagttgctaaagatcactcctctaataagatgtcagaaatatttttgttcttcacatattttgtacttcaaggccactatgtccctgcttaataatttcttttgctgggtacagtggcatgcacatatagtcccagctactcaggtggctgaggtgagatg

SEQ ID NO: 372384 - DNA, 689 bp, Homo Sapiens
tttcacagggggaatgaagacattgcaatattcctgcttcggcatggggcctatttctgttcctacatcttgctggatagtcctgaccccagcaaacatctgctgagaaagtacttcattgaagccagtcccttgcccagcagttatccaggaaaaacagctctccgtgtgaaatggtcccatctcagactgccctgggtagacctagactggctcatagacatctcctgccagatcacggagctcgacctttctgccaactgcctggcgaccctcccctcggttatcccctggggcctcatcaatctccggaagctgaacctctccgacaaccacctgggggagctgcctggcgtgcagtcatcggacgaaatcatctgttccaggctacttgaaattgacatttccagcaacaagttgtcccacctccctcctggattcttgcacctctcaaaacttcaaaaagctgacagcttcaaaaaacttgcttagaaaaattgttcgaagaagaaaatgccactaactggataggtttacggaggctacagaaacttgatatatctgacaataaattgacagaactccctgccctgttccttcactctttcaagtccctcaattctctgaatgtctccagaaacaacctgaaggtgtttccagatccctgtggaaaagtaccctgtggaaaa

SEQ ID NO: 372385 - DNA, 293 bp, Homo Sapiens
agagataatcataattgtagtatatttgcatggaggaatacctacttagcaataaacaaataaactaccaaaacacaaaacaccatgaacaaatctcaaaaacgttatgtcaagcgaaacaagcctgactgtactactgtactattttacatgaaactcaagaacaagcaacactagtcttatggtaacagaaaatcaaaacagtgttcacctctgagggttgggaactgcctagaagaggaacaaaagaaaaaagtgggggtggttacaagatggccaaatacctgtgaaaa

SEQ ID NO: 372386 - DNA, 130 bp, Homo Sapiens
agatctcaggaaagtgttatcactcagagaaaacacacaggacaatggaactgacagagcatcctgggtgtttgtggaacaccaatgaagcctagtgcggctggaactgaatgtgcatggaagttggaga

SEQ ID NO: 372387 - DNA, 577 bp, Homo Sapiens
ccacatgggtggatcgtatgtggggcagtcttgtaaaggctccttccctaggtcaccatctctaaaacacagtaaagtagaggaatgggaggaataagcatgagtagcaacaggttgagaactgcatggctgtcggcaaggaagagttctgctctctttccctctagacgggctgagagtcctgctgccttcagggttccttgagaagacagggccatctaaagcttcccttgggtgtctacatggggcttcctccccaattcccccaggatttgcgcttggtctttgatctggcagtggaattggcctggaatgtttgctgacagccctgcagacttctgtcaacccagacccaacactctccttacactgcacacactgctgtgtgggagcttccagtgcaacccttgtcagagctccaggcagaatgatatcttgtttgggacttgccccaccttcctcaaagccagtagaagcctcagggcattggacatggtcttgcttaggccctgaggcacttgtagaattctgaacatcacaggtcacagactgactttcaaaatgggctgttttttct

SEQ ID NO: 372388 - DNA, 268 bp, Homo Sapiens
aggactccctattccacaggggaatgtgctcaggaaacatgaacttaaagagactatacatttaaagcacattgtttaaaaatagatttatgttttatcaatattaaaaagcactagaaaaaattatttacccctgaaaaattatgctgtcatggtttgggggcagtatttaatcattaattgattttcatattttagactttaaagccagtcctaagtttataagatttcataagttaaagcacatacagtgctcagaaggctgtaa

SEQ ID NO: 372389 - DNA, 513 bp, Homo Sapiens
tacttttccacaggcaggtggagattttgtggactttattctcattcgataatcccatggtaaaccctaaatgatcctctttctagtgacaggaccatctaggactcacagaggatacaatttgtatggaataacctgtcaagataagcagagtatcagatactgacagtccttcattgtgacctcttatgggacgccattacctggcttggttttggcctagtaatttcctggctagatggatggaatttgggtctgttatttcaggggcatatggatagaaccaataatgtaaatttttgtttgcttttcataggcaatttgtggttattaaataattacgtaagatgtaaagtcctcagaagaagtggtgcttaacttgatatatgcatccaaataacttagtggctttttcaaaaaatatatgattgctactcacttctagagattatgactcagttaactcaggatggaagtcagtgtatgtgagtttttaaaatgcttccctgtgga

SEQ ID NO: 372390 - DNA, 544 bp, Homo Sapiens
tactttcacaggggttgagtgaaagcagaaaagggaataataaggcaagagagagagacaagagaaaaaccaggcaagggtaggtcagatagaggtccaaggaaaagaagaaacccacgtaaggaagacataaatagaaaaataaagaagtagacatagtagacatagtaggcatagaaggacaacccaactggttctgaggtaagtgaatgaaacaaattggacttcctgcaaaccagggaatgtgggagtgatcatctgattggcctagcttgggttaggtgtcttcacatggcccaatcagctacagtcgtacaggccatattaggcaaattaaaacagcggctgaaagcccaaccctggctggtgggttgaggagatggaagccatcaggtgaaggggtgataggctgtataaccaccctgaaaataccaaatatgccccatccttccctgaaacctttcagtcccttctggtgaaccagtccagtggttctcatactgtagccaatgcaaaagtcacctcaagggaattaacacacgaa

SEQ ID NO: 372391 - DNA, 463 bp, Homo Sapiens
tgggttcttaactcggtaatggtaattgtcttattaaagcaaaaaaataagaagacaaaagataattaaaatgaattattctttaaatatgtccagagattctttctctaaatttcttcacaattattaaaattactgttcaactttgagcatcaccatgaatgctcaaagcaacaatattagcaaaaatgtttctatgccctgtacatttatttaagtgctcacattttaggtactgctttgaaaacatccgtaatcagagagcattcagtggtaaataaagtatggccaaaacacgaaaactattactacgaaacaaacactaaactgtcagttcccgccagattgcatgctctgtgaaacatatatccgagaccaaaacattacttacttttcagtgacttttaccgaaaaaccctagtaatagcatgtcaccttattctgatcttgtgcctgtgaacgc

SEQ ID NO: 372392 - DNA, 549 bp, Homo Sapiens
gggcagcgtagggatttctggaatgagtcctcacacattctccagccaccactgtccaaccctccctccatcccggcctctgccccttccctcctcacgtggaaacaccaggtgcacgttgtgaccttgttggcaaaaagcaaggtgccggaaatccatgcacccacagcagataactgttcccctcctgtgcccatcctgaagctggcccaatctgagctccccacaggagtttatttttgatagatcgagaagactagaactatccaaggaacgagaactgccccgcttgggcctcctcctcacctggtgcgttcagtcaggctgcagcatgccctgaggatgtgctgcaagtccctggggccaggctgagagagctgaggcccttgtcttgatgaactgcaggagttgctgtcagggcctgctgggccctgaaggcctccagtctgccaagagggaggtggccgtgagctgagtggtgccaagtctccggtgccaggcattggaaaggtcatcttgacatccgtcttcccttcctgtggaaaagta

SEQ ID NO: 372393 - DNA, 316 bp, Homo Sapiens
gtggagaaaaggaaaaagtctagcgagtacctaagtaattgacctcgttcctagcatggctgctatgccacacaattacagagtgtaatattgtaaaggatcagagaactgtgggctctgcttgaggcactttcaaacctcactgctctacctgaattgaagctgaagcccgtgggatgattgacttctgactttctggcagtgaataggcagacccagaagggaagtgggtaggaagtagtgctggcctggccctgtttatcttccccactgtaggcagggggatgacactcgaatcagcatgagagtgaccccc

SEQ ID NO: 372394 - DNA, 575 bp, Homo Sapiens
agtaacacaacattggctatgaactggaccgtgtacctaaaccatttcaagcccagttcccacatattaaagagggttttgtaactgtgaagtgagtctgaacacacaaagctctcagcacagtgcctggcacaggggacacactcaaaacaaggtaactgtcattatacgaagtttcagaggatctttcctaaccaatcttgagttctgccagtttagtactggtatgatttgttatttggggtaaggtcagggggaggatcaataaggtaccccttcattcaaagatcaataagtggagccatatcttggaatgtggtccagcggtgagcatcatctctgatactgcaatacaataagaaatgcttatctgatctgcacacctgtttactggaatgcagctcctaaaactcttatactctccaaagtgttaagtgtcttttggcatgctaatgaatgactggtggctggggtctcctggagagccttgggatggggcctgggtgccagaggaaccaaccgtaatattaaagtgtttgaactttccgccccaacaccctgacctctagagacag

SEQ ID NO: 372395 - DNA, 437 bp, Homo Sapiens
  misc_feature (339)..(339): n is a, c, g, or t
ggttacagttaaagagcaggggatttctttttgaggtgacgaaaatattctgaaatttgttactgatggtggttgtatgtactaaatacagaatgtactaaatgtacaaaaatgtaccaaaaactattgaattgcacactttaaatggatgaattgtgtggtatttgaatcaaatttatcaatgaagctgttactacaaaaataaatgatctgaatagacatttctccaaatagacatacacgaaaggatgttcaacatcattagtccttaggtaaatgcaaatcaaaccacaatgagatgagacacactttatactcactaggatgagtataataaancaaggagaataataagcactgtcaatgacacagagaaattggaatcctcatacattgctggtaagaatgaaaaatgttaacggccccctgtgaaagta

SEQ ID NO: 372396 - DNA, 223 bp, Homo Sapiens
ctatttccacagggacacaatatgcctgtttatgtagtcttaggcccttcagataagattatcttctcactacaggaactccgtaggtttttaaagatgaacttcctaatttttaaacgtttttatatgctatcatagaatgatatatattttattgaaactagggtctcattctgtcaaataaaatattttcaattaaaattttgaattgttactgcatgta

SEQ ID NO: 372397 - DNA, 464 bp, Homo Sapiens
cttcacatttagttcagcacactccatgccgggtcatgagacagaaataagccacctcagagtgatggctgggttcgttcattcatctactcttcagtcaacaaacacttactgagaagtggctgtgtgccaggcacgctttaggtgctggggttgcctccatgaacaaaacaagcagaaaactctgctgctgtgaagcaagctaaggcggagcccagcatggcaggggcgggaggggctggctggcaagacattgcttcctgccctccccccaggggcaccacacagaacagtttacaaagcactcccacggttgcgttcccattaacaagccttcgcccccaacacaagcctttcctctcctagtccccgggacggtgtcagccctgaacatagcccaggctgggagagtggggggctgacaccctcgggtgactaaatgtgcccactgcccacctgcccaa

SEQ ID NO: 372398 - DNA, 535 bp, Homo Sapiens
gggttttaatctcaagaaaataactgctatcagttagattttgatgtatattgtattagccttttgacttacacaaaagttataatggtaaaattgatcctctgtgtaatttatgtaggaaattgaagtgcttgcataagccgtactcgcatgtgagagctaattgtaagggattaaagacattagcaactgtgtcctcagctttgttatacttgagtcatacttaacagccaagatcttcagtcatacattaacagctaagatcttggtcagaaatgcagcctccatttatgacattctcttgggaaaataagtctcttgtttaacaaggtgatttagtttttactttgatttcaggaatattgtctaacgtgagtagggcgagaaggcagggcggcttgtactgagcctaatttagcctgcacctataaggatcaaggtgttgtttactgagcctcctgggatcccagggctcacttgggtgggagagtgggttgtacctgagccaaaaaactgctgacacacctgtaaagta

SEQ ID NO: 372399 - DNA, 652 bp, Homo Sapiens
ctgaaaactgtatcctcgaattatgctaacccatttttggaacatgggtcccatagagagacatgaaactcaactgcacatgcccacatttctctacttataaatattcatgactcttcctatagtttattgaatatgtgtatttggccagtctattcaacataaatccctgtcatattcttctgaccctcaaaaaagtgtgtttctggcttctggatggaggttacacttcctggcctctcagaatggctacgctgcaggctgcaacctttatgaaaagtaaagctctcctttccaaatttatgaaatttatcattcttcagttgatacatctttttaaatttatgaattgtatctccctcttaaaattagaaaggtgtatgcataggaaattgtggataaactctgtagttttagaaacagcagtaagtgtgctgaggaacaactgagtcatcagtactagtgatcccatagaacacggttccaacagtttgtgtaagatgatggatagacagatagcctgagtggaaaactgacaatccagagctgatggtctctctgcttggagatgaagcctcttcgtatatgagcttacacttataaaaagatataaataaggaaaagtgaagtaaaagaaaaacccatgttgata

SEQ ID NO: 372400 - DNA, 446 bp, Homo Sapiens
  misc_feature (30)..(30): n is a, c, g, or t
  misc_feature (42)..(42): n is a, c, g, or t
  misc_feature (47)..(47): n is a, c, g, or t
aagaaaccacccctgattgcaaaaatggtnccccctgaacanaaagncccactcccagcatccaccataagtcctgaatactccccttgccttcctgtttggttttttgatccccttcacagtcccctaaaacacagtaaaagcaataggaatactgagcagttttgtcacagggcacaacagagcatgtcccagactggcatgactgaggacagaggatgctgaaaaaaggttatttggggcaactgcagggctgaaggaacatttgataatgattggctgaaggagaggagaaaggagctcattcccttcctcaatggaaagtaaaagaggggaaaaaaccctgaaacctcccaactctaccacatcaaataaaattaaaaattcatcaacatcagtatcatcagaaaaaaaacaatacaaacacatctatcgtaataatgtac

SEQ ID NO: 372401 - DNA, 155 bp, Homo Sapiens
tgcttcactccaaatctgcatgggagaggaggctaaagaattaagcccagatctcagaaacgctgagtggaatttttcagtctcgttactcagcaaacaaatatgtactagggacagtacacacatactaaaaataagagaggagagctaaaata

SEQ ID NO: 372402 - DNA, 571 bp, Homo Sapiens
aggtttttcacaaggaaaggttaagttagagatgcccaatggtccacattcctactgtgaacccctggaattttagtcacaggagagaccctagccccttgcaggacaaaaaattcacatagagggctgcccagagacagcacaaaagcatttcctattccagtgaggaagttcacactgggtcccacgctccccccgagtcctaagcagctacagcaaggtgatattttgaagcccagctcacaacagaatgcgtactcccctggggcccagtggcatcgtaaaaaagaatgtaatcatgtcattcacagcaacatggatggaactgaaggtcattatgtcgagtgaaataagccaggaactgaaagacaaatataacaagttctcattcatatgtgggagctaaaaagtcgatcacatgaaggtagagtggattggtagcagaggctggcaaggttatatgggtgggaagagggaaatgaagagatgttggttaatgggcacaaaaatacagacagaaggaacaagttcgaatgtttgatagaagagtagggtgactatagttaacaac

SEQ ID NO: 372403 - DNA, 421 bp, Homo Sapiens
tgcaatatctttatagtgtccctgtaggccttcatcaccagcttgaaatggcgatagagtgggtaacacaacacccttcttccaaaagacaccatgatatcatgaacgttagtccaagtctgtgaagtgtcattttaataagcagtcatttccacaaaatgttacacaaacaaaagtacacaatgaaataggaagcttttctcatttaaaagctgcaagttcggatcattgtgaagccaagtagaagagaaacataaaaccatgaaataagattctttttgtatactttacaataaaacagaatcttagtttttgtaatttctcacactatcaatacatcacaaatgtcacaagaaagcttttaaataaagtcctaaagattacaaataagaatctaaaacacatggcctgtggaaaagta

SEQ ID NO: 372404 - DNA, 224 bp, Homo Sapiens
aataaaaatagaccaacgctaaagcctgtgctccagagcctccaggcaattggatcagaagtcgcagctctggtgggaggaaggcgagccctcatgtgtgtccctgtgccactttgccttggcccctttgctgtccatcctttttcagggcgtggacttcctggtgctagaaagcgtgatgttcgccatacttcgagcggtcgctgggccccagctgtacctct

SEQ ID NO: 372405 - DNA, 402 bp, Homo Sapiens
tgccaggattacaggcatgagccaccacacctggcccaaacagtaattaatgatcaactttttagtgccaaagtcacttctgggacaatgcagatatggagacaaatcagactgttccagacactaccaagttcatggtgcaataaggaagacatatcaaaaacagacaattataatacagaagttaaattattgccttacagttccaaaccaattcttcattgccttgctctgtgatacgagactaacctaggctgactacatttctcctttcccagtggagcgagtggctattaggttctcgccgatagagggtgctggaaggagaatacaaagccagttgcaatgctcagtttttcacaaagtagcaagtagatcagtgtgacctgtggaaaagtatgg

SEQ ID NO: 372406 - DNA, 804 bp, Homo Sapiens
tattgaaatgtcctcacaacacagcagttctgacttccctctagagcaatgtgctctactaagagggaggcagaatgttgcaatgacctaacaacagaagtcacaaaccatccttgccacgatattccagtggttacacaggttagccctgttcagcaggagaggggactacacaaaggcatgataccaggaggcaaggaccactgggccatcttggaggctggctagcacaccaaggcacttagaattaacatacatgcaccaaactcctgagcatgactgtcaaaacccttcgtcatctgactcctactgcactctaacctcagttcatcccaccctttctcagcccaataaactccagccttcctagcctcctccttctcctcaaaggtgagggatttgtacctatttcagagcctttatattaactgctccctcagactggattaattctctccactcatcattttatcatccagatctgagcataaatagcacctcctcagagaggccaccaagtctaaaaggccatctatcctctttctgtcccagaacccaatttttttggcagaacacttatcaccgtctgacatttgagcacatctggctcagtgttaaactctctggcacaattagtcactacggttaacatacctttaaccttcaaatgcataacctagcccaacaccctggccttgcagttgtggaaactgctcagctcgaaggaccttgtccttcaatctgcctcactcacactctaccatcatcaaactcagctcatcttgtgtcaccccctgtgaagta

SEQ ID NO: 372407 - DNA, 429 bp, Homo Sapiens
  misc_feature (137)..(210): n is a, c, g, or t
tacattttccacagggaaaaaggatgcaaacattcttggtaatgctaaaggaagaatacctgttaaactcagttcttcctaactcaaggctatacatcagctacccaaggagattttgctaatagctacacgcccannnnnnnnnnnnnnnnnnnnnnnnnnnnnnnnnnnnnnnnnnnnnnnnnnnnnnnnnnnnnnnnnnnnnnnnnntccaactggttgtgacacacaagtaaaacctgatttaaaaccactgttttgaattcccgagaagatttcaggcaatctgtggacactcatcagtagttgtgttcaagtccatccaatctaaaaggggaagcacttttcaaacaaatatactaagctgagagcacggtttttctgactagctgtttaggtcatcgcagaaaagctactcaccctgtgaag

SEQ ID NO: 372408 - DNA, 819 bp, Homo Sapiens
ctgctgtgagtttacacaaatgattccagagcagaatgaaagcagaaagctgttggttacaatattcttttaacctctctgcagcattttacacttactgggaaccttatgattcaccgtaagagtggaaatatacctgagttcgtgtcctaatggtctctaattcacattggatcgtgggcaaatcacctcacctctctgagcctgttccctcctcttagaccatctctaagaccacttcatctatttacacatcatttgcttgaacattgctgaacatctgcgtgaacttggcctctccagcccttgcaggtggaaacagctgtgtcaaggctcaaggctcacgctgaggggacttggagggagggggcttctgcattaagctttcctggtgaagacccttgatcttgtccaaagccctgtgtctttgactggcttctcttcagagtccccgttgtcatcgtaagacccttgctgtttggagggtggtcttgtgactgtggcagctgctggccgctggaatgaggagcctatctccatcctccagtgtgactcaggcagagcattgagaattcccagggcagaaatccttcctgctcaggctttcattctaaaactacagtcttcattaaagctgaactttctgggtagctgagcttatatgcccggcatctgaatgagagctctctttgtaactgtgtgacttgagatctagtttgccagctcctgggaaacaatacatgtgttcttgtttgtgtttgctcagcaagcagatgtctgagatgtaagaagcttttctttccctatgaaacctgcgcc

SEQ ID NO: 372409 - DNA, 317 bp, Homo Sapiens
cgaacataaagagatccttaaattatgagttgttggcttatcttcataaataatttgtctgtaaaatggatgaaatgaaaagaggttcaattaaaacctacttttttctagtgctaaagaaaagatttaagcaccttgtcaagctgggtaaataggaaaaatacataatcatgctcagatatgtatctaggataattataattaaaaataagctatagtaacaatggctaatgataatttagctttattatatgtgctaagcactctggttttacatgcattatcttcttttgttcttgctacaacctgtggaaaat

SEQ ID NO: 372410 - DNA, 243 bp, Homo Sapiens
  misc_feature (42)..(42): n is a, c, g, or t
ctcggtaccctacttgttccacagggaaaaaaatgagacccncaatagaagcctctgatgtgtgggaagtagtaagcctcatgagggtggtggatggggtaaaaaacagtcaactgtaagccaccaaggaaaacaaaaggccatgaaagagaaggaaggtcacccatcccacggcaggattgagaagaacatttatgggacctgggttgggaaacactggctgtgaatttaactgatgcagcg

SEQ ID NO: 372411 - DNA, 297 bp, Homo Sapiens
gtctgagccaccccgcccagcaacaaggctaatttgagggtcacttctttgatgccttttcttgcccatgctataggtcagaactaggacaagcagaggaggtcatatataagctacgtaagtctcttggcctctttgtaccttagcttccccatttgagaaaaatgaatggatcttaagacacgcttttcagagttgataatgggcttatacccagctacccaataattgtatgagtttttgtacataaatagttgtctacatgtattcatcttctatttcaccctgggaaaagta

SEQ ID NO: 372412 - DNA, 172 bp, Homo Sapiens
ttcctggggtcctgccaggcccccacatctaggcccaacgacagcaacaacacagcatacactgtagcatgcaaggaacatttgctggtctggtttggattcaactggtaggctacatcactttagtttgctggcccacagtgtccgcctgtgaaagtaggtccgactatat

SEQ ID NO: 372413 - DNA, 331 bp, Homo Sapiens
  misc_feature (317)..(317): n is a, c, g, or t
ccctcggtcccacaagtacaccatgacttgatgctgtacctagaccagaacatacttttacaaagggtctcttccttagcttctctagtcacacatttgagcatgccacctgcctcctgttggtaccctgatggctcccccaggccatcctcttagtcatctctggatgactcctcgctccattcccattttcattccctcccactacaagcatctcccactgacctccttccactgatactgctccggctcaagtcagcaacgaggcacacccccaatcaatggagtcttcaccccagcttcctctcactgaactnccctgtggaaagta

SEQ ID NO: 372414 - DNA, 339 bp, Homo Sapiens
acggacctacttttcacaggcctgtctcagcttagtgatgtcatcagtgctcattagcctcttcatagtctcttgaaaagcataaagaaaattagcctctggcacagaaaaggcttttaaaccaaccttttcacagtatgtctcaaactgaacatccacttaagtgtataattacaaaaaagaaagggtatgctagatatgttgacacaggatctctaaatgtagctgaaggagttactattatcttcaaaggcaaaacatctttcttaggcttacaagacaaactatgtagtggagtagacaggaaagcaaatcactaagagattatctccctctaag

SEQ ID NO: 372415 - DNA, 307 bp, Homo Sapiens
cagcctgcactgtcattttctgtagctaacttcccccaacactcccacctccacatagcccttaagttaaaggagaacaaggaagccctgtgttcattaccgtgtctctaggggcctagcacagaactttgaacccataaagtgttgagtgaccactcccctgtaatctctactttcttagcatccattagccaacagcctaagcaaaatcaaagtgaatatcagagtagatacaaaaataaaataagctgatctggatattatcctgatgcagatgggtaatggccactaataagatttggggggt

SEQ ID NO: 372416 - DNA, 191 bp, Homo Sapiens
tggcagcttcatgccacctcagctgtcctgaaggatagagttcatgggtgcctcaatgcgtggtgacatacataacgagtgacaaagagacaacagtgacatcccagtgaaaggacacaccaccaagaagcttcttgttgatggatcccttgtgagtcggatcaaaagcttgatccacaaataatcctggg

SEQ ID NO: 372417 - DNA, 422 bp, Homo Sapiens
  misc_feature (12)..(12): n is a, c, g, or t
  misc_feature (65)..(65): n is a, c, g, or t
  misc_feature (126)..(126): n is a, c, g, or t
  misc_feature (140)..(140): n is a, c, g, or t
  misc_feature (146)..(146): n is a, c, g, or t
  misc_feature (307)..(316): n is a, c, g, or t
gtgagccagggnaaattccattgattggaaccaaaatggaaaacctaccagggtgtgcccctttnacaaggactggaggtgaaacccaaccgggattaaatccagaaggccatgtgtcaaattttnctaccaatgaaacnttcatngcaacattcagtggagctgaatatatacagatgttagaggcttcccagggaggcagaattgttgtccttggaagattgttaagacccaaatgtcattaggctgtcttcaagctgcatttggcaggaggatactttcactgttgtttatttcttgtttcagnnnnnnnnnnttgtttttttaaacatttagaccagaaaacaaaattcagaatccccacccacatccaataactgcatttattgcaatgccaatagcttaaaatggatcattatctg

SEQ ID NO: 372418 - DNA, 158 bp, Homo Sapiens
ctgtgctacttcctagctatgcaacctgagacaaatcacatatactctctgatcttctatttcattatctgtgaagtggacacaaaaataatacctacctcttagcacatgtttataaaaccaaataaaagtaagtaaataactagggaccgagtgat

SEQ ID NO: 372419 - DNA, 484 bp, Homo Sapiens
  misc_feature (141)..(149): n is a, c, g, or t
tataccacaggctagactctagcttggggtctagtggagcaagttaaatgtcttcaaaggtgatgggttattcaactgaagtaaatgttttctagaatgtggtgaaacctggaaaatacagggggagtaggagagggaagnnnnnnnnngacataatatacttttctccactctacctaccatgataatacatattaatcttgcctttattctttctttattgtatataaaagcttccactaactttccattctagggagtcattgagagaatataaatatgtgggctttttgttaaagcctgataggagaagagattattataagtaattggagactgtggagtcagaataactgagtttgaattctgacttcatcatttaccagctgtgttgcttaaccataaaatgctcataatatttactccagcgaataatgggagaattcacagaggtaatccttgcagataatcctgtggaaaagta

SEQ ID NO: 372420 - DNA, 431 bp, Homo Sapiens
ctgtactagacaaggactcgccactctgtcgcccaccttcttctgccttctgagatgaggtagatgatttgtgtcgggcaaatggaagacataacttgacagccatcaacttccattgtattgtactgagaagtgcgagtcctatgcccacaagtctctcgcctcagcagagaaactggctgaaattcctcagagtgaggcttgttgggaaaactcacatgcaagggaaggtgaaaggctgggagcccgtcactctcctcttcttccactttctgtctgcttgtcaccatggctacctctacatctgcttccccatacggagaggctggtcgcttggaagacatcctttcaaactcctgaggtaaatcagggtcagtaagcatgctggaaaagcacaatttccctttgtcacagcagccacctatgatcgt

SEQ ID NO: 372421 - DNA, 513 bp, Homo Sapiens
  misc_feature (388)..(388): n is a, c, g, or t
  misc_feature (466)..(466): n is a, c, g, or t
  misc_feature (489)..(489): n is a, c, g, or t
ctttcatgccaaacttgcaagtgagaaaagatccttagtggctctggtggaagaaatagtatttcttcttctcagggtgtctccctgccttggcccctccctgagccccaggctttaaaagtgaaaatgtttgaaacatgaaacatgtctgtaggaagcatcagcatggccataagtgcaatgattttcatatatgcctctgcccatttcaaatatatttttgacatgaatgaatctaacagtatacagaataattcatgtaagaccctaacgtgtacatgtgaaaaagcatttctatataatgtgaggagcactggccatcaattagggaaataaaggtcatgtaatattgcaaattttcaaaatagagccctgcaagataactgcnatcataccaaaaactatttgagtaaatggatttttaaagtaatttttgtttagaagagtttatatttcagaagcaganaatgtcaaatgatagtctttgtnaatggtggtgctccttctctctgc

SEQ ID NO: 372422 - DNA, 235 bp, Homo Sapiens
cactaatgttatcattagaactctggaagtagttggcttccaactcagagcaaaaaaatggaatcttgaataatggaataatgggaagatgtagctgtggccattgacaaaatatgacacatctaggaagcactgtgcccattttacagagttactagatttttctcttccttgagtggctgttgaaagctcctcttgtgcgatgttggcgttcaaaattgaactcctttttttc

SEQ ID NO: 372423 - DNA, 412 bp, Homo Sapiens
aatagtttaaaccaattctgactaaatctctggtctgaccctgcctaaatggagaacaagaacactgaggtctttagtacagggccagccacgagaaacacagggttcactggggtcaaatgtattggaaagttcacgggtccttggtctgagtcctttcttttccagtgactgggagtgcaaaggggatgctaagaataaacctgtgttatgcctcagttacagatgactaggcttattttagccagtcaccttgttcacttcagcaagagaagtacttgctcactcctgtaaaacgactccgaggtgtgtggctgggcagctacagcatattgcactgctttgatgtgtgaggtgtgcccggctcctttcccatttaccatcttcaatggtcacagcctgtggaaaagta

SEQ ID NO: 372424 - DNA, 524 bp, Homo Sapiens
  misc_feature (187)..(187): n is a, c, g, or t
  misc_feature (335)..(345): n is a, c, g, or t
ccgtacttgtccacagggaggaggcagaaggatccagagctttgcactgtgtgctgatggcaagcccatgaagagaaaggacagagggagcaggagggtcaggagacaataaaatggattctgttttgacatgggttgttaatgataaccaatcatcaaggtgagaatgtccagtagaatttgggangagggtctgacaatttggagaagcatcaagactaccatttagctccagggaatcaaagaaggtgatgtaacaattggagaaataagaacagatgaaacagcccaaggagacagcctagaagatgaagatggcacagagagaacattgnnnnnnnnnnngagagagagagaaagaggagtcacacatgtggttcactgacaactaaacaaatgtctgagattactatcatcctgccaaatactgcagagtcacacacaatttgatgctgctcacagccttgagaaaggagctggagtgaggaacacagccaggcataacactcctgtgaaaagtagga

SEQ ID NO: 372425 - DNA, 601 bp, Homo Sapiens
aatttaaatgaaataatgaatacagaagttgcttttacaacaactggtatatgagatggtctcaagcaatattagttaaagttgggtgtttatctgtgcctccaatatctgcctccttatagtttccatatcctccagatgcttctagtgccgacctcagctgccttgcccgtctttcattgttattttgatcccttcaagtgcacacactgacctttgcattggatacctggaaaataatttgtctcaacattctaagtctatgtcaattaaaataaatttaatgcatttctcaaagcctccacattcatttctactggaaaaatccaaatgcaaatgagacatctggttctcatgtacagatggtctgtgcattatttgcatctttgtcaaatcaagctaatgtgaaacctcatgtcatatggtctgcacgtcctctgtttctttgctaggaattatatatgatgaaaaaatatgaccaagatatgatgaaaatattttctgaagtcacactaatttgtgtttagctgtaagtcaaatcacttgattgtgctgataaaatatttgtcgagttttcccatgtctgtggcactgtttttga

SEQ ID NO: 372426 - DNA, 426 bp, Homo Sapiens
gggaaaggctaatcttacggataatccacgtgagatttccacacaagagaaaagcacacgcatagtgaaatgtcagtcttttcagtaatgaggatacctttaaggcactcttggactctcggcaaccacaacataatagttgaaagatcaagattggctccacgaaagtgatacggaggttaggatgctacttgctgcaaacaagccctactttggccaacatcctgcttatttctcaaaaaagaggcacagtgaaaacaaaaacgacattgggacatgctcctcaaggtagtgatatatacgataacgtgtatatatgatcagctggtagcctaccaaagcctgtagaaatctaggactgtgctaatcagtatcaaaccaatttctatctcttcccgaaagacctgtgaaaagtcagcgagcgac

SEQ ID NO: 372427 - DNA, 406 bp, Homo Sapiens
tacttttccacagggtactttacacttagggctaacagtgttggaaataactgatgtgaatgtctttaagtaagacagacagacactttactactccctgttgtctgccatttatattacctaccaggctcctaaaataagttcatgaccccaactttacactccctgattttgtgtcatgtgctgggtttatagtagagaacaaaaataaacatgttctttgaactaactaagctttcagacaaatgggggaaacacagttgaagacatttttaaaataatgttacgcttagggcacagtgatagtttaacaacaatactgcttaaagctcaaacaaatcttttaccattcaacccagtgctcatttcattaatctctatgctaattactcccctgtgaaaagta

SEQ ID NO: 372428 - DNA, 476 bp, Homo Sapiens
  misc_feature (178)..(212): n is a, c, g, or t
gggccatactgttttatgaaatgcctggtagggtatccaggtggagatgtccagcatgattttggcaaatacagaactgagcttaggagtaactaagggtgagagggacacgaagagaaagagatgagatgaggagttacacgtaaaggccatagtaaagcgctgaaaatagatgtgnnnnnnnnnnnnnnnnnnnnnnnnnnnnnnnnnnncatctatagaaaagaaggctgttggccccaggaagcctcagcacaggatgaagaaaatagagcaggaaaagacatcaagcagccagaaggatatgaggaaaaacagaagaaatgctgttagaggctaagacaggaaaatgtttcaagaagagaagggccagccatgtcaaataggtctaggatttgacaattaattggtgtaatgaaaactaagaaactagattcagtagtggtgtaaacaaaagtcagattatggtgagggga

SEQ ID NO: 372429 - DNA, 522 bp, Homo Sapiens
tagtcagatattcagtgacagcgatttaaccaagtacggtgcatcatttccaacccagcttccaacctcagattgtctacatttacattctttgacctgatgagtggtttctttattgtaataagtcaaatgagttgagaaagaaattggatgagatgaagactttgaaggccaagaaccgcaggtggatgaggaacaatactgtcctgattgtgtgatctctccattgcctttaattaagccctctgtgaggttcctaagatctgggcacattttcaagagtgacaacgctcaattcaagaggggtgtggaaggcagaagactattttgccaggcaggctcatgttcccagatgttcacagcgctccttgtgaggtaatcaatgacagctgaaggctgtggcatcgcatttgcccacctccccaaggatctggtgtgcagggaggacgaggagtggggtagctgggaaagaaccaccactgtgccccctatcctaacggcagtatgtcctgtggaaaagta

SEQ ID NO: 372430 - DNA, 516 bp, Homo Sapiens
gagacgactggcaaaattcaaataaggtctgtagatcagttaatagcaccactgctgttgatttcctgttttaaataactacactatgtttacagaagatatcagcattacgggaggctggatggagggcatatataatctctgtgtaccatttgtgccatttttgtaagtctaaagttatttccaaataaaagcccaaatatattttttagaaattgtaaagccctaaaaaaagacctaaaatacatattaccatctcctgagatattcttccaaattaaagcaccaaattaaaacctattactccacggcctggaatatccttaacaaatctgtcacctcctctgtgaagcatttttgatgcctctacaaagagttagcttcccttctttgaccacagtctcttgcatcactgctggctattaatagactcaccctgacttaaaattattactagttctcgcatttgtcttttctactacataagagttcctcaaaatacagagaccttgtctt

SEQ ID NO: 372431 - DNA, 461 bp, Homo Sapiens
acacagggctggggataaaactggctgcaaggcaatgaggctgtagaacaggctgactgcttgaattgacaaaattcctatactccctggcattccctcgcctgttggcctacaaatatccgttccctggagtatatgtcactcctcattcttgataggtccttcttctgtgacttcatgctgattagggatgccgcgtccagagatattaggggagtgaaaatctctagacactaaatctaaatgtgttttgaggtctcccaagataggctgcaaaggctggtattgttggaagctgcagttgtaatttttctaatctggaagatacaaattttaccaagagatttaagatccagggaccaaacaacagtagtacaaacaataaagttagtagttctactaggggcagaatattaccaagtaattggtattgcccatttgatagcttcccaaatagtcag

SEQ ID NO: 372432 - DNA, 521 bp, Homo Sapiens
acggagaccaggcactgccaggcccaggaccctttggcttcttgcatctcagggcaagtgctgcctgcctatctcatgaaaaatccgggacagtctggggaataccgaggactctgactctcaacagagcatggcctcgttcgtgacacaaggacggcatctctttgcctggaggtcggtcatgtgaagcaggatacacactcatctgtctcacacgatttagcagagtcatccatagagtcacagaaggtgctggcagcaccacgtccactcaatactgtggatatcggatagggaacggaaaaggcgacagtcaccgagagtgaatggtcccttgtttctatgtagacagcatgtctcttggtcttatcttattagataactttggaatcatatcaatcacccatcatccaactatctaccatctaccttactgatctgtcatctatcacctagaatctaaacaatctatcgtctgttccttttctctcatacacactaagtaagcaggagacatatgt

SEQ ID NO: 372433 - DNA, 150 bp, Homo Sapiens
tggtgggagtgaggggacctcagcctaagggaagttctgccatcaacaacctgtgacgctggacaagtcacacgactctttggaattcaactggaacagggattcatttcatttcttttctttttttgagacagagttttgctcttctca

SEQ ID NO: 372434 - DNA, 758 bp, Homo Sapiens
acttttacttttccacagggacttttacttttccacagggacttttacttttccacagggacaagttggctctgccacaagttgttaaacttacatggtgctgcattacaagcacacacatgggctcgtaagaaggctcgttccataaaggcaatggaagactttcaagtggagatggggcatgagctgggctttgaaaaatgagtaaaaaagcgaaaggataggtaaaggcatttctggcaggggaatggccaaaggccccaggccagggaggcacaggtatgcctgacagttaatagggttgtagtggccatgcagaggctttgtgttgggaggaaagggatgcttagatggtaactagctgggtctcagccctagaaggcgggggggtcaatcctgtgctgtgtaatcagcatggagtcacttagtcctctgagctttgctttcggcttctgtaaaatgtgcatggtaataatcctgttgtgaggattaaacgaaatgagcaagaggagcccttctagtaaaccacaagttcatacacactttagatgttcaaaacacaagcaactgttaccacgacagaggccaaagcttggaaggggagggcttggagtttgcacttcctcacgcctgctccagctggctcatcacttgcggatccccttgggtgggcatgggatgtggatgctgattgaaggatttgcaggcagagagataggagcctttggtggggcacagacaaggcacacagatactcc

SEQ ID NO: 372435 - DNA, 285 bp, Homo Sapiens
gaggcatagggtttctctccagtatgaatctctgatgtaaaataaggactgagctctgattaaaagctttcccacactcattacatttatagggtttctctccagtgtggatccttcgatgtttaataaggtctgaattctgactgaaacttttgctacactgattacatgggatatagtttctccccagtatggattctctgatgcagaataagatctgagctctgactgaaggctttcccacacacatcacatttatatggtttctccccagtgtggagagag

SEQ ID NO: 372436 - DNA, 553 bp, Homo Sapiens
cagactgttgcctgcaccatcagacaagaagtcagtgatgatgacgatgctgtcctattttcatgggaaagccagagtcatttttagatcagaagctacttaactttggccgccagtccaccaaaatatctcccaggaaagcctggacgtttggtgtggcctggtgggaatgtagggcccctggattttcagggtgctgtgttgtaacgtggcctctgtaaggtcttgaatcagaaggttatacgcccctggattagttctccattagtgggcatttcagattctcttgattagcattcagagaagatgatccacagcacaacaaaccaatacggtccctgacccgtcacacagggctttaatgcatgaactgccattgtgtttactatctgcagcaccttccaattctgtttcccactgattttggtgacattctggaggtgttcagcccattctataagcaggcagagagaactagtttgactaatatgttctggaagtgtcttcaataaaatcagtaatagcctggacatcacaataatcggagctgcca

SEQ ID NO: 372437 - DNA, 475 bp, Homo Sapiens
gtataaatagtttaaataaaaaaggagagatgatatcaggaagacagcaagctaggcggtgctaaccttcatcctctcacaaaaacaacaatttaacaactattcatggatgaaaatagctctgggacagttctgggctacaactaaaaaggaacagtagccgagtggagcacaaaaatcaaggatggctgcatagaaaaaggtaggaaatattttacctctggctggaaaagcttagttccaagaggaatctccttggctatgagttcccactgcagagaataagaagaacaggaggaccccagcaatctccgccacagaggaccccagaaccccacgtgaccatcacgcacccctaaacagccttctgccaggagaggacacatgcagtactttagcaaatgtgaaaactcagttgatggagcctcctgatctcaagttactggctcccaaagccagagaaacccaatccccc

SEQ ID NO: 372438 - DNA, 448 bp, Homo Sapiens
tttcacaggctagaatataatccaacagattgggaacaatgtcattcttacattcttatatggcatagtttgcgttagaacagtgtttggaagacagtaagcattcagcaattatgttaactcagtgaatggaattctcaggaattcacaggaagctccctgtgtcctaagcaagaccacctcttaatctcctcaattcttaatttccatccagaattattccacccagagcccagaagagtgtaatgactttaattcctccccaggaaagcagtatagctgactacttctttcagcactgccttgcataaccattatttctgtactaagatttgttttgcctcccttttcccaattttctttttcttacctcatattaacatctttgacaaaattctcttattcaattcacataacaacctgggcaagtattattacatctttttgt

SEQ ID NO: 372439 - DNA, 464 bp, Homo Sapiens
tacttcacagggcctggataaggttgatttaataatggaggatgtccctaggaagtttaaatttaaaaagttacatagagctatgtgatgaatgtggtctacttgtactacatcatgttctacaaagagaatatgagttattttgaaattacagctggtctgttttcttttgccatagtactgctctgattttggatgacatgggtcacaatataatgaggacaccagagataatggacagtactcatactcaaggttatactcatttaccacctagttcaggagtcagatactcagtctgtaggaaacaaaacaaaacaaaacaccagagcataagaagtactatgagataaagcagagctataggaatacactacttagggctgggagctccaggagtatctacctgaagaagttacacaaatgagcgctcaagggaggaaggaaaaaccccctgtggaata

SEQ ID NO: 372440 - DNA, 189 bp, Homo Sapiens
ttactttcccacagggtgtctatactttctccctttgtctgagaactgaccttcctgactgaagttcaccaagagccaacagttggctctgatagttttcagagacaaatctccagggttcaggcagctcctaggccactcggaatgacatcgttgcttaaaagcatcactttactctaaatgagctca

SEQ ID NO: 372441 - DNA, 359 bp, Homo Sapiens
tacttccacagggaatgttgccttctgagttccacttacatatgctgaggttgagaattgtaaagaaaaaagatatatcaggtcatgcaaaatagaagtacatgtatctagaagttatgcaaaacgtgctttgtgttccatgaaaggggagatacaaatggggcagaggaacattttataaaaacgtagcgttctgtacactgacaaagattccttgcttgatcaaacattagtcaggcacctaaaccttctccagtctgtgcacttccttgtcaaatccagctttagcaagaacttccttacctttgatatctgatcacccttaatatcttaccaggttcatcatcctgcaccatccc

SEQ ID NO: 372442 - DNA, 434 bp, Homo Sapiens
acacgtcaatgaaacctcagtttaacagataagcatattttacctccaggttcataagcttcacttgatggctcatttcttttgaatgttatttggtattgacactgcaattctaacacattcactctttaggatttgacttacctagtaattccactcattatgtcactaattttggtaaactatattcacatcaagagtataaactaacttgctgtgtatctcaatgggcctgcaatttgcatttcggggtgagatgattctccattgtatatgactgaccaaaactttgcaggacagctaacatcccttatccctgctgactaaataccagtagtggtaccaccactaccaccaccgtactcagtcactgtggcaagaaaacatacccataatttcaaacctgcttctagaggagcagtgtcaccccagct

SEQ ID NO: 372443 - DNA, 846 bp, Homo Sapiens
  misc_feature (407)..(433): n is a, c, g, or t
gtttgctgtaaatcatttaaaaatatgctcaaattccaataaaaattccaagaaaaatattttcgaacaagaacatgtgatttttaaatccatatattgaacacacacatacaatgagagccattattataaaatttactataagatatttaagattattatcactatccaaaattaaacaaatttgaaatggcacaaaaataaacacattaatgaaagagaattaaaaacacagaaattgagtgtaattttatctagtaacagggtaacattttaaacccacaaaacagagcgattgttccatttatggtattaaaatactgggtaatgatttgagaatataaaatgatagaattgaatcatggtcccacaccttgcataaaagttaattccagtattaaatgttnnnnnnnnnnnnnnnnnnnnnnnnnnnttagatgtatgtgtgttttacgtccttgagaatgaatgtcttctaaaatcaaaatttcaaacagaaaccttataaaaaggaataaacctaacgtacctaaaatgtaaattcttacacatttcaacaccaggtaaatagcacaaaacaaactgggaaaatttttacaacaattatgttacatgaaaattaaaatccttatgacatgtacaatgtataaaacagtatgattactgctattattaatagtattatgattacctggtcttcccacacaccagtcctcttctggttccctgtggtgaagcagagccctccctctctggccacagtgagggatccagcaggaaccctgcctaaaaccacagagggtgtgagccaagccaggacatcacattccctcctgcgaaatgacg

SEQ ID NO: 372444 - DNA, 782 bp, Homo Sapiens
cgcgggcaggtactttccacaggggggggtgtttgtgtgtttggtagagatagtttccctatgttgctcatgctggtttcaaactcctggtcaaaactatcctctggtctcagcctcttaaagcgctgggattataggcatgagccacctcacctggccaaaaaatttgtgtatttttgatgtgtacattaactagagttaataactatgatattctttgcttagtgatgtttagcactcagttttgtttttgtgttaatattttccttctgaagtatcacctctgtcgttatgtttaattattcattactttatagagttcagagatttcaccaaactaaaccacaaatcagtctaattttctgtctacttctgttgttgatgtagaatatattttactcagattttcccaagcactactatttgaccaactccatggtttatagcatgtcatatacattgacaggttctaccaacaagtgtattttatagcctctaccagaatagaagttctctcatcctctaaccaacctaattcctccagacccacgtcaaacattaggagttcctctcatgccaagatattttttaagttccttaacttttaaagtaccccagcacctctgattagtttcactatattaaaatttgactttatgtcaaatctctaataaaatttgactttgtcagatctctaataaaatttgactttgtgtcaaatcgctaatttcctcacacgctagcagatatgcactcaggaaaacgaacttgagcgcgctacc

SEQ ID NO: 372445 - DNA, 511 bp, Homo Sapiens
cgggacatagatgagaggaatatggactgtatataaattgttgtgtaaataaccttctttattccaaaataacttcagatgttctgatagtactttatagcaaaagaaagcaataatactttctagcagataattatatttgataactaatgcttctgtatatcttttgctagttcttcctgttctcctcaatcacgagtaatcaagatccttatatttctgtccttgtccctctttcttttctcaccatgcaccctcttgccttgggcagtttaaatactgtccctgtctgccaacttttaaacttacacttcatatcaggtctttgttctgagctccagatccgtatgtgtaactgtctctttcacatttttacttagagtgctcaaaggcatcaacattaatttgtcaaaagctggactcttggtctacccaactctttctcctcatcctacctcttctcattaagtcacccaggtccacatatcattcacctgaaagtcatgcttga

SEQ ID NO: 372446 - DNA, 377 bp, Homo Sapiens
caagccacagcacccggcttctatgaaatcttacaagttcctttattcaacggtcatttactgagaacatttttgatgtccaacatcggacccgtcttaagatcccaacatctgacgtggttggtctctgtccctgtgaaatccacaaccttcttggaaatgttaaataataatatctaattggagtaacaggagtgttaaacattattatgtgggatttttctgattaaaaccatcaaatgggttgtgtaaagacccatttcccattgtcttctaatgcatttgggtcacactggtgttgccagttccttgttctttttcttccatctcatttatctcagtctctactgacattttcatctttctgcccttctctc

SEQ ID NO: 372447 - DNA, 546 bp, Homo Sapiens
  misc_feature (298)..(308): n is a, c, g, or t
aaaacgagaaagacgtaggtttaaagacgtagatgtgcttctttgagaatcttagcagatagcctatgtttttgtttagactaatatccatttttttcattcctcatatgttgcatttttctttacttaattttcttcttttaatgacaccataccgatgaatttgggtttcttactaatcatatatctaaggctcatatttttagaaacacatgctaaaccatatttctgcttttctgctattaattttcatctgtcagtagccaaaagaaaccatttacttaatgccttaaaatgnnnnnnnnnnnccatcgattagttttcctctgaggtacttttagttgaatattgcaaatggattaaatatcagaagcacagtatacttttggtgggggtgagggaagccagaatttgttcttagacaatatacaagtttcgggggcttattcattcttccattaaaaaacgatcacaaactagaaacaacggaggtctccctacctttagaaatgatgattaatttgttccctgtggaaaagctcgcag

SEQ ID NO: 372448 - DNA, 475 bp, Homo Sapiens
  misc_feature (32)..(32): n is a, c, g, or t
aggctccacggcctttcattggtaattggganaagagctaccagaattgacatgtcccagctcctgtgtgcttcaaacccctggagtcatggagaggaaacagggcgaggaaggcagccagcagcatcaaggatgtcagctgagacgtgcgagggttcaagtccagtcacaggcagatgacaggtgagccaaggacacaactcctccttgggcaaagggcaatctcaaaacctcggtggacctgagctaggccaactttatctcaagagcttctaagtagtggcttagaaatgtgctcagaggaaaaagagaggtgactttggaaccaagcagatcagcaacttgcttcctagctgtgtgaccctgggcaaattacagagccatcagagccttggtttccacattcttaaatgggggtaatacccacatcccagaattattgtaaggagtcaaaaattatatatatatatcacta

SEQ ID NO: 372449 - DNA, 317 bp, Homo Sapiens
tactttccacagacattacagtggcagaagggtaaccaaagggctttggaagtatggaagaaagggagcctggcagtgcttgttacttggtttcctttgcttttatttagagaaaaaaaagccaattctgaagggtaggtagggtttaaatacaaaggaaaagaaccttctctttgggattcagtcacggtaactacatttaggttagggtaatctagaactagttgctatctggaactcgacttgtctgttgtccaccagacccaccttcacgtactaaaagtccattctcactagctgtgcatggtatcctattt

SEQ ID NO: 372450 - DNA, 801 bp, Homo Sapiens
  misc_feature (14)..(14): n is a, c, g, or t
tacttccacagggnctaatactgagggtggagggaatccaggaggaactccatgcagacgaatatgcctactacatccaggtaggtcagcctgctgggattcaaacacacggaacaagtgtgctcagggcctcatgtggctataattatacttttaatgtgcaaattatgggtagcacttaaaacaacctaccttcgtcatatcctcacccgtaacagccaaccaaaaaagattttggagggagaccagacttggagcactgcattcaattaatgtgagccataatttcctatttcaggcttataaagattatccctataaggtttctcttaagaactgtaatcttgttctaataactaatctatccccatggaaacttaattggactcgattaaaacatgtaaaaatactgtacttttcagaaaactgcctttcttaccagaaaaccgaaacttaacaaggatctccctgaagggggagttgaaaggtaaactatgggcccacggtgaggatttctgaaatcaaatctaatgtgtgaggtaccagactcttttcacaatcaaactcgaacggtgagaaacacatcacggggatctcccagttccctgagtaacaaatctcgcactgggtctggctggcaggaaggcaagtgagcaactcctgctacctcaatctgatgacagccacttgagttcacaaagcagatagcaacaagcaggagattcaatgacgggctcgataatcgctgttgatatggatatagtgtagtagtgcacccagggttctaagtgtacactggtc

SEQ ID NO: 372451 - DNA, 308 bp, Homo Sapiens
aaaagaaagaaagaaaaacaactaacttatacttaatggactccattagcagggcttcaagtatgttcttctgaacagagtttatttctggtatccaatagtaccaggcagctgaagaagatattcaatgccatcagcaagttcacaacctatctggagacatgcataatgcaaaaacgtactacttcaatacagttgatacaacaatggtagcgctaagtggtaagactctccaacctggggatttggaaaaaattcttgcaagtgaggcctgacactgagggttggatgattggttgcttttgaga

SEQ ID NO: 372452 - DNA, 549 bp, Homo Sapiens
  misc_feature (69)..(69): n is a, c, g, or t
cacttgcaacgcacgcccttcttttgtacttaagctggccaatccccttatacgcttgtagaagggccnagataatcactgtttgcgaatgcaaattcccagctttttctggttagcttcttcttttttatccccagggagatacaaacggagacttaaaagccaaactggcagcaatggtgagagcaggatccaaacagcggaagatagacccaaacaacattagtttgccaattctcacatccacgggcagagaggccaaatgatacccaagaggggtcaatctttcatctggagttaatgctcctaagtctcgtaatcgtatttttgaggcacgaagagaatcggtgtgtggaggttcaatgagccgagagaacacagactggagattatgagcactaaacatctctaaaattttaattcttagacacagctgttccaatggcactctttgtatttctggtagctgttgttttaaaagctggtgattgtagtgatggctagtgaataaatggaagcagaccccagacgcaaaccgcgcctgctcgg

SEQ ID NO: 372453 - DNA, 342 bp, Homo Sapiens
gtcatgccatctgtgttaacccccccacataagtctacatcaagtatttggttaaaagtgctcacagcagaatttactgaggatttaatggaagtgttctaaaactggattgttgtaatgcacaactgcacaagtgggtaaattcacaaagaaaaatgtacacataaaatgggtgaactttatggtatataaaaattacagtggtatatagaaattatatgaaaataaaactgctttaaaaagtgacctgaacaacatactatgtttccaaggcctgggatcgtggtaggtactcttatatgttgctgttctgaatagaagatagtatgaccctgaaaagta

SEQ ID NO: 372454 - DNA, 330 bp, Homo Sapiens
cagctcggtttcctctgcggctggaaggaagtcatccacccgtccctcatctgcggctggaaggaagttatccacccgtccctcatctgcggccggaaggagggcatccacccgttcctcatctgcgaccggaaggaatcatccacccgtccctcatctgcgtccggaaggaagtcatccacccgtccctcatctgcgtccggaaggaagacatccgcccatccctcatctgcgtccggaaggaagtcatccacccgttcctcatctgcgtctggagggaagtaatccgccctttccttatatgcgcccgaaggaagtcattcacccgtc

SEQ ID NO: 372455 - DNA, 168 bp, Homo Sapiens
acccggaatgcataaggttatgttgggaaactctctttgtattgatttatatgtggactgggttttagtttcgaagtgcacatagtcagtatctctctctcacttttctactgatgtgcccttagaaacgtgtgcaggggatgggttgacattcaacttgctgaatct

SEQ ID NO: 372456 - DNA, 158 bp, Homo Sapiens
tactcagtcagaagaaagcctactatgctcaaaactcttcagggcttcccaactcactcaggataaaatacatagtctttatagtaacttccgaattttctttctgtcgtcatcccttcaattagcccaaagtgaaaaaacgatcccctgtggaaata

SEQ ID NO: 372457 - DNA, 436 bp, Homo Sapiens
tacttccacagggaaaaacaactcctccaaggaactttgctgtaaacaggagcagagagagcaatgtagggtcaatagagaattcttgatatgtgaaatgtaatagtgtttgctgaagggaataagaattagaaaggaaaaattgatgacatagtccagtggagactaagctggagctccctctcttctgaaacaaagcacttcattcatttcattaaaagatgcagagcattgtgccagataccatggacaccaagatgactatgacacaccccttgctgtggagaagtgaagaagctcctgggctgtgatggtcgaagaagatggacttgcttggaagggaaactaaaatttattaagcagctactataaagcatctttacatctgttatttcatttaatccctgtaatatccctgggaaaagtacctgtggaa

SEQ ID NO: 372458 - DNA, 203 bp, Homo Sapiens
tacttccacagggtttgctaaataattatgaccagtattttactaccatcttcttccttggtgaactactaaaattagtaaatttatgttaaaaatgaagttctccctagaaatcaaaagtgcagtctaagcactgaaaatgttctatcaacacttgttaactgagaaccattgaaacatctaggaatttttaactctgcaag

SEQ ID NO: 372459 - DNA, 1052 bp, Homo Sapiens
  misc_feature (55)..(55): n is a, c, g, or t
  misc_feature (1014)..(1014): n is a, c, g, or t
  misc_feature (1033)..(1033): n is a, c, g, or t
ccatgacttggaaggaaatgcagttaaacgggactctggaatatggatcaatggntttgattatactggaatttctcacataacccctcacattcctgagatcaatgatagtatccgagctcactgtgaggagaatgcacctctttgtggttttccttggtatcttccagtgcacttcctgatcaggaaaaactggtaccttcctgccccagaagtttctcccaagaaatcctcctcatttccgactcatatccaaagaacagacaccttaggattctataaaattgacttttgaagcaacaggaccaagccatatgtccttctatgttcgagcccacaaagggtcaacactttctcagtggtctcttggcaatggcaccccagtcacaagtaaaggaggagactactttgtcttttactcccatggactccaggcctctgcatgacagttctggatagaagtgcaggtttcagaagaacatcctgaaggaatggtcaccgtggccattgctgcccactatctgtctggggaagacaagagatcccctcaactggatgctctgaaggaaaagttcccagattggacatttccctctgcctgggtgtgcacctacgatctctttgtattttaatcttgtggatgagctctaagtacatgcccagtggatactccatgtgacatggtttctccctatgttacgtggatgtttgtaacgtaagtcaatgaattttaatgatcatatgttcaaagagctttctgggttaacgcttttcagggccaagcactataagggtttagctgtggcgcagtgatgcatggcctgttgacacttgaaaatgccagtcttttggcacttcagcacatgtgggtactgccactaacacacacgtcattttatatgaccttaaggacaaagccaacaatccactttcaattagctggccccttttagggttcaagaaagatgtaacactgttcagaggcattgttaattgaggacaaaagtttgtttnccatttaaggccccaaaanccttttgttgtatttagtt

SEQ ID NO: 372460 - DNA, 137 bp, Homo Sapiens
caagtggtatatttgattgtaaagtaagaccattacccaagtcatatttaatagcagcataatgccttctcatgctgtcttattttctcttagtttcaaaattaccatagaagctgagggattcccctgtggaagta

SEQ ID NO: 372461 - DNA, 757 bp, Homo Sapiens
  misc_feature (352)..(352): n is a, c, g, or t
  misc_feature (579)..(579): n is a, c, g, or t
taggttgaatctgtgggttccgactcagagggccagctgtatgtggatttctttttctttggcaactgcatattttaactttctgatgctgatattcagaatttttgacatttaaaaattaccgttgttagtgggaactggagatgtttgaagaatatagaacagaagattattctgttgcatgcagactgagatagcagagtctatcagataccctggttctctgataaaagaagtatcttgatttctggagaactaggcagataaccccaccatgccacagagggtcttcatgtcaagttcatgggtccgcaacctcagaggagccttgggcgagtcctcaagacctctnaaaataaacttgctgtgctctcatttgtttcccacggtgaattagtccaaatctctacctctctccccctaccccctacttcatccttatcctttaggcctttccttctcaacagatgatgtcatctcttatttcactgagcaaactgggtatcccaggaggagactccatccacttcctgcccccttgccaaaaatgtatcttgatttttccttcctctttacttncctggctgcctgccttcaaggaagtcaggtccctccctttctccaggattaatttctccagctcattcttgattttgtccctgtctctccagggagcttgcctccatgattagcttcatcctttgttccacttatgacagtgtccgctgtgtcgacctctttcattcagcttataaag

SEQ ID NO: 372462 - DNA, 406 bp, Homo Sapiens
gtccttataggagggagggaagagactcggagtcagaggatgagacgtgatgatggaagcagaggttggaattgtgccatttctggaagggaacgcaagccaaggaatgtgggtggcctctagaaaaggtaagaaacagattgtcccctagagcctccagaaggaaggcagccctgctgacacctcgatttcagccccggaagacctgctgttcagaatgttgacatctagacgtataagataataaatgtgtgccattttaggccaggaaatttgtggtagtttgttacagcagcaataagaaacactagatcagcaaggataagaaacgcctggttaatcccagatggaaggagtagactgtagccaaaagcttgggtgacaggggccctctcggatgtttctg

SEQ ID NO: 372463 - DNA, 581 bp, Homo Sapiens
ttttccaagacaagccctgatgtcttcctgcccaaagtcctggacctcatgtcaatggcatttctatcaacagtgcttatacctccaagattctgcctccagagaaggagggaggcctgcctcggcagagtgggcaacaagaccgagtgtgctctgctaggctttgtcacagatctgaagcaggattatcaggctgtgcgtaatgaagtgcccgaggagaagctctacaaggtgtacacctttaactcagtgcgcaagtcaatgagcaccgtcatcaggaatcccaacggtggcttccgtatgtacagcaagggcgcctctgagatcatcttgcgcaagtgtaatcgaaacctggaccggaaaggggaagcagtgccattcaagaataaagacagagatgatatggtacgcactgtcatcgagcccaatggcctgtgatggactccggactatctgcatagcttaccgggacttcgatgacacagagccctcttgggacaatgagaatgagatcctcaccgaactgacctgtatcgcggtggtgggcattgaggaacctgtgcgccagaggtgcagatgta

SEQ ID NO: 372464 - DNA, 356 bp, Homo Sapiens
tacttccacaggggtttgaggtccattcaagcctggagaggttttaaccagcccacaaaaatctcaccagcctttctgtgtcaccgagattgatgcgtccgatgcattggaccatcagttcctttaaaaattcagttagttaggctgacacttttgcatacctgtagctgagttctccgagatacaaggtcctttgaggatttccttggacactgcatatgacatcgctaaaaatcaaatgcaaactaatgtccacagcttaagggtaagtctatgtgtggtttctgttaccttcctatcttctattccccaagctggttttatccctgccctgtggaaaaggggtaccgagctcg

SEQ ID NO: 372465 - DNA, 113 bp, Homo Sapiens
actttcacaggggaaaaaattcagatttcaccactcagagatgacactgctaacaggctgaagcatgtgttcccctctttctcatttgagtcatcccaggatgaggttatata

SEQ ID NO: 372466 - DNA, 130 bp, Homo Sapiens
tttttaaaattgaagcggggagctctcagcaacgtggaaaggaactggccagcaacttagcttaaaggatcatccgtaagagacacacaagtcattcagggtaaaatataatagtgtacattgttaaagt

SEQ ID NO: 372467 - DNA, 112 bp, Homo Sapiens
taccatgaaaaactatgtaatccatatgtaacgataacacgctacgcacctggatctgggcttctaaatcctattccccactaaaaggatctggagtcccctgtgaaaagta

SEQ ID NO: 372468 - DNA, 652 bp, Homo Sapiens
  misc_feature (170)..(193): n is a, c, g, or t
gagatccctactttccacagggattcttgtatagggggtacacttttgtaaaggatcatcaagtattttggaagactcattggctctgccagtggcttagataaataaatttgggcaagttattgatctctctcctcagagaaaaaaattgatgtgttttcttttatatnnnnnnnnnnnnnnnnnnnnnnnntgtgatctgtaactcattatgtttccttgctagaaagctcaaagatatgttatttgcctgtttttagttgctatccagttttcttacaataatctctctgcctcagtctcctcatcggattacttgtcacatgtgttaaatccttcttttaattgatggttctgttgtatatatcttttatatttatataggtagcctcaactctcctttttttggagagtggtaatagaaatataaataataaatagttgccctttggtttccccaacctgtggtgacaacaagataataaaacagatacttatcctatataaaacaggcataaaggctttgggacaatatgggaatcatgatgtgggtttggtggaaagcgagcaaagcaccttgtaaggatcttgtagtctgaagattaagtgtgctgggtaggtcatgtcctcccagacctgtgaaaagtaggtc

SEQ ID NO: 372469 - DNA, 425 bp, Homo Sapiens
gagcaatcagagcatgggagagactgaacagagttcaggagagcctttattaaggtgagcacctggctcagtaggactagcgtccaggaaagtctgagccccgaacaaagagagcggccaccttttaaacaatcagtggtgggaattacgtgatgcaggaagcgtacttacagaagcgagaagaaaggcagttgttactccatgtcttacatccttgggaatacatggttgtgtaatatatacgtatcaatcttatgaccttgcagctgtgctggggaggtaagcaagaattcacagagctctaaggaatgtgaaactggggagtatagatgaggctcatggagcacagaaggagcacaggctgttaatatccttctctaacttctactacggggtggggacggaggcgctaccttataactaag

SEQ ID NO: 372470 - DNA, 503 bp, Homo Sapiens
  misc_feature (245)..(255): n is a, c, g, or t
cgctggcgacttccccctttcaatggcctagatgcagagagagatcagatacaattttgggatggggaaattttcagttcttccactgtagctggctccatttgtgtgctgtggaaatacaatattttataaagctgtgtgagaatttttgtttgcatttgggcctatatataataatagaattaattaaaactattttaaaagacccaggaaaggtctttaatactttaaagtattttccatcnnnnnnnnnnnctaccccacatgagaacttactaaaatcaacgctaagctttcttttgggataaacaaggtaactccacttagtagatagtatgtccttttttcctttttctagtcacacctttataatgtgtatttattatttacaaaagtaaaccattaatattttagatataatgtatgtgtccattttgatagtcctgaattttgactttattaacccccttgtggaaagtatcctgtcgaaaagtacctgtgga

SEQ ID NO: 372471 - DNA, 944 bp, Homo Sapiens
acactcttcccataggtggtactttgacttgtcagggaagttctattgctctgataacttaaaacccaccccaccagaagctcaccaaaactagcagcctgtgaaaaatgatcaccattttcctagagctccgagaccactagtggtagtgccacagtaaccccaaaatgtcaatgaaaatatttccttccccagaaactgcttggtttcactcaggtcctgtccttatgggcctgtgtctggttgcagggcttgaagtatttcggaagctcagccgaggttgaaccctttcccctgggggttggtgatctttgttttggccatttccacctggtgaagattttcatagacaaatatgcttctggcatcctgtaattcattgtgccttatgatggacctctgattctataagcttccccctagctagggatgcacgggggtgataaagacatgactagatgtgaacctgacctgcagacagtccacctgaacgtccctggaaatgtctcccgaaaaggatgaaaagcctcctcctttagacaaggaagacagagtggagcaaatttctctacatagatcctcattcgaaaacaaacttacagaatgcagaatggctactgtgtgtcttgtgctatgcctaggtctctctctctctaagtggactctgaccctgtccaaaacattgtgcttttgcatgtagctgtgtcgcatttaggcccagctcctaagaaccgtttggaaataaatcacatagagcctttgattgtgaggcaggcttaaagtacattttgtttgatttgcagaggtcatggtgaggaatttatatgcatggtctgttgtggcagcagcgagatttccaaaaagatgaatgatgaaatgaaacagactgaagctatctcacaaatgttaaatggagaaataaaagttgttatagtgcattgcct

SEQ ID NO: 372472 - DNA, 145 bp, Homo Sapiens
ttacacagcctcatgctccaacagcagatgccaaaagaatgccaagaacagttatatctcagtgcgcacaaaggagctggctgcctatccactcgcaagaccagtgaggatgaaaaaatgcctactctgacaggagagcctcccc

SEQ ID NO: 372473 - DNA, 473 bp, Homo Sapiens
agggaatcttgcctcagcacagagtggttttctgtggatggtataaatcaagtaacctcctcactcccctctgtctcataatcatatttgcttttattgaaaacatttgtcactaacttaaatgtcttaaattatgcatatcttatcgcctgtctccttgtggttcactgtacctagaagtgtacttggaatatatcagtgattcaaatatttgttgaatgaaatagtgggtacagtttagcaaggttacaaatgtctcctttatcttgagcatagtaaagtggcaggactctgtagcactttaatataaagtattctgtgctctgaggtgatagacatataaaatgcaggaacagcaactgaaacaaaactataaaacaaatgttatcatgtaattgttttgtagacatttattttgttcaacactgttcctactttactgcttattgcacctttacttccctgtggaaaag

SEQ ID NO: 372474 - DNA, 601 bp, Homo Sapiens
gtgtggtactttccgggggattaccaatcagcaactagtgcaagtgtgtcttttgttgctgttttgtttttgagggctcagcactgcagagggagatggagaaagagtaacgggtagggattcggtccgctgtcaaggaacttccaatcaaagctaggaagtcagcacaggcacagtacctagtacacaggacaccgtaaagagttagtttaaaaaacactgttagcagaagagattacaaaatcatatgctaactttgtgctaataaccgtccagaatgtttctgtgctgatgctcacaaccagcatttcctcccagcaggcttagcacactgaaactaataaatagttcgtagaagcaaattttagaaattccatggctagcaatattcagaccaaatgaagtgtgaacgtctgtctgtgacatttgagttttcagccctcaaagggacgggggagaagtttgggtctgctcaaggtaggaggtgagaagagataccctcctattccataaagtcatgatccccaaaaggggtacacttaccagaagatatgttgatcaaaaaagaagaagaaaagccctagtgtgaggggctcaggag

SEQ ID NO: 372475 - DNA, 497 bp, Homo Sapiens
cacaggggacatatatttcagcatgaatttattttctaattggtttcaacataattggtttcctttgcaatccagtgtattttatctaatgaatttggagaacattagactgatggggcccatagacgtcaccatgctgtcaaagggagacagggcacaaaggttgagaattgctaaagcagagggtcagaaatgtcaaaagtattgtctaagttggtgaagtcaagattggaattcaggtctgggtaactgagtagaagagatgcagcaagtctaggaccaatgaagagtggcgaggaggataaagtctgagaggggttggactctggccaggctcgatggtcctcggaaatatgaccctggcagggaatgaattttaccaccatttaaatgatgtaagccacggaggtgtattctcaaggtagaatgagaatgaatgagctacgactacacatggtgacctggacgaatcttacaagcctcatgctgagaaaaag

SEQ ID NO: 372476 - DNA, 530 bp, Homo Sapiens
gaatcttcagaaaatgcttaaaaattcaatcacaatcagccgcagccacttcagtggatctccatggtctcccctaggtagcatctcctcaattctacaaacacaacactaagtatcctgaaaacagaattcagacctacgcacatgaatcgaaggtgctgtacagtatctcacaatggaagagaaggtaggtcttctttgccttcacccactaaaaatgacaagttaatttgccatccaccgacctctttccttcgtgaaatgtgtaactgcttgtctgaagcataccagactcatccggcaaaatgtggcaaatgggagagcagagcacagggctcagcttttcagtgcctgggtaagaccaaagcctggctggttgtttgatgtgtcctagtgcagtcaagtttcttacccaaccagggacctttaacaaagtgctgaagaaagcagccattctactagcacactagcactgtaaaaccagcccaaagggagggaaagaaaacactttcatatgctaacctctccct

SEQ ID NO: 372477 - DNA, 479 bp, Homo Sapiens
tgatagattggtaaacagtgaatagcttaaggaatttaagaaggatgaatctcagatcttggtgagcaaaatgaggacaaacaataaatcttttcctcaagagtatttggttgcgtatgctaagtctgaatctcttactgcaagtaaactgtgtgatatctattcttacagacaaagtaaatacagctcttcaaggaacaacctgcagtcatcagggacaggagcgtctccatgaaggaaacctcacaggcctttctgctgaaaaccttgcaactccttggagagggcagccctggcagaaactcagacaaagcaaaccctacaggggagtgaattgattataattttagcacagatttcacagcccaggatcccccactgtttgttgcaggataggaagtccagactgttttttatatctgcctattcccaggttatcaaaatgattcattatggccaattcctccctgtgaaaagta

SEQ ID NO: 372478 - DNA, 380 bp, Homo Sapiens
ctgtatctctttagattatttcagccacacctgtgactttaattatcatttgaatttaggtaactcctaaatatgtatcttcaacccgatctcttccgagcccccgatccatagatccaactgcatacttaacatctccacttatataccttaaaggcatcaccatttcaacatatccaaaaatttaaatttatgacttctgcaccctgcctctaccaccattactaacccctccctgcatgcattctccagaaaaccaactacaacatccaacctgctcctgtgcttctagttttctcttttgagtgaatacaacccacattcataagcccagcaagttacaggcttaaaagtcatcctcaacgtcctgtggaaaagta

SEQ ID NO: 372479 - DNA, 483 bp, Homo Sapiens
aggttgagaagtaatgtgaacaaaacagacatatttatttctgctcatagcttgacatttagtggaagatatggaaaaaaataaacaagtccacgaaataattgcaaacttccataagtgctatgaaggaagcagagtgttgagacttacagaatttagacaaggcaaggttcttctctgctttaaacctcccagagctccccatgggctgggtaatgcagttccaagtacttagcatggcattcaaggctctttaaaacatcacatcttgcctgatgttcccggccactgatgctctcaatactccaggccacaactaattactggccactccctggacatgtgtgtagtgccaaggagctcagatattgacctgtcagtgataggagtggttctaagcatgatggtgacacaatctcatccaatgtacactgtcgatggtaattctgcagagtgtgtaagagggcctggtcagggagagac

SEQ ID NO: 372480 - DNA, 435 bp, Homo Sapiens
aagtatattatatcagtatgttaggcaagagtcctagggaatattttccctattatgagacagagctgatacgtggagccttgaatttcatgaggtgccttcagccatcctcgctgatgttcgaagatctgatcatgtcaagtttaatcatagatgacgttcttgaagatcacctttcccccttcatgtgaattttatagtcagctactaaaatcaagtgtggaaggcaaggggtaggtgatcagggtgatcaagtcaaatgatgcaggcaagctaagagtatataccacattgccaagcagagcggggttccaccaagtgaagcagaatagtgggtcacccacccaccctctcagaaccacctattggagatcccggtaactgcagtaagtcgtgatagcacgtttgtcttggagtttaactctgcggaggtag

SEQ ID NO: 372481 - DNA, 630 bp, Homo Sapiens
cttggagatattgctgttacttctctcaggaggagtgggctctcattgatgaagctcaaaggtgcctgtatcatgatgtgatgctgagaacttttcgcttatggcctcagtaggtaagacctcttaaaaccacaccatcaacctctgctggactctgctcttcccctttttccaggagtttccggtctttcccagagttggacatgggcccttcttcgttccttggttcctgacctgtggaagacataggcgttgtggttgccaggcctgggttttttctgccccaacatctactgtcctgaagccttttagttaagagtttgggttcagactcttgtaacttgcccaaccgacaccacttggttttgccactccttgctaaggtgactgttcagttctgtggtggacctgtgttacaggttctccccctgcctttagtagacgtgtctttagacctgcctttctcaggaattacaggtacttacatggttgctatttgtagggaaccctagactatgacagcaagaccccctcccaagggttttttcgtaataaatttccctcctgtagtctgtcatgggttggcgcacctggccagtgttgtgacccacctcctgtgaaaagtacgga

SEQ ID NO: 372482 - DNA, 736 bp, Homo Sapiens
tcagcggtacctactttcacaggcttaaatatctaactgatatattcagtgtttctctagttggttgtgaatgtgttgggatttggacaacctcattcattaccccacccggctgtacacctgattcgcttgcgtgtcctatgcatgaagagcactggtatgaccgagtccggagggcccatttcttaaatcagtgacggatttaggaaggagcctgaccagtgaaagttggaagagagatggtattcctgggagggtttcttaggtctcttgggttgtagagagtccccttcctgcccgtcagctttggtatgtgcaggactaggcccagcctgcaagctagaagcctgacaggaaatagcaaatatgccgaggatggctgagcaaaggtttgtgaaaagagtctggaactttgatgatgttgagctgttgaataagttaactcctggagctgcgctagccgtggacttctggttatgtgagagaataaaccccagtttttcattttaggtcagtatttgagttggatcttttgcaaacttgcagccacaaagtatgctaacctggctggtctctaaataacaaatttccacagtatccaacaatgtcaagtcgccaagcatttccaccttctccctggagacacccctcctggctttcgggatgtcctgaagaactgctgctcctgtcaccatcagtcatcgtctgccttcccttagtttctctcctatcaaaa

SEQ ID NO: 372483 - DNA, 225 bp, Homo Sapiens
  misc_feature (190)..(190): n is a, c, g, or t
cctgcttactatcaaaacaccatgacacatgacttctctggcggggtgttggccaagacaaactgaactatagaagatccttgacttgccaacgttcaaatgatgaactttcaaaaatagcgaaactggctgcagagcaaaagcttttcagctctgcacaacaccaacagatggcgctaagtgtcacccnttgtggagagcagagggacctcggaagtatgtagt

SEQ ID NO: 372484 - DNA, 466 bp, Homo Sapiens
  misc_feature (202)..(293): n is a, c, g, or t
atcaaaatgaaagctgacagtccttacagatttgtccctgaaggagtatgatgtcaattccactgtacttgattgatctaagcagtcaaggggaaggaagaagacctacctctcaatgggaagaataacatagagctacagccatctctcatcaaccacaatgtccatttagatgaagctttttcagttctttttttaaaannnnnnnnnnnnnnnnnnnnnnnnnnnnnnnnnnnnnnnnnnnnnnnnnnnnnnnnnnnnnnnnnnnnnnnnnnnnnnnnnnnnnnnnnnnngttaaaatcctggatagtcttactaatgtttgtctgactgatttatcagtttatacgagagctgagttaaaatttcccatactatattggtgggtttattaatatcttttgtaattttgtcaatttttaagctaagaagacaggtttatactcatttaaaaattttaaaattt

SEQ ID NO: 372485 - DNA, 267 bp, Homo Sapiens
ttctgggattacaggggtgagccactgtgccaggctcaattttggtttttaatgataatagctaattctgatgagaatccttgaagcaaaactctcacaccttgctagtgttccagcatgtataatcccctgttatagcctgaatgtgtcccccagaatatgtgttggatacttaatccccagtgtaacagtgttgggagatggtgtctaatgggaggtgtttagataatgagagctctaccctcaaaagtggattaacactgcaat

SEQ ID NO: 372486 - DNA, 480 bp, Homo Sapiens
  misc_feature (346)..(405): n is a, c, g, or t
tacttttccacagagtgctgcagttgcacagtgaaggacactgaagcagcgtggggaagctcctgaattttctggagctgagcgcaggagctgagacctgctaagcaaggaaaggcagtggactaaggctcacctccggccccagtgcctcctcctcccaactggtgctccagaacaccacatcacaatgcacatgtggatatattcctcgcgagttgctctgaaatcacttttcactctaagccatcttggttactaggctgtaagctctttgagagccccccaatcctgtgtgctttgccacactctctcttgtatcactcttccctactcccctaccccacgnnnnnnnnnnnnnnnnnnnnnnnnnnnnnnnnnnnnnnnnnnnnnnnnnnnnnnnnnnnntgtgagctctgcattgcccactgaatggtgagaaattcagaaggatgttgcattccctttgttttccctccgtgt

SEQ ID NO: 372487 - DNA, 190 bp, Homo Sapiens
agcaaaattagtaggccactgaagcagagatgtcaaactggcgggggtaagcctcaaaacaggacccatccgaatgcaaagggaatggtgctattgtaggggtggctgggaagagccgagagactcgccacggaattggtgtgtgggtgaggagaggctgttgaaggtcgggggtgccctgtgaaaagta

SEQ ID NO: 372488 - DNA, 261 bp, Homo Sapiens
atattagacatccagtgtgtgattgaagtatagaaatactaacattatccttttattaattcaacaagggtcactaagtacatgttatatgcataatgtgaatgtagaaaaagaggagttctcataaacatgttcaaagcgaggttaaactttaagcatgaagccaggcccacgtggctcacacctgtaatcccagcactttaggaggccaggtggccggatcacttgcaagtcacggggtttgagatcagcctgcaacat

SEQ ID NO: 372489 - DNA, 559 bp, Homo Sapiens
ccagacattggaaggaaaagttcactggagcaatgtaaatgaatctgagccttcttttgaagcaaccagaagtaggaacaggtactctgtggcatatgcagctcaaaagccttggctattaaatgctacagtagaagaaaatattacttttggaagtccttttaacaaacagaggtacaaagctgtcacagatgcctgttctcttcagccagatattgacttattaccatttggagatcaaactgaaattggagagaggggcatcaacctgagtgggggacagaggcagagaatctgtgtggcacgagcgctgtatcaaaacaccaacattgtctttttggatgatccattctcagccctggacattcacttgagtgatcatttaatgcaggaggggattttgaaattcctgcaagatgacaaaaggacactcgttcttgtgactcacaaattacagtatctgacgcatgctgactcgatcatagccatgaaagatggaagtgtcctaagagaaggaactttgaaggacattcaaaccaaagatgttgagctttatgaa

SEQ ID NO: 372490 - DNA, 136 bp, Homo Sapiens
aaagaaaaaaagtgaaaatatatagtgcccaattcccaaggtacttccttcctagagcttcagtgtgtttcttgtgagaagtaatttgataacactgggtattttattatgtgttttgtataaatccctaatattt

SEQ ID NO: 372491 - DNA, 426 bp, Homo Sapiens
  misc_feature (164)..(219): n is a, c, g, or t
tactattccacatggaaaaagtgtagaatagaggttaccagtgactggctgactggtggatgtaggggagttactggtattagtggatacaggatttcgagtctcgaattgataatcatgttctgaagttgggcacgtgatctcatagcaaatgtacttcgaannnnnnnnnnnnnnnnnnnnnnnnnnnnnnnnnnnnnnnnnnnnnnnnnnnnnnnncttttaaaaaggaaggggtttagaccaaattatgttatggcctccttgctattcatgaagactagtgaagggggtgaggagagtattgtcccccaccccagggccagggcactgaaaggctgggctggggacactgattgtgatcagatcacttcccatttgtgtagaaccttacactttcccaaggagactcgcaggcacagtgtt

SEQ ID NO: 372492 - DNA, 316 bp, Homo Sapiens
cttatgatgacagagtctccttacagaatatgctaaaacttttggttatacatttcgtctccaagactatgatgtcagttccatttcggctttaactcagaaactctgccatgtcgtgaaggttgccgatatagaatctggcagacagattcagctgtataaccaaaagttttagcatattctgtaaggagatctgtcatcatagggcagttatctttttgggaccgaaggagtttaacaaactgcccagctagagctttgaaccgctccacctcaatcagagtaagaatcttttcttcaccacattccaatgcta

SEQ ID NO: 372493 - DNA, 396 bp, Homo Sapiens
caccttttcaaggtttgggtgggagaagagtgagaaacagtgaaagggcaatctgaagccacatcaggcaaggtcttggttacaagtcaaggactttgtatactatttggtcaagaactggaaggcagtcaaagtttttgagtaggagaggtgcataattatagcaaggctttaagaagactaagtgggcagcagggtgcaaaatatataatctaaggagaatttgggaaggagatagttcagttagaggctcctgtatagattggaagaggaagtaacattaattcatgtcatcgcagtgggactggaaggaaaatgacatttgtatagtgctttagagtttacaaagttcttgttgcattaattacttcatttgatatggcactctggaaagtg

SEQ ID NO: 372494 - DNA, 706 bp, Homo Sapiens
caggttacttccacaggggctagcagcaagtctgctgaaggagatgccccaccctgctcttttcagctgccttagagcctcaagcctgagcctctcctgctgttgggaggaacctggcaatgccatctttgtcttcccaatgccggtcatcccaagccactcagagagataaagagccattgcagtccctcttagggctgtcttggagcagaaagactggcacatgatagcatggtgttggcagtagtctggccttgggtctccccagagctggtggtttatcgcttattagttactgtgatacaatttgaggttcagaaaagacagtcactgtacccttaacatctcttcgaattctaagttgagtgaaaacccagaaaaaaaataggctgttcttctctaagcgcttctaaataagcagcagccaggccagggactaaaatacatcgccctgtagagccactggacactgggatgcaggtcttttgtgtctttcctgctcagtaatagatgtggaccttagtttgtaattttaggtcggctttgttttttaataacctattttttgctaaaatccatggcattcgtttattaaagaatagtatcacacagtcacgaagtctcagagggtaattccagtgtttctgaaggctaaaactgtaattgacagtcatggtcttgagttgaaggtttggatgtcagtacg

SEQ ID NO: 372495 - DNA, 326 bp, Homo Sapiens
cgcgtagcagcacctccaataccgggtccatccgcagtttacagacaggtgtgggagagctgcatggggaaaccagattctggcatggaaaggactactgcacatttcgtcttacaaagactgggttcaactctgacaaaccttttgctagataatcattgacaggtactccacgccccggatgccctggcatgacaattgcctctgcagtctacgggagggcggctcgtgatgtggcacgtcacttcatccagcgctggaacttcacaaaaattatgaaatcaaaatatcggtccctttcttatccttttctgcttccggacgaa

SEQ ID NO: 372496 - DNA, 191 bp, Homo Sapiens
cataaagtatcagcctcagaatagttttattttataacagcacagatggactaagacatctcctttgagtgtgctcagaggtatgttcaaatctctcaagatcaaaacactcaagtcacatagtggcagggcgtctcttccatttctgctaatagtgatgtctcccctggaaaaagcagcttgtttccggt

SEQ ID NO: 372497 - DNA, 365 bp, Homo Sapiens
  misc_feature (240)..(259): n is a, c, g, or t
cggaagcagctgtgtacgatatataaatgatgcaatacagaaattattgtggcatggtatacagggagaaatgaaagcattgaagaaggcaaagaagtcttcctcgggaagtcatggcttcaaagagaaaagtaggctgtgtcttaaaggataagtatgactttgccaagctaatttagggaactttgtattctaggaagagggaacagaatgtgcaaagcctcgaaggtgcactgtttnnnnnnnnnnnnnnnnnnnngggattctttagtatattttgactgcatgttgaggagtgatgaggaatagagttagacaggtagtcaggatactgtaaggttaaaacctgagctctgtggttgact

SEQ ID NO: 372498 - DNA, 292 bp, Homo Sapiens
gagggtatgtcgttgggaacacacatgacctttcaggaggtaattgacccgcactgttggtaggagcatcttatgtagccatctgaagacagattggaacctccttactcagaagggttcgattgtttggccaaggaatgtcaactgttgctgcagaataagctgggtggttacctgctgaccccttttcattcttttctgctttattagaaccttgatatgagaataagttcagcaagagttggagaggagagtgaaatcattcccaggcttcgtgtggaggtctgtgctt

SEQ ID NO: 372499 - DNA, 645 bp, Homo Sapiens
accggaagcatgagaaaaagctaaatttagtttaactctgataggcatcatctccaattcagttgttcttaactgaatagctctatatgctcttcattctaagagctttattaacattctttaggagaatgaataggtaaccacatacacatacatatctaaatgtgaagaggaaggtaaaggtaactctactgatatccagaatcataaaacccattattgaggtggattttcaatagctacaattacagttatgtatattaaataactgtcaatagaacaaagcaggaacaggtgcacaaatccatgtagaaacacagcatttatgaccagactattcctaaatcactcagaagtaaacatcttttctggccatctccttttttacaagttaaggtttccactatgtctcctaacaaagtaaattggactttagttatttaacgttaacaacagcatacaattaatgagtatagccagatcataattacaggaaagaattataaggtaaaaaatttcttttacatatttcccaggaccttctctagctttcatgtcactgtgcaaaaatcaaattacttttacttctttgtttaatgaatgaaaaaagtatattttagatgatcatatgctgctccccagtca

SEQ ID NO: 372500 - DNA, 155 bp, Homo Sapiens
agtcgacggaagcatacatgagtatagaagattgggtcacaagtaggaggtgaagggagataaatattgaggaaagagagctagtataatgaatagagggacgaaagcagtggttaccaaattttaatgcatatcacgatcatcaagggaacaga

SEQ ID NO: 372501 - DNA, 180 bp, Homo Sapiens
gtatctagtaattaaagaattctgagactagatggtggatggggtgattcaggtagacacagaagtcattcacctgacagctaaacttgaatggaacaatctattagttaattccataatcattgaaaaatgtagagaagtgataacgagactgataaatggagtatcccacgatgagct

SEQ ID NO: 372502 - DNA, 149 bp, Homo Sapiens
aagtttctaaaacctaggaaaacttaattaccataatatttagaggttaatgccaacattataataggtctcagattagcagcttaaaaagcaaataataccataatctaccatagctatatttatatgatttaagaaggatcctctag

SEQ ID NO: 372503 - DNA, 606 bp, Homo Sapiens
  misc_feature (520)..(520): n is a, c, g, or t
tttatactatttacccctaacctctctcaagtttgagtttgccttcgagctactgctgtttatctccctctcttccctgctaagctacttgaagagccgcctatattcacttctcccagagtctgcttctgtctcagcccagtcccttggactctgaatttcatcccctctactgtcctgaaacatccttccttcaagggtcaggcacatcttctaagttgcctcttctcaactcccatcctgtgtgaccactttctagaataagacaatattgactaaccccttctcatctgcacccctctcaacttggcttccaaggtggcacattgtcctggctctcctctgcctcttccacggttccttctgacttcgcatcctctggtggtgagctgctggctctgctcccccagcctgcactctcagatctttgcctttcttcctgcatccgttgtgtctgcacagatctcccacaggcatctcaagctcatctccctcctcattgccccattcctgtagcacncactgcatccccactggcttggtttggaccatatcaacgccacctggacgatgtattctaactgatctttctgcttccgtcttaag

SEQ ID NO: 372504 - DNA, 458 bp, Homo Sapiens
tgtaccggaagcatgaggaggagtgttggccaaataaagatagaaaaaagcacaagggcgcacaggtgccaagaagatgaagtgacccaggaactgaagggggtccgtggctgatgggtagtgagaaagggtaaagcagtggagtgtgagagtaagcagtggtcagctggggtcagtggcctagatttcattctgaatgcagcgggaagcctgacatgacccttgtacctccttcaggccatggaaaatgtttctaagctcctacttaaagcttttcaagcatcagagaatcctcttaaaccagagagggatatgatgttgacagagcaggtttactccaaaagtcggcttgaggtcaagtcatttaatcttcttactctatatgggatttggaacagaaagggaagaagcagagtcctcccatccatctgggaattcacccagcctgcttccggtcg

SEQ ID NO: 372505 - DNA, 240 bp, Homo Sapiens
gcttcggtaaccccaggaaattgtagtacagtgcagtatgaggtgtttaaagcctataaactgttatttaactaatactgttttctaaaatactttccatgatctaagaaaataatttccagtttcttgggctatgtattaactgggcattctaaaacgtcacttctcatcactcccatgatagtacaatttcctgcttccctcctaatcgctagtgcttccgtcagggatcctctaagt

SEQ ID NO: 372506 - DNA, 595 bp, Homo Sapiens
  misc_feature (447)..(447): n is a, c, g, or t
  misc_feature (551)..(551): n is a, c, g, or t
  misc_feature (585)..(585): n is a, c, g, or t
tattgtattcattctcaggtgggctgaataaatctgttcacagcaggtgcctctatctgaccttaccttggcccacacaggctttttccagaagagcacaaagggttgggtggcataagagctcatagaatattcatccagatgccttcaagggaaataggaaaatatacagtgaataatactgatgttatttatgtgcttcaagatcagtccccctcgacaggcattagtattctagttccttcagccccaggcatttcttggtaagaaatattcagtgatccctaagaacacgtgaggtcctccccacagctttatggagatacagtcaaggcacggtagaaggcagctgcaaagttcatggtgccagagaaatgggagaggccttcccacaacctcaggctctgagaagagcaggcagctaggacagggcaggcagacctgggnaacaccaaaggaagaggcagccatggtgttagatccacctggagggcctttcctgagagcggacagcccggccccgccccagggagttttccctttgtattttnttacggacagggacgaaacctttttagggttttnttttcaaggt

SEQ ID NO: 372507 - DNA, 415 bp, Homo Sapiens
agcgggtgtctagaggatcccgtcgacggaagcagtatggtgacagttctgatgaaaatgacaacgcacaaaagtcacggttacatctctcaccagctcagtccaggaatcttcttccccgggtacagtaattgcacttttcaacgtgcatgacagtgactcaggaggaaatggcctagctcacatgttctattccagataatctgccattcacacttgaaaagacctatggaaattattatcggttgttgacacacagaacactggacagggaagaagtctcagaatataacatcactgtaactgccactgaccagggaactcctccactgtctacagaaactcgtatttcactgcaagtgatggacatcaatgacaacccacccactttccctcatgcttcctactctgcttc

SEQ ID NO: 372508 - DNA, 340 bp, Homo Sapiens
gtcgacctagagttacgttcgacggaagcagctggagggcaggacaaggctggcaaagaaaagggcgtcttagatctgtcgtatgggccaggaccaagcctccgccctcagaatgtgacaagctggagggagggcggtgggcgacacataatttctgccacgtctctgagcacctccccaactgagctgggcagcaggaactcgagtacgggagatggagccccctcctcggcatgtaccagcgattctaaggacccctctctccgcccggctcagcctgtccgaaaaggggcttcacagttcatgggaaatgtataccacccacctacataccatgaca

SEQ ID NO: 372509 - DNA, 481 bp, Homo Sapiens
tgtctcagtttcgggacgggatgggcaaacaagcaggatcagcaagacccaaagagttccagtgcgacggcctctcagccgccggagtcgctgccgcagccgggtttgcagaaatctgtctccaatttgcagaaaccgacacagtcaatcagtcaggagaatacaaattcagtgccaggtggaccaaagtcatgggcacagctgaatggaaagccagtaggacacgaaggtggtttaaggggctcaagccgactgttatccttctctcccgaggaatttccgacgctgaaagcagctggagggcaggacaaggctggcaaagaaaagggcgtcttagatctgtcgtatgggccaggaccaagcctccgccctcagaatgtgacaagctggagggagggcggtgggcgacacataatttctgccacgtctctgagcacctccccaactgagctgggcagcaggaactcgagtacgggagatg

SEQ ID NO: 372510 - DNA, 947 bp, Homo Sapiens
acgatgagtatcagttcatactcagagaggtacttacggtcattgcagagtggtccactgaaggaagtcgtactacagtcacagctgaagccatcccattgttgcaagcacacaccttgattggaacatgagtcctcttggcaggttgtgctgggcccttcacatcctctctcgatcagtccgttgcagaaaagagcatcggagatgaggtcccggaagccgtcccatttaaatcaactgaatgccaggcagccttgaaagccttctttggcatgtacaagttttagtaaggatttgtatgtttctttagctactcctcctatatataagtcactcttaaggtctaagttcctggctccggcggtgatttgcgttgtgatttttgtgtcaatctttacagtgtggaggttgctggtgtcccttgatatcatcacgttgtgccactgattgtcattgagaggtttatttgagcttcctttgatgaggttagcaccatttcccaaatcaaacacgtaatgtaagtaccctttaactaattcaacacacaataaagtcatttccatcccccactgttatatagaattaatccatctagggatgttgtcttgaactggaaaaaaagatgcatagaagtgtaggcttgcaaggtagctaaggcaacatagctcgatttggtcttgaaggtgacaggatctgctatgatgttcctgaagccaaatctggcattaagctcacagtaatctatgtcgccatttttacacaggtcaatgtatgccattccattaaatgtcaagctctgcaggtgtccaatgaagttggaggggacagaagaaagataccgtcgttctgtgatgatgccagtctctatgttatggaactccagcctagtatgatcacctgccatttgacctgtcatggcctgttggtcatgcactgttaactttaaa

SEQ ID NO: 372511 - DNA, 688 bp, Homo Sapiens
agaggtgacggaaccggggctggtagcatagtttgagttgatgatggagccaacacaggggttggagctggtaccggtgaagctgaggctaaagaggttcctggagtagacgatggagccataactggaaccggagtctgtgatgaagccaggacaggagcagcacctggcgatggtgccaggaccggaagaggagccagaggaggagctggagaaggagccagaattgctgtctgtggagccgccataggagccagaggggtggctagagcctgagatgcagaagatgctggagccagaagggaagcctgagctggagctggatttggtgctgacggaaaaggactggccagagccgaagctggcaccaggacaggtgagcatgctggggccacggttgagttcaaccctggaacatgtgaagaggtgggagccaacaacagagggtgaccaggtgtctgagatgaagacagggatggagctgtggccaaacctagagtcaaggctgatgctgacggggaagcaccagatggtgccaaggagggaggtccaggagccgctgggacaacaggtgccaatggtggagtcacactggtcaacagagctgggcccgaagcagaaacagtaaagggggctgagatggggatggtgagtggagccgaggcagccgcggaaagttttcggaatt

SEQ ID NO: 372512 - DNA, 313 bp, Homo Sapiens
aattattaacgtaggaaacatgtatctagggggatggcaggaaaggttattgcgatatggctaaagtaagaatgaatgtagccttagaaaagtaagggcacgaaggtataagtgagttaggagggagaaagctagtggagtaggtgtaggactatggggcagctgatagaaaaccacaaggaggagagggcgtgctgtctcaaataccatagaatgctcacatgcttcaggacacacctgctcccctctctgggaagttgtaatgaccatgatgaagtttgtgaaagattcacaaacgctctattagggtaca

SEQ ID NO: 372513 - DNA, 531 bp, Homo Sapiens
  misc_feature (345)..(357): n is a, c, g, or t
cggatctcgtcgaccggaagcagctgtggcttggaggtaggggatccctgctatatgggccagaaatgtgaaagaggtgttcagtggggagtatacttctaacttgaatacattcttttcagcatttctacttattttatcaaaaggtaattttttttctcaggaaataaagcaataggcaattgttttttatagtttttctgtacagagccttattcaattatactaccaatgtaatcctattgcactgctcaacagaatcagaataagaagaacttccaagtacaatttgaaaataaaagtatctttcaagaatttgcactgtactgcattatttgatttggnnnnnnnnnnnnntcagaccacttccatttcttgatgaaacaactaactcatttgctaactttcaactggctctcttcagtggctttgagaatgtggcacttccatcatacattgcctgtagtaccaccctagaacttttttaattgaaaatattttaaaaatacttgattcgtatgcttccgtcga

SEQ ID NO: 372514 - DNA, 177 bp, Homo Sapiens
cggctgagaccctgagggtagagtacaaaagagagaaattttaaagcttggtgtccaggcgagacaacgcatgttggcaggttccgtgatgccccgagctgcaaaaccagcaagtttttattatggatttcaaaaggggaggggagtacgaatagggtgtggctcacagagatcaca

SEQ ID NO: 372515 - DNA, 666 bp, Homo Sapiens
  misc_feature (117)..(117): n is a, c, g, or t
  misc_feature (372)..(422): n is a, c, g, or t
  misc_feature (424)..(425): n is a, c, g, or t
ccgtcggccggaacaggatgacagtacggggccaggcccagaaagaacaacatggcagccaagcgctcccgcggaccgccccggagggctgaaagagaaccagatcgccatccggcnctcgttcctggagaaggagaactcggccctccgccaggaggtggctgacttgaggaaggagctggggccaaaatggccaagaacatacttgccaagtatgaggccaggcacgggcccctgtaggatggcatttttgcaggctggctttggaatagatggacagtttgtttcctgtctgatagcaccacacgcaaaccaacctttctgacatcagcactttaccagaggcataaacacaactgactcccattttgnnnnnnnnnnnnnnnnnnnnnnnnnnnnnnnnnnnnnnnnnnnnnnnnnnngnntcagcggtatgtgcgtgtgcgtggtccctttgctctgcccattttaaaggtagcccgtctgcatcgtcttttagttccaacaaagaaaggtgccatgtctttactagactgaggagccctctcgcgggtctcccatcccctccctccttcactcctgcctcctcagctttgcttcatgttcgagcttacctactcttccaggactctctgcttggattcactaaaaagggccctggtaaaa

SEQ ID NO: 372516 - DNA, 202 bp, Homo Sapiens
aaaaaaatctcactgttgaaataccagctcaactgacttgagaaacttgaagcctcagcaatggaaaatgccttgaatcaatataatttacatagtagaatgccccaaagactcaggaactgatggcacaagaaactggaagttggtgtaaaatgaagctaaataagatgcttccgtcgaaaggatcctgtagagtcaccca

SEQ ID NO: 372517 - DNA, 341 bp, Homo Sapiens
tcgaccggaagcaggagagacaggaggcaggcataccggttttgacgctattgaggtaatctaggctaaagagaactgtgacctggtagaggagatatgagaagcacttgggaggtagatttgagaaaacttggccttaggtgtggatgattaagcagaacggagctccattcactgagatgagaacacagggaggcatgggtttggagggaaggtccagtaggctgctggatatgtgggtctgtagctcaggagtgatgaagctggaaagatttgaaagtgtgagcacagaggtaattgaagtctggggatggttcttggctcattgtttattggttgcg

SEQ ID NO: 372518 - DNA, 472 bp, Homo Sapiens
gcgttcgaccggtagcagggaaggccaagacagccaccagccttacagcagttttaaccagaaatggatgcagactctggaccccatcacaggagtgcaggcctaggactgtctccaggtgatgcatagctcccttgtcaggttagtgggtgcagggattgtgacgtctgcaggggcgtggaaggctgagcaaggggagcagcttactgggctggaccagaaatactgaacatcttttccatcagtgaaatccgcttctgggtcagaaaaaagtgcgagttctagaggggcagggcctaggaggaggtcaggtcctgagccttcctggtttgaccacctcccaccccctgtgtttctgggtctgtcctcacttccacccagcggatcctgagtctcatcctttgagtccctgtgagtgtgttgtgtgcagtgggccgggctgcttcataacactgcaagttacatgcttccg

SEQ ID NO: 372519 - DNA, 233 bp, Homo Sapiens
tatcgacggaagcaggaactgagagcgtagccactgacatttgtggtggcagattaagctgtgagcagactctaaagtaatttcattctcccccatccccaaaatacactattctgactattaagactgacttgcattttatgcatgccagtacactatccatttaggatcacttatttcagtgggagacagggagggtagtcttctgagttaggaagctgtaacagattatt

SEQ ID NO: 372520 - DNA, 152 bp, Homo Sapiens
ttgatttatgtagttgcctaccctaccccgtggcaaccccaaaagactagagacacaatcactttcaactctcttgtgtttgtgtagatgactaggttcttaaatatgaacttcggatattttctaaccaattactatgccataacgtaact

SEQ ID NO: 372521 - DNA, 316 bp, Homo Sapiens
ttgaccggaagcagaatactggcggaaataaaactgcctctaattgaggtatcttcccaaggaatatacaccaacactgcaacactcaaattgccatctgaatcttatcactgaattgtgcatgtgcacctacagatcaggtatagctgagccaactcccattttcctaccaggcaattatttgaaatatgccggcaatggaatatataacaaattcctcagaccattatgcctaattttaaagaataaatgaatttagcaataattatcaatattaatattattatttaataagtttaaaggcttccgtcgacgg

SEQ ID NO: 372522 - DNA, 235 bp, Homo Sapiens
tgacctagaggacccgtcgaccggaagcacttctttctgcaaatgaattcccggtccccacccatgaagagagaggacttggtatctgagcgtaataaacagcttcaagtttgggttgagtttcagcttgctatttcagaagcagatggtttaaatgctcatatggccagtttaaatctcacaaaaacaaaacaaatttttgttaggaaacttgaccttaaaattaaaaaccatc

SEQ ID NO: 372523 - DNA, 684 bp, Homo Sapiens
  misc_feature (116)..(291): n is a, c, g, or t
  misc_feature (586)..(586): n is a, c, g, or t
tcgctctacaggatcccgtcgacggaagcagtggaaagaactatgaaactactgaaagagagcaacttcttgtagaggtagaatagtgcttaagaacaaggtctctggacatctgnnnnnnnnnnnnnnnnnnnnnnnnnnnnnnnnnnnnnnnnnnnnnnnnnnnnnnnnnnnnnnnnnnnnnnnnnnnnnnnnnnnnnnnnnnnnnnnnnnnnnnnnnnnnnnnnnnnnnnnnnnnnnnnnnnnnnnnnnnnnnnnnnnnnnnnnnnnnnnnnnnnnnnnnnnnnnnnncctgtcacctgattggtggtatataagatttgctaaataaatttttttaaaaattctaaaagccatatgaaaaatatggtcgtccaaatagaaggaatagattccaatggtaacaaggttacaggcttaaaaataaagaatgcgatgatttccacgtgataggctaatgtcaaagtttaaggacattctgtgtttggagggtggggggatgggcaggtagtggtatttcttctaacaataaaaaagagaggcaaatataacctccaggaaaaacaccccccatatctctccccgncaagaaaactctttacaagtaaggcagtatctgaacatagaacaaactaaaatatgatgagattaccataaatgctagattatgtgctcccggtcggg

SEQ ID NO: 372524 - DNA, 484 bp, Homo Sapiens
aagcaggaggcggggtggtaacctgggtctgcagggtggggacaagactctgagatgccagccagagcgtgtatatgctatatcttgctggaggggcctgtgacgtgctacggcatcctggctttgtggctctagaatggcctgtctctgggccctcatgaagattccctgtactactgtccgtgaataaactttttcttgcttatagcagccaccgcggattccactgactagcaaccaaaacctcgtcccgtactttctaagcacctgcagtattattttaccatttgagggacagttactaatatacgtaatttcttatgaaatttacccctctgacagcacagcacacaggtgctgacagtgcatgtgatacttctttgcttccgtaggtggcaccaactcatttcagaatggctcacaacacagccagtttagagaccgtataattaagatacaggtactgatgaggtgcttccggtcg

SEQ ID NO: 372525 - DNA, 697 bp, Homo Sapiens
  misc_feature (438)..(451): n is a, c, g, or t
gaagcagcagcaaccagagagccacccattcagcccggctcgacagcatggacagcagcagcatcacagtggacagtggattcaactccccacgtactcgggagagcctggcttccaacacatcaagcattgttgaaagtaaccgtcgtcagaaccccgctttgagcccggcccatggtggagctggtccagccttcaacttccgagcgagcgcggagcccccggacaaatgaagctgagaagctacagaaaccttccaactgctttgcaagcttctgttactagcgtgtgattgtccttctgcctcagatcttctgtctcattcgatacagcaaagtttacgacactgggactgatgtttacatctttggaaagacaagcatctcaaccacagtttttgtgtttacttaaactgtgctgctaagtagggctagggcnnnnnnnnnnnnnntctttatttcagactattgcttttcacatttatggctctgtagcaactgagtaacagtaggggataatatgtatacttttgcttcactaattgtatctgagcacacataggaaagtctagacactgtaagtgtaatacgcattttcaatgtcatgcagttgccaattccattttaaaatgccacagatgcgtgttgctcccagtctgtggttaaacggtgccacagaactgatccttgacacttcc

SEQ ID NO: 372526 - DNA, 390 bp, Homo Sapiens
  misc_feature (376)..(376): n is a, c, g, or t
ggaagcacaaatctgcatacgtcagaaagtggatctcttcagcctgggaattatcttctttgagatgtcctatcaccccatggtcacggcttcagaaaggatctttgttctcaaccaactcagagatcccacttcgcctaagtttccagaagactttgacgatggagagcatgcaaagcagaaatcagtcatctcctggctgttgaaccacgatccagcaaaacggcccacagccacagaactgctcaagagtgagcttgctgcccccaccccagatgggaggagtcagagctggcatgaagtgctggcaccacacgctggaccaacgtgggatggggaagggccttaccgcaccattgatgggcccagatctttntcggcagcgcattt

SEQ ID NO: 372527 - DNA, 188 bp, Homo Sapiens
gttccgaccggaagcaaaaatgagccacgagccatggaaacacacagcaccaactcccccctcgaattccactcagaatcaaacacatgcttgacttaaattacatatgttgctgggttgagaagcaggagaaaataaattcatttatgactagcactaaaaaggaaaaccttctagtcactgcttca

SEQ ID NO: 372528 - DNA, 543 bp, Homo Sapiens
acacagttgtaaaaatgtcaacccgaacagcaagcttcaggattctccatggaaaaatcattgaactctctgtcagcaatcacatccaaagctggcaaggttgctatgactgccagagcagtgcttttatgtggctgggattttgcagagagctattattcagtcagacctaatagcaacaaccttcacctacacctttgagctcacttggactttaaatttaacttaatctcaggttatatcaaggaggctatggagttaatggataaaacctatttgctgaaattataacttttattaccaaaaataagaggtcacctagggtttagcacaggatgtagtaagaaatgcaatgccatgtctctcaacacacgtattttgataaaaggtggattccagttgtaaatctgtgaaatgacaaatccacgaaggaccctttctttccctatatgttttcagtttcttgtccgttgttgccttctgtccctctttctatgattgcccccacactccctttcaaaatttcctctgcttccgtcgaac

SEQ ID NO: 372529 - DNA, 425 bp, Homo Sapiens
ttgtttctattatgaccatttaattttgtttttatttaatagtagtatttccttcccttttatctaattttttatatgctgctaaatatattttaaatatactatgtttgcgaaccttggtagctatgatgagagctattatcatctgtggtgggaaaagctatgtaaataggtagattgtatagagagactatcttgtgttgtgcctgtatgaatttttaaaagttgttgactggattttgcaaaaggatgtataatatttctgtctgctcagaatattaatttgtaaattctgcaagtttaatttttatgtagatggtataacatttgaaaatattgtcttatgtgattttttcccctgaaaatatttgcttgtaaatgaaaacttagctagggcttaaataaacatgttgctatgaaattaa

SEQ ID NO: 372530 - DNA, 535 bp, Homo Sapiens
gaggtgacttagaggatccccacgtcgaatatatgggaaagtaactacaaagagtgatttctaagggctctctctagactttgctcaggagctggtagctattatggcaagaccagtctttgaagagacacacaaaacattgaatctgtcagggggttgaggtaaagtctaggcagtgtagatgtcgctcccaagttgaggtgaggctgtccttcaccacaggacatagtttccctagggagacagttgctgtgagatcaacatggaaatgaatatgaacatgcagaaactaagtgacaatgtggatagtgagagtatgtgtgtgtgcctgtatctatcttcgtgtgtgtatcactgagtctgtaacgctcctttacaaagagtgtgacactcttgctactcgaccttagagaatctcttcgcctccagccccagactttcaatttctttatatataaaacaaggggataaattagactgagtcagcaaactatggtgtgtgaaacaaatctgggccaccaacctgttctttttt

SEQ ID NO: 372531 - DNA, 301 bp, Homo Sapiens
taacagttacatggttaatattgcacctttaatttcaaagtggtcaaatttaatttctaaagcagaacaatgaaattttcattttactgtttaggaacggggcagatgtaaaatattctgccacttaatggactcctgaatatttagaatgtattcttaaaacttcccagtggaaaatgcattgtgctttttaagggtatttaaacatttgtaaaaggctttcttggccataacggtgtatattaatatttcggcaggtgggggggtaccggaggctcggaatttcggtaagtccatgggt

SEQ ID NO: 372532 - DNA, 313 bp, Homo Sapiens
agtaggacctcatgacatcatagctcatggttagaattcaatttggaataagtcttgatgttggaatgggatcactgcactgggagcccctggtggtcaggagctgtgctttagccatcgccgaactccagcatcgagtgcagtcctgctgcctgatacacactcagaagttaaaggcactcaaaagtcctatggttcattcttttttaaaaatttaatttttaaaatattgacacataattaactaacatatattcactggaggaaccattagtgttgttcctaccatatacatgtataggtgctccacgtc

SEQ ID NO: 372533 - DNA, 305 bp, Homo Sapiens
ttccacgtgcgaaatatttgcgattattgaagctgcttaatgtccatgtgaggagaaggcatacaggaccagatcactgcccaaaatgataccctgcttctagaaaaaaggaaacttcaggagcaagtcatagagcaagaacagttgatccacagcaacaaatggacgatatcttccatccagagcagggtactttacatggataaagaaaataagcaattacaggaaaatagtcttcgtctcacacagcagattggcttcttagagcgaattataaggagcataccataattcgcacgttggag

SEQ ID NO: 372534 - DNA, 322 bp, Homo Sapiens
gaatatctagagattactgctactaaaaaatttgggaatagtatctacgtttatgaatggttcagtaaaataacctcatcatttccattagatcacagatagagatgctctcaaagagttgaaggagattaccttatgctgagtattcacaacataaaaggaacagaatggagaatatttattttggaataactttgagtaatggaggaagaaacctttcaaagagagtatctatgcagctggtagcccccaaataatatagctcagtgtctcacgatatatcgcgcccttggttcatgctagaaaacaagaaggtctttaa

SEQ ID NO: 372535 - DNA, 331 bp, Homo Sapiens
atgggtatggtatatgtggaaaaataagtacatgtccaataagaatgaattgaatgaaacttgtctgtagcctttggatccattcgctggagtcttacgctacttcaggtgaatcactgctatgctatctcatcaatgagagaaggaccaaagacattatatttcttgggttttattaataagcagataacttattaaaaagccaaataaaatacaatcccatataaatggacaattctatttctgcacttgtatataataaaagtgaaaatgtgatatttgaatctctaattaaacatcccctacacactatttctttttattgttaatg

SEQ ID NO: 372536 - DNA, 220 bp, Homo Sapiens
gggatccctccagtgcgaatatacaacctgaaactcagatgcaaaatacataaaaaactacatggacaaaatgcatatgcatataagatacacaaaggctactttaccattgtttctacacataaaatacacacaaactcagtatatacacacgatgcattaacttataataggcatacaagatacatagcacacatgcccaaaaatattcgcactgtgg

SEQ ID NO: 372537 - DNA, 102 bp, Homo Sapiens
aacttgtgtatttataagaatgtatgtaagcatgtgtgaacatgttgtgtgcacatggtagcatgttgtgcaagtgtgtgtgaacatgtgtaccgtttcctg

SEQ ID NO: 372538 - DNA, 488 bp, Homo Sapiens
gttgaaaaacaactctaaaacactttaaagtaccttcttggcctgggttacatggttcccagcctaggtttcagacttttgcttaaggccagttttagaaacccgtgaattcagaaaagttaattcagaaatttgataaacagaattgttatttaaaaactaactggaaagattgttaagttctttctgaattattcagagattatgcatcattttccttcaagaatgacagggtcagcatgtggaattccaagatacctcttgacttcctctcaagctccgtgtatggtcagtggaggcccatccgagctcagcactgagaagtgttagtttctttgggacccatctaccctgaccacatcatgatgttcatctgcagctgttgcaaggtgttcagatagtataaacataaatgtcacaaagactttaaaagaagtgcaattctcaaaaggttaggtggactaaagcgttctgtaaagcaactgcta

SEQ ID NO: 372539 - DNA, 621 bp, Homo Sapiens
  misc_feature (37)..(37): n is a, c, g, or t
agtagctattaagttgcacagcaggtctctcaccagntaggtttataggagattcaggagaaatgaagaacacatgttcctcagtcaaaggacctatctctatgggaattacagaggaaaggggacaagtagaaggctgacccaaaatatccataacctgaattaacctgtcaccagatgggaaaagttactgacacattacagtccactagttctcacctttgtgattccctcaatttgtcaattttgaaccacttgacaagtatttcctagctgaaagttttgttctaggctctcctaattctcttatctttgcagtctctgcatcatccagagtgtccttctgcaatccctcttccaacaccctggcttattgcaataacaacatacagcctcccatctgtctttcttccccttctggattggtcattgtaggattattcccttcagtaaagagttctaacttaaccagagaacacagcaaaactgaaatctcttcttttcattttttgtacttagattatcccaaaactgagtagctgccgctaagatttgggtaatagtttgccttgccatcctactaccttttccttaacttgggtatggaatattcgcacgtga

SEQ ID NO: 372540 - DNA, 313 bp, Homo Sapiens
  misc_feature (236)..(236): n is a, c, g, or t
tgactctgaggatcctccagtgcgatatctaggagaaatagaaattagagggtgggtctggcatttagagctacttttttcctggaagaatatgacaattctagcaaaatgtggcttgaaacgctgaggagtatatttaaaagctttgcaaaacaagggggacaaaaaacttgagtccacaggttgggtgcccgggtaaaccttcttcatttgggtagggactctaaaagtctatngccctagtggtaagggttaactgtgcagtaatcttatacctggccatatgattcatcagtttagcttctcaatccat

SEQ ID NO: 372541 - DNA, 167 bp, Homo Sapiens
tccacctgcgaatatataatgagttggagaaaagaaaactttaaacagatgtcttcccaggtagtatgtgtatctttttggttgactatactctcatttataattccaatcactagaccttaatcaccacagacagacctgatctgatcaaatgcaacaaagcacac

SEQ ID NO: 372542 - DNA, 410 bp, Homo Sapiens
caattccattccagcgtagaagatggctcccacattcttacagggggagtcggtgcgaatatcttcatgtatggaaggctttcaggaattgtgactgagcaaaccaacagtaaggatggagtagctgtcatcactttaccactaggtggtagtatcaagcaaggagttaagtcaagatgggttcttcttagatctatagacttggtatcttctgttgatggtactccttcactgcctgtttctctctcttgggtaagagatgggatatgggtggtaggaatggattgtgaaatgcatgtatatgcacagtggaagcatgctgtcaaattgggagacactgaagctgatagtcctaatgcagaagaggcagcaatgcaagatcattcgacctttaaatctaatacgcggga

SEQ ID NO: 372543 - DNA, 258 bp, Homo Sapiens
atcaatcacagaaatcattgacttcctgaaaggtttttaaaagcccccgcccatgtgtgcacatgactgtcacacatggcgttgtacagactaccccctcctcccttgatagcaaaatgggtaatattggctattagccttgtccagatgctgggggcagccagggggagtgggaggaggtaatcagtagcgcatggctttctacggcagcttctggtgcaactcaaactaaaaatgaagtgatcgcatattcgcacg

SEQ ID NO: 372544 - DNA, 514 bp, Homo Sapiens
agtgtatgctcatacttggacagttagggaagggtttgccaagttttaagagaagatgtgatttattttgaaatttgtttctgttttgtttttaaatcaaactgtaaaacttaaaactgaaaaattttattggtaggatttatatctaagtttggttagccttagtttctcagacttgttgtctattatctgtaggtggaagaaatttaggaagcgaaatattacagtagtgcattggtgggtctcaatccttaacatatttgcacaattttatagcacaaactttaaattcaagctgctttggacaactgacaatatgattttaaatttgaagatgggatgtgtacatgttgggtatcctactactttgtgttttcatctcctaaaagtgttttttatttccttgtatctgtagtcttttattttttaaatgactgctgaatgacatattttatcttgttctttaaaatcacaacacagagctgctattaaattaatattgatataaaaaaaa

SEQ ID NO: 372545 - DNA, 282 bp, Homo Sapiens
tcactcaattgctcaagtcaaaaagcctggcaattatcccacgttctcttttttcctcacctgcaatatccaatccatcagcagagtcaataaatcttgaatgcgaccacttctcgccaccaccactgctgctaccctgccctcatctctcagctggactcctgaactggtcctcttgctgctggactgtttccatctgaccccacagtgctctccttaacaaccagaggaaaaggcaaatccgattacatcagtgccctcggaccagccaaccaagattgg

SEQ ID NO: 372546 - DNA, 315 bp, Homo Sapiens
accccccacgtgccgaatatacatactgtttacaccacatcacctcaaatatgcaaaaataataatggggcatagaaatgactagaagaagaagagagtaaaagcagttttctctgtgtgatgagcttttggcgtgttaatttttcatcatctcttgggttttctcttattcccgtacattgagcactgccttgtacaaattttcaaaaaattgttaagcttcctgttaaatttgtttttaaaactatttattcagaaaaaaatggacctgctagaaaacattttatatatattcgcactggagcatcctctaag

SEQ ID NO: 372547 - DNA, 272 bp, Homo Sapiens
ttcgagcttcggtacctctccaccgtgcgaatatgaagacactgttgtaataaagatccaaatgatcatcctgggggagtggggaggatattcccggaatttgaggcagtcaaatatatagattatatatatcttgaaaatagaaatatattagaaatatgtacagaagtttacagtaattgcgactgcactcacctctcattttttaaaaaaaagcccacagggtcagcaactttctggcaaaatggtcaggttcaattactgcgcaggtg

SEQ ID NO: 372548 - DNA, 212 bp, Homo Sapiens
atgactaaatgaagctgagttcagagtactcatcctagaaatttctcaggagacagatacgtcctgtgatcaaacaagatttgggacccatcgtaccccgtcttcccttagaaagtcctaatacgcattatggaggggactctgaggtgcgctccaactagaaaacaaaaagcgtcagtaagctaactttcttcacctcatgtttcctaaac

SEQ ID NO: 372549 - DNA, 305 bp, Homo Sapiens
ggcaacttatgtttcagtggttgtgtgtgggtagtatttgtggttgtattggtttgtttcttgtttttggagaaacatctgctagtggaataaaatactttgttttgctctgaagagactgaaattgttcaggcttattatggctcatagattacagagaatgatgctagttacatgccaatgaactatttttactctttttatatgaaatgtaaaaatttgtaggggttctggtgatggtggtacctcttattaccttatgtaaaacacttgacagcctcgtcaatatttcgcacgtgacgaag

SEQ ID NO: 372550 - DNA, 465 bp, Homo Sapiens
tgatattgactggatgaaaggtcagtgtaaggctcaccaccaccagttgctctcaactatatcagagctcagcattatcaccacacgatgtgcaagccactgctcaacagagctcagcacacaacacagcagcacaaggacctcagccacaggcccagcctcaccaagtgcagcctcaacagcagcagctgcagaatcgctgggtagctcctcgtaacaggggagcaggcttcaaccagaacaatggagcgggcagtgaaaactttgcgttaggtgttgtacctgtcagtgcttcaccttccagtgtagaagtgcatcccgtgctgcaaaagctaaaggccataaacaactataatcccaaagactgtgattggaatctgaagaatggacgtgtgtttataattaaaagctactctgaggatgacatacatcgttccattaaatactctatctggtgtagtactg

SEQ ID NO: 372551 - DNA, 318 bp, Homo Sapiens
ctgatccggagcggtgctataaggacaggagtgtgacacaggaaggcttaggtacgtgccctgggcccagtctcacatctcagggtcctgcttcaagtgggaccagttgagatctgtgacactcagcacctgggagcccggctcagtgaagggagggagacagaactcagctcctctgagaggagaagtttacacagcacctggggccctccattgcgggagtcacagtggaaaggagtcttggctgagctttggggcaggtgcacctcattttctttgcggtctgggatgccctcagagctgtgctccggatcagcg

SEQ ID NO: 372552 - DNA, 177 bp, Homo Sapiens
tggcagagggggcagcatgtgcaaaggctgtgtctcaggagggaatatagaagaaagcgaagatgacatgaaaccaagggctaggtgaggctgggaaatgagaatggccaaaatgtctaagaccacgtagggctgggttaaaattctgcttacatcttaagagagctctccaagggg

SEQ ID NO: 372553 - DNA, 388 bp, Homo Sapiens
tccgagcgtacatcatcaaagccacattactctgatgatacggaatttatgagggatgtcccatatcatattatgcattaagttgaagtcacacaggggaggacaataggggacagaaattagtaatgtgcaagaccatttggagtcaattgaatctactcaattgcatgctggtaaaaacataaattgcaaagtgataatctattttttttctacccacgagatattgctggagacaggaaacgtattcaaagactcttgaggatactagagatttatctgaagtcccaggaagcaagtacgtttataattcaagatttttgggttgcatatatacaagaggtagactgtagtcttgtgatgatatgtggacttgtgatgactagtg

SEQ ID NO: 372554 - DNA, 522 bp, Homo Sapiens
cctgctcagaatcaaacttatcactgtttcccttatgagactcctaatgaaagaaattcagttgatactactttttaaaatgggttttaagacgtggcttgttgatataatagcgcatccacttgtactcaagtgattcaaaccttgagtaaaaaggagagtttctggagaatttagaagaatctttattgacatttaatctagagaacgtcttcaggagcaaaccactgcaagtacaagtgtaaccaggtgccatgagtcagtcatgtgctacttgtggttcaaaaccgaaacatgatactgggatgagaagtgcgaggctacactcctaatataatcaaattaccaaagcaccgttttgagtcctcggtatcccaattaaggagaaacatgacgaccttggagaatcacttagcttagggcttttagtagggaataattacacatgtagggaaggtgaaggagttagatgggaggtaagaaggctgacgagatttctagtaaccctgatccaaaagctct

SEQ ID NO: 372555 - DNA, 459 bp, Homo Sapiens
accgtcaaggaattcttatccagccttatattcatgtctatggcagctccatagagagatacaaacaccttttcacctgtgtcatagcacacgataagtcttccacatgtgatcgcccacactctggtggctcaaactccacttccagatgcatggactctcccacattaagagttccaatagctggtttctatatgagaaaggcctactagttttgatgtgaaatacagcatttttgttgccaatgtttcgtaccagcagaatcttctgggtgctgtatttgacaggacaagtggaaaaattcagcttgtcaggaaaatcgagaatggctcgtgcccctctagctttgatgggtacaataaacttttctcttacagtaacacaggtcaacgtatgggcgttatccttgttctcctctggagtaaagaggattcggaatatggaaggcactccaggagc

SEQ ID NO: 372556 - DNA, 278 bp, Homo Sapiens
  misc_feature (193)..(212): n is a, c, g, or t
ccccttggcagatggcatgctcagaatccctggataggctgactgctgaagggttttacctgataaagccagtctgcaaggactggaataagcccttacttcagatgtgtagaaataaacatatggcagtaagaaataggaaaagccagggagacataacatcaccacaataatacaatttctcattagctgnnnnnnnnnnnnnnnnnnnntagagatatatgaactgcgtgacaaagagttcaaaataattaattttgaggagctctcacagggga

SEQ ID NO: 372557 - DNA, 251 bp, Homo Sapiens
tggcagagctagagctaggtttctcactgctggagtggaatgttgtagaaaatcaacggctagaactcatgtgatgctggattagagttggagacatcagcataaatttatatttagcataatataaagatagaaaaatagatgttagtaaacacacatatatttccttgctctatctgctgagagggtctagaaacaatgatcccccagcagcaataaatatatctaacacccaggagctctccaagggg

SEQ ID NO: 372558 - DNA, 116 bp, Homo Sapiens
taggccggaggtcattaggagggctgaggtaggagtttaaagagcatggtaaggatgcactaagaggaacctgtttagaaggggacccgtgaaaagagagggtgtttacgccgggt

SEQ ID NO: 372559 - DNA, 684 bp, Homo Sapiens
aatgcagaatcagagatgaacctggaagggttccgactggtgggtgtcccgatagatggaagtgcttcccaaggctggggcaggtgagaggcaccagaggagcaaaggttcagccactggaacatacacaggtgtttccatttgcctggacagtggggcatgtggggaagcagagggaagcaggtctggaaaagtgaggagggtcttgcacatcagctgaccggaatggatggatttggtctgtggaaacagactttattggacagtgacttaatcacatgtgttcttccctgactctgggatggctctagttttaagcagtaaggcagacaaggtttgccttgggaagccctccctacaatcccgtctaccagattcctggcgtcctcctgtctccaaagccctcagcctgagtaggccccctcctgggagatgctcagtgaatatcaaatgagggaatgatcgaatgctcccgacatgtaagaccctcatccgcatatcaaaactaacccgtccagtgtcccatcccttcaggactctgctagaaaagagccagattatctactcacttgttctcatgaaggcattatgccaagttaaaggtaacccccccaggtaaaggtaactgcgtttgtaaattgatgatctggaaaagatcttagacatgggattcatgatgcgccg

SEQ ID NO: 372560 - DNA, 316 bp, Homo Sapiens
gggagacatccctgagagtataagatgggaggaagaggagactgcagggaatgacactgagctcgggctttgtaatgtgcctcatttaaagctgtaagagttaaggatctatgagctcttagagacacctgaacaggcgaggacatggcatagtgagagaagcacagaggagaagaaccaggcacagaaggtgggtgaggccagacaactttggagtggagatgggtggtgagagaggacactggcatgtctgggggcctatacatctaagatactctctgtcaccagtcaagtagtggcctagtcctccggccta

SEQ ID NO: 372561 - DNA, 457 bp, Homo Sapiens
gagttcaaggccacaggtcatggggcaggccagagcaggagaagaaggagggtgatcagggaggtgagttgatgagagagcagatgtactaagtcatacatgagtgcagtattgacagtttgcaaagcaccttcatacccactatctcaccaggtcctgctagctcagtgatgaggtgggacacctaacgtcctcacttccaggtgatgaaatggaggcctggaggagtttctaaagtcgtacaactcctaagtggtggagccaggattagaatgagatatttctggattaggggtgtcagcaagcaatctggactgggcaagatggtggatgaccaagatggtggacccaccttctctaggcagattaaagaagggtagaggcacccttcttcttggagagtgagtgaggaaagaagggtcaaggagatgctggggtccccttccagggaggagtg

SEQ ID NO: 372562 - DNA, 188 bp, Homo Sapiens
ctcagatgtatcatcatttggacagaaaatgggcaaagttatatttacaaactacctgccagttgccttccagctagtgattcattccgcagtgatgtggggaaggcagttgaaaatttaattcctcctgtacaacatatcctcttggatcgaaaagataaagagttgctaatttgtcctccggccta

SEQ ID NO: 372563 - DNA, 282 bp, Homo Sapiens
tagaaaatgttcaggatggaagcatctgaacaagtaggaatcagaagggaaggaagatagggacatttcaaagccatcttgcatctctgcaggaagaggggagcaaagaggagggaagagagccaccttcttgatttagctgcctgtggatttgctcttgagagctcttggtgctgaatcctgcagacaaggcagacaaggaaagagcctatgccagcgggatttgaacacctgaagtgacatgacctgtagtcctgccactacgtcgatctagagtcgacg

SEQ ID NO: 372564 - DNA, 357 bp, Homo Sapiens
  misc_feature (142)..(170): n is a, c, g, or t
taggccggaggacacgtgccatgcaggggatgccccgcaggagaggcctgcatgcaatgtggggtgtcagggaagagccctggaagtcatcaggaagcctccttggcctccaccagagtatgccccaatttggtcatcacannnnnnnnnnnnnnnnnnnnnnnnnnnnnctgtaactgaggcttgaatgaaatgggccgtcttcacaccagggtcttcactcccccagggtctcagagagaagaccctaccccacctaaagctgctgtataggaaggagctgtgtattgagaaggagctcacccacaccactgtgcctagccctagaccttcccttctctcaagtccccacagatc

SEQ ID NO: 372565 - DNA, 630 bp, Homo Sapiens
agtgaacacacctagccagaaacatccaggaatgggtacccctagcccctcctctctgacagggggccagtggccacagctgtggccagtggggttccagagaagccacttcaagtgcccccttctggtcccaagaggttcggaagggagctgggccagaggctcaggtacgctgcccatttagtctcagacatcccatcatgggggcggtaactcgagtctgggctcccggaggacactgaagatggaggcctgctccgtagccctctcaggactgggtcattctgttcctcgccagtgggagagcagtggggcctggtcccgagcgtggccacagggcccagctgtccctgtgcttctgtcaagggcggcacattctgtccttcacgcaacagcaccatcccctcagctcatcccccatcatgcctgaaggaactatgtggtgcaggttcccacccccagcctggaagtgtggagccagacctgtctccatttacgtcagattccatctccctgcctccctttttcccctctcgtggcctgcatttctctatccttcttggagtctctgtttatgtcttgctctttctcgtctctctcctccttccttcctcctctgtgtgcctctgg

SEQ ID NO: 372566 - DNA, 307 bp, Homo Sapiens
aaggcgggtgacatcatatctactaatctacggatctactaggatattaataatcttactctgtatgtctatcttctggtttgcttcactaaggggttcacaggcactggaaacacaacatgactaaaatttcttctcctgcggtgttacccaaaccatttaagagcatcgtctttgccttaatcactcaagttagaaactttgggtttttcttgggcttgtacctcttctgcatgtaggataagtcctgccaatgccatctctaaaaattgtcttgaacacccctccggcctagtcctccggccta

SEQ ID NO: 372567 - DNA, 199 bp, Homo Sapiens
taggccggagacattaacaacaacttggagaaattcaataggacaatataacacttgatgtatacgttctaccaaggctatcttaaacattacgaactggatagtcactagcatcataattatgatggaagccaaaaaaaatcaattaataaaattattttcacttctccttaagaacataaatacgataacagcaatg

SEQ ID NO: 372568 - DNA, 459 bp, Homo Sapiens
  misc_feature (381)..(381): n is a, c, g, or t
cagagtcggcagaatagcattcagtgtggtcccgaggctccctctgttttccttgccatggagtccccagcgccttgtgcctgtttccatttccctctctctttgaaaagtagaaatcagtggtttcttgactcctaaacagcctcctcactatagaaggagcctgagcaggtcagaagaactagaaaagtcctcagatacccccctctgtccagccccctttcccatacacagatatcaatggatgagcaggaaaagaggaggcctgggactcactgaagtacttgaagaagcacaagtgtcatagatgtgccgccctttgccctggggtgttctagatcacacagaacacgttttcagctgggactaaggaattcagantaggccagggggttcttctggaacagcttcaggccagacctttggggttcctctggggggcctggggacatggatggc

SEQ ID NO: 372569 - DNA, 215 bp, Homo Sapiens
agggggaactcctgggaacgtgagtaggaaggaaatttcattcaatggtatgactctaatggtgctctgaagaataaatgtgatgccactgtaaagagaaaccaggcaaacaacacgaccaatggtactcaattttaagagtgatttaagttctcaaacttacagtactaatctgccaagcactaagaggacatcttcacattcgtgttaagtag

SEQ ID NO: 372570 - DNA, 299 bp, Homo Sapiens
agctcggtacccatcagtggcctccactgagaatgacatgtgcacgtgagactttcagtagagttttctatatgagaaacaagggggctttctgactagtaatatgtgccctgtagaactaaacagtaaatgaggttaatgctgcattgcagagcagaagtatatggtagtagagatctgtatgctaagcaaattatccttgagctattgtttgaaatgacctcttaatcttcatttcagctcagtctggcactaattgaaatagctgtttccagggcacctggtgcttaacgaggagt

SEQ ID NO: 372571 - DNA, 381 bp, Homo Sapiens
ccccagtgtagactccaatctgatctgaaaaaaatactaataaatatctcaaaagtctagtgagctccatgtgatggagaggaaaacaaagcagggaaggggaggttgtaactataaaatagagtggtcagggaaagtctcaatgaaacgctgacatttgatcaaagactcaaaagaggtgaaggcaggaacatgaaatatttatctccagggcacagcagaatttcaggtgtagagaacaggcaaataaaagacattgaagttggacaagtcatctagcatatttgaaaggtaacaaggaggttactatagttggagcagagtgaagcataaaagacaaaaattgatgagttttattaaacttacatggtaaaacacaca

SEQ ID NO: 372572 - DNA, 182 bp, Homo Sapiens
agtgttgtgggctggaacagtgattaagacttaaagtctctccagaccagcagcatcagcattacttgaagttactaaaaatgaaaattcccaggttccattatttgtgttaagctttctgggtgatggtgatatatgctaaagtgtgaaaaacaacggataaatgacatgctgagttccct

SEQ ID NO: 372573 - DNA, 317 bp, Homo Sapiens
gggatactctccttaattattaattagtcttgccattttcatttacctactcagactgggacaatgtgtttgaggaatgaactccaaccttgccactcatctgtctttatgttcctgcttctgtctccaaaggcagccctagtgtcagtgtggtatttcccatcccagcatctaaaagtcacatgggcctgccttgaaaattgctcccaaagtacctacaacatgtcaaatgtcaagtgaaataggcaattattttaaattatatttctttcctttaaaaaatatagatattgcaaactgatgtcggagttccccct

SEQ ID NO: 372574 - DNA, 438 bp, Homo Sapiens
gactctagagctcccaggtttaccaagacaattgttgaataaaatttaagtgaatgagtttgtgcttcatatttaacttttaactttccactaggctttattaaatggaaaactgaaatttacaaagtcttagagtagaagcatttttatcctggctagggattctctaagagaaccagtagcaccaagatgcactggaacagtgcaacgagagagttcatgccttagggtttagaagcatacaagcaaagggaatggtgcccacttcttactagaagaatttcacaggctggagtctgggcggaggagcctgggatgacagtagaagtgtgcaggaagcactaagtcaagcctgtactaccacctcttggtttaacaataatgtataagttacctacaagccaagtggtcactgctgaaaccatcttgaaagaacct

SEQ ID NO: 372575 - DNA, 224 bp, Homo Sapiens
accatgcaggctgggacagggcatggagcatatggtgtgctaggccctatcctttcacaaaggtgtaggacactctaagtgccaaggatgtgggtggggtcccctgggcctgtgctgctctgattccctatcattgtagggttctcatttactcccatgaagtgttctgactgtctttcttctctctaccccaaccccatttttttgtttggtcttattttgat

SEQ ID NO: 372576 - DNA, 270 bp, Homo Sapiens
gcgtaatgacattgtggttatgttacaaaaaggagtcatttcagaaacagactgaaatatttacaaataaaatcatgtgttgtctgggacttacttcaaaataatgtgtgagtgtagggaatgggcagggttgcagtagggacaggattggccatgggttgatggttactgaggctgagcgatggcatgtgaggttttattattttattgtttactttcatctattttcaaaaagttaaaaaatcagccctccctttgctgaaaaaagaa

SEQ ID NO: 372577 - DNA, 159 bp, Homo Sapiens
tgccacctggtgaccctagtggaaaagctcaccagttggcacacacaacttccaatcagcttttggatgcctcactcttaaaacatgaacagatccataggatcaccatatatttgagaaaaattcacaacgtgaaagatagagactgagtccactact

SEQ ID NO: 372578 - DNA, 294 bp, Homo Sapiens
acccagtttgtcgagaaatgtccatggcgcttttatcgaaccttgcccaaggggacgcactagcagcaagggccatagctgtgcagaaaggaagcattggaaacttgataagcttcctagaggatggggtcacgatggcccagtaccagcagagccagcacaacctcatgcacatgcagcccccgcccctggaaccacctagcgtagacatgatgtgcagggcggccaaggctttgctagccatggccagagtggacgaaaaccgctcggaattccttttgcgagcgggtaccg

SEQ ID NO: 372579 - DNA, 379 bp, Homo Sapiens
  misc_feature (22)..(22): n is a, c, g, or t
  misc_feature (32)..(32): n is a, c, g, or t
  misc_feature (109)..(109): n is a, c, g, or t
  misc_feature (211)..(211): n is a, c, g, or t
  misc_feature (314)..(314): n is a, c, g, or t
  misc_feature (319)..(319): n is a, c, g, or t
  misc_feature (334)..(334): n is a, c, g, or t
  misc_feature (341)..(341): n is a, c, g, or t
  misc_feature (348)..(348): n is a, c, g, or t
  misc_feature (359)..(359): n is a, c, g, or t
ttgcagacttccacagcacccnggggagtggngggtgtggacacattggttcggcaatctgattctcctgaatttcccagccaggctcttgtggggaggcctgtggatnggggggatttgaactatttggaaacaaatgattctctatctcaggtgagaaacctggtcagaaacaaagggctggtcacctgatttaggccagcaaccaggnaagctcttagaatcccaggcggacaccctttctcaaaagatatcccctaagagtcctttctgctttcttcacaggattggattttatgtaaaatggcagagtntggantacaacgatttcttncccactncacaatnctgtgcatgcnagtattagatccatgggtgg

SEQ ID NO: 372580 - DNA, 116 bp, Homo Sapiens
taatggttaactatctagttcaacttcacacttctgctcccttatattaagctggatgctttgtatccaaaagtcagttgcatttcttacccaaaactgtcaattcctctgctggt

SEQ ID NO: 372581 - DNA, 503 bp, Homo Sapiens
  misc_feature (308)..(359): n is a, c, g, or t
ggaaaaaaggaagacagcaatggggacggagaaggaaagaaagacagccactggttcccccgtgttcacacacttgtactctttctctctttctgctgactggtctgaggtttagcatttgtatccgcaaaatgtctattagagtcctcacagacactggctttgagaaacctgctcttgttgtccccacatgacctcattggtcaaccttagtgctgctaacagcaagacaagcagacactgtgtgcattccaacatgaggcagtacaaagtacatagtatcacctaggaactagtcttgccaaaannnnnnnnnnnnnnnnnnnnnnnnnnnnnnnnnnnnnnnnnnnnnnnnnnnntgacagtgagaaatttaacctaagtctaacccagcctttggatctaactttcagttcatgggaaatacaggggatagaggaacaagttaagtgacaccactagaaagcaacaagacaaaaccaaaaaaaccacactctgaaaga

SEQ ID NO: 372582 - DNA, 263 bp, Homo Sapiens
gaccgagatcggcaagggggtcggccaagggggtcggcaagggggtaaggccaaagggggttcaggccaaggtcaggtcactggataaagccaacagagtagagagattctgatttctcagtatcaccttgagttcagtaatatactcaaaatcatagtaacagaaaaccacagaattaattcagctctataggctcatggtctgagtagtgaatctactatagatccaaacattggcacttactgcctacctattggccgaa

SEQ ID NO: 372583 - DNA, 342 bp, Homo Sapiens
tgacgatacattcagggaccagctattagaagggctgaataaagggaacatgcagctctgcagcaatattctgataatgtattgcagtgcggctcacatcactgtccaccaccacctggagcggctcatcagaactgaaggggagttttcacttaccttattgagcgtgattctgttctacttgatatttccttcaccacctcatgtcatttctcatggatttggttatgatggaaaggaagaatgcagaggaggagaaaagtgacagatcctccatttttgttgggatgcgggcattttgaatgtgatcatctttgctgaactgtatcgttagtgtcctct

SEQ ID NO: 372584 - DNA, 480 bp, Homo Sapiens
acgaatcatgagagatatacttacgttagagatgaagaaaccaaaaccaagacacaaggaggtgagtaactagccaaggctcacacagttactaacagcagggccaagattcacactccgctagtctggcttttaatgtagttgtattgatttattactctttttagtctgtctttaagagctcactttcctagatgtagtggaacacttgagagggatgtggtactctgaaaggaggggctgcaaatcactctacgtccagcagctgtgggatggaatggtcagtctgtgaggtcagtctctgtacatagtcttcaggctcaagtcaagatgtctcttctctggccaggtgcaatggtctcatgacctgttatctctacgcacttatgggaggcgcaaggtggtaggatcgcgatacccctagacatctcaagatcgcttacgctcacagtagtctgttatgaactgactcgtcatgta

SEQ ID NO: 372585 - DNA, 268 bp, Homo Sapiens
acattcagacacctatgccatcacacacacacaatcacaaagcatcagtcaggaaggccagcaagagcagaacacagaatgttaggatttcaaggtagaagctcaacactcaattcaaggtaaacttgataagaatttgcaacaagaccaatgatctgctaggtattataatgaatagaaaagcaatatggggttctggctgtaaagcaactgagcttttttgaagaaacattaaatgcacacataagacccctgcatgtatcgttag

SEQ ID NO: 372586 - DNA, 491 bp, Homo Sapiens
gatctagaggatccctaacgatacagttcagagtatgaaactgatatttaaagttgacttttaaaaattctcttctccctcaaagcaaagactacatcagtcctccaaaataaggagctagtcttttgccagccttttgagagaaggaaggaaaaaacacctaatttctctaccaggttatcctgcctcactcataaagcatctccctttactttaataagcacatggatttctcttacttgcaaccaaaagatccctaagatatttgtgatggaaagaaaattaagtttctcaactaactcagggagtccaaactacctagaaacataatgtcataaaattttctaatattgtatgcagatggctttatcccttctggaatgctaattttcagcttgctgtcttcctaacatcactccaggcatgttcagtgcagttcaccacccgacttgtacgacatctattccaggactaaactcatcatcctggtg

SEQ ID NO: 372587 - DNA, 632 bp, Homo Sapiens
ggctaagagcacagactccagaaccagactgcctaggttcagatcctccctccactgctttgctagagggtagcgtcaggatgattactgcaggttcctcgggctcattttcctcatctttgaaatggggattctaaggttgcctgtacacggtaactatgtgttagctggtgttattcacgtcctcgggaaactgaccaggccatatcttctgactgtgctgtcatgtgtagctctcacactgttgttggtttatgtttctttgtgtactttgattgctatcagttttcccacagggaactataatgtctttgtagaagaagggtcatttctggttttgctcagtagaggctaacacagtgatgggaacatagtagatgctcaacaaatatgtattgaatcaatggttatcaacccaacttaaaaaatcacatgtaaatcctatataaaatttatgaaatttcacatagtttaataaaatatttaaataaagagatcaaattttataaagaagtatttcttctcctactaatctacaattgtaatgccatcctaacacaaatcatagagagatcttttttcttttggaactaaaaaactgactgatgtatcgttaggatcctctgacagca

SEQ ID NO: 372588 - DNA, 253 bp, Homo Sapiens
ctgtccactaggcaaatagctgaaacacacagagcttaatccttgcatgagttgtaggagcttgtaagtgaggactagggctggctgggagatggaagctctagttgggctgtgtgatttggagcaagttccttccttctctgtgccttagtttcgtcatatacatggcaataagctggaacagacatccgaaggttccctccagatacaaattctcctgtatgtatcgttagggatcctctagatcacctca

SEQ ID NO: 372589 - DNA, 278 bp, Homo Sapiens
  misc_feature (118)..(118): n is a, c, g, or t
taacgatacacttcagagagaggaccacggtgctatgagagctcaaaattactgaaggcgcccagtaagggagccccgggaaggagggggagagtcagactggggtgaatgtgcatcnccaggaggaaacagaatgtatcagaatgaggctttggggtcagcagaaaatgtggcctaccaaggtgagtttagctacgacaatgtccagattttctgctgtacttggtttctgctactttaaaaatgatgttacctccagatccatcgagatcctctga

SEQ ID NO: 372590 - DNA, 619 bp, Homo Sapiens
  misc_feature (14)..(14): n is a, c, g, or t
cgaacatcagcttntcagaggtctgttcctggaatgcttccccccacccactttctgtctagctgccttcgcatttctctattttggttcggtgtccatacaaactctacttgccaccacaccagccacatataactccccagagcctctttcctgcaggctgactgttcagattccctgcacacacatgcctggggcctgtcgaagcctcatgggtgagacccagaccccgatggttagaaccacatctgcaatgaagagctctcagctcacaggctcctaccctgagggatgtcccacacagctgggctctctccgtgcagctccagcccagatgtttcctctcctctgcagggggaggcatctgggactttgaattgtaatcttggaagaagcagctataagacacagatctgaatggtcccagctaaacctcttggaactattgccccaacttaagccgaagatcagggagcagaacagacaacagagaaaggccagacgtgagagttccttctgagagctgtaaaagagtgaagattagctttaaagagccctggaattctggctacagaacttccgcctctccaagccgaaagaggtcctgcatgtatcgtta

SEQ ID NO: 372591 - DNA, 686 bp, Homo Sapiens
  misc_feature (155)..(301): n is a, c, g, or t
  misc_feature (453)..(570): n is a, c, g, or t
agacgagtaagtgcagaggagagattagtaacacacaggaataaaagcctaatccatgcaggtcatgctgatactcaaatttctattaataaaaaggagaaacaggaaggtttctgtgggaggtgaaatctaatgatgggtgagagtcttggagnnnnnnnnnnnnnnnnnnnnnnnnnnnnnnnnnnnnnnnnnnnnnnnnnnnnnnnnnnnnnnnnnnnnnnnnnnnnnnnnnnnnnnnnnnnnnnnnnnnnnnnnnnnnnnnnnnnnnnnnnnnnnnnnnnnnnnnnnnnnnnnnnnntagtttgacaactggggaaagaagtgttcttcaccccctacccccaagacattctctctgtcggccaggctggagtgcagcctcaacctcctgggcacaagtgatcctcccacctcagcacacaacaccatgcccaattttaagtgcgttannnnnnnnnnnnnnnnnnnnnnnnnnnnnnnnnnnnnnnnnnnnnnnnnnnnnnnnnnnnnnnnnnnnnnnnnnnnnnnnnnnnnnnnnnnnnnnnnnnnnnnnnnnnnnnnnnnnnnttcattttcacagtgagacatttgtactgtggctatgtaggagaacattcttgttcttagcaaacatactgaagtttttagatattaatctgccacagtggtggatcctctagaga

SEQ ID NO: 372592 - DNA, 377 bp, Homo Sapiens
gaggactaataacgatacagtcagccaaactataatgatagatttagaattaggtgcaatcaaggcttataagagtgaatttcaagttgttaccagtaaagtttgtctttttcattcagcctgatgcctttaacagaaaactcagatgagtggattggtcacgtgagatggcagtgacaaaaacttcagtttaaaatgccttatggatctgtattggcattccttcccgctgatgaaattctaggagcttttagtaaattaaagctgcatttgcatgaagaagccagagaaattactgactggtttgaagataatgacgtgcatggtcggataagaagacatgccctggagttgctgtttgaccatcagtatcgtta

SEQ ID NO: 372593 - DNA, 186 bp, Homo Sapiens
aggactcataacgatacagtcagcatggttctgatgaaaaatatgtgttatctcaaggatctcttgtgtgataagacacttgtgccgcttccaagattctctttgtctttgttttttaagagtttgattgtatgcctaggtgtagatctctgagtttttcctggttggaaactatgagcttcctgc

SEQ ID NO: 372594 - DNA, 551 bp, Homo Sapiens
ttgacgtgtggaagaaggggcagaacaactgccagaaatgtagggaaagattttctgtggagtctgcattcttgaaggatgagcaagaattttctggataggtaaacaaagcaaagagaattctcacctgagggagcgttgtgtgcacagggagtcctgagttgatggggcatatttattcatcctttctttgttcatttatttattctttattcaactaatatttattgtacacctatgtaccagtttgggtgctgtggatagcatagtgaacctgacagacataatcctgtcataaattcagtataatgtagaagaataaataattaaaattatgatgagtattgcaaaagagtaagcatggggtgttacaggtgtatgtaacaatgttaaatataggagaagcttctggaatattgaggagtggtatgagatgggactggaaggagggatttggtccaattttgaaaggtattatatacagagcacaggagtttaaataacattttataaatttttaaaaaattagctacagaagttccacacgtcat

SEQ ID NO: 372595 - DNA, 523 bp, Homo Sapiens
gcaattataaaacatactatggagagaaaattcaggagtggactgtattgttaagtatagtacaaggcatttggaaaactttttactaaattgtttagttcagatttccacttcacaactttttaaatataaaaaacttctacttttgataccttcagttcaatccttgtaagaaagaaattatttttatttagatttcctcatggagttaagtgggaaaagtaattttttaggttagattattaggttaactccatatttcttggattttgacgcacagatacatgtaatatttacttaccatgcccggccctctgctaaattttttaataaaaatttttaattgtggtaaaatgtacttaacataaaatttgccattttaactgtttttgagtacacgggtcattggtagtaagtacattcgtgttgtgtgttaccactattgtcatccaaacacagaacattttctgtcttgcaaaactgaaactgtactcattaaagagcagttccttattccacacgt

SEQ ID NO: 372596 - DNA, 569 bp, Homo Sapiens
  misc_feature (115)..(176): n is a, c, g, or t
tagacgtgtggaaggatcttcatgagatgagctcttgtaggagggacactccattctttgtaacactactgatgaaggaaaagtaataaaaacgttttaaaaatgagtatgtctnnnnnnnnnnnnnnnnnnnnnnnnnnnnnnnnnnnnnnnnnnnnnnnnnnnnnnnnnnnnnnttaaacagagagacacaattcaagtcacaaaaattaagtttcagggtcaggacttgtgggtaaagcaagtttctggctgcactcgtagctcacttgatttttatttcataagctctccagggaatcatagcccaccagtgtgccgcgttcccagtgatgagtctggaagggaataagggacttcatccaggctatttaggacataaaatattctaggaaaactactccctgtcctctcctggaaatctctagccagcagttacacttacccttggggttgagcatattttgttggcttttgttgtatgtaaccaaatctttcctgcttctaattaaatttattcctttagtaaaatccttcccagaaaccatatggctattttccacgtcata

SEQ ID NO: 372597 - DNA, 644 bp, Homo Sapiens
tatgacgtgtgatggatgaggccacagagggagcagaatgaaagtattaatgtatatagagatgtggtgagatgttacacaagagaagctttattagtgcaaattatgttggaaaacaccggataacacacacttcaactgatgtctttgctgctggacttctcagggcctttcaaaggctaatgagtgtttgtatttctggaggagaaaaaggggttgtgagcgctggggatcaccgaaggcagaaaggcatctggggattcctaggcttctttgaccatgaaatccttctatcacagggcatcttactgcactaaacaaatatttctgaccataaaatatggtaaccagaacactattttttttctttgagggtaaaatagcaatacctcacattcaaacagcgcatcatatttaaccaagtgctttcatgccacttctcattcaactcccaaaacaactttgcagaagtagactttgtatccctattcatgaatgagacccagatacaatgagtggcatgcctaatgcccaatatctcccagctggttaggcatagaccttgagctaaagccagggacaatcaggtcaccaactccaaaatcatattaagttgtatgatcttgactgcttccacacgtcat

SEQ ID NO: 372598 - DNA, 141 bp, Homo Sapiens
tatgaagtgtggaatagtataatgttattggaaggaggtggaagaaggataaatattagttaaaaattatattacaacctctagggcgaaccacaaaaatttgtaaaaagacatataattgatatgctaagaaaggaagta

SEQ ID NO: 372599 - DNA, 552 bp, Homo Sapiens
tgagtgtggaatagtaaagtcatgttaatatagacagtgagctatgagtggtttgattctcatcccaagctgtcttggttcgctgtttgaatgactgtgatgtcccctccaccaagaaggctgacgcctatgaacatgtgtactccctttccctcttggtccagctggatttggcccatgaaggcagggagcagagtgaggctggaatattcatttctgttctctttctgctggtattacccagcaagcaatgggctcactgcctgatgcacacacaagccaataccatggcactgaaaacctttattgggaattgactggcaagacaggaggcaaggctgaaatctatgtcgcctagctggtgggctggggcaggttttataggcgaagggtaatgaaccatgatctgattggatcttgcaatgaggtgatgctggggaggcatgatctgactggatcctgccacggggcgaacactagagctcaatctgaattggatcctggatcctgccatgtgcagtccacctctgaaagcagtccttgctcccgctt

SEQ ID NO: 372600 - DNA, 428 bp, Homo Sapiens
  misc_feature (366)..(374): n is a, c, g, or t
ttctcttagctgcttgcctttggggacattttgctgcacattttaagaggactggaaagaaaaatacagttaaaacaaactagtctattttaggttctgttgatagtttagtgatgtactaggggaatgctggggtgtgtggtaggaaatggaggtggggaacagatagacatggaacagaatcactaagagctttgctgttttcagttatctacatgtatagacaactggaaaaaattgaaagatcatccaagttggaggaaaaaaattctcataacacaaattcaagcaatgagtaaaaaagaatgaggaagaattctcactggcttaagtcagaaatgccaaagaaaaagataaagaaaaacnnnnnnnnnggagatggagtcttgctctgtttcccagatgggagtgcagtggcacaatcatag

SEQ ID NO: 372601 - DNA, 545 bp, Homo Sapiens
tcgagctcggtaccgtatgacgtgtggaactaggtggataatacatgtgtctctaaaggcatgggtgggagctcctaccgaaaccctgtggttttcatctgtttcacaatctaaacatggccaacttctttaaaaatgtatgcattgctctccagaagaaatagctgtgaaaaatgtagctagatctaattagttactgcttatagagaaatctgtcaaagtttaacagattcatggtaaaatatgtaactatataataacttcatacataaaataagtacatattcagtatgataaacagtatgcttcagaaaatataaaaataaaaatttagaatacatcaaatgatgggaactaatcttaaagctgttaaagaaaaagtttattcagaaatcttatcgcaggtgcaacatctacagcaatggtctaacagaggtggtcgaagggttcaagttgtgacaacaacagaggccatttattgagcaacttctatgcgccaggcactgggctaggggctttacatatactgtcccatttcatccttc

SEQ ID NO: 372602 - DNA, 143 bp, Homo Sapiens
acgtgtggaatactgagaaaagaccaaacatacatgtaacctaaatcctaaaaagagagcggagtggaaggggcagcagcagtgttttaaaagagaacggccacctctaggaccccaagcttagtttctaatgccattctcca

SEQ ID NO: 372603 - DNA, 583 bp, Homo Sapiens
  misc_feature (190)..(223): n is a, c, g, or t
gtatcgagcagttctgaacgccttggaatgatggaaagataaacaagtgaagatatccaatagggatgtggaacaagaaaactgtcacaaaggttcttttaaggaccaaaacgtagtcttgcaagtctttgtgacagaagtgctaactgaaactatcagagtgaattgactcaccaactaaaacaatgcnnnnnnnnnnnnnnnnnnnnnnnnnnnnnnnnnnaatgaagggacagcatcttggcgtatacctatagttaagggggttggggaaggcaaggagacagcacagagatctagaagaaattcagaagatcgctgtagcaacactgaagtcaagggaatcgttctccggtctgtgcccgtgagtaggtgtctgtgataactgctttgtaacagtacagattataaataaaagtctgtgggcagcaacagaaaaacaacacatacattttcagtgcgactgggtctgtctggccctgcccaccatgtggtttggggatctacttcgttccgactagagagcacccactcaaaatttcctctggatggcaacccagcacaacacgtcttccacctcata

SEQ ID NO: 372604 - DNA, 448 bp, Homo Sapiens
  misc_feature (180)..(188): n is a, c, g, or t
cttcagtgctaacatcctgctctcctctgttttcagtgtcttctgtactctggaacctgtccagtcagtattctgagtcatatgagatagaaatcagtctctcaggaagccccagacaagccagaatgttggacacacggtcaactcttttgtttctgtccaaggagtagacccagtatnnnnnnnnntttcctccaacttgctctgtgctatgctacataggaagaaggacatgaaaggacatgccaaacactgaaatttcctaacccttttgctgtaatctccttttggttttacagtggcctggtgctgtagcttctcagctcttcttcagagctctcacaaaggtattctggtccatatattgttgttaacacactaaacacactcttgctctcttgactttgctcatattgttcctctctaggaagggcttccacacgtcata

SEQ ID NO: 372605 - DNA, 186 bp, Homo Sapiens
tgtatgactgtttgaagagtccctgctctgaagtagttccatctggtcaagttatggaatcttcttaacagttaatttgcttgctctcagaacattaacaactaagttacgttcttggctgttagaatccctagcagatattttaaacttacatttttgatataattatttcacccccttcacttc

SEQ ID NO: 372606 - DNA, 690 bp, Homo Sapiens
gttatgaggttgtgaagtaatatgtaacattataattaatgttttattattttactctcttatagttaaatttcacacagtaaaatctacacataaacattcatgtttaatctaaaatcaaattataccgacataatgccaaaataactgctctatgagatcaataaatccaatctgattctgatatagaaaggcaaaacccgtgtgcattgctttgtaatagtaaccaaacaggcattatgtttcagccatttcaggaacttattggtgattgttgtatattgattataattctggtcagttgtagttaacaagccttcgttctccttatactttctttgttccaaagaacctattttgttttatagcatggttggacttttctctagaaaattacaaatgtattcaatataaccagtatttatcccaactttctgaagaagaaacttctcctacttaactccaaccttatgactcttctctgatatttttccagccataggtgttagcatctgctgttgtaaaatctttggtgttgattggtgtggactgagatgaggaccagagccaagatcactttttacaagaaatattatacaattctgccccttgtccaactctataaattactagaagtttctggaagtgtgtacatcttcaagctcatcttaatcatttccacacagtcat

SEQ ID NO: 372607 - DNA, 670 bp, Homo Sapiens
ccttgaatacttaggggcagctgcaccatttgcagatgttatttatttccttgaagaggtgttttcagggctgtaagagaaccctgaggaattcaagtgcaaaaatctcttggtatcttgcctcagtttccaatattaatagctgtgtggtgagtgttcagccagaaacggtatcattgcttaagtaaaaaagattgtggcaagtagcatcatggaaacaaagttgaaaggttttcttagaaatgatctcatctctgtggttttcaaattagtgctccatggagccacagtggtgttgcttgaagcaacagacttgcattttaattgttttactagttaagtttctgattaagatacagttcagttgctttaagaaaatggctgaccaccactgatctaatccatcaccaatttaaaggggaaactaaggctaaaaggaggtaagggatttgcttgaggccacccatttagttagcagaacttggtgacacatcaccagtggagtgggggtaggaaggatcttgtcaaaccttcctagtgtctgttctcaggtcatcaatggttgtaccaaatctttccatcactccattgcagggagtccactccacctgacagtttccgttctgaaacaggctccttttcatactggactctgcattccacagtcata

SEQ ID NO: 372608 - DNA, 529 bp, Homo Sapiens
ggaaagcagcatgtttgagtgccaggttaaatacattcttacaatgacccaatgaggtttctatcattatccccattttttagatgagaaaacatgctcagagaggttcagtcacttttctaaggtttcactgttgagatctgcgttcctgggtctggataaataatggaacacccactggcacatacatgagaagctccgagaaggcaggacaagcattatcatccccatttatacatggggaaactggggttctgaaagatgtgaataaacttgcatgagttctcacagctaataaatgagtccatctggactagacctgtttaggttcattcattcattcattctttcagccatccagcaaatgtttatcaaagggcatagttctctccagtatagccttctggttcttatatagataatcagaaatgattgaaggcaggacggatcaaaagaactccgcagcccatccctgcctcaaaataatgtgattccacatgttccattcctttcatcctttcatcgatcg

SEQ ID NO: 372609 - DNA, 694 bp, Homo Sapiens
  misc_feature (650)..(650): n is a, c, g, or t
agtctcgaggagactctcacgacagaaaggaatggaacatgtggaatcacattattttgaggcagggatgggctgcggagttcttttgatccggcctgccttcaatcatttctgattatcaaaataagaaagttcgacggagactctccactcaaaataattgagtggagagatcaaggtacaagacactctgcctttaccttcaaagtctgagcaaatatgattttatatcgttttaatcagagattcttttaaagaccaagttactgcagtcctgtcttgttcttctcctattttatactgatgtgctcagtaccttggtgtctttgtctgtcttttagggggaagggaacccacgttttggactagagtagcacagatgccattcttacctcactgtaggtttctttaaagaatgtttagtcctgacaatgcgatgcagatttctttctctccccactctatcttctcttgcagagctttatccctttttcattgttcagcatgactgggaacctgccagctcgccacaatgaaacataatgtttttgcgaagtgtgtgtcaaatgtcgtgagcttagaagagattcatcgtagagaatgctgcttaatgagtgttaaataactgatcatttggtaaatctgatgtngccagtgatgtggacgggagaatgctggataggatgttggagat

SEQ ID NO: 372610 - DNA, 387 bp, Homo Sapiens
accaaacaagcaccgcacaaatagaatagcatggacaatgagtatcaaggtaggaaatactgtgatgtgtttggaaaacaaccaattgttcagtctgactgaagcataggttacgaactgggaaggaacctggggatatgactaaaaaagtaaatagtgggccagggtgagaactatttagtttgaaaatgctctgcattccttgtaagaataagggcttcagcattcactaacccgtatcttccaaggcacacatgcttacgtgactacttagcagactgtagacagttaactctcggcctatttgaagtacagacatacactggatatattgtgggtttggtcccaaaccactgcagaaaagttagtatcttgtccggggttgtt

SEQ ID NO: 372611 - DNA, 552 bp, Homo Sapiens
  misc_feature (45)..(56): n is a, c, g, or t
tatctcagaagtgatgctacgtgactttcaaggctttgtcagggnnnnnnnnnnnncagcttaaaccgggctgactctctacaactgcctccacttgccttgggaactgtcattaggtcatgaggaataccaggccacatggaaaggtcatgtgtaggggtctcagctgacagccaatacctcctttagatgctgagtgaaggatctttgggacaacaaccctcagacttcagatcttccagatgctgtggagcagggtgaaccctccccattgtaccctatctgaatttctagcccacaaaaaccatgatggataataaatgattatggtggtctgaagccatttagggtaacaggttttggtggcaatagataataatatatgcagttggaatacgggcttggctccttagtttggtgaccccagaaaatgaacacacagtccccttgcttttagattggtccttcacaccagagctaatggctgtgagatgcccaacactcctggttgctctcttaagtgatctcgtttgtttttctgcttactgtcat

SEQ ID NO: 372612 - DNA, 570 bp, Homo Sapiens
gtatacgttggaaaaggtgaaacatgaatggtgacaagtgagaagaggtacagcaagtaatgagaaggaaagttgatattgatcacctcttcaccgccctggtcttgagaatgagggttgtgagggcggattcaggtgcgcatatccggttccatagacatgcagcaggacctttgcccagtccttgctgccagtagatccaagcagaagcctcagcacagtactccgaacactagatgatgctgacaaccaagttgcatgaagtggcaattggtcctagttgatcaatatggaaatagagagatatttccctgtatggtcaaaggaaaagcaaagttgggatcaccaactgtcaaaatgatggtcctcctaaggccttgtctccccagccaggtcacacttccccaagcaacagttggcagtggaaggatctgcatcattttgattaagtactattattagccacaatgaggtctgtaataatcaatgttaatttatacacctccctttcccaaaagcctctgattgattgagagaagtatgatctcctagtctgaagttattaacaca

SEQ ID NO: 372613 - DNA, 541 bp, Homo Sapiens
ttgacgtgtggaacagagcgcctcattctgatacatgcaatcagtaaaaaccatagggcaacttggtagattaaggagttactagaatttgctttagtctccaactgcaattctttattgatcatgaaattgttgaagagaaacacaaatgtcagttttacctttcctgtgggcgtgaaagcacatcgaagtttcaggcaactgttaacatctctaccatctgtctgagttgagatttcaggttgtgacacttgccgtgactgatatgtacctgacgttttgtgtgtcttagatactaatggaattcatattctggctagttctttcagtgcatttgtagacatgttcttttcctttgtagcagtcctccctcaccctgaaatgttggtgttctaaccgatttctaatgctaatttcaactggaagcactttttcaagcccagctatcaaaccacaccagacatgtatggattcgggttgcccaataaagcgttgctattatgtaagcatccctcacgcatacagcatcaccagttttggg

SEQ ID NO: 372614 - DNA, 535 bp, Homo Sapiens
ggtactagaaaaaaacgccattatgtaatggctgcatttttttaaagcctggttctgcttacagaattacttcagtaacaatgaaaagaggcatgttctcatgtactttgcctggttatacttgcagagtactccataatctttggaaaaaaatttaaaaagaccaaagttttatgcaacctatggcttttactttttattaccaatatacaaagtacataaaaaatatccatttttactctaccttctctgtcttcctatttccagatgctttaagtaggaaagaaaaaggcaaggcaacaaaaaattccatctattatactgaaggctgacgtttcaatgtctcatttgtaaagagtcagtagtaaaagtcattaactatcaaaagaaggaaaataactgtcacttaagtacctccttagttcataaatgttttcccacaaagaaaaagtaaatgtaaggcagatatgactacagaagttagttactattttcttttcataaacctttttgcttctttcaaagctcttccaca

SEQ ID NO: 372615 - DNA, 595 bp, Homo Sapiens
cgatattcgagtcatgaccatttcgtaaataagaggcgagtaattggtcgttgaatgattcttactattgaataaccttcctggatttgtatagttttgcaccaataaaactgtgtactactgtttgttggtttaagagtagcagattgaaatataagaagccagattagactctaaaattgtggccattggaatctcatttataaatggaccttttaagtatattaattcctcttcagaattgagctggacacatttggcattcttagtttgtcatataaccaggtttatccttagtctaactgcaagggatagaacctgccccaggtcacaatcattctgtccaatccagccaaggttccctccacatatgaagatggaccatggcaggacacaactgattgtgtggcaccatgtattagcagtgggaatatgtatcacatatgatgcagcctttcatatttcagcagtttgccactgtgactgtctggcaagcccccagatggcgttatattaattggattagattattttgctcaccttatgtaatactgtaacttcctataacctaatttttcggtatcagtaaccaaaa

SEQ ID NO: 372616 - DNA, 116 bp, Homo Sapiens
gtatgacgtgtgaatagaggagaaaaggtatgaaatgaggaaagtgttatttgccacaggaaatattggattcagttgatttttaaaaatgaggtataacagtatgccagtaaatg

SEQ ID NO: 372617 - DNA, 531 bp, Homo Sapiens
ctagttaaaaccaaccttaacaacagaggaattggaaatgcatttagaaagtcggtgagatgaaaaagtgatggaggtagtaaactttttcatgggttctggggacggcatttgtgatgaagaatgaaaatccacttctttaggtggcacaaaagcaggttctactaattctgacagccaagggtccatcttttcatcgaatggcattcgaagacctttgctgattttgaattcatcaggtataaagttctgaaatggggaatgactttttaactgcaaggaattccaaactttgaaatgggagttgttctggtctaaggatgcagaaaggttgacatgcttggctctgcatgatgatgggttctgccgtcctctggtcatttctgagggtccagcagatctgaaagcacaagggtgtctatctagttgtggatgttcagaagttagagtccggaaacatcccttttcatggctctaaataaaaatgtgactacatacagcttctggcttacgttccctcgccgggattcc

SEQ ID NO: 372618 - DNA, 396 bp, Homo Sapiens
tctccgattccatgaaacattttttttaaaacagtgtaagggatcatattcgttttactatacaaaaggacatcattgaggaaaagcttgtttctaggctgtatcacagtaaataatcttgattgttcctagaacaggggtagaaaagtcccaagatcttcagaagggcttggttttttcctcccaggattcttgctcagtgatgagttgaaagcacagcataagcttctaagggaggaaggcagcattggggagcaggaggctgatggtcctcctcagggtctcagtgtaaatgataaattgtctaaaaataaggaatattcctgcctctagagaaataaggtgtacatagttaatgtagcatatctggtcgacgttgtatttgtatctatttgt

SEQ ID NO: 372619 - DNA, 661 bp, Homo Sapiens
  misc_feature (205)..(213): n is a, c, g, or t
  misc_feature (629)..(629): n is a, c, g, or t
tagacgtgtggaaatcacactgggtgtgatgatggcttgcccatccattactgctacaatcaaggccaggcttggatgttggccagtcttgttttttaggcacctttgcatgatgatgactcttgaacagagcaaaaaacaaggaggattatgtgtgactgggtgaactgttagactcctcccacgttttgaatatttcgtgccnnnnnnnnngttgtcattttctatgtcatttctcctaccatagcacaaatcctagcggaccctaggagcaaagaggggggcagccctcatgcctaacagtggtctgtttttatatgagactcaagaacaggcctcattccagggcacagtccctaaattactgatcatgtgcactcgtacagtatattactgtgaccacaaggatgtggcaaagattctcatctttcttcaagtggcttttgctcatctgattgagaattaatcagatcatgttggctacataaggaaacagaaggagggatttcaggagaggctggctcctccccaaggttagtccccagactgagaaagtgaaaccttattgggaaaaattggactgccctgaatttaggcaccaattgcattaacgcacatctcttccacanctaacagacttaaattaacagtgttccttcgt

SEQ ID NO: 372620 - DNA, 234 bp, Homo Sapiens
ggagctcggtacctcctaatatcaggtgcctataaaggggacattcataggagagtcccatgaagacaaatagtctggggtgggagtccagacctctttggacagctgccctggttctctccttccctttgctgccccttctcagggttgttcctctcaaaatatgtttcttgatgcatgaatgacattgcatttaatttaagaggcaattctctgataagaaagtcctgcctt

SEQ ID NO: 372621 - DNA, 143 bp, Homo Sapiens
ctatcctaccccaggctcagaatgttggggtatctccacctgcctgagaacttcaaacatacagggtgctgggcttagatgggcagcagcaccttcgttcagtgcatgagtgaatgaatgaatgagggagagaaagaggaagg

SEQ ID NO: 372622 - DNA, 306 bp, Homo Sapiens
tgtggaagcgtctatcagaacatctttcctctcattggcagctcactacggagcttgcaaaggttcacaggtggctgaatcccaacccagttgtaaatcacaacatgggtacatcttgcatattttagaagacagaaaagaaaataccttgtcagccagcaatcagaagcacattatatctcaaaaggtctgccccttgtgcctgtcagcctgaatgggacctttcacacaaaccttcctgcctattcacttagagcagccagacaactccctccctcccatctttcaaattattccacacgtcaa

SEQ ID NO: 372623 - DNA, 928 bp, Homo Sapiens
ttgacgtgtggaagcagttcttggggatgtgactactgccacggtgacaattctagaccaggaggcagcagggagcctcatattgccagcaccacccattgtggtcacacttgctgactatgaccatgtggaagaagttaccaaggaaggagtcaagaaatccccctccccaggctacccactggtctgtgtcaccccctgcgaccctcatttccccagatacgctgtcatgaaggagcgctgcagtgaggccggcatcaaccagacatctgtgcagttcagctgggaagtggctgcccccactgatggcaatggggcccggtctccctttgaaaccatcactgacaacacaccattcaccagtgtcaaccacatggtcctggacagcatttacttcagccggcggttccatgtgcgttgtgtggccaaggctgtggacaaggtgggccatgtggggacccccttaaggagcaacattgttaccattggaacagacagtgctatctgccacacaccagtggtggctgggacatccagaggcttccaggctcagtccttcaccgcaaccttgaaatacctggatgtcaaacataaggagcatccgaacagaatccacatttcggtgcagatcccacaccatgatggaatgctgccccttatctccaccatgccgttgcacaacttacattttctactgtctgagtccatctacagacaccagcacgtctgctccaatttagttaccacctatgacctgagaggcatctcagaggcagggttcctggatgatgtggtctatgatagcactgcctggggcctggctacgatcgccccttccagtttgacccctgcgtgcttgatgcgttgttcccttctgatcgtggtgattaagaggtgaactcactgacaacgaccgggatcctctgag

SEQ ID NO: 372624 - DNA, 123 bp, Homo Sapiens
ttgacgtgtggaaagcctcaaattattaccatgtactaaatctggaagtcattttgaaaattcagtgccttccaatcaatacttctgggactgagtaactgtgatgggagaatacctcctctt

SEQ ID NO: 372625 - DNA, 340 bp, Homo Sapiens
gagacacccaagtgcttctagaaagatgcctagcactattgttcagtaagtagcaaagagaatatttcttttctgggttttgtgggatgcagatataaaattggggattgctacatgattttgctaccctaagtgaaaccatgatgacatgatacaaggaagaagacaagttgagaacaattggagagaaagagaactggagtcctaactaaactacacttgaaagtccaccttacttttagagactttacaaccgaccaaaaagagtttacattacttgtataagcaatttgagtttttttgtcttttgctaccaaaaaaattctaactaatacaaaga

SEQ ID NO: 372626 - DNA, 133 bp, Homo Sapiens
ttccctccatcatccttctgttccaatgtaatagggctgctgcagttttgctgtagaaaggcttaaacttttgaagatgtcagctgcctctgccttttgcagaaaattctgttaaaggtgaaacaagtaaaaa

SEQ ID NO: 372627 - DNA, 580 bp, Homo Sapiens
gataacagcaaaaaccacaatgtgatggctagacagagccaacccagaactggccctaatatcgcagccagtgctcaccctttgatcctaactggcctaggaatgtccaagcttccagcacttcatgcagaggcacccctggcacccatcctcctttgccttgactttgctgtgatgcggagagcagcagcgctgtctcatggggccgtgttcatcctgctgtgccatctgtggcgtgggctgcctggttctacctctcagttgccctggtttgtggtggtgagtctggtcccttgtcggcagcagcagattcagaagcttagatggttatgcagacttgactgcttggaccatcacttcctcattagtaaaacaacagggtagaacagttcctttctaaaggcctccaggagttttcagggcaggagggtgtgatgatggcaggcaggttgaggtttccgtttgtttcacaacctcggcctcttgtcctgcatgcactaaagcattggggttgcaggtaacagagtcctgctcactcttaccagggtgagcctccatacttgcccattccacacgtaac

SEQ ID NO: 372628 - DNA, 161 bp, Homo Sapiens
agtgtggaacacaaaataacattccctacatggtgaacatttctcttctacagcctagttgaatctattttcagtacccatttggaaccaatcttcccaagttttgaaggataaaagtagtaagtgaaattgcaaagctcacatctaaggtactagaaaaa

SEQ ID NO: 372629 - DNA, 382 bp, Homo Sapiens
cacttggtgatcttatgggatccattgcgccacaatgaatggaatacaatgcgttcaatcgaaatccattgcaccacactgcatggaatccactgcattcaatcgggatccatttagccatgcttcatggaatacactgcgttcaatcgggatgcattttaccatgctgcatggaatccactgcattcagtgatgctgcatggaatgcactaacttcaatcgggatgctttggaccatgctgcataaaatccactgcatttaatcgggatgcaatgagccacgctccatggaatcaactgcattcaatcaagtctggatggaatccactgcatttaatcgggatgcattttaccacgctgcatgcgtcggctactcttccgg

SEQ ID NO: 372630 - DNA, 568 bp, Homo Sapiens
accctattgatgcagtggattccatgcagcatggattaatcgatcccgattgaatgcagtgtattccatgcagcgtggtccaatggatctcgattgaatgcagtggattccatgcagcgtggcccaatggatctcgattgaatgcagtggattccatgcagtgtggtgcagtggattctgattgaatgcagtgaattccatgcatcgtggcacaatggatcccaattgaatgcagtggattccatgcagcgtggcccaatggatctcgattgaatgcagtggattccatgcagcgtgattgaatgcagtggattccatgcagcgtgaagaaatggaaccctattgaatgcagtggattttatgcagcatgattgaatgcagtggattccatgcagcaagattgaatgcagtggattttatgcagtatggcccaaatcatcccgattgaatacagtggattccatgcatagtgattgaaagcagtgtaatccacgctgcgtggaaaaatggatcccgatcgaatgcagtggatacgatgcagcgtcattaaatgcgtcggctaatttta

SEQ ID NO: 372631 - DNA, 528 bp, Homo Sapiens
actagtacgcatgtcatgtctagtacacagagtccgtggtatcaatcgtcgtgaggggaaaagccttgggtgtgcttatggtgtcatacccaagtcaccgctgactccaatgaagtttctcctgtgttttcttctaggagttagagttttagcttttaaattatgtctttgatctattttgagttaacttttgtatatggtgtgagtgtccagcttttttgcctaaggatagctggttttcccaacaccatttgttgaaaagatgtcctttccccattgaatggtcttggcatcctgtggaaaatcatttgaccatatatgccagggtttatttctgggcatgctattctattctgcacttctgtctgtacatatttatgccagtgccacattattttgattactgtagctctgtaataataagctttgaaatcaggaagtatgcgacctccagctttgttctttttcaagattgttttggctacctggggttccttgagattcgatgtaaatcttaggatggatttt

SEQ ID NO: 372632 - DNA, 278 bp, Homo Sapiens
cgatcttatctagggccagacgctgcacaacatcagtctttgaacttggtattttggggactttctgaatccaaggctgttgaggaacatggaagagttcttatcaaaggtggttgactaagccaagtgtcttcccaacattcactttggtgtctccacgtgtagcagagaaaggaagaccagcaaattgtgatgtagcaaaaattttttttaaaacaccgtgggttgaacttctcataccttcttaactttccaaagccccttttctgtctctgtta

SEQ ID NO: 372633 - DNA, 256 bp, Homo Sapiens
tctaggggcaccagaggttgctgtttcaccacgctgtcctctcacctcagagcagtgggggccttcccagccctttggcaggtgggcagggcagtgtcacaagcctctagggtgcacgtggagaatgagaggcagagagaagggagatggaggaagggagacggacaggccactcaacagggaggcggcagattcaaagctgctgactcctacacatggtcccctgggggactgagcccatggtcctacctcaaat

SEQ ID NO: 372634 - DNA, 231 bp, Homo Sapiens
aatctatagtactttggggttaagctttgacttgcaggatgtaatttactgaccagtaacaaagactccacctagctggaacctcattccagaaatgtttcttttgataagattcttagatactgaaacatcatttttaaaaagctgtgctttgggaaatcaatttgggggattggtttcaggaattacaggcagcaatagcttcataaatgtgcaacccatgcagcctcc

SEQ ID NO: 372635 - DNA, 281 bp, Homo Sapiens
ctctagtggacatccagaccaaaacaaaatacatatttagaacaattgcaagagtatgagattatccagccagtagtccttcttctatcaccttccatttcagggcctgcatacttgactctcacttctttttcttaaaaatgggctcaaaagcaaataatcagtcttgggtcacatggccaggagaagtaagaagagtgaaggttattgaaggttacagaacatgcaggaacgagtcgagggtgtggcagagtacagagactaactcctcaagtccctta

SEQ ID NO: 372636 - DNA, 345 bp, Homo Sapiens
aacccgtctaggggcatgaatgcattcactagaagggggtcacctggtaggggtcaaaagactaaagtctgtaccacaccttcatctggtcatgctagcatctagggaaggactcaagcagctgattggctgttacagaccccactcggcctggtgccaccaccaaaatcaccaccacctccacctacatttctgcctctacacttaaagttaacaagaaaaccaaagggctcattgatggccttactaagtttttcacaccatcacctgatggtcgcagatcacgaggtgaaattatagacttttcaaatcgctccaccaactaagaacggccatgcagcatca

SEQ ID NO: 372637 - DNA, 250 bp, Homo Sapiens
ctttccccgaacctcaggtattcaaccgcctccacaacacttccacttagatgtctaacaagcacctacatttgaatcttgattccaattaattcccatcccctcaagaaatgcctgcccttcagccttccccaccagcgaaaatgacaactccaacacctagctgcttaggccaaaaaccgtagtcatctctgagatccctctcacaccccatacgtgcaagcctgccctagaggtgtcgaatcctcgg

SEQ ID NO: 372638 - DNA, 197 bp, Homo Sapiens
gacactctaggggcagaaaacgtgatctaaaggagtgaagaggcttatctggagatcgcacaaacaggataagacttgcgccagagtacctatccccaacttcggaagttagttttaaataagctgatgatctgatttacttatgtttacatatgtagctgctaactgaaacaaatttatttcttttaaacggaagg

SEQ ID NO: 372639 - DNA, 386 bp, Homo Sapiens
agcgttcgaggattccgagtgaggttccagtgttgcccctagagacctctggagtagaaccagctttttgaactctgataataaaagcaaaagctgttttatccggctctctactaatagaaagtctttattaactttacctgaactggttttgtcagtacagtgactagagactggtagtaaatgataacctagtggtaatgggagatcctgaagtctcctgaatcatcaaggacaggtcacattgggttcagggcagctctagccttttgagtatgtttgatggtaaggagttccaaacgcagccactccttgaaagatgaggtacctggtgattggctgctgagtcactgaccgagatatactataaaaatgcagatttccca

SEQ ID NO: 372640 - DNA, 293 bp, Homo Sapiens
atggccggtggggatgtgtaggcataaaaccacaggactaggtcagacatgacccaggaagactcttaacaaacgccctcaggtgtaacagcaggggcaggctgggcaggggtggccctcagtacagttgcatttggcctcagatttgtgactaagagaagcataatatgaggcaaaacctcagcatcctcctctaccagcaggagagctggactacaacagcaatttcatgatggcaggcctcaacccctgattgaccaggaaatctatgtaacaggttataacattatact

SEQ ID NO: 372641 - DNA, 407 bp, Homo Sapiens
gaggggctgctgtcatgatataaccagactgctgtggagactgaagaaccacagtggactggaacatggcggcatgagggtcagaaccatcagcagatggctggcgagcaagactcatgtggctaaactgagaccctaggttatcctgctgtgagaaaatgtgattagctgctggttgttgaggtggggctgggagaggttgtctgtggaggtccaggcacttgggatctaactggttgttgagtcataggaggactatacacaatctggactcccatctgggtttatgaagggctgacctgttggtgggttgatcagaatacgtgccaggtggtatgcctgccgcttccaagggaagcaaaaagaagctagtgctaggagatgcgacttgcccatttaggccacca

SEQ ID NO: 372642 - DNA, 252 bp, Homo Sapiens
cagaattccccagtgcccctcagctggctccgtagaagcagcagcagagttctactctctattaaccatgaggtcacagataaggctccggaaatgcagttctagaaaccaggaagtaatccttggccaacgatttccttggcagtcatcctgaaagtcatcccatcaacccatatagtctaatggcattcaagtcacctggggggctggtcaaaaacgcctaggataaggacccaccctacctcgcagtca

SEQ ID NO: 372643 - DNA, 331 bp, Homo Sapiens
acacaggcgaagagcaccttccagaacaccgtcaggaagtgcatcacgtagtcatagcacgacggcagccgctcctcccgggacccgtcctcctcctcctcactcgtccacctgcgctcacctgtaattgcctcttaaaaactgctccctccatgaatgggtcccaattaccaagaccaagttcgttttcttgatgagtttatccaccgtgttcttaaaatcatatgactcctcgatgatgacctccacgccggcagttcttccccaagaactggcttgcccatctctgctatccgcttacgaccacgacctatctcagcagcacctacag

SEQ ID NO: 372644 - DNA, 140 bp, Homo Sapiens
ctcttttgggctcccccatcaagaaacccggtatcatctacgtgcggtggctcatgcttgtaatcccagcactttggggggagggggaactccttccttagacagcagtggtctttatccctttctggtaagaaaggaaa

SEQ ID NO: 372645 - DNA, 212 bp, Homo Sapiens
ggaactcctcagaaggcaatatggtaagaaccttgaggaaataagtgtaaattgtaaatcagccacaaactcagttttagcctaccttgccttgcgtattccctcttgcaagactaaccagagaaacacagaatcaagcctttatcatttggtaaattgtttcatcaagaatactggcccaagcatggtggctcacaactgtaataccactg

SEQ ID NO: 372646 - DNA, 220 bp, Homo Sapiens
ctccccgttagcagcccagcataatatttaagggcattccagcagggaagacagctattaaggatatgattgtacaattaattgttatcattgtaagtgccacaaggaaaacaggataccatgagagcctattaaaagaagacctccctcatctgtgcaggtcaggaagggattctgcagaagagttgagatctgaaaaattagtcagacttagccaaag

SEQ ID NO: 372647 - DNA, 360 bp, Homo Sapiens
  misc_feature (50)..(66): n is a, c, g, or t
aacaaccccggacaaaggacagagatgtggacggaggaggaagggagtannnnnnnnnnnnnnnnnacttttttaattctaccataaaatgcaactcgcctataactggcagttgctctgcctgattttagagagtgcctgggtgtgttggcctacttctccctcctactccctctcagtgtctggcccctgaggccagtccttgtggtgccacaacacactgcatgaataaatggtgcctcatttcagaggaaaaactgaaagcaagactgtcagccattgagttccagggacctaagagcctggatgctttatcccagcattggtttaaaacactgtgtgtccaggttgttggaccac

SEQ ID NO: 372648 - DNA, 235 bp, Homo Sapiens
tcctagctcttgtgtgacatctacaggcatgagggtgaaccaaatgaatagggcctgaagggaacccccgagtcaactgcagcagccctacagaagagagacctgaccattgaaagaaaaacaaacagaaagcaagaacgacagtatcaacaacaacaaaaaaagtccctacaaaaaccccatccaagggtcagcagtctcaaagatcgaaactagacaaactaacgaagatgag

SEQ ID NO: 372649 - DNA, 441 bp, Homo Sapiens
gacacatagagagatccccagatatgtacttcgtaattgtccagaatctacagtaattctgatgcaggttgactcagtgtccatattctaagaaccactagtttaatgatgattccactggttggaatcatctctttggctggtcccaggataccctgaaggcagtaggttgtgcagaatcagatggaacacacttatggaggcatgagagtcaccaagtgaaccttttgtgcaaaagtgcaaatttgatttggaattctcaaagtcctatttattacaaaaacaaaggaacccagtcaaatgaaatgtgctggatagaaaattgtggtctttccatagaaaaacctgtttcaccagtgctttgttattcgaatatttaaggtattcatatttcaagtttattaaaccagtttaaatgctcctccacctacttatgattaa

SEQ ID NO: 372650 - DNA, 443 bp, Homo Sapiens
gccactatcgtattaaggtcatgccattcctgtgaagctggtgcttgttactctctactggcttctgttcacctttccaccggccccaagacacacacatagtgacacaaggcagtggacagggaaagagcaagactttataaagtaagcacagaacaaaggtatctttctaatgaggaggaggtgttggttctgggaaggaagcttgggatttgggtattcaggatccagaagtgagagagcctgggaagttcaggaaccagagaaagaaaaagccttgcccattctcacccatgacactgtgctcagcaggtactagcagacttcaggctctgtgactaaaaggggtcagaccagttgatactacccacagctgccatgtaaggatgtgtgtggacttcactagggaagaacggtgttacgaaggcaaactggggatccta

SEQ ID NO: 372651 - DNA, 427 bp, Homo Sapiens
aagtcagcacacagttcctaatccttaggtaaaaagatacacttgtgaacagtaacgctcagtcaagctcacagcctctccacatcatcagggagtcaacgtgcaattaataagcaggctaggatgcttgaagaatcccattccattcactaaaaacccagggatgctcatgcccaccctaagtgcagggcaagccctcggtattgtttcagttaacattcctgggcctcagtttcctcgtctgaaaaaggaagggactttggaatgggaaatctcaacgatccctctcatgattcagataggctagatattcgaatccaccaatagaggaagagactttctgacagccaacatttacactcctactattttggaacaaccagaacactgaaaatttggtacgaaaagcttttcttacgagtgcaac

SEQ ID NO: 372652 - DNA, 395 bp, Homo Sapiens
cgatctctagcaggatccccagattgcactcgtaagatgtgtattaaaataagtaccctaaatacaattatgttatcagtaaccctggagtaataaaaattaagcattaccaaactattaggaacagagaacaaggatgattagggaaaacctcagggagatgattatatgtggatatggtattagagagacagtttgatttcaccagaagaaatttttttaagtgtgaaaagaaaaagaatattctaggtaaagggaatagcatgaatgtaagtgtggagccaaaatgtgtatccaaggtagggaatgtagtccacattaggtagagtgtacagttcttattcttgagtaatagaaaatatgctgaagacagcctgggcacagttgttcactcc

SEQ ID NO: 372653 - DNA, 692 bp, Homo Sapiens
tctagaggactccccagtgccttcgtaacgttctgctgccagcccatctcccgggctggaaagccgcaagcccttggcactttcttctgccccttgcctgacagtgtttgcctttctttggatgatggagcagtgagatcatccaggtgccccccaggggcttggcagagctgcttacttggatctgctccaggtcagccaacaagatggatttaagggtggatataaacagagttgacaacaggttccagggtctttggcaagggtgaggtaagggggccacactttggtcaccttcctgaggatcctgtcgcccttatcagcacgacctgagtggatgggcatcagacacaataagagagagaggcctatgtatcaggaccccgctggataaatgggggtttggggatcttctgtgatttgcatttcttcaataactgctgccaggaagacggatgatgaagggttaaggacacacagaagagatgagactcccaatataacaagcagggaataagacttccaactccaaacaccagtcttctgaatgtgcctgccagaattctgatcatgaagactgccgaagtgttctgaccttgcacctcagaattccaaccccgtacattagttccaacctgggacatcagcattctgaccttgcccgctagagttttaattacgaagtacaatct

SEQ ID NO: 372654 - DNA, 373 bp, Homo Sapiens
ggcatccccagttgcttcgtaattcgtgtatattggccacagctagcaaataacaggatgattgaatccaggcctgttttattccaaaaatcatattaccctagggtacagtgtgccccatcggagaacacaccaggaaaagaaatatgacctcctttattaacagtctttcatactgacctttaatgaaaacactgactttaccgaccattgggaaagtagctcataaaactaagttatctgtatgagtcaataataagcactaaaggggttaagcttcttgcactgaataaagcaggtggcatattttttagaatttctagtttaagtagcttgtacttccctgtactggggatcacacgctaaagaagct

SEQ ID NO: 372655 - DNA, 591 bp, Homo Sapiens
agtggtcgtctctagcaggatccccagttgccgtcgtaaccttttagaatatgtagctgtcttttatatctaaatctaaatacctttgaatttggcagaatgtcatattctttcacattgtctcgtagaacaatcaactcttccagatatttctgatccttgactgactgaatttctctcatggctttgtctggctatgtggtcacaatttccaatgttattctattgacaaggttttttagcttccagaatagctgaccagaagcctctccatccacatttctattgcagacattaggagaacacttgaagtacacggctttgtctgatctgttcagagttcctaactttgccctttactaccaattgtccagaccctcagtttcttcttctatcaaacaaagtaatattacttaatctcacatggctgttgagagaacacaatgagtttgtgcatctaaagtgccttgaatagcgctaagacttgccataaagtaactactagatgtactctaagttctgtatttacttagacaaacctgatttcagagatcaaaataggccttacgaagtgcactgggatcctgtatg

SEQ ID NO: 372656 - DNA, 736 bp, Homo Sapiens
  misc_feature (240)..(339): n is a, c, g, or t
gcagttgtactcgtaaggggtgggagggtcacaatatttgttcaattttcagcattaagaagtcctaaacattaaaccaaaatggatccttcatgatttgactgatgtttatgttaacaatgagctatcagattccattatccaacaaagtaaatatctatggaaataatatagaagtttaggctgaactcaagaaataataagatatgacctggatttcctttcatttattatattgcnnnnnnnnnnnnnnnnnnnnnnnnnnnnnnnnnnnnnnnnnnnnnnnnnnnnnnnnnnnnnnnnnnnnnnnnnnnnnnnnnnnnnnnnnnnnnnnnnnnnatggatttcctttgaaaataattttcctagtacaatgtgttctcacaaaatttgaatattctaaaacttaagtacagaggaaaagttttctgaaattacgtatctcaagagtcaaagcttgaaatcactttgttttctaggccttcttcaataaagaatttcggatgaagtacatgttattctgtatgacagtctgttgtttccaagagaataataacaagctgtccttgaaaagaatggctggtgatggaattagctctagagaatttaaggtagtatttgccaagaaagaaggtcagtctgatattgtgtcaaacatatcctttattaacctgaataagtaaatatatgaataagtaaatatacctaataaattacgaggcaacgtggggatccc

SEQ ID NO: 372657 - DNA, 147 bp, Homo Sapiens
gggtctagtgcagctaagcagacaccgcacagccggctaacttggaaagacattaggagcttggtcttgaattaataccattctaaacgttttctatgtatatctgaaaattcacatagtgttgtctcatgtgaccagggtagatct

SEQ ID NO: 372658 - DNA, 472 bp, Homo Sapiens
atctatattcaatgtaactaaaataaacacatgacaaatttaaaatatataaaggaaagaaatacatgcattactggtcaccatatgtatgttttttaacatgttacctttaccccaaggagctacattaatggctaagtagacattacatcttagacgcacaaatacgtaactttaaaactggctcttaaggtctgcaagtagtattgcccattctttacacctcagaactcacaattaaggtaatattaataataatccccataggacagagtataaacccaagaactaaggagagagaattgagagcaggaaaggcaggaggggaaagcaggctagacaggcgcccagcatgtcgaaataatggtgtgactgacactccacagcaatctgtgctcctggagtcaggacgtgagccgacttgcgtttaaaatacatccacatggctcacgcctctccgggatcctctgga

SEQ ID NO: 372659 - DNA, 398 bp, Homo Sapiens
gaggatcccggagcggcgtgagtaggtagaaagcaagtccttgaaagcacagaaaggaaaggaggaaactgagaggtgtgcttaaaaggctgtgactaggatgcttcagtgaaaagcactcctatagctggtctcttctagttgctttgatacttttggggggaaaaatctgcactcaacaccatatgaggcctcccttctgcctattagtcttagagaaaacatatctgcccatctattcgtctttcttttggtctatccatttactgtctggacacagttggaaagttgctttttttcgataagaggaaaatgggtacatgatgaaattgatgctttgggattaaatagagggtgcacgtcttatcttccattcctttgtgtgtctacaaagactt

SEQ ID NO: 372660 - DNA, 290 bp, Homo Sapiens
cagaggattcaagaggcgttagggaagggcaaacttcacagaaacagtggccaaatctcacatctgcagaggtattgtcttttcctggacattccctttgctgccccctggggctttctcttgtcagttatctcttctgtcccttgcatttttctcctttttcattgactcattcctctctattcacaagttttctctttctcaagtccctctacctctaactaaccttactttccatctctgtgcccaaaacttgctcatctgcaaacactctgcactaaacgcctctg

SEQ ID NO: 372661 - DNA, 278 bp, Homo Sapiens
gccagaaactctgctgagaaataaagattgcatgttggatggcatgtccaagtgttgtatgtcttaggaatcggcccagatgttcacagcagatgaggaacagcatggaacacacagctgcttcctattaagtgattttcactcttctagtcacaggctttacagggtttagatttacactcttctatttgcagcagtcctactatctctggaatgttctggctggctttacaaattctgcctatttcttcatagcactaacaaatctaccgcctctg

SEQ ID NO: 372662 - DNA, 461 bp, Homo Sapiens
gggaggctgtccagaggatccggaagaggcgtgaggatgaataatctaggaaatcccttgaaaggaagaaaagaggatcatcagagacatcttctggagctccacaaactgctcagagcagagaggccaccagatacgaatgctgcctcagataatccaatggaggaagagggtttggctggtattttctggctgagttcttgataagaaactgtaatcacatctgctagctagggatccaagaaaaacaagatatggtctctttatacacattccacagcccctaccttctctcaagagatgttaaaatggcttaaaatgtgttaaaatgtgacaatttaataaatgtggcagaaacaaaaaagagactcctaaagtattcctctctacagagagtatgaagctattaattcagcaaatgaatccaggagctcagaaagggtaccagctaacgcctctga

SEQ ID NO: 372663 - DNA, 141 bp, Homo Sapiens
ctccgaggagtcccggagaggcgttaggcttctctatggcttctgtagcgccatcatcctatgtcttactccattttgtgctgccatggcagaatacttgagactaggtaatttataaagaacagaagtttattttcttgt

SEQ ID NO: 372664 - DNA, 480 bp, Homo Sapiens
gaggatccggagaggcgttagtagaggtaagggtgggtagaaatagcattttttcccggaggcctttcctgtaggcaactatagttaaggagtgcccgtgtgtgatgaaaactctgccaaaggaatacctggctgaggaaattactttccaaaggaaggtgggaaggaaatcagcccaaagcccgtgactttcacacttcaggcaaagttgagaggcagttagagggaacagggttgaaagcaacaaaaagtgccattttgatgagaacttcaggtgtttgttccaacatcaacctccctcccatacacaccaggcagaagccatgacctcaataaagagggagatcggaggacttcctgagaagggcgtttagcttttatgtctcccatgcctccagaacgtggaaaacacatgccagctcatttaacggggcaccttttctctccgtctagacactgctctctgccgggcctcctttc

SEQ ID NO: 372665 - DNA, 205 bp, Homo Sapiens
tccaacaccgcccccccggtaagtagatttctacggacagtgtataaacattccactccgcgcatcaaatcattgtggtttggaactaacggtgttaacaacgggagataaacagtggccagatatgatgtgaatctgccctttgatctgtggaccaatataacaagactggagagaacacacaatttcctccctggatatacat

SEQ ID NO: 372666 - DNA, 455 bp, Homo Sapiens
ctcgaatctgagttacaatgggcccttctactccaggaacaatgattgtatctccttccttcaaacgcccattgatcaagatgacatctatagtggtgcccatccccgggagagctttaacctccatcacctgtgctctcagctcttcacagtgtgcaagtctcttgctcaacatggtctgagttaactctacaagaaggtagatcagacttcccatgccatcaccagtatgagcagaggtaggtaccaaagacacaaaagtgcggggatctttattctcataaaacaaagcagcattcaaaccctgctgtgcagattctagaataatagcctttgctcgctcctcaaattcatcttttgtattctttttctgcttctttaaagtagcagccacatcagagtcaggactctttttccaatcatataacctatcaatcttacgaagtgcaactggg

SEQ ID NO: 372667 - DNA, 198 bp, Homo Sapiens
atgtcacaatatcactataaggcattccttcttccattctttttatatctccacagaactgctctcatgggaccctgtcctgccctgtaggtaaaagcccttcttattttccgctgagaggtctacccactttcatagggtgtccagtcaatttgtgagtacagtccactggagtcttcagaacatcaaccctgccgg

SEQ ID NO: 372668 - DNA, 559 bp, Homo Sapiens
  misc_feature (309)..(309): n is a, c, g, or t
ttcgttatgcactgagttggcacctggccgaggggacatgcccacattgactgataatacccatggccgctatgtcttggtcatttatgagaacctgctcaagtatgtcaacctggatgcctggagtcgggaactgctagaccggtactgcgtagagtatggtgtgggcatcattggctttttccgagcccacgagcacagcctactgagcgcccagctcaagggctttcccctttttttacactcaaacttggggctccgggactaccaaagtgaatccttctgccccgctactgcatctcacacgcnccagccgcctagaaccagggccactgcctggtgatgactggaccatcttccaatccaatcatagtacatatgaaccagtgcttcttgccagccttcggccagctgagcccgcagtgccaggaccagttcttcgtcgggcccggcttcccactgtggtacaggacctggggcttcatgatggcatccagcgggtgctctttggacatggcctttccttctggctccacaaactcatcttcgttgatgctgt

SEQ ID NO: 372669 - DNA, 370 bp, Homo Sapiens
  misc_feature (173)..(215): n is a, c, g, or t
gatttcaccttgcagtatgcaagagttgcttacatcttactaacactttaatgtcagattttaattttatgtcaactaataaatacgatgtggcatcccactgttattaatttgtattgccctgattacctttaaaatattcttttaggactattggccgatgaattgttcannnnnnnnnnnnnnnnnnnnnnnnnnnnnnnnnnnnnnnnnnnccctgaagggtaggagtttttaatatacttggaactaaatctgagtctgctactgtgtggcaaatgtctttcctcggtatctttttctggtcataatttatggtgtctcctgtgcagaagtctaacatttaaatgatcatagtgggtgtaggctt

SEQ ID NO: 372670 - DNA, 115 bp, Homo Sapiens
ctttagacagaacaagttcagggctctccagcccagcccgagtcactgctcgttctgaggagcaatcctgcacctgccctccctcctcctgatctactgttccgggaccaggcta

SEQ ID NO: 372671 - DNA, 151 bp, Homo Sapiens
aaagttatgctttccacagaaaaatacaatttcagagcatttatagacttctagaaacccatccatgggacttcctttgggaaggttaagaatcctgagaaaaagcctcttcaaatgtgtttgtgactctgccggtgaatctgaccgactc

SEQ ID NO: 372672 - DNA, 618 bp, Homo Sapiens
tcccggtgtttatcgtatgcacatgtggcatcaggagacaaaagtcttaaacagggtgtgaacaaacgactggacccaaacacaaagttttcacaggcttccatgaacaccacattcctgaatggtcacacttcccttcctaagagttaaaatggaatctatgatttgaaactaatcattatttattagagtctgcagatgaaactcacctttgagataaataaagaagaaaagacactcagtcaagataccaacccaggaataactgagggagaattttcatctaaaagaaattcaccgggtaaactcttaagaggtactgttggtataatttaataaataaaataggatgagaatctatatcagtaagagtctcaatttttggtaccttagaaattaactgtgagctaattaaagtggaaaagcaatgatttgtaaatatattaattacataaaacttggtaaattaaggatatgtgcttaatggtgtacatatctaattaagtaaaaaggtttatcattgtattttattgatgaggatgagataaataatagctaagcattcctaaatactctctaaccaggcatactttaaaacatatgccgtatctggggatc

SEQ ID NO: 372673 - DNA, 827 bp, Homo Sapiens
ggctccacaaactccgggagctcaaattcctcatcatcatccggcaatggttcctggctcttgactgagtgcctatgggagattgggttgatcaaagggtcaaagtagaaagctggcaagtcaggatcctcagttttgatgaatacaacattgggagtatggtaccaggtgaggtggacatggtgtggaagattgttgtacaagtaaggaaaagcaatctctgtactcagtgcggataggctgccggatgataatcttgttaatatcattgaattcattccagtcttcatcctgtaggttgatgtctcgaacaagaggttcaaatttggggcctccaggaatggccatattgagtgccttggacgtaaagaaggccttcaaatcaaacaggtagaagtagttgtcatccaccaagtctgtcaggagctgattagccaggcggtagagagtcgacatcataggtagtgtgaactgccagcgctggtaagtggagccatttacatacttcctgctgtccctcaacggctggtggtcatagaaccagtccaacacaggggcgtcctcctcagggtccagctctagctgaatggcctccagtggctcaacatctaggatgttgtcagcatagtccgagggcggctcctcatcatcaaaagggggaaaacgcatcctcttgaaatgcctcctatctcttttttctcggcgcatcataatccacattgacccccactgggagatgtagacaggttcaatgacccagggaatctcattgacgaaggaaatggctccagtgatgtggtacagcacaggcacatccgtactgcccg

SEQ ID NO: 372674 - DNA, 424 bp, Homo Sapiens
ggctttcctacaagagcaggtttctcactttcgatattaagcagaagagacagaggctggacgtctcaagccaaccaaggactcagctgggttggggctagattgcagttttagtggaatgtagtcttccccttgtttatctatacttgtaagccatgacactccctggattttgactgaaagcctggtatatctttatcttctgggccctgaaaaagttctctttcagaagttttcagctcatttctttatcttagggccctaacagctacaaaatttggtaaatatcttcaaaaagagttcaatggtatgtttgagtttggtgtctccaggctgccaagtccttttgtttgtttatttcctactaaaattctactgccttttggaagctctgcctttggcttcctatgcagcctcaaaacac

SEQ ID NO: 372675 - DNA, 341 bp, Homo Sapiens
cttggatcaataaatggacgacgcgagtgtgtggacagtacagataattcctcaaagccatccagtgaaaccgcttctcacatggctcggcagcgattagaaagcacagaacaaaagaaaatctcggggaaagtcacaaagtccctccctgccagtgctctttccctcatgatcccaggagatatgtttgctgtttcccctctgggaagtccaatgtctccccattccctgtactcggacccttcttcttcacgagattcctctcccagccgagattcctcagcagcttctgccagtccacatcagccgattgtgatccacagttcggggaagaactacgg

SEQ ID NO: 372676 - DNA, 399 bp, Homo Sapiens
agggagcatggagggggaggttctccagaaaaatgagtctagtgtgttctttcttacaattgtcgaattgctcattagctctagtcaatgaatcttttagtgaagcactttgtacgtcagaattttatctggaggtgtaccaatcaaaaaatgccacccagcaggcagaaagccagagagaatgctgtctctggatcaaagtcaagctctcaagacacaaaatccagatggatcaaagtcaagctctcaagacacaaaatccagacagaaggagaacctcatctggttttattggttacccatagctgagtttgtccaagtgggtgcctgtcagtgagaaccacaagctcacaggtacgtgagcgaaaggacagactaaagaaaggtatgatccacacc

SEQ ID NO: 372677 - DNA, 388 bp, Homo Sapiens
  misc_feature (46)..(113): n is a, c, g, or t
tggaagttaaagtgtgggttctgattcagactgcctgggtttgttnnnnnnnnnnnnnnnnnnnnnnnnnnnnnnnnnnnnnnnnnnnnnnnnnnnnnnnnnnnnnnnnnnnncactaattattttaagttgttattcgtattattattattgttaatctagtacagtgctttgatacttcattcaacaatcattgccagatgtaacagaagatggctgaataaggaatcaggcaattctaccatagcgttttctcacagacactctagcaatttttaaaactaaatgggattatcccagtatactagtctaataagtctaccaaaaaccaagaaaccaaaaattgttcttatcaaactgtatgctgtctcttcttttaaaaacacag

SEQ ID NO: 372678 - DNA, 415 bp, Homo Sapiens
  misc_feature (69)..(69): n is a, c, g, or t
tcagccggtccgtatacgtgtggaatagatgcactcacacagatagctagatgaactccatcatgtttntaagagagttggttttattagttcagttagttcactttcctttggtttcataatgtaagaaacaaaaagagtaagagcagtgctttatttcagtagtatggggtaaggctttaactttctgggtctgaggcggaggtttctgctggcatcttagctttctgtgtgtttgtttggtttactcctgacagagacaatggaatgcttcaatgaaaacgcccaactcattttccatctatgaatgaacaggaggcatcccgtggctaaggagggataaatattccgcgccactggaggcctgctggctcacccgggctacaccactattgtacccactctggcttccaca

SEQ ID NO: 372679 - DNA, 603 bp, Homo Sapiens
cactgaggataaggaggagaagttatcagagaaacagcaacccttctgcccagtgtaggatgctcagctggccctgaccagcagacgcatgttaactgtgcccttggcatgggacgttcaccagccatggtaaggtgctcatgcgcaggcatggggaaggtggaggcagagttcctctaagtttgagactgatggaagaatgaaggagtgagcagttaagggtattcatgagtgagtgactataatgccaggccagggattggataaaggatgtaaaaacaggagtggtgtctgtggatggagagaaaatacaggaaataatgattgtatggagacagacagacagaccaggaactggctgctggtcttcacgtgcagggagagggatacagggaaggggagctgaaggttgccaagaggaagatgaggtagtgaagactgatgatgtgatttcaaaaaagaaagggcttacaagaaagagcggagcagtcgtcctgaatgacacaaggaggaaagtaatcccacctcctgtcttggaggtgggattactttcctccttgtgtcttccagagacggtgttcgccaaaaaaaccaaaagcaata

SEQ ID NO: 372680 - DNA, 577 bp, Homo Sapiens
ggaaggatggcaggatctgctggtaatagattggaggtggggagtgaaagaaagagaaagtcatggatgactgcaatgcgtggcctgacaaccgggaatgaggaagaattaagtaacagcgagagaagagcaagtgtggtgggcaatggagattaggagtcccatcaggcatgtgcaaagcttgaagtgcctcttacgtaaataaacagagatggtcaagagagcttcatagtaggtcactggatgctggtcttgaatttccagagctgagcataactttggaagttaccagttttgattattcccatattattgtgagaattattttagtcttattatctccattgtatgtggaaaaatctgttttcccactatattaaaaactcggtggagagagaacatcatcggcagagtggtttgccttgtgacagataaatgcaagtagatagtataaaatgaaggctcaataaatactgatagaacttgtgataatacatttttctttatgggtaatttacttgatataataatttttgttataagaacagtttaaagacttttacacatgttaatgttg

SEQ ID NO: 372681 - DNA, 139 bp, Homo Sapiens
acgtgtggaacgcggcatataatattattcggaaatgtatgcaaactcatgtacttggaacagcacttcacgatataattctactactttcgacaaaacacataatttcagcaccttttccactattataaagaggaag

SEQ ID NO: 372682 - DNA, 465 bp, Homo Sapiens
cctactgtgtgtcccaaagaggcttcctcactcccaatcactaacccctctgcaaattccttccagggccttgaacagcaccctggaagggttcatagaataaagcttcaactccttcagacagacctctaattaatccaaatgggtttccaagtacatctaaccccaatacaaggacatacatctgtttcaagaactgttcactgtaatgcctaacaacactccatataagctgatctctcttgtagaactgatatcgaatttcataataagcaagtttgaatatagggtcatccacatcagtcagagtagcacctatgcttttcaacagcaagttgacagaatgaactgcaaacatttcctgtttttctttgtctgattcttcacctccggaacctcaaagacaaactcaaatgcaacttcacaggagaaatatggaaatgttcaaagaaactagatttgtga

SEQ ID NO: 372683 - DNA, 633 bp, Homo Sapiens
cagatcagtttcccctgctagactgtgagccccataagggcaaggagcttattgaattggcctttgtatctctgatgcccaacatgttgtagactataaataaatgatgaatgagtggatggaagaatggaggaaggagcgagtgagtgagtgtttggctgatggataagagggtggaaggataggcggaaggatggattggtgaatgaatgaatgaatttcctttggttaagtctcttgaaagaaaggctaaggatctaagtatggatatagaataatttcagtaagcttacagcatttaacaatgttcagcaatgtatgaccacatataattaagatatggctagttagtctctgtaataaagtacttttgcattactttaacttgcattgctttaattactaatgatgagtgtacactttgacctatgtttgttaacaaattgtattatatcttctgtaaactgtttgtccaagtcctttgggtcatggctttctgaagagactggtcccggatgtccttgggatgtagggagcccatagctcactggaggcattcaaggaaccagccaggcagcccccagagcaagtcgtgtttaggagattctcatggtgtggggttggactcggtgg

SEQ ID NO: 372684 - DNA, 223 bp, Homo Sapiens
gattcgataaaggacagatggaagacagaaaaggagaaaaacatggtagtaaagcaaggctgaaggcaaagaacacctggaatgaaggactgtggccctcacctgacaggcggcacccgatgtgaagagagaaggtgtaagcaagaagttatagcctgctcatagtgccagcccttgtatctaaagctgcaacttggagcctttccattagggcagccaagag

SEQ ID NO: 372685 - DNA, 182 bp, Homo Sapiens
ccccaaggattctcagatggcagaatctgaggatcttcacattattgcatctgaagattattatacaggatgatcagttattttgttcaaagacacaggctaggattctgccaggaatattctatcaggaatggttagcttttttggatgataacagtttttcattcacctttcatcgatcg

SEQ ID NO: 372686 - DNA, 310 bp, Homo Sapiens
  misc_feature (179)..(197): n is a, c, g, or t
aatcgatgagggggagacaccttgactcttgcaccagactacattagcttcaatggctagggtaaccatggcattttgtagctgtgtatctatttgtcaggagttaacaagtaattatgtaacaagtctctagttataatgatcacctttggctacaccatttgcccagggacttgccnnnnnnnnnnnnnnnnnnnggatcacctgctacccagcagtgcttactgagtttgccatgctgcagtccacccatcttctgtacagctaaacacgaactgaccatatttcaaaacttacctttcatcgatcg

SEQ ID NO: 372687 - DNA, 320 bp, Homo Sapiens
aatcgacgaaagggagaggggcacaaaaaaagtggacacatcttggtattatttattggaatgttaactatgtattctgcaagcatttttattgatctctaaggataatattagctaacacatttagtgtcaggctttgtgctaaatgaaatgctttactggtattgtctcatttattcacctcatttttacagataagaaaaatcaagaatgaggagagttagtaccatgcagatggtcccaggatgaaaccagaatatgaactcaggcagtccagctgctcaacctgtgttcttaaccttcatgccttcatcgatcgc

SEQ ID NO: 372688 - DNA, 410 bp, Homo Sapiens
atctgatgaaggagagcactcggatagcagaagccatcaggtgagctgtgctccttttcacacaccttggggtcctgcgtaggattaccaagtaaaaatacaggctgctcagttaaatacgaatttcaaacaaccaggaattttatttttacgcataagtatatcctgtgcaatactcgaggtctgcttacatttttaaaatgttaggttatttatctagaaattcaaattttaattagggcatcctcatattttcatcatctaaccatggtcctgccaaaattagggatgctttgccctctaggttagatccctctttcattcttttgatcggaaagattttttatttgctatcaaggcctgagtctggtagtggccatgtgttgtccacactactcccgccccttgct

SEQ ID NO: 372689 - DNA, 628 bp, Homo Sapiens
ctctagcaggatccccccacatttgcaggatgatgggtacctggatttaaacaggttctatgagatgagtgatgtgaagaggtaaaatggatgctcggcttaggaataggtgaaatatgattagctcctgtttctgacccaataagtgcaggatctcttgtaaactgtaaaatgctcatttttatcaatgataagaggactctttgtagtttctaatgtactgcttcgagtaggaattggatgaaaactgcatcttgatagctcatgttctatcttatttgccaatcttctttcaccagtagcttggctgttcacataagtggccttagactttacagaatcaggagaatgagttattttgggtttaacaacttcaggtgatgggctggattttatcttgtgagtatctactgaagtagtaagtttagattttatagtctctggaggtggacttcgcttatgcagcttatcttccatgacagaaactgcacttaaaggagaaatgtaagagacatacttctcgttttccatgttcaagtgatcatttcctgaagaagcatttgtaacacttgattgggctagatccacttatactacatcacggacccagctctgtctgtatcttttt

SEQ ID NO: 372690 - DNA, 150 bp, Homo Sapiens
ctctctccacactggatccacactggatcttgagatttttaattgcttatcactgacgaatagctacgttttaggaaactggaccccataacgtagctattcggtcagtgataagcaattaaaaatcgggatcctctaatcacctcacac

SEQ ID NO: 372691 - DNA, 215 bp, Homo Sapiens
ctctctccactctgggtaagcatttcataaatgcaccttcctaactaactttaaaacctggcattggcagtcctatctgtagaacctatttacttaatgtgtagttcctttggagaaatatttgaggaaggttttgttcctcatctaaatttacaaaggattgctggaacaaagcagtaggaaacagaaggagcagtttaaactacactcccgag

SEQ ID NO: 372692 - DNA, 635 bp, Homo Sapiens
ctctctccacacgcatggtggatctcgtggcccatgatacacagtatgtgaataatggcataggaggacatctatatcgaaagtacttgtcataggaaatgaggtgcgcgtaccttagaggcatccatgaggaacacacttaatgaatgctatgagtctggataattatcggacccatatagagataggttcatgaacgcggattctgtgggatgagcttcatcagcaatccgtacagaatgtcagttcctactatgcataaggatgcaggttattatgttggacaccaggagaactaggatgagaagtgtatcgaagactggaggtgggctcatgacgaatgctgatacatgttcactttgtgaatcactaccagggaccgttcaaccaagactgggcgtctctttaacacaccggctttagtatggtatttcccctaaggcaaaaggcagaaatgagtgggtacaccatgattaagttgcattctgtagagataggatcatttaagtcaagtcagcaacaaaaattagagacattgaagatgatggggtagaaaaggggtatcaaataggttagaaagatggcttgaaaggaaatgagggaaataccagtgtggagagatggtaccgagctga

SEQ ID NO: 372693 - DNA, 173 bp, Homo Sapiens
tctctccacacgggttagtaacatttccactctcacctcgatatctccccactgttactctcaccttcgggcactggccattgcacttcactgaaaagatagacttcatcctgcaggacaccttgtggttcccacctccaaatcccccagccttctgcaccagtgtggaggag

SEQ ID NO: 372694 - DNA, 362 bp, Homo Sapiens
tcggacccggatcatctttgcacaattgctgggaatccttgtagagttgattgctgctgtatcatccaccatgaaattcattgttggtgcaccaagagccaggacataggctaatggcaatgaatcctttccaccttcctccaacccagggagacctgcctttttgtccttcacctgagcagtgctttcttcccaaagcttactcttatccttttccttttcttctgcagaaacatgtttcccggacttctcagataaaccctctgcaatctcttgggttcctttctccgttccttctttaagaacattctcaaagctttcgtctattggcatcggcttggtctccacatctgcttttgttc

SEQ ID NO: 372695 - DNA, 385 bp, Homo Sapiens
  misc_feature (51)..(51): n is a, c, g, or t
ggggactgcatggctgtgctcagcaagaatgatgcctgagcaggctcctgnccttcacttcttccccatttcctccacttcaggacaatgttctaatttgtccattctaaaaagtgtaatcttgatgcttttgggaatcaatgatggcacctacgggtaaacacagaacagacaaccccacaacacaaaaccatggacaagagctgaccgcatccatcctgggtgtaagcttcttgctggagttgcaaaggatgtgtctgtctattctcagaacttaaagatactggactttctggagtaaaagaaccacagaagaaaaaatagctgaaacctgaaccctgccaagacactgccacctgtcttttccatcattgcaaagattcct

SEQ ID NO: 372696 - DNA, 397 bp, Homo Sapiens
accggttgattcttagctgagcagacttgcttgtcactctcaaacatttactgaacacctcactgtgtgccaggccctgtgctttgtcaggctctgggggagacaggtcattactctgcagtgtgggaagcggggctgccctggaagtgtgtactcagtgctgtgggggtacagagggagggctggagaacttagctggtgggaaaggagggtactggaaggcttctcagagagtagtggcattgggcttacaagggagggcgatctgtgtggacaagagtgttacagcacaaaagcatgtaaacaaaaaagcatggagcatctttaagaaatagcacggagtttgctgtgactggatctgctgagattggagggtgagaaggacgtgcaggcctgt

SEQ ID NO: 372697 - DNA, 330 bp, Homo Sapiens
  misc_feature (154)..(221): n is a, c, g, or t
aacatacacaagacaattctataatctctaactggtctccctgcttcaactctcaggtccaattcggcctacacactggatgccagataattttcttatttaaaaacaacaacagaaacactgctcagactgcttcttagccatgccattcacnnnnnnnnnnnnnnnnnnnnnnnnnnnnnnnnnnnnnnnnnnnnnnnnnnnnnnnnnnnnnnnnnnnnaatcagtggttttcactgcccaccgaaggaggcacaaagtcctcaggccagcattagggtatctacaacacagttggcatctcctcatctttcgctaaagaatcgtgcc

SEQ ID NO: 372698 - DNA, 436 bp, Homo Sapiens [sequence omitted]

SEQ ID NO: 372699 - DNA, 255 bp, Homo Sapiens
tcttcgccagtgaaggactacctgagtctggaaatttttgagttgtttgacagcttggggggtagaaatagtgtgtctgtggtcctttttcttctttgccctgtcctctttcacatcctaagtgtaaactttaccctgcaatgttattcattaaacatttttacagaaacttaattttcctcagttatactgagctttctagctagggcaagcaaacgaactcgtgccgagggatcctactagacgtcgaccctg

SEQ ID NO: 372700 - DNA, 637 bp, Homo Sapiens
  misc_feature (13)..(13): n is a, c, g, or t
ggcacagacccantgttcctgtgccacgtaacacagtatgtaacaaatatgcctagttccctttcctttgccccttgtcccaggaagttacccaatgtccccctcggtgtgagcttcctactgtctgtaaaaattaatagatggaaccccaggcaagtcctgttgtaataacagttgtgccaacaattattattatggcttattggaagagtgttgaattgtaccactgacctacgaaaaccaccacaaaggacactgaaaggcaaagctgttgtgggataagaaacaatttgctgttatcttctaatatcaagacctttttaatggaccacacacataagggtcttgacaatatgtaactttttttcttaagctaagagaaaattttaatttaggcttgtttcaagatttcaaggcttgagccaatacagaaaccatggactgtagacaaagtcatagtccccactgtaatttagccttgagcttaagagtttctgttaaaaaaagagagaaagagaaaacaagaaatctaatcactatggacggctaaaagttgggaatgaggtcaaggctcctcattgtttgaaatagtctgagtgaaattctgtctagtctgatccagctccttctcctgcta

SEQ ID NO: 372701 - DNA, 569 bp, Homo Sapiens
aagcaaataatgtttatttttatattgatgatacacttaatatatatgtggattcaaggtacaaaattcatgtacaagagttcacacctgatgaatgtagacacattcctagagaacatttatcaatgtgaaaatttctttaatacactgacaacaaaaatcaaatattctctaatctcgttattcaataaacatcaaaacaacgtttcagttttcatcctctagtactgaagtgccctcaaggtggtaggcactgtatagcaggagaaaacattggaaagcctactgaatccgctctacagaatcacagtgtttactctgaaattcatttagtgaagtagtggaaggctatcttttatgacaaatcacatctcatacaagagtcaaaagtgatgaactcaagaaaataaaatgtttcaagaacttctcaatttctaaaatctatggagtattaaccataacagacaaagaagaaaaaggctgctggaaaggaagaaaaaaacatcctgtttaagagaacgtatggcttaagcaatttagaacccagtgtggagagagggaccggctga

SEQ ID NO: 372702 - DNA, 340 bp, Homo Sapiens
atctctccacactgggtagaaacacgagtattaatacatcttccactcaagtatcaatttcagaaggaaacgtaaatgaatattctaaataaggctaatttgtattaatctgcctttatgtttgagggaaaaaaagctgagacattgcatgaaagatgatgcaggatatacgctgatcttttggccccaatgagctatttgaacattgtcctgtttattgtcagttttcttcatcatttattatatggtcaatttttgaattcctgtaatatgaaacccttattctatcttttaacttactgttacctaaagttagtaagtccagattatatggtcattc

SEQ ID NO: 372703 - DNA, 423 bp, Homo Sapiens
gatgctgtgcacgggctgtgtgacctgaagggccttgcggtgaggtctcttggtgataatccacacactgtcctgagccttggttttgcagcatttccaacttgggttgacagagtgagactgtgcaggactgccccgtacagtacggcttctatgtgtgaacaacacagaccactaagagatgtgacaaagctgttccatcagaggaaacatagtctgggggacaaatcctcccattcctgataggacaggagggagcggttggctggggaagacctgagtgagggagctttcttgaggacgggttttgtcggagtgtagttcatataccatgcacagcctgtcagcatacagcttgaatgaactcacgtgtgtaaccagatcaagaggcagaatattactagggtggcagtttcgagtccc

SEQ ID NO: 372704 - DNA, 209 bp, Homo Sapiens
aatagccggtacctctctccacactggtgctcaatgagggaggagctctggcttgaaggctttcccacacttctggcatttgtagggcttctcgccagtgtgggtcttgcggtgctcaatgaggttggagctctggctgaaggccttcccgcactctatcgcatttggtatggtttctatcccagtgtggagagggatcctctagtagt

SEQ ID NO: 372705 - DNA, 371 bp, Homo Sapiens
ggcacaagtaactgattgtccaggaatacaacctttgtgtaaaaggagagaaacactgcattttgttttgttcagaagtcaccaggagttgctcagtacttcaaaaaataccatgtcaccatgtggaacactctgcaggaatctgaatggcccacacaacgtatatctctgtctgagtcttcaattgtagcttttgcattccctgtgtcctagcacttacatttcaaaatgcatagaattacatcataagattatttcctcttattcacttttacttctccttcgtaattacgtaacattttcaaaatatatgtaagttggttagactatgaaagcatttaaaagagaatccaaaaggcaaagaatacgtg

SEQ ID NO: 372706 - DNA, 254 bp, Homo Sapiens
  misc_feature (175)..(184): n is a, c, g, or t
cacgcattctttgcctaccagcaggccatgaaagcacagaaatcaaatgatatcaaacactgtggaaattagagatgatagttctgttttccttaattttaatgtagttgaaataaaggaacaaacaagtgttgttatttattgcaaagtgaaaataaaacacttgctttatttnnnnnnnnnngcctaaattagcaagccccaatacctgtggctgtatataaatatatttgtactaagcacacagacaacgg

SEQ ID NO: 372707 - DNA, 449 bp, Homo Sapiens
  misc_feature (16)..(16): n is a, c, g, or t
ttctttagcttactantagcatcctggaccttaaaactagtgcttcaaacattgtaggcactacaatcaacatttgtagaatgaatagagcaaatcaatgaatattatgccttcggtatttaaaacaacttcacgaagttacttattattgtctcatttttacaatgtgggtgatacactgagggtcagtaaaaggtcaaggctctggaaaggatgagagctgaacttctcctattctgagactgacattccatccaccctgttactacctggacttagtctcttggctgggtcctcagaggctggacctctgtcatgattgatcattttggttttcagcatctgggaatactgcttagatattggcagaaatgcaataaaaacttgaagaactaatacaaatttttgatcatttatgaaaatgtaccacattcagttatgagtttatt

SEQ ID NO: 372708 - DNA, 287 bp, Homo Sapiens
tgcaacacttcaatatttactggaatactcctataaaacggtctcttttgccttgttttattttggtaactaagtgaatgctagggttagccataaaggtagcttgctgcatttctatttcttgtgttctaaatcactgaataattttttaaaaaagtagttctaaagcatttccagttaaataaggaaggctgtaacatttattaggggaagtcaaggggatgaggtagtgaggaaagtaccagaaaccaccaacaggtgtttcggttacgttgagcaaagaatcg

SEQ ID NO: 372709 - DNA, 379 bp, Homo Sapiens
  misc_feature (284)..(318): n is a, c, g, or t
tatgctgataaactatcacagttacatcacaaagaatcacatcaaatgtttataatttccaaaggagacagattttacctagtttctagcaaccgtggaaatttatcagcaaagaactccactctattttttcttgcctgagaaatgggatggaacgctaaccaaaagacagtgcaggcaaacgatttatcttatgaataatctcccccaaagtgatgggaccacaggcatgagccatccaccatgcccagccaaaaatgtcctgattttaaagttttaatgannnnnnnnnnnnnnnnnnnnnnnnnnnnnnnnnnntatatatatcatgaaacttttggtataaacacccagccatggtttacacggacataaacca

SEQ ID NO: 372710 - DNA, 410 bp, Homo Sapiens
taattagtatatgtgcatctctgcctcactgaactatagccccctcagggactgagcaaagtgttctttccaacatgatttaccaggcacagtgattgtcacatattaggtcttccataagcatcgacttaatgaaaataaatcctgggacattaggcctcactgttgcattgtgtttgaggaggtacgtgttgtcacagaactgttggaacaacagctacgatcatagcccttgcagttactagttcttccatgctgaaggatgacaggcacaatggagtcctcacctgcctttcttggcaaagttcctgaatgtggttgctgagaggattttagtcttttctctgcagtgagaatgtgggctgaattcacatttttaaagcactcttatagcccgcaaagaatcgtga

SEQ ID NO: 372711 - DNA, 362 bp, Homo Sapiens
tacagaccgagatggatagatgtcagaagcagcatatcagaatggcattgagcatgtgctatggagttagacagatttgtgtttgattactgctcttctacttcttagctgagtgacctaagcgatataattaaactactttgtcagttttgtaatctctacattgggtataacaatagcacccatcatagggagttgtatggatgaaacatagtaatgaatgtaaagtgcttagaatagtgctaggcaactggaaaataattcagcaggatgtggtaatgtgttgtgcctcacttctcagctgctaccatgttgccttcaatggtcttccctcccactccttgactttgcctgcaaagaag

SEQ ID NO: 372712 - DNA, 419 bp, Homo Sapiens
taatatctttgctgaaatataaacccacaactactatacagctctactcattcaatattatttaaaaggttttacaattcaaaacttggcagacttctaaaaataaggagatcaaatgttgatccaacagcacaatattttaacctcctataattggaatgaattacaatttttatctttaactacaatttaattcaatttcagcattcatggcctttattaactgaaagtagcctctaaaaatcatcatacaatgtgagacactattaaaaattgctcacaaaactacacgaaggtcattcaaagaaattcatcagacagttcccctaatctttctttgcctcaagaaaatagcactaaggtggaaatactaaatgttcctaatgatcctccaagagatggataatgcagaaatcgtg

SEQ ID NO: 372713 - DNA, 200 bp, Homo Sapiens
cagtttgtggtgactctgaggatcccaatcctctatatcaaattttcccaggaaactaaaggtggtgacaagtaaactccagaagagaaccactggatctcctctgccacagggtgcaaattttagcttaaaccagccagggagcactgttcctgagagttcttaggggttagggtcacagatagaaacagagaattcag

SEQ ID NO: 372714 - DNA, 186 bp, Homo Sapiens
ctttgaaagtcggtaggagtgattaggtaaaggaggtgaaggagtaaagataattattctagactgagaaattatgttagtatcaggttatgaggttagaagaggtaagtaggcaactggtattgctgtgctgagaatttaaaaatctttattgaaggctataaaagaaaagtgtaatagcagaga

SEQ ID NO: 372715 - DNA, 573 bp, Homo Sapiens
tttaccatctaattcgtaagaaatattcgagtccagagttagagatgcatgtctgtagtcaaatgcagacttggctctccagatggcaatagtgaaaggaagcccatcctgctggtcaaagcatccaagaaataaggcaggtggccaggagaaacctggctctagcatcccacccacctcctttgctacagatgggcttgggcaagtcactccccatgtggccttggattcgccatattaaaagctatggggttctactagatggtctctgagatcatttccagtctggcccctcactggttttttaactgggagcagtggctacaagattggatctggctgaatgctttttctcattcagcctgatgcactccagaagtttcaggtggaatcaccaaggagcagacctgaggccatgcagcttggaaaaataagaagtaggtaaagcccaagagtaccttcggcatttagtgaaaaatgctccagtggtaggctggggatggggagcaggaggaggtagagctatacattgttacagatgccgtcaaatgcaagaatggaaaccggggatcc

SEQ ID NO: 372716 - DNA, 214 bp, Homo Sapiens
ctcctaaagtgctggaatacagagcatgagccaccgtgccagactgcagatatatcttttttacaggacagaaatcatttgtgtctctacagacatacgcatctgccttgctgttggatggaataatttacttggctattggttttttaaaagttaacatccctgatggagtcgtaaatatcctaatcaatagtaaatagcaaagaatcgtacc

SEQ ID NO: 372717 - DNA, 560 bp, Homo Sapiens
  misc_feature (383)..(496): n is a, c, g, or t
ggaagctctctgggaccgcatataataagggacacatgatcccaatcacatcccaaacgccacaactccaaatgccatcagattgggattagatgttatgacatatcaatatacaggaagggcacaaacagagacagatatatgacaggcccagtgtcaaaatagtttaaattgataaaacagaagataaacattgatattttaaattgttgaaatctgattttaaatattggcaactaattcaaattatactgaaaccgtctgtgtggcagacatgcatattcacagaaatggcccatgcccaccatagtgtactctctgcttaaagcactaaacaaaattcctatgaaaaagttttaagaggcctggtgtggtggcttatnnnnnnnnnnnnnnnnnnnnnnnnnnnnnnnnnnnnnnnnnnnnnnnnnnnnnnnnnnnnnnnnnnnnnnnnnnnnnnnnnnnnnnnnnnnnnnnnnnnnnnnnnnnnnnnnnnaattagccaggcttggtggcaggatctgtaatcccagctaatcatggctagcaaagaatcgtgc

SEQ ID NO: 372718 - DNA, 684 bp, Homo Sapiens
ctttgcaagacagaatacaagttaaaggactaacatctcttactactggcatgtacccaggtcacaggtaacggctatatgcaactcgggagttcatacaaaccaacagaaaaacttgctataatattatacccaaattaatccttataaaaagcaaactgaatagaggaaaaatgagtaagcgctgttattgcccagactatactgcaaatcattttcaactactattaaatgggatttaggaaggaaaagaaagatcatcacttcagactccagtaagataaaaacagaaggcggctagaaagaacttaatggaaagggtactataaactagaagtctatttgcaaaactagactgttggctggttctcctaaaaccaggctgttttcataatgagttagtttaacattttgtctttatgtgtaagcacccctttccttggtgcagtcacagccaaactgcaaacagaaatcgagaagttgtgagctccagatttgagagccacagagagtttgtgagatcaaaaacatccactctcagtaaataaatctgagctacctaaatcacacagtcagcttaaaggcaagggaaccagagggaaaaactccaaaggagtgatctcttcatacaatggcttccagtaccccactcaggcaaagaatcgaccggggatcctcagagtc

SEQ ID NO: 372719 - DNA, 410 bp, Homo Sapiens
gagaggacagctccaaggatcttgaggtagggaagaggttggcctgttctcgtaagtggtagaaagacagtgtggccaaagtccagttagatgaggtagatagatttagagagctactaaccagcaattagcacttgtcaccactactgataatgaaaatcagtttttttcaagtttctaggatctgttgagaatcaaaatatgtttgcagaagagaattgaataaactgaccttctctttctaatatagattttagaaaatattacattatactacagtaatatgaagggaaactgacactcaataaaccaaatatcagatggtataaaatctaggtaagatttataatagacttagattaataatatgtaaatgtatacttagatactaattagcaaagaatcgtacc

SEQ ID NO: 372720 - DNA, 330 bp, Homo Sapiens
ggctgactagaggacccaggactaaagactccatgccaggagaactcaaatctctgtcagcctgagtacaccggtgggattggctggagaccccagctaaaaggaccctcattggacaggatcttgagaactacatgccagggagaattcagatctctctcagcctgagaacagcaggggcgggtggctggaggccacggttgagagtttcctcactgggcaggacctcaagacctccatgccagggagaattcaaatctctgtcagccccggaacactggcggaggtggctggaggccccagtgtggagagagagtgacaccctgcctc

SEQ ID NO: 372721 - DNA, 454 bp, Homo Sapiens
tagaatgagctggcaccggtagattcttgcactcaacgtaaaatactagttctctaacatatgccagaaggccctgcacaccgtgctccggccctcttcttcaaccttacctcttgcttctacccctctttcatgaagtttctgccacactgggcttcatttgtttctttgttcactggacatttcccagacacaggaagtacagacctaagctctgccggaatattcttttccaactttttggcttcagcttatattatcctgcacctattgaaattaggtctacctgcagatttcatcatagttggcttcttcaaagtactttttaaaatcttttagaacttatatatcttaatatttatctgattattgtctcccacaacattctctaagttccattagtatcttacacatcactgtttccacagcactcagcaaagaatcgtgcggtacc

SEQ ID NO: 372722 - DNA, 355 bp, Homo Sapiens
tcttgcttctacccctctttcatgaagtttctgccacactgggcttcatttgtttctttgttcactggacatttcccagacacaggaagtacagacctaagctctgccggaatattcttttccaactttttggcttcagcttatattatcctgcacctattgaaattaggtctacctgcagatttcatcatagttggcttcttcaaagtactttttaaaatcttttagaactatatatatcttaatatttatctgattattgtctcccacaacattctctaagttccattagtatctacacatcagctgtttccacagcactcagcaaagaatcgtaccggtagccgagctcgat

SEQ ID NO: 372723 - DNA, 382 bp, Homo Sapiens
tgctgaagaacaagatgaagatgaagaagaactagagcctgatcgagagtgggagcaagaagaggatgatgaggaagaagatgatctggaagaacaagatgatctctcagaatctgagtcagaatcagaactagattctgatccccttttgtggactcttggtttcttagaagctgggtttggagttaggggttctgttctggctgcaaccatgcgtctgtctgtttcacattttccaccagatttctggtctccagtagcctgtggtaaaacaccattctttggacttacaggctcagattttattagtgtcctgggttccacagaagacatagatttcttcttcagaaggcaaagaatctaccgggagtcctctagagtc

SEQ ID NO: 372724 - DNA, 309 bp, Homo Sapiens
aggagaaaggatcctgggttatgctgaggagcccttgctatctctggtttgtcatggagttctgtgaaggtggagacctgaatcagtatgtcctgtcccggaggccagacccagccaccaacaaaagtttcatgctacagctgacgagcgccattgccttcctgcacaaaaaccatattgtgcacagggacctgaagccagacaacatcctcatcacagagcggtctggcacccccatcctcaaagtggccggacatttggactaagcaaggtctgtgctgggctggcaccccgaggcaaagaatcgta

SEQ ID NO: 372725 - DNA, 539 bp, Homo Sapiens
tcgactctagtagtatcccggctagattctttgcccttcttggaactttccttatagaatcatccttctggacaaactttagatggagaatatcacaccacgctggaaaaatgccggattatgaaaggattactggacgccgcaaaacaccttcctggacaccatcgccacccgttattgacggaacacatagcaacttcatccttgccaatgcccaggtggctaagggtttccccatagtctactgttccgatggcttctgcgagcttgctggatttgcccgaactgaagtcatgcagaagagttgtagctgcaagttcttatttggggttgaaaccaatgagcaactgatgcttcaaatagaaaagtcactggaggagaaaacagaattcaaaggagaaattatgttctacaagaaaaacgggtctccattttggtgcctactggatattgttcccatataagaatgtatataggagatgtatgtactttttctggccgcgttcaaagatatatcagatacaaaagtgaagtatacg

SEQ ID NO: 372726 - DNA, 324 bp, Homo Sapiens
cacgattctttggttgaaagcaaacagaagaaatcctctatttcaggcagtaaatatgaagcagagagtagatgtaagggatgctcccaaaactggccactctgttaatgacaaaacagagaccagaatccacattctcaacgctcagtccagcgccagacccacaaaaccatttggtttttgcaagagcactgaatttccccaaaataaaacccaaactatcactaacagatgtttagatggtcagtcttcatgccttgtcttcattcaatgctcattcctccttatactgcaaaaacaaaaggtggctaaaagagtattcca

SEQ ID NO: 372727 - DNA, 164 bp, Homo Sapiens
tacaggtctccatttggtaggtccaaacagactggcaaaaattccttcagaaaaggatttatataatcaaaatgaactataacagaaagtgaattgcagactacaatttccgacttaaacgttaacgtttacaggagtccttaaaatgaggatgcatagatgta

SEQ ID NO: 372728 - DNA, 410 bp, Homo Sapiens
cacgcattctttgcatctttctcaaatataaattctgactacatctaggtgtgattctcttacatctgatacttctctgcaacttttgtctcagcatagtaaccacctaagttgggccaacatacaaattccttgtaggtaaattaactgaagaactgacggttaagaaaccttcctgataatttaactcttgcttccctgaacagattcactcctttcacgacaggaaaggtgttttgattcctctaatttcttcagtttaacacactgatagaccagagggacaggaagaaaatgtttaataaatctctccatagctgtcctcgctctcacatttgccctcacactcaaccttattctactatcaagagtcaaaaagtgccatcggcacctggctcctctacctcctt

SEQ ID NO: 372729 - DNA, 120 bp, Homo Sapiens
cacgattatttgatagagctgctcagaatgaagtaatttattaaatttagctatgtatgctattcaagcgagattaattctttctgatgttgaaattaaatagttggcaaagaatcgtga

SEQ ID NO: 372730 - DNA, 449 bp, Homo Sapiens
tctgaggatccccatttctaaaggtggctctgtccaaattgggatgaactgatcactatccatttgagatatcaagtaaagatcctttgacaaattctctcgtgaaaaacagaattctaattgtttcttcagacattcttttaggtcttctgtagaaactgctgaattgctttctccggaaacatcatatatttggtaactcagatcttctggtcctaaaatcatcccatcagttgattcttcaatgcctgtagtatttcttgtggtttcacaagatgaagaatacattacttcatattctttacatatatcttctgagagctctgcattaccctcaggatgagcacctgatgtagctgctatttcatgccaagagctttcagttccatgagttactggggtggcatcagatgtacaggagcaatttcttccacgcaaagaagtgaccc

SEQ ID NO: 372731 - DNA, 145 bp, Homo Sapiens
ggacgattctttgcatcacagggggttacctggtgatttaaacaattgaggacataaactggtttcttataccctcactcattataaaaagataaatttgcatctcaacattaatggaatacttaaaattattcttatctcttca

SEQ ID NO: 372732 - DNA, 215 bp, Homo Sapiens
gcaggtcttctttcttccagtcgtgacagccttgtcttcctggggaccgatgcttgattgttgctctgttaggagcgcctgagtcaaaagcaaattgagattttgaaagagagaaggggtttattttagccatttatcctcccttcattacaggcaagaaaaaacctggtgtaaacaccagtgtgctagatggagaaggaggcaaagaatcgtga

SEQ ID NO: 372733 - DNA, 437 bp, Homo Sapiens
ggccttatggctggtacagctgctagtgcttttcgtttggtgccgcctctgctttgccgttgtcctgttcttgttcactttgagctacccttgcagccgaccctgggcaagggaatatcaagttgtcagtcatagtgtatcctgaactcctgagctgtaacctaccccactacctaaccaggaagaccggcgttctcttaatccagaaccaccttgtagcctgaatattctgggtacccagtaggtgaaaggctggtatcaatatctctgagcttgttgcgctaataaaaaagttcccaggagatgtagatctcacaggcacaatatcattctccaactctaccccgataataacagtacaatggttttggaagggtagagagggaactgaaacagcaaaaggggagatggtccccttgtggtcttaatgtatcgtg

SEQ ID NO: 372734 - DNA, 123 bp, Homo Sapiens
cacgattcttgctaacaactaggatataaaaactagttaactgggagaaataacaactttctcactttaggaggtaaccgaatggcttgattttatagctgataggctggcaaagatcgtgcc

SEQ ID NO: 372735 - DNA, 170 bp, Homo Sapiens
cactcaacatccttgctgacctccacctagcagcccttcacttccaggcaggagtgagtgagcgctcatgccatgcgcacccctcgggtcacagagcgacatggggaggagacacgttctgcaacctgtccggctagccagtgtggagaaaggggatcgtctagagtcac

SEQ ID NO: 372736 - DNA, 338 bp, Homo Sapiens
actgagacatttctctcaacatgggtagatcattggaatggcagtgcgtacagtgtgtgtaccagaacttgagagatgggaggtgcggggacgggaggtggaagctcctgtgtcgcctgggctggggcctcccgcccagtcctcgcaggccaaagggtgacccatttcttttttccagtcaccaggagctcggatggtcactctgaggtgtgaatagatgatgtttttccttcagttcacactgaattcaactcaaaccagcaaaggcctttgggctggggattctgtggttgcagaggtctagagggggtggacttttgcagccagtgtggagagag

SEQ ID NO: 372737 - DNA, 595 bp, Homo Sapiens
aagtaatttgaatcaactcattacattcagaaacatctttttaagatcactgtgatacattcgactgtcaattctgaagagacgtataaaggaaatgccagctaaggagcaaggaaacagctttcattcatgggctaaattgcagcttaaaaaagatggaccaggattatttcctttagaaacttactgtacaaaagatactgttcaccccattagagaactgatttgaagttactcttccctgtgagggctctgtcatcttaactgtattcacatactttcaactgttccccttgctgctaacctcaggttctttagttcatctatctggcagagctgatttggggaaaacaagacaaaccttgtcaggttttcttaataaataagcagttgtcatgtttcaagagttttagaaatgagcaataatcaaggaagaggacaacgattgcatacgtttataatatttagaacatcttttgccacaataaacactgcaaaccaaccacttgtggacaccaaacatttggatttgtatattgtgtggcactatctccctcaattcctctctccctaaagtaggtttatcctctagagt

SEQ ID NO: 372738 - DNA, 150 bp, Homo Sapiens
tctttttttctataagaggtagagaggtgtacctttcaattcagagttttgcaaaacatgatgaaggtaacactgcttagaagtgtggaatggaaccacttaaatacactgcttaccatgcttcttctgctttaaatgaaacacattaaa

SEQ ID NO: 372739 - DNA, 396 bp, Homo Sapiens
gatacaaaagtgcggatagaagaccaggaaggcggaaagaacatctgcctaccgccctcaggcacagcttcaaagaggaggtagccaattgagctgagacttcatcaatgcattaggaattcaccatgttagacgggcagagcaaagggtgttctcaggcaaagggaacaacaggtacaaagacacagaggcccaaggggcacttcaaagaagcaagtacagaggtttttcttgagctgaaggtgcagtgaggaatagtggccgcatgaggccagacagacaagcagggatcagatcaagaagagccttttgaccattcttccatttattcagcaaacagttactgagtgcgtactaggtgccagtcactcagctaagtgctggggctgtaacggg

SEQ ID NO: 372740 - DNA, 511 bp, Homo Sapiens
gagctcggtaccccacgcaacttggactagaagactcaatattgttgtgactttccttcctagactgacctatggatttaatgcatggcatgtatgtatcttgactagctgattctaagacatttgtagaaatgaaattggctaaaaaaagccaaagaagaactgggtagggacttgccttacagcaagatatatcccaacctgtggtgagaaatacagtatgagtataggcacacgggacacagtggagttacaagagggcctacccatcacagcctcctgcctgtttgatgactgccgaacaatcattcaccaagcctaagtgggatataataccccatgagttggggatgctgacccataaggtatggtatgtccttttttcctatccctatgatgatagtctctgactattagttttagtacattaaggagtactttagtacttaagtacttcatagaagaagatacaatgttctcagtgggaagatgaaactgatccacagtgcgt

SEQ ID NO: 372741 - DNA, 266 bp, Homo Sapiens
agtggtggcagataagggaaataagagagggcatgataatgggaagatgaagtctaatttgggaccagattataaaaggcctttattttatgcttagtatcttgggttttattttgtaggcaatggggattctataactttttaagaaaaatctttttagttgtaaaacacagatattgaaaaccacataaaataaatgtatagcttaatgaactcttataggcttaactcttgtgcaaccccgcccagtggcgtgtgagagtcct

SEQ ID NO: 372742 - DNA, 290 bp, Homo Sapiens
aggtgactctagcaggatctccacgcaacttggccatggatgagaagcgaaagtggtagcatgattatttggtgtatcctgaaacatgactttcgttatttttatagtgaccttaattatctgacactttattaatatttctttctgtatcttatgttgcagactattcagactatgaagacagttccctcgaatttttggaaaggtgctcttctccactaactcgatcttctgggagttctctggcttcacgaagcatgtttacggagaaaactacaacctatcagtac

SEQ ID NO: 372743 - DNA, 411 bp, Homo Sapiens
aacagtttggccaagatggacccatttcagtccattgcagcgcgggcgttggaagaactggagtcttcataacgctaagcattgttttggaaagaatgagatatgaaggagttgtagatatcttccagactgtcaaaatgttaagaacacaacgaccagctatggtacagacagaggatcaatatcagttttcctatcgtgccgcactagagtacctgggcagctttgaccactatgcaacgtagaaacccctgacccattctggatttttactacaggcccttcaatatccatggagtctcttctgagccatacagggcacttgagaagtccttcttaacttctagctaacaactacttagtgggactattacacacaaaacaaattaaaaacaaattattccaggtgga

SEQ ID NO: 372744 - DNA, 723 bp, Homo Sapiens
  misc_feature (439)..(606): n is a, c, g, or t
ctcatccctccttactcactctccactagcttccaacttttcttctgcagcttcctcacccctctctgcctttacagaattgaagagttagggcctgcttcctagattaggttttggcataagggaatgttgtgactggtctgattgtctacccagaccactcaaactttctccatatcagcaataaggctgtttattttcttatcattcatgtgtccactggagtagcacttttaatttccttcaaaaacttttccttggctttcatgatttggttgtttgctgcgagagatctagctggcgacccatttcagcttctgacgtgccttcctaactaagcttcaacatttccagttttggatataaagtgagagatgtgtaactcttcctttcacttgaacacttagaagctattatagggttattaattggcctatcnnnnnnnnnnnnnnnnnnnnnnnnnnnnnnnnnnnnnnnnnnnnnnnnnnnnnnnnnnnnnnnnnnnnnnnnnnnnnnnnnnnnnnnnnnnnnnnnnnnnnnnnnnnnnnnnnnnnnnnnnnnnnnnnnnnnnnnnnnnnnnnnnnnnnnnnnnnnnnnnnnnnnnnntaaaactccctgagccctccctagaagtccagcagatggtggcacaggcttgtcagcctgaagaatgtgagccattaacatctttcttataataccagctcagattcttatacacaa

SEQ ID NO: 372745 - DNA, 492 bp, Homo Sapiens
ctagtataaaaacaccacatatttgaggcagggagcaaatcaaagggcgtaaaagaaaaaacgtcaatacatgttaaattagtgttacccattgcacagtatttcattgcactggcctagtccacaagctcagaaactcagggtcatgtttagaaactataagctcagaaccagatgacactctggaatgctaccctctggctttacagaagaggaaattgagacccaagaaggcgaatggcttccctgtagttcatgagattccacagtgctgagagacattagtactctttctggtcaaagtaattaatttatgtatggctggtaccttgggacaagggcaatgacattaaatgattctgaaaacacaaaagcaaaaaaccagcttggcatatataaaatacctccaaattaaaacttaacaaatataatatcagtgtgcaaaatgaatggaaagcaagataatattacagtgcttcatgataagaaaag

SEQ ID NO: 372746 - DNA, 174 bp, Homo Sapiens
cggcccggtagatcatcctacactgacagtgtaggaatgaatctactggcattactttatattcttctggactgctcttttcacctaatggatgttcacccttcttttcctattataatccagcagcatatatctgaatgaattataataggaaaagaagggtgaacatccatt

SEQ ID NO: 372747 - DNA, 473 bp, Homo Sapiens
ctctctccacactggtttgtgaggaagggtgagggaaggaagggtacatgggtagaactggtcagtccatctgcatagatagccagggttgaggatggagtatcctctcttctacaccatgttcagctcagaggccggaagtgctcctcaactagaggccagatactctcttctgcaactcacagccaacatgacacacacaaacagacactcatcttcagagccttgatggtgaatggtctacaacccaacttcctcacatctacacctccaaccactgccttcggtggctttgctccctttacctgactaaatcattccatctcctctgtcctaaccctcttcccttttctcaggaattcagagtcattcttacccagtaccagcaatcagggtcaggaaacccaatcagatatagaaaaacttgaagagtaaggcgggcatccgcaatcctatcactccccagtgtggag

SEQ ID NO: 372748 - DNA, 581 bp, Homo Sapiens
ggacactatgatgaggctaggtaagtggaaactggcgcactatgatgaggctaggtgagtgcacacgggagcactatgatgatgctcggtgagcggacactgggacactatgatgaggccaggtgagtgcacactgggacactatgatgaggccaggtgagcgcacactgggacactatgatgaggctaggtgagcgcacactgggacactatgatgaggccaggtgagtgcacactgggacactatgatgaggctaggtgagtgcacactggggcactatgatgaggccaggtgagcgcacactgggacactatgatgaggctaggtgagcgcacactgggacactatgatgaggccaggtgagcgcacactgggacactatgatgaggctaggtgagtgcacactgggacactatgatgaggctaggtgagcgcacactgggacactatgatgaggccgggtgagtgcacactgggacactatgatgaggctaggtgagcgcacactgggacactatgatgaggccaggtgagtgcacactggacactataatgagggaatgagcgcacagtggtcaat

SEQ ID NO: 372749 - DNA, 237 bp, Homo Sapiens
ggctcggacctgtagaaatgattgtctaatactgaaaagggcaaacacacaaccaaagcatggctacttgctttcgtataaagtggaaagaacaccagtggcacacaaggatagattgctttcagtttttttcttaatgaggcttaagaaagctttatgctgaggagacattcggctgctgtggaggttgcgttggctgcggaggctgtgctatcactgcttgctgttgagaagtgc

SEQ ID NO: 372750 - DNA, 450 bp, Homo Sapiens
ctctctccacactggagtgatgggaagatgttcaatgcactcattcaccgataccgacccgatctagtagacatggagagggtgcaaatcccaagtaaccgagagaatctggaacaagcttttgaagtggcagaaagactgggggtcactcgcctgctggatgcagaagatgtggatgtgccatctccagatgaaaagtctgtaatcacttatgtgtcttcgatttatgatgccttccctaaagttcctgagggtggagaagggatcagtgctacggaagtggactccaggtggcaagaataccaaagccgagtggactccctcattcctggatcaacagcatacatactgatgtcagataaaacttttccccaaatccctgttgaactaaaggcactttataaccgatatatacacttcaaagaacagaaattctgtcagtgctggagt

SEQ ID NO: 372751 - DNA, 590 bp, Homo Sapiens
tccttactgagtaaagtttgtacatagatcattgagagaagagtagaagtctccaagtataatggtaagtatgtttatttctcctttacagtttagcatcatgtgtattgaacctcctgtaaggtgcatgtaaatttaggattgttaaaactttttggtgaatgaaccccttaatcattatataatgccctctttatctctgatagtattcctcattccaaagtctactttatctaatattaatacagcctctccagcctccttttagtgtttgtatattattttccatccatttaatctgtcttttatttaaaatgggtttgttctagacagccttttttaattcatcttgaaaaatctgtttttacattgaagtgtttagactatttacatttaatgtaattttgatgtagttggatttaaatatacaatcttaatggttttctacttatgtgctctctgatgcctattttggagtgcattttatcttcaccatgggctcactacttacactcaacttttcctctcttttaaaaagttaatgggcttctctgtgatatatatcttacatctttaataatagaccatat

SEQ ID NO: 372752 - DNA, 190 bp, Homo Sapiens
agaggatcccctctcaactggtgctgtgacggaggaagatgtgggaactcttaggtccctggtcctaggggtctgtgctggggtggggctcgttgacctgcatcctggctggccctgtgactctgcctgtttacaggtgagcagctcctggccaaaagcaaacattttactattcccagtgtggagagag

SEQ ID NO: 372753 - DNA, 140 bp, Homo Sapiens
gataaccaaaccaaacagggagaaaaatgaaaatgaaaggccagtttcactcattatcatagatacatcaattctaaataaatgttatggtgagtgtgcttggaaataaaaataaataagggatcctctagatcaccagc

SEQ ID NO: 372754 - DNA, 498 bp, Homo Sapiens
tgcgtgttctgaggatccctctctccacactggagtttgacagaaactaaagagaaagagttgagaagatacatgcagagtaaataagttggggcctcatcatacccggaaagtttgacaggaggttcatctggaaataatatgtggggaatattctgcatgtaaggacccagaaataagtacattagaataattcaaataaaaaataatgaaagcccacaattgaggtactgaaattaataagggaaaagacggatttttgtaagactactatttcactgggtcatccagaaaggatttagccaatggatagaatttgagacaactggggagttgtgacgttaaggctactttgagattttaagcccagagggcaataaaaatgatggtcctgtacacagaaatagaagtggcaatgagagaggagtagatgatttcttcgcgtctttaaggagcttcttaattactttaaagggttcctttactacctttttcaat

SEQ ID NO: 372755 - DNA, 509 bp, Homo Sapiens
atccactctccacactggaaatgagctcttctttcaccctggggcttctcaaagtctatattactattccccaaatgaaaagttgtaatagatgcctatttacagagaggaatggaaaaaatttagagaatattttggaccatagatagtcatatgcaggcttctatttctatttgaaatacaatataacagctatgttttcctgaaaagacaagtaaatggaaacatatctgaaatgaaagctagggctacgccatattcataactcacaaataattttaaacaacataggtcagtttataattagcaacaaagtagcatggaatatggggcagttttccaactggaagagaaatgctaagaggcaatagtgccatattctgggtcggacacatttttaatttgtttatcagaacagtgcagattagactaaaatttggctcttaaaccatagaaaatagattctggttctccaaatatctccaagccaaaactgacctcagatctgt

SEQ ID NO: 372756 - DNA, 362 bp, Homo Sapiens
caatagatacaaacctctcttcttaaccaaagcaaagttttctaacactgggcaatacttgctaataatcagagctgtggctgaaatgaaatccatttagaatagtcaggtgtgatgaaagtagtactgtcatcactttgtagtgtttttgcagttgtataattttatttgatgaccagtggttagttcttatccacatggagtgtctgtagattttgaaagtggtaacaggtacataagtaaccaaagtatagagctcgttttagtgaatttttatcttcattacattttctggacaaccacgcagggatacactgtgtgagacattccttattccttgggcccagccagtgtggagagag

SEQ ID NO: 372757 - DNA, 589 bp, Homo Sapiens
tctctccacactggtcactgtaacagtggacgaactcgcaaggtatccgaaagctaagtgtcataagcaaagaagcgctggcagtttcaaacgtaatagcattaagaagatcgtgtgaagcttgctagctttcttttttaaaatcaacttaacatgggctcttcactagtgaccccttccctgtccttgcccgtttccccccatgttgtaatgctgcacttccggttttataatgaacccatccggttagccatgttgccagatgatcaactcttcgaagccttgcctaaatttaatgctgccttttctttaactttttttcttctacttttggcgtgtatctggtatatgtaagtgttcagaacaactgcaaagaaagtgggaggtcaggaaacttttaactgagaaatctcaattgtaagagaggatgaattcttgaatacggctactactggccggtgaagaaaaccatttgcacagagctctgccttctgtggttttcccttcttcatcctacagagtagagtgttagtcctatttatacatttttcaagatacaagtttatgagagacatagtattataacccg

SEQ ID NO: 372758 - DNA, 661 bp, Homo Sapiens
  misc_feature (437)..(446): n is a, c, g, or t
cgggatttctatcaggaaaccgttatgacagtccaatatggaaaattaaatatgcatcactgctataaatagggaatcgaagcattttaatgccaagaatcttagtgtttctttactctaaaagatcccctataatccataccctggagaaaagtaataaagttgtgccagtgtttcgtccatttcagccctcctgagcctgctttacccacattaaattaaaaactcaatgaaacctaattcattcagccaagtcctgttcctctagtgatagctcttcactggaagctgcttttcaggtcagaaacagacagcaaggaataatagatgggaactagaaaaatacatgtgtgtctcacaacagtaagcacaagtgaatatgttttggaaaggacaaaaatactaactaacactgttttaaaaacacaaatttcccnnnnnnnnnncaaagggaagctgaagaaatatggaatttaaggattaaaataattctcgaaataagttgctccaaaaaaagcagctcaacgcgcccaccccgcactgagacagggaggcacaggctccgggcctggggcatgctggagccgcggtgctgctccctcctgtggtcagacctgtactttggggctagataagagtttggagatctgaggtaccgacc

SEQ ID NO: 372759 - DNA, 214 bp, Homo Sapiens
cactgcccaacaacaccagctcctctccccagccaaagaagaaaccactggatggagaatatttcacccttcagatccgtgggcgtgagcgcttcgagatgttccgagagctgaatgaggccttggaactcaaggatgcccaggctgggaaggagccaggggggagcagggctcactccagccacctgaagtccaaaaaggtcagtataggacc

SEQ ID NO: 372760 - DNA, 238 bp, Homo Sapiens
cagatcgtctgttagattctctatgcccagcacagagcaaagctcactaagtgttggatggatggcggacagacaggcagacaaatgaggaaacaaacccaacctcattcccagtaatctctacctccgtggggcccccagaaggacatctcgttcactcatgttcgtgtgacaacctcttcagaggttttgcaggcatgcaccctctttccggtggatcctactagcagtcgacctg

SEQ ID NO: 372761 - DNA, 587 bp, Homo Sapiens
ttgaaatcagtatgctctgcctatctatcattcactagacataactatactccttactggtgatcaaaccgcagaggataagtttacataaaatttaaaataaaacaaaacacaaccagcacagttacaagcagctgactagaaaagtcccatacctaatacagtgccaactcttattagttaagacagaatctgtctgtatacaagccatcctccaccactgagtccttctttaaacttgatgagaatagactgattacttagtaggacaacaagaatcctcatggctgctgtaactgtggtgaaatgtaagtgttcctccataaacatcatgatccggtcaaaacccagtgtcttcaccagttcttcacaagcttgcaaattaatgcttgtcttttctattaaatgtatacaattagttttagcaagatatccagaagtctgtacctcaaaagtataagattagctgatacaagacctccaaactcctcttcagttcctaaaataaaaatcactatattaaatctccctagtagataagctaaaagacaatttacacatagttcttggaagttactgaaaatata

SEQ ID NO: 372762 - DNA, 219 bp, Homo Sapiens
ccgatcagtcttcttgaaccacttcaggctctctgtatcccctcccaactagaccttaacttttttacctccaggtccatctctgcaccaccctattttagcaagaatcctgctgttaaataaaatgtatgagaggctactgttctggactgagcttctgcaataggcccccacaggccagaacagagtcatctgtgctaggtgccacgtaattgaact

SEQ ID NO: 372763 - DNA, 405 bp, Homo Sapiens
ggaggatcccctcatttcagttcttatggagtagagctgtatctgtatttcagtatgtgccccatgtgattctcatacatacaaagttttagatccactttcataaggaatatacatccaagttcataattaataaagaatatcaagacaccaggtaacaatacagatttcaaagtctgaagcaattagtccataacatgtatctttagataagattttagaacaaatgagctggcaatgtaaagaaagtgttagttacattattccttgaaaaaaattaagattacaattccttttcatatctacaaaataggttagtatagggagtgggttttcagtacagtaagttggctctcagaaatcccagctcatgcaagctcagaaaaaaataaatgaactgaatgg

SEQ ID NO: 372764 - DNA, 626 bp, Homo Sapiens
  misc_feature (529)..(538): n is a, c, g, or t
ggctcggtaccggctcatatcagttcaattttaagtttgcaacaaaccagctgccttcagcaggagcttagctgtgcttcaaaagtaaatggaactttaaagctttattgaaagttttcaatgattccacttcagtttctaaagaagtacaagttcaacattaaagcagccccagttgccctaccaataagctccatcagggcctgagaaagatggtaggcagaaagagaaggggcaattgcaaaatggtatctcaagcaacccagatacccctactagcatctaggaaacaaagtgagggagcaaataaaagaaaaatcaccccaaactgtaatgctggcctcaatcctgtgaccattagcacacctcattttatattctggcattttactatgtttaatgttgcaagaattttgaagattgtgtttaaataccaggtgtgttattcctattttcttcatgtagctcttatagttatgagatacacttacgagctcagttattaacttattccacttataacttgtgnnnnnnnnnngctaaggggtttttatacagaaggtccattttttcccctacttattttgttactattaatggcctttagaaatatttatacattagct

SEQ ID NO: 372765 - DNA, 519 bp, Homo Sapiens
aattcggcactagggtgaagtgcttaattgttgtaatgcatgatattggtagagtgtcagtatccatttgtgtgtgtatataaaacaaatgaggctctggtttctagtttcagctttataaatggctgactgtgcagttacaccatgtctacctaagtatctttgatactgtgtcatgatcacatttctaaactctatagtctttctgcctcacggagatttgagataggtcttaatttttaaaattaaacttactcatattaaacaaagacatatgaagactttagtaagatatattatgatatattaaagaccattctgctccaggaaattagaaattaactacaggcaaaatacacacatcctaaaaaatgtttttatcatgtcaacaataaaacacaaagacatgaattaaacatacacccttttcccgctgcctcattaggaaattaaaaaacaattcagaggtctagaggaaaatggaaatatttaaaatgctttttagaactggggaagaca

SEQ ID NO: 372766 - DNA, 521 bp, Homo Sapiens
gatttgctgagttgaaaggacagtatatgagttcagagaatctgagggttgagttcgggagagaacggggctctacagaaaaagagcccgagaatcggcatagagcccccctccctctacttgggtctttgctgaacacaaagacatctatgtgtagggtgaatctctacacatctatgtgtagggtgaggcaggcaaacatctacctgtgagcagtgagctgaaagttcgcagaactcacataggctcaggaattgtttgaattcagccagaggtatccctggtgagttcagtaatcactcaactcattcactagaaaccctagaaaggccacacctagcagaattttagtagggtaaaggcttctctggaaccaccttaatagaaagtggctttacaagtaattaactgtccacccccctagaacagagccatacactctgtaaaggaaaacaaaatctaaaccccaaatgtaaaattaacaatttccaacattcaataaaaaattacctgacagccaa

SEQ ID NO: 372767 - DNA, 154 bp, Homo Sapiens
tgactaatcctaaagcttgggcttctggctgccaataaatcacagtaggacaaatgttaataagacaaaatgttattaataatagcatcttttttatatgctagacaacagctgcagggatgcacattggttttctcctttgctccttggcctt

SEQ ID NO: 372768 - DNA, 141 bp, Homo Sapiens
cgtagaggatcccaataaattcctcaggaagtgcttataggatccgagttcttacatgttgtggacagttttcttgtgtcctttgctagacattagaaggctgtattttctggaaataaaatccatgtctacgtggggtac

SEQ ID NO: 372769 - DNA, 191 bp, Homo Sapiens
atttcagttccaacagtattctactaaagaaaattgagcgggaaacatggcgggaaagtggcgtttcattaattgctactgtaactcgtctaatggagaggttgttagattacagggactgcatgaaaatgggagaggtagatggcaaaaagattggctgcacagttagccttctgaacttctataagact

SEQ ID NO: 372770 - DNA, 440 bp, Homo Sapiens
ccagagtatacacggctgacctgagatcccagtcttaaatgcaaattgtaatagattgggtaaaactaagctttattgtactctagataattactaaagagattgaagcaaatgaatggaagaagaaatacgaagagacccggcaagaagttttggagatgaggttagactggaggttttggggaggggctggatacttttatgcactgttagatttgatacagatgaagtgatgacagtgtttgcttgccacagaaccaagtgttgagagcttgagggctttgctgtttgcaccttgctttgtgattgagaatgttatttcaggagttattgctaaccagttattatattcaaatactgtagtttatcttgggttgttcagaacatataacatgtaaacagaacccacataattcttatcttcttagatctgaaatgag

SEQ ID NO: 372771 - DNA, 393 bp, Homo Sapiens
aattgtgcgctggcagcggcagctcaggacggctacctttaccggcacaattactgctccaaagacaaaatccccatcaggaagtatgccgacggcaccatcgacattgaggaggtcacagagaaccccaagactgaggtgtgcggtggggagaaagggccttgctgcgcctgccccaaaactgaagccgagaagcaggccgagaaggaggaggctgaataccgcaaagtctttgagaatttcctgcacaactccatcttcgtgcccagacctgaaaggaagcggagagatgtcatgcaagtgaacaacaccaccatgtccagccgaagcaggaacaccacggccgcagacacctacaacatcaccgacccggaagagctggagacagagtac

SEQ ID NO: 372772 - DNA, 389 bp, Homo Sapiens
tttctagcagtgttggacaatggattctaaaggttcctggagactttgttaaatttctcataattccagagggaaggccaaaatattgagaatactcaatgataggatgagtttccactctacttccttatcctcaaggcacacaccagagttccactgggtgaggacagggaagtaggatgtcccaacaccctctgagggttttcatgcattaatcccgccatatgggctgatggttggaactgcctttagttctctaagtaaaggtctaaaaatgcacctgtggtttctgaacttgggtatacgctgatacataaggactaccatagaagttacatgccttaatcctgtaatacttttgtgtggtatcattctgctaatatattgtc

SEQ ID NO: 372773 - DNA, 344 bp, Homo Sapiens
aggcgtgtcagtgggcctcgggctgtcatcactgtcaatagggcatcaagagatagtaggtgtgttgtatagagttgaccagacacagggaaggcattcttggacagcagctttgtgagttcctcaaagaggttggaacagtagtagtcacaatcatagttgatgtagagctctgtgacaaagctggggatgcgccagagctgcacaatggcctccagtgccatctccttcatctcataaggcatcttggggttctccacagtgatgatctccataagctttttgatgtacatctccattgggaacttgaggtgctctcgcatgctctcgaacactgacaacgg

SEQ ID NO: 372774 - DNA, 522 bp, Homo Sapiens
aagccgccagcagaaccagcaccattattgttaaatgtaacagaccagatacttccaggagccactccaagtgctgaaggaaaacggaagaggaataaatcagtgagcaacatggagaaagccagtatagagcctcctgaggaggaagaggaagagaggcctgtggtcaatggaaatggagtagtagtaacaccagaatccagtgaacatgaagacaaaagtgcaggtgcctcaggggagatgccctcccagccttatcctgcaccagtgtacagtcagcctgaggagctgaaggagcagatggatgacacaaagccaactaaacctgaagacaatgaggaaccagacccattgcctgataactgggaaatggcctatacagagaagggcgaagtctacttcattgaccataacacaaagacaacatcatggcttggtccacgacttgggaaaaagggtgagactccagaagagtgcaaagaatatgagcttccatatggctgggaaaaaattcatgatccc

SEQ ID NO: 372775 - DNA, 825 bp, Homo Sapiens
  misc_feature (307)..(601): n is a, c, g, or t
agacaattactacggtaccccaaagccgccagcagaaccagcaccattattgttaaatgtaacagaccagatacttctaggagccactccaagtgctgaaggaaaacggaagaggaataaatcagtgagcaacatggagaaagccagtatagagcctcctgaggaggaagaggaagagaggcctgtggtcaatggaaatggagtagtagtaacaccagcacagtgtctctgccctgccttcgtgttcttcacattcttcacattcaccagacaccagatttcaaagaagactgagaaacatgttccnnnnnnnnnnnnnnnnnnnnnnnnnnnnnnnnnnnnnnnnnnnnnnnnnnnnnnnnnnnnnnnnnnnnnnnnnnnnnnnnnnnnnnnnnnnnnnnnnnnnnnnnnnnnnnnnnnnnnnnnnnnnnnnnnnnnnnnnnnnnnnnnnnnnnnnnnnnnnnnnnnnnnnnnnnnnnnnnnnnnnnnnnnnnnnnnnnnnnnnnnnnnnnnnnnnnnnnnnnnnnnnnnnnnnnnnnnnnnnnnnnnnnnnnnnnnnnnnnnnnnnnnnnnnnnnnnnnnnnnnnnnnnnnnnnnnnnncaaaaagagagagagagaaacatgtcacttaaattttagttaacactgccctatatcaactaactatagtaataattaatatcaaacttcaattcagagcataaatattataatcaatgaggcacatttggaaaatataaaaaacatattgaggtaacattattccattacgaaggaatattgataatagtaataagcaataaaataattcacttcttttgatg

SEQ ID NO: 372776 - DNA, 504 bp, Homo Sapiens
  misc_feature (17)..(17): n is a, c, g, or t
  misc_feature (26)..(26): n is a, c, g, or t
  misc_feature (35)..(35): n is a, c, g, or t
  misc_feature (43)..(43): n is a, c, g, or t
  misc_feature (48)..(48): n is a, c, g, or t
  misc_feature (138)..(138): n is a, c, g, or t
acccaggaacaacatcnctctcaagnacgtggcanacgcttcntccangaaaaccgacttacaaacggcttccccttggtggtctccaagagactccgagcgccctccattggatttgcccaaaaggagggaactgantctcgcaaataaagaacgccagacagaggcaggagggcattgtgagcaattccatcatgtacttcacggaggaaccccccgagctgccggccaacagcccacatcccctgaagctgcggcgcatcctgaacctcagcccgtttacagtgacagaccacactccgatggaaacggtggtggatatcttccggaaactggggcttcggcagtgcctggtgacgcggagcgggagacttcttggcatcatcacaaaaaaggatgttctgagacatatggcccagatggcaaaccaggaccccgaatccatcatgtttaattagcaacaaggtggcaattattttcagaaaaacactgactgtgtcattt

SEQ ID NO: 372777 - DNA, 194 bp, Homo Sapiens
aactaaatatattacccaaaacaatggtcggaattctatttaccatggaaaacaaactggcttagaggagtagaataatgttgctaactttgacccagaaacacctcagctccttatttgggggctgttctaatcacttgcacttattatctcagtttttctcatcaaaaccatatgggatcctctagatcact

SEQ ID NO: 372778 - DNA, 580 bp, Homo Sapiens
ggtgatctagaggatcccgttgtcagtggggatgggccatttgcaggtggggaggtggacaaaagactgcaccagctgaagactcagttggctactttgaccagttctttggctacagtcactcaggagaagtcccgcatggaggcttcttacttggctgacaagaaaaagatgaaacaggacttagaggatgccagtaacaaggcggaggaggagagggcccgcctggagggagaattgaaggggctgcaggagcagatagcagaaaccaaagcccggcttatcacgcagcagcatgatcgggcccaagagcagagtgaccatgccttgatgctgcgtgagctccagaagctgctgcaggaggagaggacccagcgccaggacttggagcttaggttagaagagacccgagaagccttggcaggacgagcatatgcagctgaacagatggaaggattggctctgcagaccaagcagctgacccgtgaggtggaggagctgaaaagtgaactgcaggccattcgagatgagaagaatcagccagatccccggctgcaagaacttcaggaagaggctgcca

SEQ ID NO: 372779 - DNA, 263 bp, Homo Sapiens
agcgcgttgtcagtggttgagatgcagaagtcaattaccaggcagcacagctgttttgtaaaactttctcctgaaagcagggacgttgttcacactaatgctaacggtcgtccagcaccggctgccacgttgccgcagctggaaatgggggcgtcggcagtgattcctggagcgtaggtccgctttcttgctagactctggcccaagtgcagtatgatctcatcctcagtgtgtctgtttcctcacagtttgaacaggaaaat

SEQ ID NO: 372780 - DNA, 212 bp, Homo Sapiens
ctagacatgtctttcctgccttcaagaaatgcataatctagtagtagaaagagatcgcctttgtgaaaattgctgcaatattaagaagcatgaaattagtgaggtgtgaacggtattagtgaggaatcttttatggtgaatgatagtgacccaatcggaaataacttaaaaaataagagctttattggctcatgtactaggaagtgcagaag

SEQ ID NO: 372781 - DNA, 596 bp, Homo Sapiens
gaggattagtggagagggaggcattcttatggaggcttagtgaggggcagttgaggataggggcctcaagttagaggcagtatctgggctgagccatcagcgattcccagggtcctcaaggtcatgagcctgaattagatcacccagggtgtaggtgtcactggagaagagaagagatgaagaactgagccccagggctctccaaggtttagagtccagagagtagagaattgactaatagaagttcaggagatgaagctggaaaggaagggagaaaaccagagaagtgggatttcaggtgccaaataaagacagtgtttgaaaggaagagaaaggtgggtattgtgtgatggtactgttagaccaagtaaggtttagcactgagaagtggccatgtcatttagcactctggacaagtgatttctgtggcgtggtgaaggcaaaaacctcagcagatgggctgaaaagaatgtcaggattatcttcctaaagcatcatattaaagctgaaaatatccacatcatatcacaagagaaatgtgtacctattaattagaatacatgtgaaagaatgtttatggtaacactgtatagccc

SEQ ID NO: 372782 - DNA, 478 bp, Homo Sapiens
ctcgcacccgtagttagtgctgatggagaaggctgtggagtcggtggttcgggagagcctgagcaggcaacgcagcccagcgcctggcagcccagatgaggaaggtggagcggaggccccggctgctggcattcgcttcaggcgttgggccacccgggagctgtacatcccttcaggcgagagcgaggttgctggtggggcctctcacagctcgggacagcgcactccccagggcccagtgtcggccactgtggaggtcagcagccccacaggctttgcccagtcacaggtgctggaggatgtgagccaggctgcaaggcacataaaactcggcccctctgaagtctggaggactgagcgaatgtcatatgaaggacccactgcagaagtggtggagatggatgtgagtaacgtagaggcgatccgcagccggacacaggaagcgggagctctcggtgtgtctgaccgtggatcctgg

SEQ ID NO: 372783 - DNA, 230 bp, Homo Sapiens
atctgggggggcctgttaaacccccagcacatcagacttggtaggtttaaggtggaacctgaaaatgtgcatttctaacaagttcccaggtgatgccaatgctgctggtctaaggaccattgctgtaatattttgaaatatcagatgtatttaagtagacattgggtgattttgtcaatgacttgccacctagcttttcatttagaacccaaatgggctgatgtctaata

SEQ ID NO: 372784 - DNA, 169 bp, Homo Sapiens
taaaggtaacaggagcgaattctgatataataaaaatgataaattataaacatattgctttccctagggggaaaaaaagtaagagaaaaaacagctaagtgagaccgagccttgggtacaaatcccgagggaccacccatccttttgtagctgatgtctatagggtccg

SEQ ID NO: 372785 - DNA, 174 bp, Homo Sapiens
taccccctattagacatcactgggtgggatttaaaacagttcactcataatattatttcagttcggaaatttgaagctggtcactataacatgatcaattcttctctcatattcagcccctttcatccactcattcctattatctgagactacatttatcatctcttctagatg

SEQ ID NO: 372786 - DNA, 283 bp, Homo Sapiens
  misc_feature (60)..(96): n is a, c, g, or t
gtatgcctgtatcaaatatcttatgtaactcagaaatataaacatctactatgacccacnnnnnnnnnnnnnnnnnnnnnnnnnnnnnnnnnnnnncttgtagactgtagaattgttgcactgttttgtgtatagagaattatacaggaattatgggggtgcttgacaagtctctactccaaaaaacagagttaaacgatccaaatgaacaaaggcatcagactacaatagccatactcttaacccttggaaacaaccactcccctatgatgtctatatggag

SEQ ID NO: 372787 - DNA, 285 bp, Homo Sapiens
ctattagacatccccttactgaatgctccttgaggatacaacacacctcatttctgtagcaagactgtattcctgaatccctcctagtggtggaagaagttgatggtagttgtttggtatatctgtctcaattataaagtgatcatctgattttcaataacatgagttattttccttcctcacaaagatatgcctgaatattcagtcacaaatgaattttgtcgcaaacacttcttaatcggaattctgctccgagaagttggctttgccctgcaggaagaccaa

SEQ ID NO: 372788 - DNA, 399 bp, Homo Sapiens
tagaggatccccctattagacatcacctgggggtcagagaaggaacacaccactccaggcctgtctcccaggatcctaggactctgtggaatgcatccctttccctagaaaaagaagacaaacttttgctttggttaactttgttaattttatgtgtcaacttgactgggccatgggctgcctggacatctggttaaacattatttctgggttgggctgtgagggcgtttctggaagagattagcatttgaatccagttaaacagttaacttgattggactcacttaagcgtttgcccttccccaagtgagggtctgaatatttattgaccaaaaggcagaagaagcttgattctgtctctctgcctgacttgagttggacatcatctctcttggtcca

SEQ ID NO: 372789 - DNA, 604 bp, Homo Sapiens
  misc_feature (493)..(503): n is a, c, g, or t
tccctatagacatcactcatggtctcttgtgaactatgaaattttattttcctggtccttcagtccaaagtttctatctcaatctttgctctgactttgcactcctgcgtgaccttgggagagccccttaggatccctgaggccttgatttctcttaggcaattttaaccataaagatgcataactaatatatgcatgggctttacaagtcttcaaatgctttcacatgctgtatctcttctgctatacagaacaaccagtaaatgtgggaaactctgctgtatttgctttaaaaatgaggaaactgaggctcagagagtttaaattacctgctgcatcccccagctggatgctggagcctggacagctcaggggttcccactcccatccttttttgtgtatcatgcaggtatccacgggctagtgagtgggcttggaggaagaaaggcaggagggaaattcgtagggcaacaggccaaattattataatagnnnnnnnnnnnaaacatggttcatggagaacagaatcttatggtatgggctgaatatatacactcccatttgtttttcattacatcaatgtctaatagggaggtaccgagct

SEQ ID NO: 372790 - DNA, 281 bp, Homo Sapiens
cggactcccaatagacatcatggcttcgaagtcatacatttaaactggagtgtcttctgcccccttagatgtttaggtagtgtggtttttaaaagataaatattgatcatttgttagctttcacattatagaatcctctccagaagaaaaacaaagcttctattctgcacagagaaggatgaacaccaaagaaattctataaataggattttactggagtcggaaaaagttggtcctaaatttcccatgagatgtctcatagggagggatcctctagaaca

SEQ ID NO: 372791 - DNA, 944 bp, Homo Sapiens
  misc_feature (721)..(784): n is a, c, g, or t
acttcctctcctcccacctccagcttctacagcagggccacagcgaagacccagcacaatgccatgaacaacatcattcggcttttcctgaagaagggactggttaatgacctggccagagtacctcacagcttagacctgtccagtcccaacatggccaacacagtcaatgctgctctgaagcctttggaaacactttcccggattgtgaaccagcccagtagcctttttggcagcaagagtgcttctagcaagaacaagtctgagcaggatgcccaaggagcctctcaagattccagtagcaaccagcaggacccaggcgagcctggggaagcagaagtgcaggaggaggatcatgatgtcactcagacagaggtggcagatggggatatcatggatggggaggatgaaaccgactcagtggtgattgctgggcagcctgaggtgctcagttcacaagagatgcaggttgagaatgagctggaggacctgatagatgagttgcttgagagggatggcggatctgggaacagtacaattatagtgagcagaagtggagaggatgaatcacaagaggacgtgctgatggatgaagctccttccaacctcagccaagcttccaccttgcaggccaaccgagaagattccatgaatatcctggaccctgaggatgaggaggagcacactcaggaagaggacagcagtggcagtaacgaggatnnnnnnnnnnnnnnnnnnnnnnnnnnnnnnnnnnnnnnnnnnnnnnnnnnnnnnnnnnnnnnnnatgaaggtgaagagggagatgaagacgatgacgacgatggctctgagatggaattggatgaggattatcctgatatgaacgcttctcccttggtccgatttgagcgctttgaccgggaggatgatctcatcattgagtttgacaacatgttctccagtgc

SEQ ID NO: 372792 - DNA, 260 bp, Homo Sapiens
aatagataggtcttagtgattaattgttaatattgattggataggtaacttagaggtgatgaggcatgatcagattttgggtgtattttgaagtcagcagaatttgctgagggactagtgggctatgaaagagaggtgataatgatgactccggttgtttttgcttcaacatcctgaaggatggagttgccatttaccaagacagaggcaattaggtttgggaataggggagactggagattaggcatacatttgcttga

SEQ ID NO: 372793 - DNA, 144 bp, Homo Sapiens
caggtacctaaaggaataacctaccttgatttgaattaatattccatgtctttatttaaagcaatcacctatttcttacaacacaggaccatgaattcctagcctataggattgaacaaaagcttacttaaaacccaactagta

SEQ ID NO: 372794 - DNA, 245 bp, Homo Sapiens
actctcgaggatccccctattagacatcttctctgatccttgagaaattttaaaaggggctatttatgacttggcagggatatcgaagaggagactgaactactgggggaaggatgggcggaatgaacttaaaggtgccgttgaccttaggaatctgtgactctaagagtttggtgctcctgtaatcagggacgttggtcagagggtagcagatttgctggctggcctgatgtctacatacggga

SEQ ID NO: 372795 - DNA, 310 bp, Homo Sapiens
ctagaggatcacctccctattagacacggggtgggtaaggagtctgatgtcctgtaaatgaaggaaccaaatggagttcctccggctttctcagctaagggagagcttattcacatggaaacaaggctaggtgattaagggagaaagggacagtctgaaaacaaggttagtaaaaacaaggttaggtattagaactgcaaagagtattaagtgaaataagtgaaggaaaatatgagctcttatttttaaaaagttgtgttggggcaaatgttaaatatctttctttctctggacattattaagaaagata

SEQ ID NO: 372796 - DNA, 341 bp, Homo Sapiens
actacaatgaacctgaagcccctctctggatcagatagagcatggatgtggtcagccagtgatttctctgacggtgatgccaaactagagcggttggcagcaaaatttaaaacaccagagctggctgaagaattcaagcagaaatttgacggaatgccagcggcttctgttagacataccacttccaactccccataaacttgtagatactggcagagctgccaagttaatacagagagctgaagaaatgcagagtggacctgaaagatttccaaacatttttgaccaatgatcataccaaagtcactgaggaagaaaataagggttcaggtacaggtgcg

SEQ ID NO: 372797 - DNA, 418 bp, Homo Sapiens
cctattagacatcatcatctttctcaacttcaggagaaggatttcagtttggcaaaaaagacctcaatttcaagggattttcaggtgctggagaaaaattattctcatcacgatacggtaaaatggccaataaagcaaacacttccggtgactttgagaaagatgatgatgcctataagactgaggacagcgatgacatccattttgaaccagtagttcaaatgcctgaaaaagtagaacttgtaacaggagaagaaggtgaaaaagttctgtattcacagggggtaaaactatttagatttgatgctgaggtaaggcagtggaaagaaaggggcttggggaacttaaaaattctcaaaaaacgaggtcaatggcaaactaagaatgctgatgcgaagagaacaagtactaaaagtgt

SEQ ID NO: 372798 - DNA, 711 bp, Homo Sapiens
  misc_feature (184)..(289): n is a, c, g, or t
  misc_feature (371)..(415): n is a, c, g, or t
gtttggagaacatggatatccaaaccatattatagaccaactaggcttcacagatgcatacaaaactttccagtcaaaaccaagataatacaaaatattcttatttgcatctggtgtattctgttaggacacataccaagttttattaaattcaaaaatacgtgattgggtgaaaatgctgttnnnnnnnnnnnnnnnnnnnnnnnnnnnnnnnnnnnnnnnnnnnnnnnnnnnnnnnnnnnnnnnnnnnnnnnnnnnnnnnnnnnnnnnnnnnnnnnnnnnnnnnnnnccaaccattaaacagacatctagtgcgtatctgtagtcctagctactcagaaaactgaggtaaaaggatcacttgagcccannnnnnnnnnnnnnnnnnnnnnnnnnnnnnnnnnnnnnnnnnnnncacgaggtgacagtaaaatcttgcctcaaaacaacaaaaacaatcatttaaaaaagactaaaattacacactgtgtgttttctaacaaaaactgaatgaaactaggaattaaaagcaaaagtcaaactggcaaattcaaaactgtgtatatgaaacacactcttcaacatattcttgctcaggggtcaaaaaatttcatttttcacgaaatgtcaataaaatctagagttaaaagctacagcaacataaacaatgtgatactgacacaaagataaacagtatgtctcatacgggag

SEQ ID NO: 372799 - DNA, 222 bp, Homo Sapiens
ctccatctagacatcacatttaacatttgattgtacatgcaatgggttccaggacaagttcttaacaatgaagcttggcctcagaatggtcacaaatagtattttagtcttttgctctgggacgcctaactgagtgggattatctatgtctttatttaaataattttcattaaatgtttttattttctatgatgggggctaaggaagtatgtctaataggga

SEQ ID NO: 372800 - DNA, 179 bp, Homo Sapiens
gcagagaagctatatggcagaaagcagagaattggaagggaagtcaccaaagaagagaacatacttgcaggcagtgtttcaggtagtgagtgaaatctgcacacaaacagaaattctttctctcgtggaatgtatgtactaactggagaaagcattgttaaaaaataaccaataggatg

SEQ ID NO: 372801 - DNA, 249 bp, Homo Sapiens
  misc_feature (55)..(67): n is a, c, g, or t
cccctgccccgccttcacgcccgcccgtcgagctcttgagggtccccccctcccnnnnnnnnnnnnnggacatatagtctataatttgtagggatgggatgaacaggagagagaagacaattatacaaataaatataaaaaatagacctgtgtaagttctaggaagaacagatacatggtgtttttgacagcgtatcatggtcaggaaggtcagtgatgtagaatcaacaggaagatttgatgagtgac

SEQ ID NO: 372802 - DNA, 638 bp, Homo Sapiens
cttgatagtaatcaagcatacaggacttcaggaaagctgatagggataatactttcaattaaaggaagctatacttccatatagactaggactataaatgcaatacataaatagcaatgattatctcaatgttcttcattctttaaagttaattaatgcattttctaataaaagaaactaacatatgcaagtgacatatctcagagatagttattttgtaatttttttgcaaaaagttacacaaaagtgcacataatagcataaaatattaaccaatgccatccaagtattatatgcatttgtgcagttattatagtcaaaatgatataagggtttatgtatgaattcagtaaggtagttttctcagttagggttatgtttgtcatatttgcacctttttaaaaacatggtttcttgaaaatctccaatgtctctgaaatcagaatatcgctggggtaagcagggaaggtatatataatttttagtgttacaggtgattcttctgtacacttcctaagatcatagatttaagacttaggaaacaaagcaaactgttgctaactcttggaacatagcctagaacaacattactatttagcacatatagtaatagacacaaagatcaaaccaaatacctg

SEQ ID NO: 372803 - DNA, 217 bp, Homo Sapiens
gtccaatagacatcgcacacagtaggtgtcaacaaatatttgtcaaataaactaactacgttagagaaggacttcagctaatatcaaaataaaaaggaccaagggtagttttagcaaacacagagtctaggtaaatgtctacttctttgaggataagtgattgaaaggttgtcataggagagctgtgaaaaagctctacagactgatgtctaatagg

SEQ ID NO: 372804 - DNA, 299 bp, Homo Sapiens
gcggacctccatattagacatcttctggtgagaattagaacatgtgttaattcttcgtgacatggctctgtgttgtggacctaaacgtggagaattttcactctgtgcctacattcacaaatgcaacatgtgggtttgtatatacatatgttgtacatgaactcagattccaagttagctgtgttcaaatctgaattctcccctgcataactttatacttggccaattttgcctccaaattaattggtcactgaatattttaagtttttaatactgaaaccacatgatgtctaatatga

SEQ ID NO: 372805 - DNA, 250 bp, Homo Sapiens
ggcggtcccctattagacatccttctaggctctgtctgtaaagatgctgagaggtataattcctagagctttttaatctgtggccaactgcagtcatgagccacacagcccctctgagtgcactgccatggtgtggagaagatttacagcccctcaaagggctccgcctgatattattcaaagcaccaaacacagagcatgggcaaaagcaaacgtgaccagtgggttcctgattatggggatcctctag

SEQ ID NO: 372806 - DNA, 294 bp, Homo Sapiens
ctgggataaactatccccaaattaaatgttattttaaatcaagtagaacaaagtagcaaacaggataagtaaacacatacagaagaataaaaataattgtcatttaaggattatatttttaattaacaagtgtcggtcacatagtaagcagtttatatattttttgtaagccagactcttcataaccatggtgcacaacatgtttcataacgtctgtagtttctactacatatacctttattgtataataagcaatgtgggttaaacatacacatgatgactataggaggtccg

SEQ ID NO: 372807 - DNA, 312 bp, Homo Sapiens
ccccatatagacatcacgtgacggtaggaatatttctttcttctttgtatcaccagtgctaaccatgtaaatggtgtgaggaatgacaaaaaggaagaaaatacttacaagtaaacaagaccctatactaatacatgtcactgtgcccttccatatacatatatcctacccactcccccactactaagaactattcttttctgtctggtaaaaaggtatgcatttaaaatagtttcgcttttaaatggattgtgcaccagagggcaaaccactcatttactctcctggcagaggaaaacagtaaagtgtcaa

SEQ ID NO: 372808 - DNA, 235 bp, Homo Sapiens
ggctcggacccctatagacatcttatctcattatgtcattacatcttcaatcctacggagtctccttgtttacttgtgttttctcttgtgcctttgactttttaaagacactaggcactggaattcatttttagaggaaatcaacatggctgatataactgctctagcaattatctaaaaacttgaaaggtattaaggttggttttccaaagttagttattcacccacccagtgg

SEQ ID NO: 372809 - DNA, 464 bp, Homo Sapiens
ggtgtatgagtactattggcggtaaaattctttcagcttcgccacgtttgaatttgctcatagaaaatactgaaaaaagtaatgtcaggttttttttctgctcataaaatcctatttcttttgctactttttctttcaagtctgttttactgttacagtgatcatagtcacatgtgttacaccttggttttttaaaccaacaatcttgccaccagacttgagctctgaagagggcagggacaaggttccctgctatgcccccagcacccagcagatgcctgaccccagttggtacttgtatgacatctgtggaatgaatgaatgagtgaatgaatggactgtgggaaacgtggaatctgtcagcgtatttccctgccaggctctccatctctgtaccctcctatggttcagactgacccaacacactggttttaaacacctatccaacccagatgggtaccgag

SEQ ID NO: 372810 - DNA, 443 bp, Homo Sapiens
ccctattagacatccagtctaagtacagcagctatagtgaggccagagcaaatccattttcccctaagtgaaacaaaataacaaaatagccatgaggatacttcgtgtagaagaaatattaagtgtgtagactgaatgaatttttcctccctgatgttaaaaatcacagaaaagaacttagagaaaaacctgaaaaatgtaatacaagaacatatagaaaaggaaaccaaaatcacctttcattttgctttcaaagattgccacaataaatatttgtagtgtatcttcctagtaggactaaactctaattagatgaggtaggattgcttcctttctaaaagatctactgaagataaaactgatttagttctgtttgaaaaattaactttaaagacaagaacataattatgaatgcatacttattctaatattagcattttaat

SEQ ID NO: 372811 - DNA, 501 bp, Homo Sapiens
agggtcccgccgatagacatcagtccatctgaatatcatgtttataagctgtctgatagtactccgttaatatgctgtacctataattacttgaaccatgaccctattaagggtccttggggacggtcttaatagttgatattacaaatagtgctgcagtaaacatccctacacttacatttttgagcatttgtgtcagtatttcaaaaaacaatttctaggcatgaaactgctgaggcaaagaatgtgcgcatttaatttgagacatactgataaatatccctacagaaatgttgtttcagtttccggaagtctgttattaatcatgaaacgaaataaattagaagtttctcaaatgataggaattacaagtctgctgaatgattagggcatatatcacagatgaagttttataactcttttgggtttagtataaatttaaaatttatattttaagtagacacaagttgaatacaggacatggaaattattttagctctt

SEQ ID NO: 372812 - DNA, 192 bp, Homo Sapiens
tcagtcgcgtgtgctcagtcgcgtgtgctcagtcgcgtgtgcttatcattgtttaggaagcaatccttgtacccccaggtcatgcatgttgctggaatctctgtccacaccagcaggccagccttacgtccctgcccctttgctggaaagcctcaatccaggaaagagtggctatgtgacctacagcacacg

SEQ ID NO: 372813 - DNA, 162 bp, Homo Sapiens
tccctattagacattccctagacagaattaatgactaccagacatttttactagacagaattaatgaatgatctagacagaattaagaacttcttcaccgttgagtacacctctaatactacatcgagttctaagtagggagggatccgtctagagcatcct

SEQ ID NO: 372814 - DNA, 216 bp, Homo Sapiens
gctgtagaagtaccttgtgccttcaggaaacctaacataaaaagatctaagaggtagaaaaaggaacgaagcaattatttaataattccttagaaaaaagttatttgacttaacataaaactttagagtttcttttattcccaattgtttattattttatcacaaagaactacccaaaactacaaacagataatagtatctctgatgtctaatagg

SEQ ID NO: 372815 - DNA, 351 bp, Homo Sapiens
aagccacagtatcatgaagtgacacatagatttcaagaaagataaatacaaagaaaaccaaatctaagcatatcagagtaaaattgctaaacaaagacaaaaggaaaatctttaaagccctttgaaagagcaacaacatgacttttaacaagaaaccagaagacagtagaacaacatctttccaatgctgatagctaccaaacaaaaatttttagtatgttttccaataaacaaaaactgacagaatctattgccagcaaacctgtgtttttcaaacagaagctaaatgaactttagaaatgtaaaaataaaaatacaaatcaggaacatatgaattagaataccaaagat

SEQ ID NO: 372816 - DNA, 251 bp, Homo Sapiens
ttagcggactcccatatagacatcatcttttaatcatatttatttattttttaagctcccaatgagtatagtgatttaacttctactcgtggtttcattctttgaatgacttacaactaactgcctgcatataggaggctacctattgaatagctctaaactctcaatgaaaccaaagagctctgccaccccttccctgaacaaaccagttgtcagggcagtcaaattcacagcttaataaaaattttatt

SEQ ID NO: 372817 - DNA, 481 bp, Homo Sapiens
  misc_feature (66)..(75): n is a, c, g, or t
ccatcgctgatagagatcatcggacatggcactcagcctgggcgagaacagcaaaactccaactcnnnnnnnnnngtgatggaaagtatggctggggtggtgagtaccgatattgactgggtagtaaatatatactaaatccagtgaaatatgacttctctaactgagctggacatatccgggttatatctcagggcagctagataaactagaaatgacttattttaacctggtagccacagcacactggaggttattcttaggtgatggtcagagacaaagctgggtaagtgactccgggattaagaattatggaggtgatcccataacagccggtgatttctaaaagcagaagactggcccttattatagaaaaagaagtgatgtcttatggtatgtggcttggttggatatgcagaccttatttggcttttatgagatgaaatttagaacatacacctcacatggatcactaaaaatg

SEQ ID NO: 372818 - DNA, 362 bp, Homo Sapiens
cggaccctcccatattagacatcatttggaaccaattctatgaactagaataatctctccagttatcactttatctgtatcacatgaatgacatacactttcttaagattatttcactttcctgagaaatagcctctaagatctttaaagatttttctctcttcagtgggcttttgccaaccgagcacttctgtatggatataatcttatattaaatatgttcaagaaagaactgtctttcctcaacaccaatctgtcgagattccctgcagttttgtcccagtcacacacaggtttactgttagagtgatcttgacctatgtctaccatatcctgtccccgagtttcttaaaagttactga

SEQ ID NO: 372819 - DNA, 345 bp, Homo Sapiens
tccctattagagatctatgagaaaggctttcatgccttagttacattttctgtctcctccaattagactcctccaatgctactgaagggctttagtacagtgctctgcacacaataggtgcttcacagatatttgcagaatgatttattgaggaggaatccatagatgatctcacagaaattcaaggaaaaatctactatgtgaaaaacaaagtgccgattccatgcttcaattccatgattctggcagccagcataacaaaacagccacaacaataacaaggaaaaaaaagccacgatgatgtttagaagttaactttaaactcttctgtcgttatagcgtaat

SEQ ID NO: 372820 - DNA, 336 bp, Homo Sapiens
gctgttcagaggatccctcccgtattagacatcataaatatgtgtcattacgagatgtggaagatacattcctataagataaacatataaatgtaaattactgaaagaaggctatttacataggggtttttttggcttaaggtttataggtctcttaaaattgctacatgtgttacataatttcaaattcatattttggcttattttttaaaagcatgaaaactatagaactcttcagaaacgtatctattgtgagaaaaagaatacttagaattttcaaagatgcggtattctaataaaaaataacaaggctaattttatctgaaaaatacatgt

SEQ ID NO: 372821 - DNA, 457 bp, Homo Sapiens
gtccctccaatcagaatctgaggggcaaggagaatgttactaaaaatatatagacaatataatgatgtactcttgaatctaagatatgcagtatatgggtccttcctttatccatatagcttcagttacctgtttctcttatatctacaaagattctaagtctgatgctcacagctaaggttagggctgagtacgctgttcattgagacttttatacctctgactctggaaataagaaaggcttttcaaaaatccatctgggctgggtgcagtggctcatgaacaagaaaattttcaaggtcaatgaagcaactcctaatactgactgaaatattaactacagagagtacaggagatcatgctatattctgctaacacatccataaatttcttaagggaaaaaatgtcatcaaactacagattttatactcattgctttttatgtccaaggcaacat

SEQ ID NO: 372822 - DNA, 182 bp, Homo Sapiens
accgggcttatagttatttgtttgggatctcagtccgtagtcaattgtttgagtagacctttctttttagaatcttaatttttaaagccaccagtagccacttaaaggccatcagtgaccacgctggagcttataaatattttcattttcctaattttcaataaaaaagttggattgtatta

SEQ ID NO: 372823 - DNA, 377 bp, Homo Sapiens
caatggtaaaagaagttataagttagctaaggtccccccaagagactttacatgcttttatctacttaaaaacatttaataaactccatttaattaaaccaaataaatcattaatttaggctgtttaggaaaagttataaaatgtttgataatttttcttataataatcctaatgtattatatggttcaataatgtgctattctaggatgaaaccatttaaatctggttctttgtacattttaatgaacttttgcatcatatctccaatacttttatgaatatttatgatctcttacataagttgatttccacatagtggggagatttaggctttctaacactgctctgctttttcttataacttcttttaccattg

SEQ ID NO: 372824 - DNA, 405 bp, Homo Sapiens
gcagatcattggtgatctaggaacaacggatagaggtaagacagtgacgaattacaaaagagcctgaacaaactttcagagatgatgaatatgttcactatcttatttataactaccaaaactaggggtgacagtttgacagttatacacatatgtcaaaatttgccataattatatacttcaaatgtgcagtttattgtatgttaattatcccaagttattttacaaaattattctttaatgctactagctctgcaactctgatcattgattttaggccaatttatgaatcacaccacaaatctcattactctgcagacatctttgcttttgatttttaaaaaatatattacttaaactggtgattcctttgttgccagaccgatatgatgtctaatacgggag

SEQ ID NO: 372825 - DNA, 161 bp, Homo Sapiens
tccctgattagacatccatccagtgggatggcagcacactggtgggcaaaattggaagtataaagatgtgtaatatgtaagaccccctcactcaagaagcttacaagtccaacaaagcaggcaaaatggcaaaacacaagcagttgggagcgttgtaaaat

SEQ ID NO: 372826 - DNA, 518 bp, Homo Sapiens
tattagacatcccttaatctatgtatctcagcatgcatagttgaggttggtgctaagcacagctaaagttccaagtctcctctgaagctcccctggtgatctaactgggctttctggtgatggtctcctctaggctgctatagtaacatttatacaaatatgtctctgtattctttccttctgtgtattatgtctgtcatcttacctgtataaagaattcaatacttctctgctttgtgtaactacttgtattctttgctcggttcttgtattcttatatatatattttcagcctggcttcctaggggtcatccctgtgttttctcagctcagtgatcaaccagcgattgggcagagattatattcaaacaccttttatacaaagtatacaaagaaacaggaaaatctaccctgcagcctgtactcagaaaaaatagtgttcaatgaaactaacttacagactcagccgcttgttagattaacaaagattctaatcagggcagggacctctagaacgc

SEQ ID NO: 372827 - DNA, 193 bp, Homo Sapiens
gctggtcccccatatagacatcaggtgaaggatgttggttgcccgggctgtgtggcagtaggatggagaaagaggatggattgagatctaagggttagaacaggcagttcttgctggaaagaagtgttcttcattctacagttcagaataggaaaggtattgactgtgcaggcatttcttagtgtactcaaaa

SEQ ID NO: 372828 - DNA, 548 bp, Homo Sapiens
caggccagggactgaaagctgacagtgacaacaaaactagaacgcaaacggttgctgtaccagaagctgagaaaactggagaagtgcacgtgtatttcatgtttcctgactggacgggttgggaacagaagcgattttatttgtatctattttttaatgcaatttctgcaggtattactagtccttcagggacattcataaaccatgcttctttttaactggggaaaaacatgactcaaagttattttttccatgtatttatttaggcagctctttattgtcctcatatgggctgttcttggcaatgggataaagaggtctttaggcaattaatttaaatggagctgtgcatccagacgagaggaatcacagacagaacgattccagactgtggggtgaattatttgcattttaaaggtgcatttttccacccaataaatctgagtgatttcagttagcttaccctttgtgcgtgaagacccatagtcttccccgttgttaatttaatttctatataatctgatgctctgtcagatcgatctctagta

SEQ ID NO: 372829 - DNA, 371 bp, Homo Sapiens
ctgtctagaggatccctcgctgattagacatcaatctaatttgtaggacatttccattatcctaaaaagaaacctcatgtccttttacagttatccccattgcctgccctaggcaccaccaaactttctgtctttatatattggcctttcttagacatttaatataataaacataatgctttaaaggatcatccatgttgttaactcgtgtcttttaaaaccaacatacatggtggttctgactggtatctcctaatgatctcatttgaatgtcaaggcaaaatttctgccatgtacaaagttaaataaagccaatttaaagaatttatagaatcagttacacaaaactaaaatggatgggtaccgagctc

SEQ ID NO: 372830 - DNA, 514 bp, Homo Sapiens
  misc_feature (70)..(107): n is a, c, g, or t
gcctctcccccaagtctcggggatacaccggcgggaccccccagcccggcccccaaaaggaattgtcttnnnnnnnnnnnnnnnnnnnnnnnnnnnnnnnnnnnnnngtccttggaagagcttagaagatgaaatacatttaatgaaaattgagctcattcttccccaatatttgttccatattcctctccatattatactattagtacacaatcctgtttggacttactggaaaaaagagctgaatagcttgtccacatgtcaagaaactttctgtttaagaacactgaggttcatcaacatcaaaaaatattttcagcatcattcaggcactggacatgctctgcaaattaaataccttagggcccctactatttcagtgttttctcagtgtcttgttgcagtggcaaatgctatgaactacatttttcaaatgaatattgaagattgagaaagaggttaagacctctatctataacgatagaaccaatctagaaaatgtctagtggggccg

SEQ ID NO: 372831 - DNA, 446 bp, Homo Sapiens
gatttaagtgggaagaggactacaaagaatacaaagaaactagcaatgcctgaagacattttttgttgtcacaactgggggtggggggatggtacttggtagaggccagagatgccgctaaccatactacaacacaggacagtttcctacaagaaaatgtcagtagagctgacactaagaaaccttgctgtatatgaaccactgataagaataaaatcttagctttccaaggtcaatcttgccttttagccccatcatggccccacgtgtttgcaggttctttggctaagccaccaaatagctgttatggtctgttaacaatcaaatgaatggcaagggagaagtttaagccatgacccagcatttaaaaaataatggaaaagaatacacagcaaaactaagagtatgcagcatgcagaggatgtctaatacgggagggatcctct

SEQ ID NO: 372832 - DNA, 468 bp, Homo Sapiens
tctcttgggtatatactcgggagtggaatggctgggtgtcatatggtcactctatgttgagccttgaggaactgccagactcttttccgaagtggctgctccattctgcgtgccatcagcagtgtttgagggttctaattattccacattctagccaacacttggtaggattgccagtctggtcatttcatgccaagtgttcttgagaggcagtgtgtgtgcgtatgtgtcttggtgtgtgcatgtgtacactgtgtgtaaatggagtgtgttctgtagcatgagagatgtgcgtgggtaaatgtcctaatgatggcagaatgcccaaacatgaagatgtagtagaaccgtcagtggtagagcaatatagcacagactctctatggctgatttggtgcaggtgcctctctcgagctgtatagatgtgagacaggaagattgataagatatatatttttatgtttgtag

SEQ ID NO: 372833 - DNA, 420 bp, Homo Sapiens
cttcctgcctgacaagtagatgcaataggtgggcccaagtagctaaggaagccgtgtgcagagcctgaaggggtgccagtgtgtgggccagccaatcagcatggagcccacgggaactgaaagatgttttaattctggggcttcatactagaaaccttaatatcttagaaagacaggttaagggaagagagaaaagcataagttaggtaatttgggggataagttgagtgtagcctgcaaactatggtatagacagaaccaaagaaacagagacttaattaactctgtcaatcaacatttatagagcattggttgagtcaggcactgggaacatgaagatgaataagacacagctcttgctttccaggaactcacggtctggtgggggaagacataaatggatacagctgattgtaaaat

SEQ ID NO: 372834 - DNA, 277 bp, Homo Sapiens
ccttgtcctctttctctgattgatggtttggggataggcatgtaatccaggtgatagccagtcagaacatggcattcttctggccatagtgattggatcagagatggttttgttaacctatgtttgtcctaatagaatgaagcctagaatgttgggtagttggcagaagataagctcttctccttccgtgcagagagatgtgtggatgtgagacctaaaactgccatagccatttttattcttttgacgggagaacaacttgatgtctaatacggga

SEQ ID NO: 372835 - DNA, 237 bp, Homo Sapiens
cttgtccactttgatcaattctccacataatgccttgagcgataaataaaataaaaataagattacaacacttccttcctccccaaacgtctatggcgaccctatatggctaccaattcccagatcagtgaggtggttgtttcaaaatcacctgcaggctcttgcaaagggtacaggatttccctccttcttcttcagagtcactggcataaagagcattgtcactatgtctatagg

SEQ ID NO: 372836 - DNA, 284 bp, Homo Sapiens
tctatcagacatcacgtgacataagcataatggggtttccagagctgagatcacacgtttaccaacctttgatttttgccctttattttaaaactatacccttgtcattcattaaatgaaagttttcgttcctcatgaaggaaatttttcatagatattatttttcataaggaatgcttgttaaataaaattctcagtagaaatgatccagaaatctcttaccactaacttccctgaattatttactatctagatactgtaaccctgggaaccgaatattctag

SEQ ID NO: 372837 - DNA, 449 bp, Homo Sapiens
aatactcagtcaacacttcaagcttaacatgtctaaatggcacaaattatctacatctgtccctgtttccccattctgtgttctttaaatcttggtttcttcatatttaaaaaagagattttaatatttctgtcctttaaagtcccatgactttatatgcacaaagttcttagcatagtataagtacaaagcacagagtaagttattcaattagtgacagctgatattatattttaacaatagaaatagtcttcaaatctactattggccctcaactttagagggcaccttttcacatcacaatcagaactgtttgtgttacttccttgcataaaaagcattaatgactcccctttggtctaaaaggaaagtttaacaaattaaacaatggctttaacactctgaaatataaccccaacccacctggatgtctaatatgggaggtgacc

SEQ ID NO: 372838 - DNA, 296 bp, Homo Sapiens
gtttccgaacttcatcgactccaaggaatgattaaaaaatccattgattgaatggaaaaaataaagtttgcagtttactcccaggaccttccaaatcagcatatcgtttttaaatgctgactcctcaaaagcaaaatagtcatccgagaattttgacttcaactgctatctttttctttcttcacagttttccattttaataaaaaatgacagatttcctgtaaacctggccgagtctgccggcggccgcggaaatcctcaggtttgcgatttgagccactatacgggggtcctcg

SEQ ID NO: 372839 - DNA, 586 bp, Homo Sapiens
gattagacatctgagagtgataaggcataaatatgtaagcagagaggctagaagccggtctaagtcctagaaattcaagtaggcctgaagaaggacaaaagaaatctgaggttctatatggaaatgtacaagggggacccagaaatagaaagatttagaagttacattaagaaactttggcgaattctaaaagtagtagccatgtacaagtgcactgaaagaagaacctgaagggaattgaacctccttcacaatcttgcaggcagtcttttctgaaagctgtagtccagtgaccctttgaagtggcaaggcacattcaggatctcatcatcctataatgctaatgggtaaaaagtgatacctatcatctttaaagctttcagacaaacttacatcattcaaattcttcaagcagttcccctttcctgcagaaaaaaatggcaatttcttctttctaaaactctttttttaatttttaagtcatatggtgtgattgagatggaatatcatggagtcattatgtctgtagtaaccagacatgatgtcagaaatgtcatcccgaagaaagacaactctgtgcatcaca

SEQ ID NO: 372840 - DNA, 273 bp, Homo Sapiens
aaaccaaagcagaaaactaacaatctaagaaaactctgacatacaacagctcttgccatgaaacccttgctggaggaggaaagcaggctcctaactgttctctcccctcctcccctccattgcatctgcagaagccccttttctgccaaaaacatccctctgctgaattgttctcaaggggcttatgctggagtaggcatattaagaatattatgatgcaaatacatgaaactattggaccaggatggagatccttgagaaggtgtctatagg

SEQ ID NO: 372841 - DNA, 280 bp, Homo Sapiens
tgactaaagatgttggtcagaagagatgccagtaagtgaaaaagtaaagccaataagggcacacagatctacatccctcgtggtgaaaacatgtgtttggagagaacatactgtggccttgaagattactttcagcacataccttttccccttaactggaattcatctactagtgttatttaaaatgttttagaggaaggagcctgccacttcaagcacctgttaagtgcaaaaagaaatgtgttgaattaactgacggattctataggaggtccgccta

SEQ ID NO: 372842 - DNA, 213 bp, Homo Sapiens
tccctatagacatccactgggtgtgtcttatggagttgtattttaagaataatacataactaaaaggagatgctgtgggatatcagattggtgatatgaagctttcattcaattatgacgaaaaataagaaactgcaacaaaaattactatctaggaaaggggagtaaacaccaggacgtcaccatatcaacatatggtactaggcagggatg

SEQ ID NO: 372843 - DNA, 277 bp, Homo Sapiens
cagtcgcgtgtgctgtcgcgtgtgtgtgcagagacaagtatgtgtgccgagtgtccgtccatgcataggagtgaggcatgtgcatacacgaccttggagattgagtgctcatggccatatgtgtatacggggagggggtgtggccatgctgggacacgttcacagtgtgaatggtgcatgcatgcacacacatcttcaacaggcaaacagcatcgtgtcagggccaagagcctggactgaagccttgagcacacgatctagcttctctacaccgatc

SEQ ID NO: 372844 - DNA, 517 bp, Homo Sapiens
gccagctaaactatgaagcagccaaggaatgggggagaaactagaacatactttaaaataattacagttattatctctggcttataacattaaaaataaattttgcttctttataattttttccaaagttctataatcagaaaatgtgactgtaaaattttgttattatttttgttgtttctggggttaagtacctatcaagcaaaatggcttgggtcttccctgccaagtgtctaaatctagcattattcagtctttcatgcctatttttatgtgttcccatagtctcaccaccccataaaaatctctttaatatcttgtctaatcatagagtaatataattttctatgaaattatttaaatgagtttattcactagactctaatggaaaaagaatggccttcaggatcagatagatatgggttcagataatcatttggttccccagtgtccagagcaagcgtatagtaggtgccaataaatatcagtagatgcgtggaaggatgtctactaggga

SEQ ID NO: 372845 - DNA, 336 bp, Homo Sapiens
tactagaatccctcaatcaaatgtctaaaaagcttctctttgagtgacaggcaaaacttaaattccaacttctgtgacaagatcaataaggaaattaaaatgttaagactttccacaaatagaaagtacccttcaatttccatacattcttttctttaatagataaaagctactcttcaatttccatatatttcttttacttaatagataaataatatgtaaaacctcataataccttttacactgtccatctaatgaacctgagagactgaccgtcacacacagagattatagcacctcaaaacatgtataaaagactctgatgtctatcagcga

SEQ ID NO: 372846 - DNA, 287 bp, Homo Sapiens
tgaggatccctccctatgagacatactcttaaggaagactcgatctgtccgggtccattatgtattttagtttgaaacattattttccattggaaaactcattttcttctatttcaagtgttttaatatcataatgatactaacaccttaagaaccttaagaactacctgtaatattcataagttaatctgaattgatgcatttggttctgatgccattgagagtatatccatgactttcccatgaaggtataatatagcagtacatttctaaagggcactgtagtt

SEQ ID NO: 372847 - DNA, 302 bp, Homo Sapiens
ggcggacctccatatagacatctacacgtctcgctgtagtaggtgatttaccaatagacaacctcttaaaaacagcaacataaatttcagtcagaatttttcaagggttttatcttttctcagaacttatcgtgataaaaggtgatgacacttacagttgacaacaacttttactttcctcacatctgggaatgacacatcattttccgcactgcattcatattccccagcctggtcccttgtaattccataaatgtccaaatatggtccattttcaaatggttttgctgatggggagatgt

SEQ ID NO: 372848 - DNA, 268 bp, Homo Sapiens
tacgtccatatagacatcagttacagtctacatggagtatttcatgaaactgaatgaaattttgataatttggtagcttgactggtgctataattctactatttaaaatgatccatttcttatggaagaatgcatgttattgggtgaatattactgcattttcctctttgcttgatatgttttaagacctctcaattttctcattgtcgtccatgtgcgttgcgtgggtcgtgtctctgcgtctgccttgtgaagtacgctgccctcc

SEQ ID NO: 372849 - DNA, 412 bp, Homo Sapiens
ggcctccatatagacataccccaaattctgggtatttgagtacatgtgaatcatggatttggtattcaactttttccctggatgctttggaatcgtgtcttccatgctccactgggttcaatttaaaataggagaggctttctcttctgaaagatccattttaggtctttttcaagaatagtgaacacattttttaacaaaataagttgtaattttaaaaggaaagttttgcctattttattaagatggaaatttctttttaggctaatttgaaatccaactgaagctttttaaccaatattttaaatttgaaccactagagttttttatgatgcaaatgattatgttgtctgaaaggtgtggttttattgaatgtctatttgagtatcatttaaaaagtatttgcctttta

SEQ ID NO: 372850 - DNA, 230 bp, Homo Sapiens
cagttagaagaaaaaagtgaagatcaagaagacaaggaatgtttaaaacaagcaataacagctttgcttaatgttcagagtggtatggaaaaaatatgttctaaaagtcttgcaaatacgaagactgagtgaatctgcatgtcggttttatagtcagcaaatgaaggggaaacaactagctatcaagcaagatgacgaattcagaagaatattgatgtcttatacgggag

SEQ ID NO: 372851 - DNA, 328 bp, Homo Sapiens
tgattagacatctatatacggtagaatagagatcgattccgagtgagggtaagcactgtgtagcatcagatgaggcctctggtatgttctttcttattccacagattaatacattagtgtcttcagagtcagagggtatttcatctcttcataattactcttaatcaatctacctctggctaacttggctcccatttactctatgaggtggtataaaatctgacattcctgtggaatttggcatcctctggtctcttttattcattattgaagctttatgtttttctggagatttggcctaaatcagctcttggtggatgtctaatag

SEQ ID NO: 372852 - DNA, 411 bp, Homo Sapiens
gataagacatcacagcaacagaaacatttctgtgccccctttatggcctcctaaactaactaacccatagaaacaggaaaacggatggcttactaaaatgtgtggactaagatcaagaacaagatggatttttcagtatttatcttatagacacaatttaattaccagacaggtaattaattactaccctgtactctcaccttttatatacccactggatcttgtatatagtgggacctatcttaggaggattctaaattggttcagattaagtttttactgagataatgaatgggactcaaaatagaacttgagtttggttacagacaaataattaagtagaacttgtcacttgcacatccaagacctgttaacagaaatccgtaactactacaaatagatgtctgtagg

SEQ ID NO: 372853 - DNA, 406 bp, Homo Sapiens
gataggtgattagttattcaagatgagttaaaatttaagtatgactatattagcttttttccaaagcttttttccaaagcatttccggaatgctttttcattaaaatagctatttagtgaaaattctttataatacaaggatattccagagtagactaatttggcagacaaaaataatgttaaatgtattaatggaatcctaaaagggttattttcaatgaatatgggactgatagccaaatgtaaaagcttattaatatctaatgccaggagccatggcatttggtataaatatgtgtaatttatggtacttttagatgaggtttatatattataccttcctgccattagtggatgaagaaaatttctgaaggctaaactagaggatacaagaaatgtctaatag

SEQ ID NO: 372854 - DNA, 321 bp, Homo Sapiens
ttgtgagggaataaaaatcaaagaaaccattgtatattctggtctgaaaaatgttgtctcaacagtttttttaacttagaagttcccagtttcatgtcttcgttgtatttttaaagatactatttttttgaacttaaaatttttactgaaattgcccctttagaagtcaccactagctagggataaaatttttgtaatttactcattcattattaggtttattacagagtcattattctatactttgtgttggcatattttgctgaaacatatttgatttcaatctcttgattctataggcagggatcctctagaacgcca

SEQ ID NO: 372855 - DNA, 214 bp, Homo Sapiens
cgggcaggctatacctcctgcagatgtacaaatgaacatgcactaaagattttatttacctcattcagtgagggagctaggaaaacattataaacagttgaaatggggatcaaaccaaatttatttgtccagtaatagtgaaatgaatatgcaaatggagtcaaactgattttccatgggaatgatgtctaatacggcgagggatcctctagaa

SEQ ID NO: 372856 - DNA, 300 bp, Homo Sapiens
tattagacatctccctacttagacatcaactataagtaaaggtgaaaaagcagaaaaatatcaacaaagtcaaaaggtggtcattagaaagattaatgaaaatgggtaagcccgggcaatactgattttttttaaaaaggagaaaacacaaagtatcagcataaggacatgaaagaagggtagatactacagatgctgctggcattaaaaggacattagcaacttcatatcaatacgtctgacaatttagatgaaagggacaatttattggaaaaacacaagttaccaaaacaggaacag

SEQ ID NO: 372857 - DNA, 256 bp, Homo Sapiens
aagttctaggccagagatagaactaaatgtcttaatcctaagaggaaaaacttcattccaagggacattgggtttagatgagattcattgttagattatgccccagatggcctgttagctttcttaggaaacttgttcccattttgtgtctccacaatggttctcagctactatctggaccagtcccttaaaattaaaagttaaattagatgtgatgtgatttgaaatttgaaacctatgtttttatttaactaga

SEQ ID NO: 372858 - DNA, 412 bp, Homo Sapiens
tccttattagacatccattaggggaaatggaagacttttaaaacacaacaatgataagtagttaagatcctaaactgcaaaatatattctatgattgattcattgaccagcagaagaaagaaacatttgcccggcattgctggtgaaagagcaggaaaaatcccaagtagctcctatttcccagccccaacaagacgggaagacagcagggggaaaagtgaagagaaaacaagggtgacgggaccactttgcggtagtcaaggcagggggtggcggaagggccctttatgaaaacacaggtatgatatgatggctgttcctgtgtgttcccgagtcacccaaaaacagttcaaattatgtttgacattctcattttggcacagggtgaaaaagtgtggtctattctagaaac

SEQ ID NO: 372859 - DNA, 536 bp, Homo Sapiens
ctagaggataccagaaaaaaacaagaagaaaaggatgaattagaacttcttcggctgggacttaagggcatcatcaggcaggtttggggtaggatagcaggggaggcagagacatagtcggggtcagtggtcatgagttgtggctttgagcccaaaaactgggtttctgttccctacttggccactcagtagtgcatgacttgggccaaatttcttaaattcatgaagcaagtttccgggtgaatgaaatggggataaaaatagtgttcaaacctatccgttggtttgtgtgaaactgaaatgaatagtatcgtgcaggtacttgtgagcaaggggagctgctgtttcctgtccctttatgaatgggaaatatctgagacaagttcccaaccctctggcactgcagggccgcatggctacggagggtcgttgttacaacagctggggctggccttcttttaggagcttcagtggttctgaaaacttttatttgtttgtttgttttagtagatgtagggtctttcagtgttacccgg

SEQ ID NO: 372860 - DNA, 515 bp, Homo Sapiens
  misc_feature (56)..(56): n is a, c, g, or t
  misc_feature (103)..(103): n is a, c, g, or t
  misc_feature (394)..(407): n is a, c, g, or t
gtaaaccccctgaacaaaaggacccaaaattatggtggaaactaatgcctcccccngcgttccttggaatcattaccctatgaccttaacaaatcctgccccnggagatgtggacattcctgcatttgccttcctgtatcctggagagatgtttgtatatatcccaggccgtatacacacacatttccatatctctctacagatatatttccccttcaatcgtgacctggtatttggaactctccttttcatttggcttatcttccttttaatgtgatgtctctgtgctaatacttaccagttcttgttttgcaatctgttttgaggtccattgctttactaagacccactgcatcttggctgatttcaaagtgacacctgaatacagtgtttnnnnnnnnnnnnnngttttgtttgtaaatcatgtgaccagcttctctcaacctgacatggaaagtctcttgtactacagtgtatttaataaaaatgatgtcttacaataaataacatactcc

SEQ ID NO: 372861 - DNA, 475 bp, Homo Sapiens
  misc_feature (290)..(291): n is a, c, g, or t
agtccaggcattatacaagcccgcaggtgtaatagatgttggctgcatagctctgcttgatctaccaatgactatgtacccagcaagggccaagcgcagcatgtgggcactagatctcattccccatcccctctctgtctagaagtatacatacagagccgtaatcatccttatgctctctcctcatgagtatttcctgttctaatggaaactccatcaccatgtaaaaatgttaattcctcatcacattgacctcatattgctctaagtgtctcatttattttcttttnnctttacaggaagattccttaaaagaattgagtgtactggctttccttccactttcttcagcctaccccagttatgtattcacccacaccactcagctaaactagtcatgtcaagatcacccatgaacttcacattgctaaatccagggataaatattcctcccttgttcttggtgtatcctaat

SEQ ID NO: 372862 - DNA, 855 bp, Homo Sapiens
gtgctcgaagctgatgttatatggaatcctgtgttggtaaatctctgagatgttagtgccggcacggtactgcacaaggaaaggcaaacccacacctgggatgtgggtggatcccagatgagacaaatcactgccctttccaggagagggtgttctgatataatcagcttaccactaggtggctggttgacagccccaaggcatggcaccagatggaagcccagtgttgctgtctgttcattcccggtagataatcgtcagtggtcatgactggatcatgctgctgagaggctcttggccacgatggtcaccctatccagaggtctgctgtgtggacactgggtctggtgaggacagaggctagccaatatctgttggtcgacttatcccagtgcttggtttttagtgccccatggtgagcattggtttgcaaaacaaaggcctgtaccccatgcctgttcccaaggcccatctgtctgcctctcacctagaccttgttccctccaggatcctgaccagccgtttgtgcctgcctaggaccctgttatcctcagcacaggcaacttgttttcccccccacacagagctgaccagataccctgcccagggctctgctccacctctgtctttcaggctgttcctatgtgaggctgtagtgaggcctgcaccagtataccaagcaacccatccacaaatcaggtctgcgtttccccctaagttgtagtgaatccccatgaagtgatggcgggagtgaggtgaggacgtcattggtcaacagaggtgcgtgtcatgggggattgggccacatgttgtgtgctgtgtcctctagacatgcttgggttcggtcgtagaggt

SEQ ID NO: 372863 - DNA, 357 bp, Homo Sapiens
tccctataagacatctcttttttgtctctttggctacatctgatggaaactaggcaaagtgctgggattattggtgtgagaggaatccctttcaacccttgaaaataaatcaagcggtgatgaactccctgagcttatatttgcctaggaaggtctttatttctctttcatttttgaaggacagtttggctggacatagtatgtcttatttggcagtttgtccccttctgcactgtgaatatattatgtcagtcccttctggccatctggcaaggtttctgctatgaaatccactgttttatgaaggatctcttgttcatgacaagttgctttttgattttaaaatgactcaatgtg

SEQ ID NO: 372864 - DNA, 371 bp, Homo Sapiens
gggagtatatcagcaaggatggtgttccatactgtgagtccgactaccatgcccagtttggcattaaatgtgagacttgtgaccgatacatcagtgagcagagtcttggaggcaggagggaagcactaccacccaaactgtgccaggtgtgtacgctgccaccagatgttcaccgaaggagaaggaaatgtacctcacaggttccgaggtttggcaccccatctgcaaaacggcagaccgggcagagaagaagttaaagcatagacctgagccagccaggcctggcttgctcaggtctcgcgggcagaaggatacaagtgtgagacaacaggaccaccaagttgatagggtaactgagcctctggataaca

SEQ ID NO: 372865 - DNA, 338 bp, Homo Sapiens
gtaaataactaaaagacacaagaacaaatggctatagatggactaagacagtaacttccggctgggtccatgaattatatagtatctgcatcttaacgttagcattaagtaatctcagattactccagagagtacattaggaaacgggattatctatcccatatatgtttgaaaatattcccagtacctattaaatccaaaatgtgctaagaataattttccaatcactaattcataaatactagtgataccgtgctgcttgttagctaacaacaggttgaacagagacactccagtgtccctctgtttatgcaggttcacatgtatttaaggcggcg

SEQ ID NO: 372866 - DNA, 752 bp, Homo Sapiens
  misc_feature (63)..(63): n is a, c, g, or t
aggtaagggtcatgttgtgttatcggttcaaaaaaaaccccacacaacccacatcctctattnataaaaagtagtacctctcatagtaaaagcctgctctacagttacagttttcgtttcagaattaacaatccattagctcaaattaatattggctgcatcaacaatattcctgcaagtatcgccaatcgtcttccagagacaaacatgaaggctgagtctattcctctaatgatggcgaggagaaggggattgaggagtgagccttctgttcagccaaataacaggtgcatgaagcatttttaaaataaactccctgttcaggataaggaagtcagagctggttttgtaaaatgccatcaagggactctgtaccatctggagacaggtcctttgagtcaggagggattttagtgaatggcttcccagtcttggtttttacacgctatgtagccaatacatctgtgtacaaagagcattaaacccacctattgcactgaaggaaatgtggctaagtcacttggaataccgagagtactgaccttgagtaactgaagtgctacttcacctctgtgtggctcagagttcccatctgcatagtggagacaagaggtgctatccctgacccgctgggtgagagagagctagaaagggcaggagtgagagggagctaaaaagcactgggccttctccagagaaaggcagtgttcaattaacaaagtactcaacaaaggactccaatcaaaaagcac

SEQ ID NO: 372867 - DNA, 764 bp, Homo Sapiens
ctacaggggtagcggatatcaactacgatgagactttgagcactctgagatatgcagatcgtgcaaaacaaattaaatgcaagtgctgttatcaatgaggaccccaatgccaaactggttcgtgaattaaaggaggaggtgacacggctgaaggaccttcttcgtgctcagggcctgggagatattattgatattgatccattgatcgatgattactctggaagtggaagcaaatatctgaaagattttcagaacaataagcatagatacttgctagcctctgagaatcaacgccctggccatttttccacagcatccatggggtccctcacttcatccccatcttcctgctcactcagtagtcaggtgggcttgacgtctgtgaccagtattcaagagaggatcatgtctacacctggaggagaggaagctatggaacgtttaaaggaatcagagaagatcattgctgagttgaatgaaacttgggaagagaagcttcgtaaaacagaggccatcagaatggagagagaggctttgttggctgagatgggagttgccattcgggaagatggaggaaccctaggggttttctcacctaaaaagaccccacatcttgttaacctcaatgaagacccactaatgtctgagtgcctactttattacatcaaagatggaattacaagggttggccaagcagatgctgagcggcgccaggacatagtgctgagcggggctcacattaaagaagagcattgtatcttccg

SEQ ID NO: 372868 - DNA, 460 bp, Homo Sapiens
cacggacactagttgctggacaggactttagtgtccagaggggctgaaagagaccaagatctcagcccctagtttcccattttctttcgatgagtggggttggtaagagtcaggccctaaaatctgggctgtagcatggtgcttgccaccaaaggagacaggcttgaagtcaggtatggagtcctccacttcctccctatgatggggacagggccatgggctaagctggtggaagcttcaggcctacctgccatggtgccattatttgcgacaaaagccgccatgtccactcggcggccatcaatgtgcaggtcccgcatacagccgatgaagtccttatgggatacggggaagttctcggggaggttggggacacctcccagaagaagagggcccgtcaggtccagggacctggggatcaagcgtctgggtcattggtggggcactcgtgtcctgccca

SEQ ID NO: 372869 - DNA, 682 bp, Homo Sapiens
  misc_feature (327)..(327): n is a, c, g, or t
  misc_feature (329)..(329): n is a, c, g, or t
  misc_feature (574)..(574): n is a, c, g, or t
  misc_feature (587)..(587): n is a, c, g, or t
  misc_feature (592)..(592): n is a, c, g, or t
  misc_feature (598)..(598): n is a, c, g, or t
  misc_feature (665)..(665): n is a, c, g, or t
atgcagatgaataagataaattctcagaatgtagttataatctcttgttttctggtatatgccatctttctttaacttctctaaaatattgggtatttgtcaaataaccacttttaacagttaccattactgagggcttatacattggtgttataaaagtgacttgattcagaaatcaatccattcagtaaagtactccttctctaaatttgctgttatgtctataaggaacagtttgacctgcccttctcctcacctcctcacctgccttccaacattgaatttggaaggagacgtgaaaattggacatttggttttgcccttggntnggaaactatcatataatcataagtttgagcctagaagtgatccttgtgatcttctcacctctttaaattcccacaacacaagagattaaaaacagaggtttcagctcttcatagtgcgttgtgaaatggctggccagagtgtaccaacaaagctgtcatcgggctcacagctcagagacatctgcatgtgatcatctgcatagtcctctcctcttaacggggaaacacctcaggatttgcatatnaaaaaaggcaccngggtnttgganaatggaaccccttttcttggaacatccaaaggttgttttcccacaggccttggggcaggcagggtgnctcttagttgggtgttt

SEQ ID NO: 372870 - DNA, 670 bp, Homo Sapiens
gctttgttgttcttctagtgtgacttttcaagtgtaacagccattcttcctgactttaatattgtccagttctggtcttttctgtgaattaccactgggccccttacctcaatgctttttgttgatgcccactctggttcccttgtttatctgagtctgttggtaccccaaatgaccccacacccatcttaaagtactttttttcaccttccctgtttagtactggccagatgagttttttctagagctctgtcactatctgaaaagaaagaggctatgggaaacatagaaatggtatgtattaataactgatcataggctgaggagaaaaaatgtagctggctgcaaacccagtgctgtgaggtgacttatatgaggttccagatcaaagacaggccgtgtgagccagtccaggagggtgtaagttctgaatggttccttgctgactttgggtgacacatgtaccacatactggctcagtttaagtcatggttctattgtagatttatttttatattagttaataaatgactttaaattgtcaccaattgaaaatcttgtcactcttttggttttctttatatagctcagccaaatcttgttttatgtcctgtcctcatctcttaagctaaatctgtttggatcatattaataaactaaatgaaattac

SEQ ID NO: 372871 - DNA, 420 bp, Homo Sapiens
tgcccacagtcgatttcggtggagcggagccccaagaaaaggctcctaggagcagtactgaaaagactggtggtgacaatgatgttgaagaatccagtagatcttcctctactgtttcacagagaagaaagcgaatatcaagtacttctagcctggttaagtctagtgtcagtgttccttcagaatctcatcccttatccacaattaatcacagacggctccacagccaactgccacttcaacaaaagagaaacagccatgctcagacagataccgaatatacaaaacccagaaactgagggaaatgttaaaagaagaattgagaaaagagaagaaacaatggaaaaacaaatatgctataaatgaaagtcagaggccaccagatcgttcaaaaatgactatgagagactccacgtcacg

SEQ ID NO: 372872 - DNA, 257 bp, Homo Sapiens
ggaccggcatactggacttctgtggactctcataggacctctgctgcctcagaccatatatctagcagaggtcggatccagactcagagtacccggcttggttggcttctcaggactgacatcatctctgaggaacactcctcattttatgcctaagtaattcctttgacttcttttgcactcgttgatacaattctcagtcccttcttgcgttgtgttcctgctctggtcccaaccctgacacacacacacgttct

SEQ ID NO: 372873 - DNA, 400 bp, Homo Sapiens
tcgtgagtcttgtactcattaacagtctgacttctagtaggcactggattcaggcactggaaaggatggccttgggcacactgtgtacacgtgaaagaggatttgtggggaagaaaaaagcagaaaagagaaagatgctatcaagaactatgggtggggatgcagggcagaattggttaaggaactggtttgtgctacagatacaggctcaggcagcgctatgttctgacttattcctgtgttcacacaatcagaagagattatgatcaggtagtccaagaaacctgggttggtgaaaaaaacaggttcccaatagagattcattgtctacagtttagataagccaggagtcttctaggcacctctgtatgttctcggcagaaatctctaggaggaaagc

SEQ ID NO: 372874 - DNA, 472 bp, Homo Sapiens
cggctcggtctgtgtgtagcacaaaggagggagggcaggtcacctgtgcagaagaacatgcacacacacaggcatgcacacatatttgtacacgggcacactcatctgcacacacacatgcacgcatacgtgcacaccctccagcacacatgtgttcagatcatgctctcatttacacgtgcacacgggcatgcacactcatgcacatgtactgttgactctatcttgagcttacacatcaaagccacgatctagttcagtacttacttgtttattgatattccatttagcatttaccaagtaccttctatgtaacttggctaggcagtctttttttctcaaacaaaatccagtacaaatcctccctcatccatgaaatctttctggattctccaatgggattgaactaatcctcatagaactttccatgtgcccctgcttgtcacgaatttcatttaccttcagagtaaaa

SEQ ID NO: 372875 - DNA, 270 bp, Homo Sapiens
tgtggggtaagaactagatttaaacaattgaatatgataattagtctataacaaggaaagtgtgttaacagatagtggatgattcgggaatggaagagtcagtgaaccaccaaaatattctagtaaagtgagtattcacctttattggcacgtggatcacctggggatcttgatacaatgcagatagtgattcagtaggtctgaggtgtctagggtggggcctgaaattctgcatttctgacaaatcctgggtgctgctgctgctgcttg

SEQ ID NO: 372876 - DNA, 434 bp, Homo Sapiens
gacaagcggagaggaccgccttccattaagtgggcggggctagcaaactagagccaaagatgcccaatgccccagaagagaattcagagggggcctgtcaggtggaaggagccaggctggatgtgggtaggacctgctgtgcccatgtggcccaggcaggcaacgcaaatcaactcacgtgcagaccagaagccagcaaggcaggtcctgcaggggtgaagaagctgaggcccggggatcctgggtactccctcaagaaccttgagttaaggagtggcctcacatcttcaggatatcctggactctagtacgtattccttggactatctgaatttcttaagtatgctaagatgatgtacatcttacaagacaaggctggagggaatggctagtatcaggtcccagagctggaaggagcgggtcccagaggccca

SEQ ID NO: 372877 - DNA, 405 bp, Homo Sapiens
gaggatcctctcccattaccaagccagtaaatttccctttgagtgggatttctgtcacttacaaccaacaggcctaacacaagagtgaactgtaagggagacctctaaggccagccacttaatgccatatctcatcaagatgcccttgattgtaaaacataccatcattttatgtaccatgaggaaaggggaaaatgctgtaagtaagctatgacaagccactgattatgagatgcatcccagtttcagaagcatgaaaatatgggaaaaatgtgcttcctaggcctgatgaaatattgcagctgtgtgcccttgggtgagttacttaatctctatgctgccttggtgtcctcgtctttaaagtgaggatgacaatgcccacctgacaggattgttgcacccaca

SEQ ID NO: 372878 - DNA, 485 bp, Homo Sapiens
gtgggtagcaacaaagaaatgctctaggccctaggaaggttagatttttgagaacacatcaacttgggtaacacaaaatatgagtaaaaacaaatatgagagaaaaacatatatgtaaactgaacacaaaaattgaattgaaccattaaaagttcgctgatcttatccctaaacaaacttctgggatatgtgtatttcatcattcgtgtgtttgaaattaaattttatttaactggtatttttaagctaactgttctaccaccaaaatcagttttaaaatacacttctagtttctgctacattctcatataatttaaaatcagccgtgtgaagaaaatacaaaccttagattcaaagcctagaatcaactatatacctaaaatataccagaactgattgttttataaatgagcaacagtgagcattcttctctttagaacctggctcataactcatctctcccaccaaccttcttgtgcataaca

SEQ ID NO: 372879 - DNA, 388 bp, Homo Sapiens
gacggtgtcgcatttccttggaaaacagtaaatttgagtagatgtggaatgttgtgtcagaagtcttttctttgaaactcagcacctgggttgtaaatggatacttcttcttggtgtcaaaatattacataagccctccaggtgaaagtgggatatttcagtctttctgatatttcttactgatagaatttcaaacagcaaatttctaataactgattttagagaacaaagtttcacagtgtgtaaaaaagcaacaactcaaaaaagtcattagaactgccttgttctctatttgtggtgactgtgcagctgtgtttcttttgttactctctgggctaagggggtttgaagtattaaacttttctctattattctagtagctacccac

SEQ ID NO: 372880 - DNA, 390 bp, Homo Sapiens
tacctgggtgcacaacacggtgtcgcatttccttggaaaacagtaaatttgagtagatgtggaatgttgtgtcagaagtcttttctttgaaactcagcacctgggttgtaaatggatacttcttcttggtgtcaaaatattacataagccctccaggtgaaagtgggatatttcagtctttctgatatttcttactgatagaatttcaaacagcaaatttctaataactgattttagagaacaaagtttcacagtgtgtaaaaaagcaacaactcaaaaaagtcattagaactgctttgttctttttgtggtgactgtgcagctgtgtttttatgttttttgggctagggggttgagattaaactgttctttattattctgtgctatcac

SEQ ID NO: 372881 - DNA, 396 bp, Homo Sapiens
  misc_feature (41)..(109): n is a, c, g, or t
tggtagcaacaacaacaacaacagagtctcactttgtcatnnnnnnnnnnnnnnnnnnnnnnnnnnnnnnnnnnnnnnnnnnnnnnnnnnnnnnnnnnnnnnnnnnnnntgggtgggaagaagacctggggggactttagctgttccttctacaggtcaggaagtcctcctgtattcagctatctgcctcatgctcacctttgtggtactcactgcctcaagtcctaggctcctgggctctaattggcttgtgtctcagttactgtgtaggctttggatattttcttttctcatctaatctaatcttatcttgtaaagatctgctctgctagtgcttcctttcgcttccatcttctgaaagcgcattggcacgtcttaactgctgttggttcctct

SEQ ID NO: 372882 - DNA, 357 bp, Homo Sapiens
  misc_feature (21)..(21): n is a, c, g, or t
attctggcttggggtcttgangtagttgtagtcagacagtagttggaatgatgggggttgtgagccatctcctcttcatgaggtcccatggcctctccacatgtttttccatgtgccttggtttgggcttcctcatggcatggtggcctcatggtggtgggactgcttacgtggcagcccagtacttcacttgtggggtgttctagctcacaagcttttacaatctagcctaagatgtcatagcattgcttttgctgcccactcacattcaaggaaatgggaattaggctctcctcttgatcacgaataagaaggtgctagaagactaaaaggaagaggagatattgttgctaccca

SEQ ID NO: 372883 - DNA, 262 bp, Homo Sapiens
aggtagccacaagaagtttgcaggtcccattcttaaagtcatttatgatgctatctctgtcatattgatcaatgcctccatgaagagacatgcaaggataagatgctctcattaaatccttaagaagaccatcagcatgttcctgctatccacaaatataatgacagatcctgactcttgataatggcctagaagctcaagtaacttcaagaatttcttttcttcttcaatcacaatcacttgtgctaccaacagggatgcc

SEQ ID NO: 372884 - DNA, 475 bp, Homo Sapiens
gggctcggtacctgtgggtagcacaagtgcttatgcatttctgaagagacaggaagcccagtatgagtcacatatttggggatgatccccttcacttggatttctgccttcctctttgcagacaccttttttcccctacattactttgaagattcaggagctcatctttgattagctcccctggattaggagctcccttttctgattgcttctgtcagttctctgtgctgtttctagacctgtttccatattcttcctcaggttcttcttttcaaaggcttcatgctctttgatccctgagtagcctgttcccatgctcacccctgatgattcaatgttgagcgttgcttcagaatgtttctttggccatctcttgctgctgcttctcccaaccttcatgctgatcctgctgcctattactgcagaactaggccgatagctttcctacagctttctgtctccattttgttgctac

SEQ ID NO: 372885 - DNA, 427 bp, Homo Sapiens
tactagaggatccccgtcacacatcctctgtatcccattctgccttgagagagcctatatactatcctgctagctcactgagaagcctcaatcaggaggactgtcctggagatgagctatggcacaggtcacttgcacataggtactcggagcagtccgtcttcaaggtccagataacatgagaaatgaagcttctcactatcgttgttggggatgacggactgtagttgatagggttagcggactattcaaactgaatcacctggggatgagagcaatgggtaactagaagcttttgggctcggggggacaggtcagtgcccacgttgtagtcattcccattttgtctcaatttgtttaacagttggctctaagttgaatgcagtcctagtgagaatctgcctcaggaagatgattgtatttcgtg

SEQ ID NO: 372886 - DNA, 458 bp, Homo Sapiens
cctaatagcatttcagtttgaaattgatactaatacgttgtcagagttaccagctactagaatttggagaactgaaaaaaacaaagcaagccttatgagttatatatgtattagcacaaaaataaccaattaaatatcactcaactaagaaaatctgacatttaaaaaataggaataattctctctttgtaattaataattgttatgaagaaaaattataatggttacaccctttcaaccagactcaaaacaccttgaagaggttacgaattctcagtacttttctaggtaatagtaaagattaatggcaattgtaaggaagataatgaattaaaatgttccatgtctagttaaggtcagggcagtaaaaataatggatgccaggatgctaatttctactggaataaatgaaaaatacaaagttctctgaggtgggaggagctatttaaaaatcaata

SEQ ID NO: 372887 - DNA, 308 bp, Homo Sapiens
gacagagaacctgtcgcctttgacaacattttcaactccgagtataaaaagtctccctagatttttcttggctcttccagggtgtatctcttgctccaaggttctgaacctaagcccagttcttattgaatctagggttcagcttatttctaattaatcaattctgctgttggtttgcacaagatagaagctggcattctctctcaagcagcctgttaaagctaaacagggacagataatgcccggaaaatacatggacattcgctgcaaacactgtcttcctacaacaaggtttctccctcagaaaa

SEQ ID NO: 372888 - DNA, 304 bp, Homo Sapiens
  misc_feature (219)..(219): n is a, c, g, or t
catgaggctccctccccatgcacccctcgggctgcagaatgatagacgagctcaactaaaacgctggccatgaccatgcagaggctggaaagctctgagcagcgggtcccctgttccacttcttaccacagctctgggttgcactcgggtgatggggtcaccaaagcaggacctatgggccttccagaaataagacaagtgccaactgttgtgattgantgtgatgacaataaagaaaatgtgcctcatgagtcagactacgaagactcttcttgcctgtatacaagagaagaggaggaagagg

SEQ ID NO: 372889 - DNA, 361 bp, Homo Sapiens
cagtgacaggctggggaatataatgcagtgcggaaaatgatgtgtcattcccagacttgaggaatagtaaagttgttgtccactttgctcctactattcaggaaattaaatctggcaccgtgacccccggacgcagtggcctgactagatgtgaaggtgcaggtgtgccgcctccagcctttgaatggtacaaaggagagaagaagctcttcaatggccaacaaggaattattattcaaaattttagcacaagatccattctcactgttaccaacgtgacacaggagcacttcggcaattatacttgtgtggctgccaacaagctaggcacaaccaatgcgagcctgcctcttaaccctcc

SEQ ID NO: 372890 - DNA, 540 bp, Homo Sapiens
catgaggctcctgcaaggatccaggggggacagatgatgacagagtggactaaggtgatggaagtggagacaaagacgcagagaagggaggcagattcatgaaaaattgagagggagcaaaaaccacactggcgtagcacctactcagctatggaagatggtggtgggaggtcaacctggcagaggcatagcagaggaactgagggagaggctgtgacaaggaggccaaagcaacagatttgggagctgaaaaaaatcaggagaaacactggatgaggcctagtgtctgattttgatggatggcactgccactctccaagccaaggaaagagaaggaaaggagaggtgagaaggaaggagacagtctgtcgcagccatactgtctgaggtgtctgtggaaatgagatacatgagtctgaagtacatggaagaggtctgacctagagatctagaggtaggccatcaacatccagttggtaactgaagcagcctaagtataaagcactcaaggaaaaggtccaggcctggccagtatgggtc

SEQ ID NO: 372891 - DNA, 165 bp, Homo Sapiens
agtacagatttttagtttgagaagatgaaaaagttctggagctggatgatggtgttggtagcacaacattatgaaggcactgaataccactgaactatatagaccagttcaaatgacacatttggtgtgatattttaccaccaataaatgttttgataaaatcgc

SEQ ID NO: 372892 - DNA, 348 bp, Homo Sapiens
aacgtcagccctctggtgggagttatgaaatatagaactgtaagagagcaagttggtgttgtctgaagtcactagatgtatggtgacttgtcatcagcagccataggaagcaaacacagagactcaagggaccaagcctttccattgcagcaagattgatcagttgttctctcccatcacggggctctcattttgctcaagtcctatgtcatcgtccctcttttcctggagagcaggagctgacttcagacgccagatcttcttttcctgccacagcgcacttgcagctcttgggaggtgaaggttctgcctgctgctcttctggaatgataaactgaaatgagccgg

SEQ ID NO: 372893 - DNA, 433 bp, Homo Sapiens
cctgtacacttagataggagctttggaaacagggatgtggccatttcctaaaggtccattcagcctgcagcttgcctgaagtactccctcctgcttcccgcaggcccatctgcccctaggacagagtaacagctgtggaagtgtgctccctccctcactggcagccatggccaaagactcagaatctcggaggatgctcagaggatgatggtgtaagtataagccttaatcagcactgttaatagaactgacagcgtgagtcgtgcaaagaactttgagaggagagtttaaaacagagagctgagaaactcagcttctgaagttggaatggttattggcttttgaacaacttgtgaactattcctttgtcagctttagaatgaatgaaatctttgtccttttgttttttgttaaatacagaaggtccagtatg

SEQ ID NO: 372894 - DNA, 204 bp, Homo Sapiens
atagtggaactgctcgggaggccaagatcacagaagagcttaatttacggtcactgggtaagtctgtggtttcagaaaaagtgagtagaggggctgaggggcatgagaaaaaccatgagacctggaggaccaaagaactggagagatggaaatttgggatgatggaatcagaaggaagaaatggcggagcagttccacttagcc

SEQ ID NO: 372895 - DNA, 720 bp, Homo Sapiens
  misc_feature (415)..(517): n is a, c, g, or t
gctaactgctcggggtcaggggtcagagacccacttgaggaggcagctcaggcaaccctactaccaccatcgagagccccaagagcacaaaaagtgcagacaccactacagttgcaacctccacagccacagctaaacctaacaccacaagcagccagaatggagcagaagatacaacaaactctggggggaaaagcagccacagtgtgaccacagacctcacatccactaaggcagaacatctgacgacccctcaccctacaagtccacttagcccccgacaacccacttcgacgcatcctgtggccaccccaacaagctcgggacatgaccatcttatgaaaatttcaagcagttcaagcactgtggctatccctggctacaccttcacaagcccggggatgaccaccacccnnnnnnnnnnnnnnnnnnnnnnnnnnnnnnnnnnnnnnnnnnnnnnnnnnnnnnnnnnnnnnnnnnnnnnnnnnnnnnnnnnnnnnnnnnnnnnnnnnnnnnnatcggttatctcgcaaagaactcaacagacctccagtcagatgccagccagctctacggccccttcctcccaggagacagtgcaggccacgagcccggcaacggcattgagaacacctaccctgccagagaccatgagctccagccccacagcagcatcaactacccaccgataccccaaaacaccttctcccactgtggctc

SEQ ID NO: 372896 - DNA, 176 bp, Homo Sapiens
gatctagaggaaccccgtccggcagcgaagactgcaaccggcacacgacccaggcagagacgcggggagaggctgaccagaagaaaggccgacgtgcaagaaacccaccctccggcgcacagggcacatgtgtcccgaggcgcacgcacacacagacggagcagttccacttaggc

SEQ ID NO: 372897 - DNA, 246 bp, Homo Sapiens
acagtggtactgctcgacttcactgaaggacctagcaatggtgaaactgagagcggagagattcacggtgcggtgaaagacaatggagctcctccctggaggcgcactggcacctgcagggtgttagcaaggagttggggatcaggcaagatgagcccagagcaatggggcagaggagagaaaattagctcaatttgggtctgaaacgttagtgaggatttcacaggagagcagcttttgattgga

SEQ ID NO: 372898 - DNA, 302 bp, Homo Sapiens
tagagtaccctcccatatagactctagttccatacattacatcataagaaaatatacggctgtaaattgggcttttaaaaatgtcttttataacaatctgaacatacaatatttcattcacagaatgtaatttttttctatgttctgactgaagccttgtgcataaaacgaccggctggaatatttactaaattctacccccctctaaaattataagcagtatttgaattacttatgctgagctttcttcatgatgaatttggcatggggtttgatgagagaacaaatgttggctttactat

SEQ ID NO: 372899 - DNA, 501 bp, Homo Sapiens
atatgagacatctatctctaccctagaagaactgaagcagtctgtttatttacagtcatgtcacagaactttaattaacttgctcaatggaacaatgagttctatacctgggttaacaatactgaaaagtataaacaactctttgtggttaaataagagatgatttgtgtacatttctttatactaacataatcatagtatttatttcacacagctataaggcagtttggcttctaggattaacatatttaacagtgataattacagatgatgggagaagaaacagaaatgaaaataaagtgtagtcttaaaggctacagataataggtaccacattacaaataataggtaccaaccaatattgaattagtgaatgcttactgaatgtcttatgaagataactacttctaatccatcagttagtcttaggatttaatttctatcatgggagtgatgtcataagcaatttctaaaactcagctgagtaactgtctttaattg

SEQ ID NO: 372900 - DNA, 268 bp, Homo Sapiens
ggaatgggacctcgagtcactgtggggtgatagacatcttaaaccagaggaatgactctctagttgtggaatttcagtcatcagccagcagatgcaggagtgtctatgaaccagatagaaatgcattacggaggaaagaacgagaaagaagaaatcaagaaactcaacaggatgatggcacagtgtaattctagttactctctcttcagtgagccctacaagacatacatagggggatgactcccaaccggagcatccacttaggcgt

SEQ ID NO: 372901 - DNA, 600 bp, Homo Sapiens
cccgactagcccgacagtggtgtatcagtgggggcaggcaggaaggggtcagagttcaggaaagattcctgagtctgtggattgacctggcggagacaggcacgcaggactggatgttgaagaggaggtggagcatgtctggaagatgaaagtgggaggaaacagtggtgcaggaattaaatgtgaaccttgtgtggaaaaagtgagacattggagtggagcagccacatggaggtggtgtgatgtgagtggggtcagggaagttgatgggaaaagaaagagatttgtggtgcaggaggggaaagaacatcatgaagttgtggggagcttagtgtctgtacagggtccgatgcagaaaaggggaaggaggaaatcagagttccccaaatggggttttatcagatctcagggaagttggtatcatgcttcttatcaaggccaacccataggattacggtagggaggcaaaatcccaggcttttcagaagtggatccttaggaaaggaaagtagggggaaggtgcctaagtcactcacggtaaatggaggaaatggggcatcactgcacattcagacagcacctgcatggaacgtactggca

SEQ ID NO: 372902 - DNA, 387 bp, Homo Sapiens
ggccttaccctccggtaagagactaagaggaaagttgcccctaagaggagacaggaaagaccagttgctcctccaaagaaaagaagaagaaaaatacataggatggatcattatgctgcggaaactcatcaggacaaaatgacaaatcctctgagggaaatcgacaaaatagtggggtaattaatgtctgtacagggtccgatgcagaaaaggggaaggaggaaatcagagttccccaaatggggttttatcagatctcagggaagttggtatcatgctacttatcaaggccaacccataggattacggtagggaggcaaaatcccaggcttttcagaagtgtgatccttagaaaaggaaagtagggggaaggtgcctaagtcactc

SEQ ID NO: 372903 - DNA, 204 bp, Homo Sapiens
cctaagtggagcgctccgagactgcctcattgccatgaggaaagatttgtcattttcgggaagaaggtgtggagcggctgggaggcagcacacaatagccctcctgtgggtaggatgttggctagccttgggtttacctcagtgaagacccatgtttaggatgcttgaaaacatctcattagcaactttgtctgttttaagctc

SEQ ID NO: 372904 - DNA, 228 bp, Homo Sapiens
  misc_feature (64)..(65): n is a, c, g, or t
ccgtaaagtggaactgcgtccgcgttgaggtgagtccacgtttagtggcatattcaaggaaagnngtgacacggatggcacgctggacatgagatattgaatccacaaatagtaaagatgtgaaggccggctctgatggtcactgattcacacatgagaaggaacgtgattaccagagaggatgcagtaggggaagcgggggacacggggagagtgccacggatcctc

SEQ ID NO: 372905 - DNA, 361 bp, Homo Sapiens
  misc_feature (19)..(19): n is a, c, g, or t
tgctcacctgggctggggntgtgggtgctgctccaggctgtcagatgctcgcctgggggtgtgggtgctgttccaggctgtcagatgctcacctgagggtgtgggtgctgctccaggctatcagatgctcacctgggggtgtgggtgctgctccaggctatcagatgctcacctgggggtgtggatgctgctccaggctgtcagatgctcacctgggggtgcagggtgctgttccaggctgtcagatgctcacctgggggtgtgggtgcagttccaggctgtcagatgctcacctgtgggtgtgaggtgctgctccaggctgtcagatgctcacctgagggtgtggctgctcccacggctg

SEQ ID NO: 372906 - DNA, 398 bp, Homo Sapiens
acaaacatttagacaatttgccaaccttaatagagaagaaagtattctgaaattctttgagatcctgtctccagtctacagatttgataaggaatgcttcaagtgtgctcttggttcaagctggattatttcagtggaactggcaatcggcccagaggccctggggtgacgatctggatgccaggcaggtaggggctgatggcagttggccctacaagctgcggcccggctacaccctgggcctgcccatctggctccgtctggcaggccaggctctccccacgcccagtcttctctggcgccgatatgtacctgacgatctccaccttgggatcggtggcagctgtgatgtggatggctggagagaccctgggcagctggtcaggctccgtctgcac

SEQ ID NO: 372907 - DNA, 320 bp, Homo Sapiens
  misc_feature (290)..(290): n is a, c, g, or t
ctgagatgacagtcggccaggaactgctccgggccacccagctccatcagtatgtggagggctttctgttgcatgggctccttgccagctcatgtcattcggttgctgcttaagcctcatgtccaggcccagcaggacttgcagctgttgctggagctgctggagaagatgggactctgttactgcctcaataaacccaagggcaagcctttgaatgggtccacagcttggtacaagttcccatgctatgtgcagaacgaggtgccccatgcagaagcctggattaatgngaccaacctagctgggcagtcttttgtggg

SEQ ID NO: 372908 - DNA, 305 bp, Homo Sapiens
gcctaagtggaactgctccggcctaagtggaactgctccggcaacatgaaaatgccatcctggacaaacatttagacttcttcgagatggtgcggaatgagcatgacctggagctagccaggaggtttgacatggtccacatcgacaccaagagtgccttcccagatgtatgagttgatccacaagaagctgaagtacacggaggcctacccctgcctgctactctgtgctgcaccactgcctgcagatggtctacaaacggatcggtgtctccttgcagcagtggcagctcctgcaccgcatct

SEQ ID NO: 372909 - DNA, 175 bp, Homo Sapiens
gtgggcatcagaaaaaataatgatacaaagctaggtatctggacactaggagcaaaaggtgcatattgggaggacaccgtgagagaagttagctaatttttaaaataataacagtgactgcatacttactgtcgcagcaccatacggagcaatccactagcgggatcctctaaac

SEQ ID NO: 372910 - DNA, 358 bp, Homo Sapiens
ccgcagtgaagactgcatttcccttctatacactactccactgaagcgggcctaggcaacaatggacaatctaagtattagcccaagatgccacttgcctatcatcttattagaatcaatgtgactaaattatctcagtcataaaatgaagatcaaaaccacctttacctggagtggggggacaggaaactctatgactccaagcttcatgtgccctggacttgcatgggaatgtccagaaaaaaagctgcttcaaaacaaaataaaatgcctttctgttgctaggatctcataaacccacagaattttaaggctagcaaagagcttttcagaaaatcactttcttcccaaggtgcat

SEQ ID NO: 372911 - DNA, 498 bp, Homo Sapiens
cctaagtggatgctccgtgggtcagaccatcccgaggcagaggctggtctcagtgggagcagccgtgcacggtctgcgtgagagctctggtcacccagggccagtccagctcagtaaccaagcaaaccacatgctcttctttcttgaataatattttccacaataacacgccttaaggaaatgccaacgaagcccggcccacaggtcagaaaaataatgaggtcatttaacaatgcagacagcccgagactgaggtagcatttgtggccacattcttggacatgacatgaaaccatcttcttgtatttcagggtctcaagaggccaaagtctccttcatgtgttaattcggagctcagttctgactggctggtggctgctccttccagagttatcagttttggagctgaagcagctcttcagaaagacagtggttttcccaagacagagcaagctgcagctgacttgctaagcaaaggggatgagccgactgatccag

SEQ ID NO: 372912 - DNA, 533 bp, Homo Sapiens
cccagggtgacttctccacaacccatgcactgccagctgtgaaggtgaagctgttcacagagagcacaggcgtcctggcgttggaggacaaggagcttgggcgggttattctccatcccaccccgaacagccccaaacagtcagagtggcacaaaatgacagtctccaaaaactgccccgaccaagatctcaaaatcaaacttgctgtccgaatggatagcctcaaaacatgaagcattctgggtatttatgggccatcggtaagaatgtctggaagagatggaagaaaaggttttttgtattggtgcaggtcagtcagtacacgtttgccatgtgcagttatcgggagaagaaagcggagcctcaggaacttctgcaattggatggctacactgtggattacaccgacccccagccaggtatgaagggtggccgagccttcttcaatgctgtcaaggagggagacaccgtgatatttgccagtgacgatgaacaagaccgcatcctgtgggtccaggccatgtatcgggcca

SEQ ID NO: 372913 - DNA, 632 bp, Homo Sapiens
acgggagagagggataatgagacttgctcccaggtgcactgccctggagcccagcaggacacacgggctctttgactctgtactgtgccagtgatttccaagatgggagtggtgctctgattgcaggaatgtcttcttggaatggcttttctcacttctctagagtccttggtagtggagcacatcatcaactgagctaacgtgagaaccaggggttggagcacatgcaaccggaagttgaaggtaatcggacagctgaacagtcttttccagagggtcggggattgggagctgaccccaggtcccggctccgtttacttcgtgtgcagcacttgtgtaggtgaccagcagtgaagagagtgcgtggaccgtcaccgtgtggtaatgaagctaacggcagccctaacagatgccgacttccgctccccgaacacattccttgtgttgcacgtcagtgggtctgagcgtgactccatggtgtgtgtccctagagcagttcactcagagacttctcttccgtgctctcaagaataaaagcagggcggcgaatcctgataagtctgccatacagggtcctgtcttgcagagggataagccagttcccaggcacagtcctaacaccgggcagtcca

SEQ ID NO: 372914 - DNA, 428 bp, Homo Sapiens
aggtatcccaaggatgtggcttaggtcacggtgaaactcatctggtgagctggcatcagaggttaggaggtgacacaactcagtccaggctgccttctaataaaagctcaattttttccactacaaaaaggacaatcaggcctgttttcagtttactcctcactgggcagtccacaggcaaaaagtccgtgctttttccgtccggcaatggtaccacgtgttttttcagatgttgccacaggtatctcttcacctctttctccctgtactgcaaatcggtccacagctgtgcctgtccttcataaatcataggctgttgcaggacaaagcaaaactgctcgaactgggtgaagaagctgttcaggttgatggtgtcccaggtctgcaggatgctgaaggtgctgtccagcatgagcgcagcggcaatc

SEQ ID NO: 372915 - DNA, 441 bp, Homo Sapiens
tggtcggcagtcacgccgtaccaggtttgcaggtagttgcggtcaccgaagtggctgttgatggcggcatcgacggagccgtagcggccttcatagagattggtacccaggctcaactccaggtgggtaaaagccttgccggtttccttgtgtttatcttcttcaagcgcatgttccagggtggcgccgatgatcacaccgccgaggttgtaggcggcactcacccccaattgcggacgtgacttgatctcgcccatgcctttgaggcgtttggagccggcatgcatagctttcatttttatccttgcgcgaatcgcttgcgccaacgtatgcgctgaagctacagggcagtgccttcgtaaccccagcccaagcccgtatcagtgtcgaggaaacgccccaggggctgatgacgcgggtaagagatcctgctagatcacc

SEQ ID NO: 372916 - DNA, 250 bp, Homo Sapiens
ttgctcaaggtgtgccgcacacaatgcgtcgctagagcactcttaccgcccacgtgcaagccagcaacacgctgttgaaggaaccgcagcgcaccggtgacatcgaagttgtcattgggaaatgcatagattccatggccgatgcgcaccagccagccactctccacgtagcgggcggcaagctggggcgagaccccgaaggtttcgagtacctgcagatcgaacggtgctccccggggaagatccgctt

SEQ ID NO: 372917 - DNA, 305 bp, Homo Sapiens
ctgtctagcaggatcccgtaagtcacccgcgtgggtatggcatatgcataacgcccagttaggaaaggagcttggtgtacttaaggagcagaatggtgaccaggtcaagcatagtgaaagggaatgtaggatgagctgagtaagaggggcaggctgaagccaggtcatgcagggcctgtggccacaggaaagaagttggaagtgatcagcacacacaaggagaaggtgacccttaggagaggagattggagagggcaagaatggatgaagtgagttgaggcttagagtggacgctgggttaactt

SEQ ID NO: 372918 - DNA, 572 bp, Homo Sapiens
cgcgtctcctcataaccaaaagtggcctcagctgcatgtgtctgtatctagggcactcggtaaccaaactccacctacctgggtgattcagagactgagcacattctctgaaaaggtcagaaggatcatcctgaagttccaggtcagtaatgggggtgggtttgcaggctgcaaaggcccaagtgacatcatctctgtcactgtggcacagcagccaagctctgttacttgcacatccccgaggcagtggactctggccctccctggagctccaaggatgggacttctactgggctcagttcaggccaggagggcatttttcagatcccccacccctttttattaagaccccagtgaaatcaccaagtctgcaaaccttccaccttgctctcctcaatcaactgataactctggagtattttttcaagaccaggtacaaatggcaaagtgcaacacaccacacacatctccaactccacttcctccatctggttaagggcttaacagctcaaaaccttgtttattgaaggaggttctgaccatggtgcttggcctcacgcggtgacttcggg

SEQ ID NO: 372919 - DNA, 726 bp, Homo Sapiens
tgatctagcaggatccccttaagtcacccgcgtcaccgtgcgtgagcgaatgggccagatcgtcgattcagccgaaatcaacgttgaaagtttcagtgagattattgaacgcggtaatggcgcctcgctggataatcgtatcgaggtgctcaacagcctcgttgagcaattttccagcgccgaccaacgcctgctggatctgcatgccgactacccgcagcacttgctcaaaccccgcctcgaacgttttcgcctgcaaataagcgagttcagccaacgggccatccacgacctggcctacctgctgcgagggaaaaaagcccagcagcccaagcccggcagctccagggccgagcccgccccaaggcgtgaagtgatcaagacacgtcatcacggcttggtgatgggtgagccccgcgaagcagacagttcgttggtcgacgtcaaggcacacatgaccggcaaggtgctcgccacgtttcatgagaaggcaccgggagtctgggttaaacggcagaaagccccatcgcagccaagcgcaccggtagctgtggatctggacaccagcatcaacacggggcaagcgctattggatggcgaacaagctgaaacccgtaaataccaggctttctccaggaaaccctggcatgcgccgcaggatatccaagacatgttcgatgatcatgcaaaggcgctggaaaaagctcaacgatatgaggaagccga

SEQ ID NO: 372920 - DNA, 659 bp, Homo Sapiens
ggtggtagtctagagatcacgaagttcaccgcgtagtaatgagaagtaaccctggacagagtggcaggcatagctctggcggtcctcttggggatggacattcgtccctctctgctggtcggaatcaaggtttacaaggatggacttgagtcctgctcgaggtctaggggtatccagagcagggtgggttagagagggaggcctaagagtcctgctcgaggtctaggggtatcctgctagggtgggttagacggggaggcctgagaggatgagaggtgggatctgcacacgcactgagaaaggcatagtatagactcagaacagtcctctcccaatctccccttctaccctccaggacctccctctgagattctgccactggtacaagctgtccccaaagcctgggctgagaatggacaagagtctgactcagccacagcccagtcagtacagaacccagagaaaacaaaggaggggctggaggaggagcagagcacatctggtcgcctgctgcaggaagaaagcaagaaggagggcgccgtggccttgcacgtgtaccaagcttactggaaggccgtgggccagggcttggccttagccatcctcttctctctgctttcatgcaagcacgcggtgaattcgggtccgggtcgaatcgt

SEQ ID NO: 372921 - DNA, 165 bp, Homo Sapiens
tggttgccgccggtcggcttagcctgcagggtcgcggtaccgagctgctggccctcgtgccaggcctggtaactggcgacgaacggttccagcgccagcgccggcagggcggcgagggcgagcaatcgcacgcgcgagcggacgtgcagggtatcgacgcggtat

SEQ ID NO: 372922 - DNA, 569 bp, Homo Sapiens
gtacccgaaggtcacccgcgtactcatctataacgagccagatcgtgcactcgtcgtacaccctgccctagggtctgcattagcgatgttcctgttccgcagtggagcaagggtaggacacaccgatgtcgatgcgcagcgcatgctgctgcaggactgctatgccggtggacggtggagaaccgaggagctgctcaaagcttatgcagataccgaggatgtctacttcgacgcagtatgtcgcgtgagcctgccccgttggcgagaccgaagagtcgcactcctgggcgatgccgcgtcatgcgcttcgctattcggcaacgggtctagcctggcgatgctgggcgcggagacgctggccgacgcactggatagaaatcgcggcgcccccactacagccctggcactgtatgaggcccaacatcgttcacgtgtagatccctatatccgccgcatgggaatgacagggcggttcatggtccccagaaccagagctggcatccaactgcgcaacttcgcgctgcagctgtaggacggtaggtgacgcggtgacttagagatcctctaga

SEQ ID NO: 372923 - DNA, 322 bp, Homo Sapiens
ccctggccgaaggctttgaagtgcttgtggtcaccgacgcctccggcactttcaacgaactgacccaacagtccgcctgggcccgcatgtcggccaacggcgcgcaactgatgacctggtttggcctggcctgtgagctgcaccgcgactggcgcaacgacatcgagggcttggggacgttgttctccaatcacattccggactaccgcaacctgttcaccagctacaacgcgttgactgaaggcaagtaagcctgatggaaggcggccgctagccgtaggggggagcgtagacgcctattttcctgacacacgcggtgaat

SEQ ID NO: 372924 - DNA, 548 bp, Homo Sapiens
  misc_feature (478)..(478): n is a, c, g, or t
  misc_feature (494)..(494): n is a, c, g, or t
  misc_feature (500)..(500): n is a, c, g, or t
  misc_feature (526)..(526): n is a, c, g, or t
gcctccatcaatgaggagaagtttgcccgcgtagaagctgagttgcaccagctgcttctagcctcaggccgtgcccatgtgctctggaccacggacatctacgggcgactggctgcggactacttcagcctatgatgaagtagctctgggtgagacacaggccgccctgcagtctctttaggtaggcagggcctttgctgggacccctggtggaggccttcacaaaagcactggttactggtttcctgctgggtctaccttgcttctgggcacacctcaagcctcccctgctttctgcagtgccccacgcggttttccctgcacttgctccataattggctgatcatctgtgggccccggggctggatgtcaggcctccattgccctgctcagtttggctgcatttggctgccgtctggggtcctggtcctttgtgcaaatgctttgggattccagttgtgagctgagagagatgatngcctctctgggctttncctgtnccctttactgagagctcagtgttctnggggttgaagttgggacagagg

SEQ ID NO: 372925 - DNA, 238 bp, Homo Sapiens
tccttagtcaccgcgtcacaaaaccgcactatattggtgcgatagcctgcacccattctcaattgcccagtcccattttggatacgaaacttcccgttgaggctggcagaacgccacagtttcgcgcctgaaacccttatttcagggcattagcgcttcttttcggagccctggtttggtttttgcattttccttgtatcagcgtgtgcctcaagcccgcgccacgcgattaaactat

SEQ ID NO: 372926 - DNA, 116 bp, Homo Sapiens
cggttagtaaacaacttaggttttcaaacagcgcccgcgatagaaggggttatttcatttgaaaacgaatacttggatgctacaaacatacatgtcttctagacgcggtgactagg

SEQ ID NO: 372927 - DNA, 269 bp, Homo Sapiens
tacccccccgtacgcccaataatcctagtttaatctccaagtataaataaacgcaatgaaaccttaacatgacatattcagtctaatgcaaagaacaatatcgcagttggaactgtgaagtactactacacagtcacacgtgaaatgtcaccaattcaaaaataagtacctgataaaatgagacttgtggcaatcaactgtaatgtttaaaggatccaccaaaaactcattcgtgtctcacacacacacccaatgcctgttcatttggg

SEQ ID NO: 372928 - DNA, 150 bp, Homo Sapiens
gcatgcttttctatgtgacaattttgtgagcatccccagattttaaattgtaacatagataggacaggctttacattatgcacagttctggccagccaaccatatgccctctcagagctgtacatcagagtgtcccttctatagtctggt

SEQ ID NO: 372929 - DNA, 510 bp, Homo Sapiens
  misc_feature (19)..(19): n is a, c, g, or t
  misc_feature (181)..(181): n is a, c, g, or t
  misc_feature (189)..(189): n is a, c, g, or t
aaaattaacgggagggtantttctagcccaaattgactagaggatctgttaagccaactgaggaacttaaaagaggtagcagaggaaaagaatacttttcattgtgcaaccccagtggagatgtccaatgttggcttggtgtgaggagaaggtcatgactagaggcttagatctggatccncttttacnagtaaaggtattcatgtgtagctaagaggagtggttaaacagcacactagaacaggatcactgttttaacagaacacatggaagaacagccaccagccgataagactgaaatggggtcttcgaatatataagaaaagaataagaagaatgattcgaagagtattttcggggggcagtaacaacttaaaaaccattattactttttcttcagggggacggtcccccgagaacagccctacggatttgaaggaaacctgaattatagtatcttctgtaggcattcactccaggcatcctttgcaacttttgacaaattactta

SEQ ID NO: 372930 - DNA, 369 bp, Homo Sapiens
ctttccccgtacgccaaaaccaggttcattcagtaccacacacagcaagttaatcactgagatgatgggtttgtgagagtttattcataacgtggccaagcaaggaggcaggagaacaggtctcaaatccacctccttgaaaacagggattgggggtacttaggcagtagaaagcagggtggtctaaagtgtgggaagaggtgattggtgggtaggaaagatgaggtaattggggcttccacgcaagcataatctagctttgtggttcctcataggacacatgcagaaaatggtggcgtcagcaccatctgagggaggagtgttttggccctctgatgtcaaaagatcacctcttggcgcgtacgggga

SEQ ID NO: 372931 - DNA, 163 bp, Homo Sapiens
ccccgtacgcccaacaacagatagaaagggactatagagttacaagtcaaagtgtatagatacatggcagccattaagtggggccagtaatgcaatcatctaccaaactgagtacatgttaaagctgccgttttgagtaggcccagaattggcgtcggggata

SEQ ID NO: 372932 - DNA, 413 bp, Homo Sapiens
cgcgtggtacacaccaggctcaaagaggcagatgcatcacttacgttgcttagctcagatcactcacatattacttgctatagaaataaactgcaggggaggcagatgtcatgtcaggtcatgcaaagttttatgaataaaatggcatttgagcaaggagtgaagaaatggagaagcaaagagaatgtcaggagcacggaaaaaggcaggagaacagcagacaggtgtggcaaagccggaagaaaccattttgataggagtgaaggagttcctgttgggaagagtggaaacgagactggggaagcaggatgaggcgtgtttttgaaggtcatatggttcaaggatccctcagttaggtatgggaatgctacaaaaggggcaaaaacggagtctcaggtttgggcgtacggggg

SEQ ID NO: 372933 - DNA, 313 bp, Homo Sapiens
ggccaagaataagttgtcagtatggagtcacgtgacagaaatgcctctggaataatcaggaagaccttacaaatgtagctatttagaaatccaatttttttaggggagaggggtaccccagaacttaaaactatgttatgtttttagcagatgcctctctgggggttttctttaagatattaaaatgtctcttgagcatttttgttcattcttacttccaaattttgctacttctctagatctgtactgtaagttaccatatgattgtataaaaatgaacatttcagtcagttatgcagttgggcgtacgggg

SEQ ID NO: 372934 - DNA, 234 bp, Homo Sapiens
  misc_feature (202)..(202): n is a, c, g, or t
tccccgtacgcccaattctgccgctagagaccctactgttgtattctgatttcaccaacatgaaactgcatttgggggaaaaaatcacccattccctttatattaggaaagtaagaagcaaacagacttcgttttggaatgtggcctttgttttgggagttggtataaaagacaagttcctcactggacgttttgctttgtntttatggggtttttatacctgccataaccttc

SEQ ID NO: 372935 - DNA, 363 bp, Homo Sapiens
tcagggctatagtaggatacctttgcactggtctctgactccccccaagataatattcgtcatcccttctctgtggccctacagcactctgaaaatatacctagcccagcagtttatcacataaataatagacagacagatagtatctatctccttgtctgttgtcccactagactgggaattccttaaggaaaggcactgtctcttcaactctgaaaccgaagtaccacacagaatacccagcacttcattgaatgcttactgaatgtttgctggatgaataagttactactatcacggacatcattatactttagcaacaaaataccatcaggctagcaagctaattataaggcatactgc

SEQ ID NO: 372936 - DNA, 292 bp, Homo Sapiens
tccccgtacgcccaagccagggacatgaacatcatctccaccgcctctctctttctctccttcctgccatagtccatccattgccaatttgtcctccttaacttctctcaaactagcctctgcatatcctcttttaacttgattcttgtgtcacacccaagacagctgaaagagcctcttaaatgcctttctctcaactgttctcgacaatcctgtcaacaagtgtgaccatttccttctcctgctcaggatctctccatttcctatacgatcaaagccaagtcccttggcg

SEQ ID NO: 372937 - DNA, 225 bp, Homo Sapiens
cccgtaacgccaagacacacgctcactgaagccacatacaaacatctacggcaaccctaactgggacctcgcctatactagtaaatggaatggagctgctgcttctcaagtttacaacgtagcttcgagtgcagttgggaagacgacacatacccaagacacaatataaggatccagcagagcaacttcaatcattcattcatccaaaacatttgggcgtacggg

SEQ ID NO: 372938 - DNA, 423 bp, Homo Sapiens
tccccgtacgcccaacaggcacaccaccaaaagggcagtgtgtggttttaaacctcaattccagtaaaaaagcttgtactatgtacacattgacataaagatccagtttaatatgcatttttcagtgcagactgagaagccctctcttgaacaggagtaacagtgagaaatgcccagtggtcgtcggcttccccaaagggcatcagaagaaatacaggactgtttccctctctccctaaaaaacatgcaagaggaaacaggccaaaatggctaaccaatcagaaatatgcttcagttttgttgcctccacccccaaatattaaggaacagacaatttctgatctatgtcacagcagaactatttgcatattggatctatgaaaatctttctgcttttggcgtacggggaaggatcctctaggc

SEQ ID NO: 372939 - DNA, 338 bp, Homo Sapiens
tccccgtacgcccaagtcttgaatgactacctgtctactgttatctgcccaaatgtgtaatctttgcactgaatcactagttgagagatccagacccatagacacagctgccagctgcgtattttctccagacatctcattgcagctgtctgaaatgttccaagtccaacactgaactcaacatctcctctatccgcagcaccaaccccaacctgcttctcctttgctcatgtagtttaataaatgacaccaccctgttttcaagttcaaaacttgctagtcatcccagaagagacgtaggtgaagcaggttggcgtacgggataagatcctctatga

SEQ ID NO: 372940 - DNA, 423 bp, Homo Sapiens
ttcccgtactcccaacgtacgtaaagaaaagtagatcaatggtaatgtatactaaactctctgtatgaaaaacatttcagggaaagacagggtaacatgagttctgatgtgggatctggggaaaggggaggagggctggaagaaaatcaggcaaagtgaaatggaatgccacacctgagctgagctgtcaaggcccgtacttattcactcaaccatggtaagctaataacgtttcaggactatgtcccagatgttttactttgactgtctcatcgattggttcataccaacacttaactggcacatactattagtatccataattctcaggagggatggaggagctaaatacacagtccacaaagtacacagctatgaagagtactgcactgatttggcgtacggggaagatcctctagagca

SEQ ID NO: 372941 - DNA, 387 bp, Homo Sapiens
tccccgtacgccaacagcaccgttggtaaaagaactccaactgtaccccagccaaccctacgaactcatccactcacattctcagcttcctgtgagagtgatggctccagcaaccaggcccagtcctggccaaagaaccaagctagagaaacgaggaagatgtcacgcaaaactactgaggggctcctggggaagattttccttcctaattaaaggaagaggggcaccgaggggagtctctttggtcccaaccctgattctttccaggattaatgtttactctaagagggtgaggtctttatttgctttactcagagatgtatcacaatggcataacagatgctcattgaaaaaaatggaatgacaatgttttagggcgtacgggga

SEQ ID NO: 372942 - DNA, 464 bp, Homo Sapiens
tccccgtacgcccaatagcaatgacttagcacatctgtgggagagggaaggtgatggagggttaaagacacaggacgctaggacaacaaatgaaagaaatggaagacacaagcgtgctgtgtggagtgttaacatttagccttctccattatcattcaagaggaagacaatactggaaggtcttccaatgacaattatatgcatcagcctagaagtgacacttcatttatgctcaaatatactggccagaactagtcacatggactcatctacctacaaagggagcagagaagtgtaagcctcccatgtgcccacacggagaaagaagggtatgcgctagatgtcgctaacatctctcttccttattcccaaacagtcccacaatctattagctttactatctagaaagcctccaaacagcctctactcccactcaccatttggcgtacggggataaagccctg

SEQ ID NO: 372943 - DNA, 270 bp, Homo Sapiens
tcagcgcaggaaaaggcatatcggcgtctccagtgatctgctgaaactcctcataggataatagagcatcctacatggttaacattacaatccaggctcctaaagagatatgcacattattctttaaaaaggaagctcctcattctcaacatagcctactttcgcaaaatgtgaatgagtgtacagataattattctattgctccctttcagttttcattttgccgggaaatttcatcataagagggatgcaccgaagttcgtaggatct

SEQ ID NO: 372944 - DNA, 362 bp, Homo Sapiens
cgatctagaggatccctcgtctttgataggaccaactcagaggtacaatcatgaaaggaaaataagtaggtctgattgactgagcatatgctgtaacgcaaagaccatacagggtaaatgtgcatcatctaattttacaacaaacctgccagcaagagaatattgttcacattctatagagagggacaacatgaaggctcagagaagtcaggtcaacatgattaggctcagtcaaaacataatttgagtttccattcatcagttcttaagtgaagttataatatctataaatatctcaatagcatcttgtgaacaactttatcacaataaatgtttgaacatccccccctatcaaaagacga

SEQ ID NO: 372945 - DNA, 214 bp, Homo Sapiens
atcccatcgccttttgataggacagtgaattgaggtaagcctggatcatatctagttcgctgaaatataagatgacccagaaataggctataggctattattcttgaatttgatacatttgttgaagatttgttcatattccccacatacacatgtagaataatttgattaattgctcataaaaatacatcttgtttcccctatcaaaagacga

SEQ ID NO: 372946 - DNA, 363 bp, Homo Sapiens
cggtaccctcgtcttttgataggatatcacattatgcaaagctattctgtgctgtattcatatgcacagttcaacagttcaatatcttcctcaaagcaaggaagggttattagcatcagaaaccagtagaatatgagaaatttcatataaaaggcataatttttttcccagtagcatttatgtgaaataatataattctatcactatttgaagctgtcctggattgtagtataaaattgtgcccaataataaaataaaaacaattaggaacacatcgtagcctagtgagttacagttattaaaactttaacccattatcattgaagatgaactcccctatcaaaagacgaggggaggctctag

SEQ ID NO: 372947 - DNA, 355 bp, Homo Sapiens
ctagagcatcccctcgtcttttgatagggtaaagaagattctactttattcttagtattgcaaatgtaagtactaattaatatttaatttcctaagtatttactttgtagaataaaactctatccaactagtgatatttactcagaggctaatgccattttggtgtgtagggcctcatgccattaaaacattcctgcgtcacttagcacttattcggagagagacagcagcccaacttaacgctgtgctcatttaaagccctgcaattatttttatgtgctgattttttaaatcaaaaattatgaattttggtagtcttacagatacatttacctgtggacctatcaaaagacga

SEQ ID NO: 372948 - DNA, 312 bp, Homo Sapiens
atcccttcgtcttttgataggcaaataatgggaaggcaatccacatgtaagggaaaacgggatttgtgtcagtaagaagtgatagcctggaaagctgctgatatttaactaaattaaaatacgataagggccatccacttttggaagggtagtaaaaatcaaggttgataagttcacacaaaatttaataagcaatagttgtgttttgttttggggggcaaggggtcagaggtgtgatcataactaaaataagactttaatcctggaaagctgggagagggacaatgctgttaagaacctatcaaaagacga

SEQ ID NO: 372949 - DNA, 722 bp, Homo Sapiens
aaatgttggctatccctgctgttgtctatatatcaattttgtctacccaacacagctgtaaacttctcaaggtgaggagtgagccatcactctttgcacctcttgctgtgattgacatggtataccttaagatatatgttaattcctatgtcttaataaatattggcttatggagaatttgttggagcaagtacagaccctatgtttaacttcttttattcaacagaattaaaaaactagctagttctctcaataaaataatactttcttttctttcttaaaatctagctgatctggtctaaaatacacatgtgggaggcgggattgtagaaatatctcaaattaattagcgtctagctctttgtaaggtaattgacagtctgagttagttgcttcccccactgcaaagcagcaaaatctgctctcaaaggcttcacgtagccgggaaaactccgttcccaattcagatcctctggggagggcatcaattatttcctattgtttttagcaccgattgttctgtctaatttgaaaggatccaaaaaaggaaatgatacttgggcattagtatcattctccatcactcttgaaagatatatgaagggaatgttgggcgcaatcagtctaggaaacatatttctcccataacaataaggccagttctttttggctttggaatcagaaatagctccatcaggccctggagggaagggggaacaaaa

SEQ ID NO: 372950 - DNA, 520 bp, Homo Sapiens
  misc_feature (113)..(113): n is a, c, g, or t
catttggaatattgagtcatttcatagagaaaaaccatgaaaccatgctctcagaagaaatattcagtgaattctggatctttcactgcaggctgtattttaaagccccccanggatgcaaaactaactcaaattggctcagcaacaaaaacaatgggaaagggaattgtcctaaataagccatcccatgccattatactcttggtagagataaacttggataaactcagagtaactaaactgacttcccaaaagaatgaaccgacctgccatatttatagtgcgagcataaaaatcactttctaaaaactttctcccttacttcttcttaataagaaggaattatttattcattagagacaaaaccatactaaaactaaacagatttaaaatacaaatttttggtagcaaacagcaggaaaatctaaatcaaaatatagtgtagtttttacataattttatatatttataaatttatcaaaatagtcttttaaagttcacaatacatatataatgtaac

SEQ ID NO: 372951 - DNA, 518 bp, Homo Sapiens
actattatggccaagggtcatgatggcaggagtaatcagaggtgttcttggagctgatgaaggtgtctaaaataggtagaaatgcaaatttttacataaaaagcaaaaccacccacatggacgtttctgggcagcctggctcctttcccagcctgaagtgctgtctggggagatgagcgagtgctcctggaggttgggtcttcccgtctggatccagggagagcctggcgaggacaggggcactggatagcgttctcaatccaatgggaagggcccaggcacgtaagcgttgtgcaggaagaaacggcagcagctcggcctcgtctgcgggttctgatggttaaggcttctgttacgtagatgtggcagtgttccctgcctggtcaaacttggttctcataaagactttgcctcttcttggatttcaattcctttagccactgcggagagggttcatccgacctctcatcattgtccatgctggaaggcagcacgcgactgcccagcaccccaggctg

SEQ ID NO: 372952 - DNA, 705 bp, Homo Sapiens
  misc_feature (673)..(673): n is a, c, g, or t
  misc_feature (682)..(682): n is a, c, g, or t
  misc_feature (691)..(691): n is a, c, g, or t
tggtggtgatgttctgtgcactctatttcctttcaatgttgctgaaatgtgtatatctttagaatgtaaatgcaacacttaagaaaattcaaacactttggaaaagggactaaacagtgatttctctgtgttcttgaaatggttttgtgaaaatgctttgataacttcccactcaaagaagagatttacagagctttcgaaattgactttgtgtgtagcaagggacggggcactatcaggatacctcttggtgctttcctaaaatggatcccggggctttccaaggagcctggaatttcagctcacagatctgtttttcttgcttcagtgtgcattttaagtcaatagagctgagtatctagcattgaggtgagggaaatgctgcctatactcccagatgtgtttagaatatctcagaaacaacactgtgtttagctcggctttctctgctaagtatgcctttcaagtgtacaccacggagacaggaccgcgttgcaaggcgggacagcaggttcagaccacagttctcagtctgactttactcttgctaggtctgtcctacttagctgttgcctgctaccgcccatgggttcttccattcggacttgcatgttgtccttttcttagttttgcaaagactaaaaatggcatttcccaaacctaactgctaatnttgaggggnctcaagcantcatttcccagatc

SEQ ID NO: 372953 - DNA, 539 bp, Homo Sapiens
gagcttacccacgtacgccttcatggaagcatgtgaaaaaaacggatcctaaggtataaacaaagtgcagatgattgtcggccatgctgcagggatttcttgtttgtcttctcagtagtgttagctaattttgtcttccaattccgaaattccttataggacttggacgctttgaacctctcaggaccccgtcagattctagtacataaactcggagccaaattcacagccagctctccttcaaactgccttatctgtttttgagttaattagaagggccttttaacaactttgcatttgagtcctaagaaaagtctagttcattaggcaataaagccactgtgctggcccctaatcaaggtcagtacatatcattatacgactgatccaaatttgagtaggttcagttatttcatttgttcattgtccacaatgttccagtcacagtaccaggtgctcagagtgtggtgtcagagacaagattcaaagtaagtcaatttagaccaatgtcatatgcgccattatagaagtacgggtga

SEQ ID NO: 372954 - DNA, 502 bp, Homo Sapiens
tgatctagaggatcccgtcgtcttcttgcaaggggggtttcctattatgcacaatctacaacgaagtagcattaatcttccggaagtaagtatgctaacacagagttaggactgtccagatcgtcagagtttcttggtgacgcttttacagtagccattctcaactcgggagattttcaaacatctgagtgtcttgcatttcgcgaacctgcagtactctgcttttgaaaagcaggaggcctactcctgctgctgtttatgtgactgcttcttagcacgctgctgttcctgctcccgcggctgctcgcctatgattgccttcttcacaatgcacaggctgatagcagcatcctggattcactgttacccctgtaacgttttgggcatatctgatttgctacttctccctcctcccctgaccctgaaaaatgactgagtctagactcgaattcactgtggattcctaggactacagaaacatcctccacctatcaaaagacga

SEQ ID NO: 372955 - DNA, 375 bp, Homo Sapiens
  misc_feature (50)..(50): n is a, c, g, or t
agttaccactgtatgctataaagagaaaaagtaaaaagaggcaaaatacnctttagtattaccgtgaaaagtaatactaaactttgtgggccccctatgaagatctcaggaactctcacaaatctctggacatttgtaaaatgctaccaaatattcacatgctttatacatatggagtgctcaaaaattactaaggaatttaaaaagatacatttactcacttcaaataaaagaatatgctgtaatatatgacacatgttttttaaaagaatgctgagttaattgacactcccaaactttaagctctcagtcatctcctactcatttttccctcctgaaatctcaggaaaaagtataaattcgaaggcgttacgt

SEQ ID NO: 372956 - DNA, 337 bp, Homo Sapiens
actctaaggatccctcagagctagataatcgtgtatagggattagctaataggcaaatgattggtttcttcagatgatgtcgtcttaggtggatagtcgtgaagagtaagggcttagctcttgcgaggatatcttgcaagacatgctgtagagagcgaggaacaagtcgcgaatctaggccgatacgtggctttaacctggtgcaaagggtggaagagggctcacttcccgagggaagcatggaagcgggtggttgggagtgaaattcaagagtccactacacccacagcagagtgagctgcgtgcgcagaatgcctgcaggctagacgcctctgca

SEQ ID NO: 372957 - DNA, 462 bp, Homo Sapiens
  misc_feature (45)..(45): n is a, c, g, or t
aatttcgagctccggtacacctgcagaggccgtttagtcttctcntcaggcaactggtagccactgcctttaagctcgggaagctggcaaatagcaccagtcttagattgggtttagggtctacttgggttatcatcagccacagtggtaactcacgtttgttctctcacgagcacacagccacctgctgtgatctttattgtgcactgcatcacttctgatgtaatccatgtttcacaaggggttttagctgcaatagtaactatctctaagacaggtgcaatgacagaggtgggaaggaagtatacctcctacctatcatgggaatttctaactctgatggaggaggtgtagctctgccctctatggagtcctcagaacttgggagagagacaagcagttaccaagggtaactctacatcacaaaacgtaaatggtacagatggccctaacgcctctgag

SEQ ID NO: 372958 - DNA, 228 bp, Homo Sapiens
ctgtcataaagtgacttaatggaagaagtttggtccctttcttgcctttctgccttctaccatatgaggacacaaaggtgtcctccccttctggaggatgcagggttcaaggttgtcaccttgggaagcaagaagactagggccctcaacaagaacacttgaactgcccagttcctttgattttgggatttccaaaaagtgtgaagaaaatacatttcgtgttcttta

SEQ ID NO: 372959 - DNA, 248 bp, Homo Sapiens
acttaggatggagtcaatgacatatcaccaggaactaggaacacccaatcctactctagaccagctcatccatctccagtgtccctctcatgtcctctcaaatgacaagaactacaaaggcatgggcttcagactctaaacccaatgtagacctccaaggagctaggctacacacacaaggactcctagaacctactcaaagctcttagaccattccatgcaaaacacaggactattttgcctctgaa

SEQ ID NO: 372960 - DNA, 426 bp, Homo Sapiens
gatctctagaggtatccccaaagagtaaacggacgagtgaggaaatggatactgactatatcagagaggacttcctttctggtaccttgggcttgggcttccccttcccgtttgctggtgacactgattttaaaaacacaggcacaggggtgagtgctgtgggtgtattcgactggctggaatacccactggatggagaaatgactctgtgtgacttctctggtgacatgatctttggtttgactgaaccaccgggcacttggggcattgtggctctggacccttcttggacatggcggactggcccgttcccagtgggcaccccactgctggttgaacagccccctgccgggttccccggatcttcctgcatgcccgtgtagtctatgtaataaccccaggggtccgttcactctttgggtaccg

SEQ ID NO: 372961 - DNA, 420 bp, Homo Sapiens
  misc_feature (293)..(356): n is a, c, g, or t
ggacaagggagacgggggagagatggacagacagttacccagagacagggacacgcgtgagccagcgagggcacaccagatgggcacagagggaaatccagagagacagggacgcaaggacacagacacaggcccagggagggtcagagacagagaaggaagccaggggaaggccgaaaggaaaaagcgagggtgagaagagcggagaagggaaggaggagagggagcaaaaaaagacaggtgcaagaaggaaggagaaacagagagccaaagggcagagaggccacaggacnnnnnnnnnnnnnnnnnnnnnnnnnnnnnnnnnnnnnnnnnnnnnnnnnnnnnnnnnnnnnnnnacagagagagggagagttgtgcgaaaaacaaaacagaaatgggctccggtactcgtggggataa

SEQ ID NO: 372962 - DNA, 419 bp, Homo Sapiens
acgtgtactgtatcctcagagcttagacaattctacaaaggcttctgaagctaagactttcactctttatcctgggactcattatttaccttatagttcactgtgtctgtgctaaaaactatagtatgctgttcgcatagaatattaaatactgtactaaaactatagatgagaatactgaatgccgtttgtcatgcaagccttcgaaccccaacccagcctatgtgagcatgctcagatggctgcaaagtggttccactcacactttggggtatagcacctacccccacgacatcccctgtcagcaggaagaagttaaagtgggtcgtcatcctttttccatccttatagcccacaccttaagaataaggtgttatgaaacccaaagggagagattgaaactacctttacaaaaatta

SEQ ID NO: 372963 - DNA, 428 bp, Homo Sapiens
  misc_feature (55)..(171): n is a, c, g, or t
  misc_feature (177)..(207): n is a, c, g, or t
tgaaaccccatctctactaaaaatacaaatttagccaggtgtggtggcatgcacnnnnnnnnnnnnnnnnnnnnnnnnnnnnnnnnnnnnnnnnnnnnnnnnnnnnnnnnnnnnnnnnnnnnnnnnnnnnnnnnnnnnnnnnnnnnnnnnnnnnnnnnnnnnnnnnnnnnntgtctnnnnnnnnnnnnnnnnnnnnnnnnnnnnnnnttgtactagtggagaggaagaaaggcaagaacacttcaaaatgacagctaatttaaaaatcactttggactaggtttttatgctcatttgagacatgactgtatttgatgaattgggaagtaataacactgcaaatgatcacattatcagcgtttctctgaaagaaaccatcccacattcatatcctaacatctgctacagtaaaaaaccggtgccggctc

SEQ ID NO: 372964 - DNA, 487 bp, Homo Sapiens
gatacgaatcgagctcggaccggtttttactgtacatgtaggtttcattgcactgattcagggtgtccttgattaacacaaaccgtgcttggttctaatatgccaaaaacctgttctccttgctctctccccccacctttttggaatgaaacaaggaaaaggctctctgaccgttcctcacggcaggttaatgggcacctgtgttctgatttattgcgctcgctgccttccctggccccgtgttaggtagggaaatcggcacggaaggtggcacggcaggagtgacctttcgctaatcaccacacctcagttactactggcgcagctcattagaagaaggaatccttcaacgagctggctttcaaatacagtcacactttgattttctccagaacaaagattccactttcacataaaagcttctgatgcatgattctgtcaactggggcactacagtaaaagaccggtagccgagctcgattcgtat

SEQ ID NO: 372965 - DNA, 480 bp, Homo Sapiens
gtggatgatgcacgctgctctttgtatattatgagtctctatgtgtctcttctgacgctagccctgggcatgccatgtggattcttttgtcgtgtttactgccatttgagtgactgttaaatcaccttctcaggtctgaagttaaaaacaggtagcatgtcacaggcgtgtctggtgaacagaaatcactcatccactgtggctctgttaaacgggggtagaagcttctccttccctctcctgtcctatggctctcagtactggagcataaccatctcagcacacctgcacctgcaatcacgttcttgctgtcacagccccaaaactgtggagactacacttgtcacaatgtggtaagtcatctgtagttcccatgcttcctcagagcaccccccactttcctcttggaggtggaagctgtgagtaaatgtaagaaaaaaatcatcagtggaagaatgtaccttaactacagtaaaaaga

SEQ ID NO: 372966 - DNA, 411 bp, Homo Sapiens
tacggtacggagtgactactatacagactacgtggctaccaggtggtaccgctcccctgagctgctggtgggggacacgcagtacggccccccgggtggatgtttgggcaattggctgtgtctttgctgagctgctgtcaggagtgcctctgtggccaggaaaatcggatgtggatcagctgtatctgattaggaagaccttgggggatctcattcctaggcaccagcaagtgtttagcacgaatcagtacttcagtggagtgaaaattccagaccctgaagatatggaaccacttgaattaaaattcccaaacatctcttatcctgccctggggctcctaaagggctgtctccacatggaccctactgaaaggctgacatgtgaacagctgttgcatcacccatattttg

SEQ ID NO: 372967 - DNA, 343 bp, Homo Sapiens
ctatgaatgactggaccctgtattgtctaattatccttaataccaaagacaggcatctgtgagaatctgagaggtactaagaaaggctctgtgctctaaaaccatttcctccactggctttatcagagagaaaccccacatttcacatcattgttaaagagcctctacagaaattcagttaccagctgagaaaaataatgaagcctccccaacaggcctctgggaccccttgagttgccaccaggaactggggtacaacagaagaggaggttactttctcaaatgcaagagcttggcaggcctaatcggttgtagatttaagaaccaaatggccaacccaatc

SEQ ID NO: 372968 - DNA, 584 bp, Homo Sapiens
  misc_feature (24)..(24): n is a, c, g, or t
  misc_feature (119)..(158): n is a, c, g, or t
ttcatttaccagtaataaggaatnaacgaaaattactcaaatttggctttggaacatgtaaaagtacccacttaattctgatgtacatttgggttaagattcactctgttggtctctcnnnnnnnnnnnnnnnnnnnnnnnnnnnnnnnnnnnnnnnnatgaaactcccaaatgttcagcatattgcctggttctcaatgaatacaaaggaaggcactgttctgagatggtatgaggactggaccaaggaaaggaatctggcaacttcataacctttggagtgtgggcactggagaggcttctagcgaacaaacctgcagagaaatgcagcatacaattctcatggcttctgtcttggctcatgaatgaaactgataatctcaatctaaaattcccaaaggcacaccttttaactctgcctacagtaattgcctcatgtacatattaacagctctcaaaaacgtgggcctcattgacctaattgaaacaatctgtcttgatatgtggatgtaatggttgttaatataagagctacactctggaagaacagaccttaaaaagatcattttctgagccgggcgcgg

SEQ ID NO: 372969 - DNA, 468 bp, Homo Sapiens
tcggataagcactccagaatttgggatgagttatccttgttgtttgtctagctctatcttggaccccagtgctgctaattagattcatgccttgttctttacgggcataagttcctctcttggctatttttcctagtatgctgagaactaggattccctttcagtgacagagtcctgtcctggaaccccaatcaagagcctaaagtttaactactctctgagatattagcctgatgccagcagcctgcctggatctctaaatattacccattctgggagttgttagtggtctctgctttcctgcagtgtcactcctgcttcctcattgggcctgctagccacagctacttggatgtacccgaacctgttgccttgccctacctactgtgggctggttcagttctgcattcccattccagtgtccactgccttcttgctatccctccgcatctgtagcagccaccacca

SEQ ID NO: 372970 - DNA, 377 bp, Homo Sapiens
gaagaggctagtggagatgagcggtcactatactgggaaagtaaaacatgaggcatgaggttagcaagagagatgcctaccaagagcttaagaatagggaagacattgccttaatagggcagaaattatacccatgtggaattaatggccttaatataacagataaaattccaatattgttactgatgcagggtcttgaccacaagtccagaaacaaacaaagccatgaaagaataaagcaatgaaagcacagatttattgaaacagttttacggaaagtacactccacagagtggtggcagcctagagcagacagctgaagagcactggttacagagttttctggagttaaaacaccctctagaggtttctcattg

SEQ ID NO: 372971 - DNA, 527 bp, Homo Sapiens
gatacagaggctacctattaaaactctcccatatacctaacacatacacatgcacacacatacaaaatatatacatatcacacacttagagaatgacagatttcaggcaatggccaatagtcagtattgagtttttctaaccccagaatctggttgggctttatgatctaaaaaaatgtggtttagaaaagaggataattggtagagctgtagtttgaaaatatcaggtcaaagttgcaaacatacttatgatggaatcatttcatttttagttcctttcccagaaaagctgagagagcacactgttccagctgacttttttttccattaatagccgttctattcaacaaagagctgcccacatgccaggaaagtgctacagtccttctaagcttttaaaaatggggatcaagctacatgcagccagttggaatacttaagatctttatgccaagacacaataacctgacctgcagctgttgtatgcctccatagtatatctagcctctgatcacgggaggcggctc

SEQ ID NO: 372972 - DNA, 604 bp, Homo Sapiens
aatacagtcgagctcgctaccgtaatacagaggctacaggctcagggtatccaagtatttgatcctggggagtctgattcagatgacaactgtacagatgtcactggtaagtgtatatcctatttatattttgagctttcaacatggctgtaatgacatgtagagccaactttgaattctgctagatttcttttacttatctatattaggttattgctttaactactgttgcaaatagtgtcgtgtgttctctctgtcagctgctaagacacctcttctccacgaagtgtatgaatttggggactgaagttccttctaccttgtcactctgccaaccctaacccataacttttactctctagtctaagatatctaccccagctcccaccagcacatctgcattttagccaagggaaagaaggaaggggagaacacgttcctttcccagaaggtacaacctaagatcacttctcaaatcccattagtcagaactataactgggaagactggatagtgtaatcagcagccaggcagatcatgtgtccaactaaaatgtagtgttctgttactgaagaagagtacagcatggtattggagtactagc

SEQ ID NO: 372973 - DNA, 694 bp, Homo Sapiens
gggtatctatgcagtatgacgtaaagtgaaccaggttgtacacaatgggtgtgacaagggaagctcagattcttaatacagttcaacagtgtatgctgatatgaggtgcaagaaacaaacagaggggtcaaggcaagttttctggcctaatggctggtacgctggaggtgctatttactgagatggagatgaccgaggagtgttgggcccaggggttgaaggtggaggatcaagatttcccttatggatgtgtgatagttgagttgtctattagtcttccaattggtgataattcgtagataattagatatgagtctaaattttagaggagaggtaggagctggaaatatgtgttcatggaccatgcacatatacatagaatttaatgccattgggcttcatgagatcacagaagcatgagtgcacctagaaaaacggttgagaactgagacctgggatactcccttgttaaaaggtaaatgttccttctacattttgaatttatagaaataatgacacagtagccagttgctgaaacactacccagttcagagtaacaaaattcctattttatcaaatcactgaatgccatttaaaattcagaatacttgcagtgatcccaaatatcgtcataaagatgaaagcctaagttcacattggtgacctagcctctgtatcaccggtggcgagctcg

SEQ ID NO: 372974 - DNA, 503 bp, Homo Sapiens
atcgagctcgccaccgtgatacagaggctactgtgctatgtgctgagtagtcttctgggtcttgctaagtagtggcaatgggctagcactgcgtcttcacatgctgtcttcaaaagtgtggattcctgctgatgtgaggagtggagccctattatcactgagctgctcagaagaaattgaattgaaagggagataatcaccgagggaaacaacattcaaaataattttctaccctggatgccagctttatcctgcatagaaaagaaaagatttcttctgagggagcagagaattagaagggagtcctgctggatactaaaaatgcacaaaagggctgccaatgtttctatcgggcaaagaatcaatggagaaactttcagaaggcaaggcagcttaaggctggtgtaagtcttagctacagagagaagatattaggttaacagggaatcggtctcaagaccagagcgattaacacccttccatgctctgcattcggatccgtt

SEQ ID NO: 372975 - DNA, 566 bp, Homo Sapiens
atagagcaccaagtagtatggcataaataccatgtgtgttaagcacgagtagcagaatgggaaataggagagagggcccaggtaggtggactctggcttgagcagggcttcctagcgcctggctggagtctagtctttatgctgagggcaagggaagactctctcagatttgtgttatggaatgatcctcccagtagctgtgtgtagcaaggatggagacagatagggccagaagcagaaagactgggagagaaagccctgcaacagcccaggcaggaaggggaggagcttgaactagggcagtgatggagggatggagagaagaaaaaggaataagaagcattgtgtgctgttgggatttttttaaagacacataaaggaaggatggtgggggtcagtaagaaggagggggaagcagcctttgccaccgcatgagtctctgcagtgatggtgactggtggctggaggggatgtgccccagtccacagaggtgcctgcccatcactctgggtgaggtcaggtctgtgctactagcctctgtataacgggtagcgagctcgatttta

SEQ ID NO: 372976 - DNA, 682 bp, Homo Sapiens
tcgagctcgcctcccgtatactgaggctagtttacaactgagcgactgattcactggaaatcaggttaaacattaaaagtaaattatatgtcaactgccatatagtgtagcagttatccacctaaggttcaggcagtcctgggttctaacactgaatggcatggggtagtggttagctcacctacagtggccaacatgttctagaagccatctctgtgactatgtagatgacttgtgctctccatgctaagatttttgctggagttttaaattttcctccaaaagctgattgtcttcatgataatgagcaccagcgatccctttcctaagtctaaataatgcatcacatgttgactaaagtggagattcaacttcgtggttggttgtttttacatagggttggttgtttctacatgtgttacagtgactcctaacattttctgaggtggaaagggcctaagcaatcacaaattcctttcctatattaaagctagagaatctgtgacagaataagacactgagtgggatagttttgtagttgacagcagaagctagggtttctgactgccaggtcagcttttttcccatttacacaggagatagctatgacaaagaataagtactagtcgttgctgtataactgaaaatctggcgagtggcttgttcaataagtaatacagtc

SEQ ID NO: 372977 - DNA, 543 bp, Homo Sapiens
tatagtaaaacaatttaaaaaatggtccctttgtttgttgaacaaacattttgtttgtaaggaaatctgattgcaggaacagagacttatttaatctactttaggtaacaggacacatgtgcatagaaacccagaaaaagctgtgtgataaatacggaagagtgagatctaaggagctggatctctacagctttcccttcaagataacgctgtttcttttgtgctacttgttccttctgtctcaaatcaccactttgacctctaatttataattgagatactttctacctgatagcttcttcttgccctcagtttctgttctgtaatgacatcagctggcattagactcacaatggatcatcgggcctcctttacatcataaatcactagcttcccctttcactgatcattgcctcggttgaactgcttttcaattaaacattcctaactgagtatttgttggacttagtacacctttttgagtaaaccaccttatgggttacttgttagcctctgtatacggtgcgagctcgattcgtatac

SEQ ID NO: 372978 - DNA, 622 bp, Homo Sapiens
ctccaaacgactgggatctactgaaaagcttgggatgtcagcttcacagaggctagaacaggaagttaagtaggaactggactttgggggccaccaaaacgaggcctggagaaacgtcaccatatttcctcccctcctgcctaatgggaatatcagttacactgaaaaatttaacttccctgtgcctcaaaacatttagcaacctgaaccagtgactttttgtcatctctgtgctgagtttggtccaagttggtcaatctcattctgtataggcatttaacatcctacctgtgactgtctgcatcctttgctggctcttttttgcccaaagtgcaaatgcacttcttcagatttacttttcaagtgagaaggtaagagctggtctctgccactgttccagggcgagcaggctagagtctaatatacttatgctagcagttaccatttgccacattgggaagcaagagacaaatcaccaggtgaatgggagggtcttcttgagaaattcagtcccttaaaacatcttctcttgccttggattaggaggaacagtgttcagtgggccaacctttttcattttaggggaagttttttcttgttcccgggcccttcagggacaggg

SEQ ID NO: 372979 - DNA, 949 bp, Homo Sapiens
actgaggctatgcaaataaagactctagcagggtcatctgcaggaggaccagtgattgttacagggcactggaataacagcaagttgagtactgcttctgtcctccagcttcttccagttaccaagtagcctgaagctaggaaacgcacatgacccaaagcatagaacactaaggagggagcgaagactcagatagggctggtttccatcctgttgacattgctgttccttgagatattgtaagtcccagacatgaaaaatcagtcttgagggaaggtcagacataaatgtatatctcattcatatgacagaagctgggcatgattgggtggcaccgctggaatttcaaaaatgtcacttagatggattaaccttgaatgctgcagggattaagcaacaaggttgatagtccaggtattgggtcctggatgccaggtagtgggtgtaggggagagagtcaagaagtcaactgaagctagagtgagtagtggaaatgagaaggaagcctaagagactgttagctcagtgctcccctcctgcaggccctgcctgcatgggtcagacctccgtgagcattcttttctctgcataggcccgatgtggtgtaggaaggtagctgggtctccgttcccggttagcctcgagggaagtcaggccttgccaagtccgtagtcagttgccgctaaggtccggcgcagccagcccacaagtgacgtgggtatactggcctggctcctcatgctccgtcttcaccggtggtagaagtagttgaagcttggagacgatgacgggcacaggcagggcaatgatgaggaccccagcgatggcagcacagcgagcccacgatctgtgtccccccacagtcatggggtacatgtccccgtaacactaccgtggtcatgtgtaaccagcagcccacagatccttgcgcggggatacctctagagta

SEQ ID NO: 372980 - DNA, 436 bp, Homo Sapiens
ggctagtatttgtagcatgcagtatcactctctctctcactcctatagaaccagaaagaccaaagtattgtatttgttcttgagttgctaactcatgaactgtaagagtctggtgcctaagaaggagaaaaaaatttttgaagatcaaaatcttgcctttaaatactgatccacagttcctaaaagtatgaaaggtcagtattctggggaagaaaaaggaaagaatgcaagtttattatataagaacattattataaaaggagaccaaagtttgaccaagtggcagaaagtaggaaatcaataggcttagtctagagattaaatatctactcagcctctcatgaggcttatcaagcccagtcctggggtaggaggtaactaatggaactagaggaaagttgtagaaaattccacatgcatcactcggtaccgagca

SEQ ID NO: 372981 - DNA, 410 bp, Homo Sapiens
tgtacgttacctggttctccaggtcagggttctagctcagcgatggagatgtcctaggctagagtcaagtgacgaggtcacagatcttggctccattgttataagctgtttggaccttgagcagactagtaaatgtctctgagcctctgttaaatggagagaatattactactcatcttagaaaacagttgtgagaataagatgatgcatgcctcacacataaaactcaacaaatggtatcttttctccatggcattattcttattattccttctcaattggagggggttgatggatcagcccaattctcttgttggtggatgaacatttagagaggcagtttaatgtggcaaaagcaacgtagaatgagagcaggtagaccctggcgcacatgtaacgggcgagctcga

SEQ ID NO: 372982 - DNA, 580 bp, Homo Sapiens
actcaatgccactacccctcactatgtgcgctgtatcaagcctaatgacttcaagttcccattcacgtttgatgagaagagggcagtgcagcagctgagagcatgtggtgtcctggaaaccatccgaatcagtgcggccggtttcccctcacggtggacttaccaagaatttttcagccgctaccgtgtcctaatgaagcagaaagatgtgctgagtgacagaaagcaaacatgcaagaatgtgttagagaaactgatactggacaaggacaaataccagtttggtaagacaaagatctttttccgtgccggtcaagtggcctatctagaaaaattgagagctgacaaactgagagctgcctgcatccggatccagaagaccatccgagggtggctgctgagaaagaagtacctacgcatgcggaaggcagccatcaccatgcagagatacgtgcggggctaccaggcccgatgctatgctaagtttctgcgcagaaccaaggcagcaaccatcattcaaaagtactggcgcatgtatgtggtccgcaggaggtacaagattagacgagctgccactatt

SEQ ID NO: 372983 - DNA, 353 bp, Homo Sapiens
gagcatccccgctaacgaagatgattaccattatgaagagttgctggagtggcatataactctttttctgatctactgatttttacttcattaaggatttcaccaccatagtctcccaaatggtatcttttctccacaacttctaaggttaagtgcaataattctcgttttgttttctctcttctcttaatcatttccaaaattgttatggctctactaaattctcgtctcagtttcaacatcttttcataagaggcttcatcattcttacgattctttcgagtttgcattttctctgttcttctccgaaaggcaacataagggtcattgttggtagagccatctcttttctc

SEQ ID NO: 372984 - DNA, 167 bp, Homo Sapiens
cagctcggtaccatggtaggactaaggaggaggttagaaagaggctgccaaagaattttcagacttcaaaagggcgttttctgcgttaagttctcttagggcctgagaagataccatgagctccttatctgaaagtccttcatctgtcagcatttggtgcctgtccg

SEQ ID NO: 372985 - DNA, 351 bp, Homo Sapiens
tctgtctcaaacaataaaaataagtttccttaatggctggctttcaggaacataggctatgaggtggagcaatttttggtaaagggggaatgctgaatggattttttatgtaccagcaaacatggtatattagcagttacagtgcaggaccctgtggaatgggccagggaaaaatgttgacattccttttccttttatttggcacccaagaaaacagtttggttgtttggtaccttgggttccagttttgtgctttgcctctggtcttccagaaatgggcaagtatagggctcagaactaaattcccaggggccgtttgtattctagatgacagtatccgggtaccgagct

SEQ ID NO: 372986 - DNA, 417 bp, Homo Sapiens
ccggtagactgtcatcctcacctaccatgacatcggcataaccgtaagttctgaggagctctgattccctgtcagccggttcccaagagagtggcggaaaaaggcagccgagaagggctgatggccgggagctggtggtttctttttgcctgggacttcctggggctgttctgggaagaactcttgccacagcctggaaaagccagaaatgcgctgcatgtgggcacggagttgtctgtgtgcccggaggcgctgggaacacaggaagctgtttgctatctgtggcagtgacttctatattaatgcacgcatatagttttcagtcttttcacagaattgtgcaacgatcagcacaattttggaacattttcatccttccaaaaaatcctgtaccttttatctgtcaccccaccctca

SEQ ID NO: 372987 - DNA, 495 bp, Homo Sapiens
ctgcgccctggtactgtcattgcaaaactggttttggaggtgtgagctgtgatcggtgtgccagggctacactggctacccggactgcaaagcctgtaactgcagtgggttagggagcaaaaatgaggatccttgttttggcccctgttatctgcaaggaaaatgttgaaggaggagactgtagtcgttgcaaatccggcttcttcaatttgcaagaggataattggaaaggctgcgatgagtgtttctgttcaggggtttcaaacagatgtcagagttcctactggacctatggcaaaatacaagatatgagtggctggtatctgactgaccttcctggccgcattcgagtggctccccagcaggacgacttggactcacctcagcagatcagcatcagtaacgcggaggcccggcaagccctgccgcacagctactactggagcgcgccggctccctatctgggaaacaaactcccagcagtaggatgacatt

SEQ ID NO: 372988 - DNA, 596 bp, Homo Sapiens
cagctcggtacccggatactgtcatcactaagtaaacctgtccctgattgtcatctccatgctgttgcaggacagactgtttctgaaagggcagtcccctttgttaagttccatcctgttgacacaggagttctgttgtgaaagaattctcattgccttgagtatgccccagtgccttcctaagaattgcagttccctggatgaaggtgggtctctgtggttcacatatatctatgaaatgtgacatcctcttgcactggaaggaacaatgaataaaaaccaaggggagagatgaagatggcagaaggtgccctctctaaaggaggggcctgtagtgggcatgacacatctcactgggcaaaatgccaccatggttctctgcctctctgcaacacatatttcctccgaaacatcagtgctgatcattatcagttacttatcaatctgatgctttccccttacttaacaccaatgtgctcttcttgaagttagcgaaggactgtgcatgactggatgtactttcaaacagttatttaaatctctctgcaaaccagttttcacctcttattgtcgatacagtaccgggaccgagccga

SEQ ID NO: 372989 - DNA, 368 bp, Homo Sapiens
cccggtaactgtcatcactccagggagctagcagccttcttcattcccagaccctcactgccaacaaaggaggctgttggccagggtttgggacttgaataccaagatggggtagagcagagccttgctgctctgcaacttcaaattatcccctcctctaggaagctgggtcacctccgtccttccccctccaaactccctagctttcttttacagccttatctccctcccttcctctgggccaggtagtagcacaggcctgtggccttttggagtaaccctataaaaaccccagagcaaccctagtgtgaagcccagaaaaccccaccataatctccagggcaactccacagttgtactccaaactc

SEQ ID NO: 372990 - DNA, 541 bp, Homo Sapiens
ctgggtttggacaaaaagagtttcagatccttcccagaaaaattcaggcacagatatggaagggggactgttgagataaacagggagctcagtgatgcccttggaatcagtattgctggaggaagaggaagtcccttaggagatatccccgtatttattgccatgattcaggctagcggagtggccgcacggacacagaagcttaaagttggagatcggattgtcagcattaacgggcaacctttggatgggctgtctcacgcggatgtggttaatctgctgaagaacgcctacgggcgcattatcctgcaggtcgtagcagataccaatataagcgccatagcagctcagcttgaaaacatgtctacaggctaccaccttggttcgcccactgctgaacaccatccagaagacacagaggagcagctgcagatgacggacgattaaaacgaggggatcagattttagctctggaaaatgagttcaaaaatttcagtgtactgtcatacggatgtcgggatacagagatcattttttcctt

SEQ ID NO: 372991 - DNA, 357 bp, Homo Sapiens
aaagcacaggtgtgttaggagagcgtctagagccagggcgcccaccccatcggcgtgctccactgaacacgggcgtctctgagctcgtttctgtgcagatgctcactgctgtcctccttgtggctctcagcttctgaaaggaaacatcttgccgttctggtctcaggagcaatgagaaggtttcaattgccccgtcaatgggcttcctcaaagaggcagggttaggaatgaagtgggaaaaaaactctagaatggggagatgatgctacaaaggtgacagagctgtgggtcatcagaacatgggctaaaacagataattttacaatacttgtcctaaaagatgacatatccggccgg

SEQ ID NO: 372992 - DNA, 323 bp, Homo Sapiens
ccggagactgtgaaccaggttagtggtggggatggaagaaaagacttgagagtcgttgaaattcttgtggggaagtccaaagcaacagagcagagagaggaatggtaagcgatgtgttggagaaaagataaaagtcgtggaagcaaaggctagaagctaatatgtgtcaagaggagagccagagatggccagaagctagcatccataataggagaattcaactcatgacactggtttccttgatttaaggatctcagacactgcgttgggtcctgctgttggttgtggctcacagagatggggacgatgacagtcaccgggac

SEQ ID NO: 372993 - DNA, 388 bp, Homo Sapiens
ggtggcaacacgttggtcttcccaatagtgaacaccatcaccatgtgacccagaatttccttccttttccagactgagtaatactccagcggagtgtacggacactttgtttgtctatcacccatcaacagacacagcctgtttccacatttggtcactgcgaacaacgctgctatagacgtgggaatacgcacatccgcttgagtctgtgttcagctatttcggatacatacgcagggcggaattgctgggtcacatggtgttggtgttccacttgttggggaactaccaacgtgttttccacagtggttgcaccctttcatactcccagcagctgtgcatgagggtttctgcatcctcgctcacacttgctattttctgtgtcttt

SEQ ID NO: 372994 - DNA, 964 bp, Homo Sapiens
cagcttgccgcgtgtcgatctagagatcccccacgcgaacaggacgggaatcacccgtatcataaattactcaatccccaagcccattaaacttaaaaataatttctacttcctcttccttcaatgcataataaaccatacaaaactccattattaaaccagaaacaaatgctccaaaaacagtcttattagaaactcaaacctcagggtacatctcagtagccatggcagtagtataaccaaaaaccactaacataccccccaaataaatcaaaaacaccattaaacctaaaaaagacccaccaaaattcaatacaatgccacaaccaactccaccacttacaatcaacccaagtccaccataaataggagagggcttagaagaaaaaccaacaaacccaataacaaaaatagtacttaaaataaatgcaatatatattgtcattattctcacatggaatctaaccacgaccaatgacatgaaaaatcatcgttgtacttcaactacaagaaccttaatgaccaacatccgaaaatcacacccactaataaaaattatcaacaacgcattcattgacctcccagccccctcaaacatctcatcatgatgaaacttcggttccctcttaggcatctgcctaatcttgcaaatcctaacaggcctgttcttagcaatacattacacatcagacacaacaacagctttctcatcagttacacacatctgtcgagacgtaaattacggatgagttattcgctatctacatgcaaacggagcatccatattctttatttgcctattcatccacgtaggccgaggtctatactacggatcctatatattcctagaaacatgaaacattggagtagttctactatttaccgttatagcaacagccttcataggctacgtcctgcccatgaggacgaatatcattctgaggagctaccgctcagcacacat

SEQ ID NO: 372995 - DNA, 275 bp, Homo Sapiens
cgcatgatgtgctctagaggagtccccgggatgtcggatgttggcattaaggttcttgtagttgaagtacaacgatgattttcatgtcatggacggggatttgtgtggcataggggttaaagatataacaggagggagaatataatccttaaaatgtaggctattcaggccaggtgtttaactagactaagagacacttcataacaatcaattgaacaagacccaattacctaagtggggcattatacactaaagaaattcacaaagaacaatat

SEQ ID NO: 372996 - DNA, 1471 bp, Homo Sapiens
gcaaatattatgagctctggggtataaaatcgtcctatgtcaccgtaggaggtctaacgggcatgtgtactattgaatgtgcctcccgagacattgtagtacatgatacatagtatgtaggcgcacactgccaacgtatgtcttatctataggagcagtgttcgccattatagggggctttgttcactgattccccctattctccgggtacacactcaaccaagcatgagcaaaaattcactttgtaatcatattcgtaggagtaaatataacattctttccacaacactttctaggactatccggaatacctcgacgatactccgattatcctgacgcatacacagcatgaaatactatttcctcaataggctcattcatctcactaacagcagtgatattaataatcttcattatctgagaagcatttgcatcaaaacgagaagtatctgcagtagaactgacaagcacaaacctagaatgactacacggatgtcctcctccctatcacacatttgaagaaccaacatatatcaacctaaaataagcataagaaaggaaggaatcgaaccctctcccactggtttcaagccaacgtcataaccactatgtctttctcgataatcgaggtattagtaaaatattacataactttgtcgaagttatattataggtgaaagccctatatgcctctatggcttaccctttccaactaggcttccaagacgccacttcacccatcatagaagaactcctacactttcacgatcacaccttaataattgtattcttaatcagctctttagtgttatatatcatttcacttatactaacaacaaaactgacacacactagcacaatggatgcccaagaagtagaaacaatttgaacaatcctacccgctattattttaattcttattgcccttccatcattacgaatcctttatataatagacgaaattaataacccagccttaaccgtaaaaaccataggacatcaatgatactgaagctatgagtatacagactatgaagacctcacctttgactcatatataatccccacatcagatcttaaacctggagaaatacgactactagaagtagacaatcgagttgttctaccaatagaaataacaatccgaatattagtatcctctgaagacgtactgcactcatgagccgtcccatccctcggtttaaaaacagatgctatcccaggacgactaaaccaaacaactctaatatccacacgacctggcctttattacggacagtgctcagaaatctgtggatcaaaccacagcttcatgcccattgtacttgaacttgtcccattaaagtacttcgaaaaatggtcaacatcaatattaacaggttcattgagaagctagtcagcactaaccttttaagttagagatcgggagcctaaatctcccctcaatggtatgacttggtagagtgtcggg

SEQ ID NO: 372997 - DNA, 252 bp, Homo Sapiens
cagttattatttctacaaccacagccacaagcaccaccaccaccatcatcaccagcagcctcaccaatacctgcagcatggaaccgagggcagccccaaggcccagccaaagccgctgaaacatgagcagaaacacaccctccagcagcaccaggaaacgccgaagaagaaaacaggctatggtgaactaaacggtaatgctggagaaagagaaatatctttaaagaacctgagttctgatgaagccaccaa

SEQ ID NO: 372998 - DNA, 323 bp, Homo Sapiens
gagctcgctaccgtaggttggagtccgcaagcagtttggagcagaagaagcagacacagcgcaaaactttcattgtcttcaccaggaagcccacgtgaaacacaggctgggccagttcaatgtggccaaagtggccaggacactctcctcatgtttcctgcacatgtttggcagcggccagtccgctcaatcaccccctgcctcgggtccatcagccccccaagcttggggcggcctccctcagtcgtgtctgggtatttgatgccaccctccgtcacagacattcgcttcagttcatccggactccaacctccggggatcct

SEQ ID NO: 372999 - DNA, 160 bp, Homo Sapiens
caagggatggattgggaattcaattccggccccttggatgccatccagatgttcaaccagctggtcacaccgagttcccctccagtcaattacttttcttgatgtttctaatcaacagcattatatatgtgatgctataaacttttatatttaatattag

SEQ ID NO: 373000 - DNA, 563 bp, Homo Sapiens
tactgtcggtgactctgaggatcccctaaagcttcgatccccagtgtcaaaggagagaaggaggaaaacatgcttgagccatccatttctctttctgaacctctaatgttagaagaaccagagaaagaagaaatagaaacttccctacccatagctattacccctgaacctgaagattctaatttagtagaagaagagatcgtagaacttgattacccagaaagcccattggtttccgagaagcccttcccaccacatatgtcccctgaagtggagcacaaagaagaagagcttattctaccattattggcagcatcatctcctgaacatgttgctttgtctgaggaagaaagagaggaaattgcatctgtttctactgattctgcttttgtatcagagtattcagtaccacaggatttgaaccatgaattacaggagcaagaaggtgagccagttcccccatcctaatgtagaagctatagctgaacacgcagtcttgtcagaagaagagaatgaggaatttgaggctattccccagctgcagccccggatcgtagctatag

SEQ ID NO: 373001 - DNA, 201 bp, Homo Sapiens
catgagtcaccatgggacctctggtatgccttaggttgggaaccatggttctaaagcacagaaagtagttgtggaaaatacaagatttgatggcaacctgggtgaccccccatcttttctccagtaggttcttaataaatgtttgtgggattacaaaggaatataaatcattctattacaaagatacatgcatgcatatgt

SEQ ID NO: 373002 - DNA, 476 bp, Homo Sapiens
caatatgactgccatgtcagcatcagcagaaacaaaggcactaattccagcatcttgttctcctaagtattatggaggataccaacaatgggaaaattggacccctaatctgaaacttcatcctcattattctgaatgaacgaaaactcttagaaccacaaaatattgctgaaaatgagctgggagttgctggcatctgtttgaatagcagaaccaccacacaggctttaaaaagccttgagaaaaccattggtctcacagctgctgacctttagaagaggctggatgctgagactgcaaaggaacctcctggtcagagacaagagccacagtgctcaagtggctttgcagagtgatgccacagctaatggcctcattggcgtggtcaaagaaaatgcggtagttttctctgtgtctgggcgaaatcagattgagcatatatccacaaataagctgcgacattgtccatacagtga

SEQ ID NO: 373003 - DNA, 590 bp, Homo Sapiens
gtcacgggtagctcaagcagcccctggcaaggactcattgaaatgggcgtgaagaacaggaccctcgacctcgatttccccatgcagctgagggtttgccacatttggaaaagacaggcatctgctgcagcatagaaacatgaacgcattctattacacacatcaaaattcaaatcaatctcaaaaaccaaggccgaattttccattacacaaggaaaagtaatccgctccccttcatgaagcaaaaccaccaaagagctgcttccccttgctggttcctcgcctcccatgcttccttcaaccttctctcgtctgtcaccccactagagagctgccatcgtcacaaggccactcttgtgaaggcaaacagtggctcttctgcccctgaccttctatggggatgtggccccctgctctgtctcaagcattttcgcctggttttccaggaccatgtccttcacctcctgcctcaggcccctcttcctaggcctcctctgcctgttcttcctcctcttccagacctcagggcatcttgtgcagcctcctatcatatgtgtcctgcctaggtgacgtcatgaaacataatcctc

SEQ ID NO: 373004 - DNA, 472 bp, Homo Sapiens
agggattattcatgagtcactgggggccgaacggaactggaggaccctgagactcattaattatagagttgtttttgccaaggacatttcatctgtgacatctttgctttggtgtaaacagaccggtcttctctctacctcatggagagtgatgtatgcaatgtatgttccataaaatgcttccaagggagagagaaagagaatgtgatccaattatacaaaatatgttggcagactcctattgatccttcaaaaccctaatgcagtattgcctcctccatgtagactttcttgattaccctgacagagttacagagttactcccatcttcccctacccgtgctgtgctgcacacacatttctgcttcaggggaggtctcagggagcttttatttatggtgggaactgtgggtactgtgatcgtggctatagtcatggctccctggatgcctgcgtccacgcccactggact

SEQ ID NO: 373005 - DNA, 518 bp, Homo Sapiens
atcggtacccgtgtcatgagttcactgaggtataagtgaaaggacagacattgtgtttgagtaaactcctagaagtccaaactttttttctgaatatctgagtcatcactttaaagttgggtacatatatgacttgtttactgaattaataaagtatatagctcctagtttttacaacttaaaggaaacaaaacgttttcatccaaaaacactggctacatctagtgggttgtttcaaggtgttagggtaaggttttgtaattaaatgattagactgtgcaggttttaaagtctgtgcttgcctagttcccacccttccatcccccagtacctagcccaatgcatggcacgtaataggctttcaataaataatgactgtgaatgagattatttcagaatcctcctttgttaatttccctgtaagttatttgtttcttttattttaggcaatttcaggctgcagcattctcatttagaaacagacacaagggaagaaaaattggcatattaattaatgg

SEQ ID NO: 373006 - DNA, 351 bp, Homo Sapiens
cttcttgtcatcccacatgcccacatttcataacagtaaatcatatccatcataaatatataaaaatgaatgaaagatgtttgtgaaggttgcattttccatcagttttctaaaacagaggcagcccttatccaagctgtactataaaattgaactagaagatgattttatttcctcagacccactaatgccacttacttgtagcattgactgaatcatatttgaaattttaaccagcttaaattgaagatttcccttatctttaaagttgtgatagaatcagcaactgacactatttgttatagacgtcggtctctacttctagatagctcagtgtctctctcgcatcat

SEQ ID NO: 373007 - DNA, 626 bp, Homo Sapiens
  misc_feature (577)..(586): n is a, c, g, or t
ttcgaggatctcgttcatgagttcacacaataggcaacaggacaggcccaccgatgacctgcagctcccgggtccctggattctgtgttcctgaaatttccctgtcttttttattttactcgtttctcagatctctggtttagggaagaaaaaagatgaaagttacagtaggactacaaagatacaactgggatggagggtttggggtgaaagaatgttgattgcaaaggaccattggccacggtcacaccacccaccccagccagcctcttctttcttctttttcccttggaaattgcttcttagatagtgaccgctattaatgacaacactggttgtattgcctaaaggaatgtaatgtattaatcatagctaatatcattagcacttaccatttacggggcaaatctgaacatgcacgaacctggttaaagttaatggctctctgctatctgctggctccagcccctactccttacgtggttatgatggtccatgccaagctctcccacctcctctctagttatgcccccttcaaattcgctgcttcaatcatatttgaagctctttgatcttnnnnnnnnnntgcctgaagatactgaacctgctttggccagtgactgcat

SEQ ID NO: 373008 - DNA, 443 bp, Homo Sapiens
tctgaggctgaccagaggatccgttcatgagtcactactctgagtctctcatatgctctgttcccattgtgtttttcattttacttcttggtcaactgtgtaccatttttgtgtgcttttcaggagttagaagaagataaattatgtctgactagtctgccataattactcaaaagttgtagtattaaagttgtaggtgtataactaattgagcaaataaccatataaagaagaatctctgaaaatgttaacatggagaaaggatatatatccagacacacgattgttgttctcttatatactcccttgacaattctgtcaaagtttaaataaaaatgaactggaatgtattagtgtgttttcacactgctataaactccccgagactgggtaaatgtataaagaaaagtgatttaattgactcacagttctgcatggctggg

SEQ ID NO: 373009 - DNA, 509 bp, Homo Sapiens
  misc_feature (309)..(329): n is a, c, g, or t
tctaaacacattggcgctactctgaagtagagggacgtgatgtagagcgacgttgcggtgggcgtcgtagcatctgctgtgtacatggtgctcctatgctccgcagactctgtcctcaacctccgctcccagttgccctttttcttccctttcaaaatggccccgctgccctctttctgtttcaagtgccccacctggggtctggcagcgtccctgcagtgattttcaggggattttgcctggtgtcctcttacttttagcattctgtatggtaaaaagatcattagtgaaaacattgtatcttatttnnnnnnnnnnnnnnnnnnnnngcgtttatcagctaatatacagcggcttgctgctgcctccacaagtgctgcctgttgattttggtgatgcgctctaccctatcagtacaatagaacacgcagaggaccgatgattatgagtctttgaggagaagccccccacaggattgcgttgagagaaatggataacacgttcgcgag

SEQ ID NO: 373010 - DNA, 537 bp, Homo Sapiens
aaggattagtcatgagtccccaactttggtgtcaactacctctccaccgtactgttatatctgtggcctctcctccctagattttcttgtcttaaagattaattactaatagttttcaaatccaaaggctggaattcagtttccatctcgtacagtgacaggacaggaattgttcgaactctaaagtgaaccatttccagaccttgtgattcaaatattatttaaaatgtgactaccttggctttgatgataaaagtcacaattaacaaatgaatgaatgaatgaatgaatcaatcccaatgtgtgctttgttcttatcccttaaaaggctctaatgctccgtgtcatagtctgcagcatacaaaaaaacatggaagtgctgggcttgcacctcaaaccaagcaggtgtgtgtagagtatgaaagagaggagactgtggtgagtccctggacgataccttcagaaatccataagattcttcatgagagtcacaattcccttctacaagtaagcattgtcctagattttggttgtcta

SEQ ID NO: 373011 - DNA, 264 bp, Homo Sapiens
gggaccgaacccgcaacctcatggttcctagtcggattcgttaaccactgcgccacgacgggaactccctggttttatttaacgtagaatattgaactaaatacagtataaaacttcgctcaagttagaaaaaaattatacaggatataaaatgatgaaacaagactccattggtctctcaatggacttgacaagtgactaatttgccgtgagagttaaaagtattatatcattgccgcatgccgcatgttcgcgggtaccgag

SEQ ID NO: 373012 - DNA, 202 bp, Homo Sapiens
ggatcccctcgtactgaattactggatcgaagcccgcaacctcatggttcctagtcggatttgttaaccactgcgccacgacgggaactccctctttttctatttcttcagaacacattcacatgaaataaaatatgatgagcctggattgtaatccccaatggcctaaatcccacagtcccaggaataagatctttctggg

SEQ ID NO: 373013 - DNA, 339 bp, Homo Sapiens
cgaattaccaggacaaggacccaggtcaactgtatcctgtctggtaccttgatttagaattactgatgctggagttcccgtcgtggcgcagtggttaacgaatccgactaggaaccatgaggttgcgggttcggtccctgcccttgctcagtgggttaacgatccggcgttgccgtgagctgtggtgtaggttgcagacgcggctcggatcccgcgttgctgtggctctggcgtaggccggtggctacagctccgattcgacccctagcctgggaacctccatatgccgcgggagcggcccaagaaatagcaaccataaccaccaccaccaccaccacc

SEQ ID NO: 373014 - DNA, 526 bp, Homo Sapiens
  misc_feature (62)..(220): n is a, c, g, or t
aaaagacgaagaggaggctctgtggttcgtctttcttggtccttccaataaccatgtaaatnnnnnnnnnnnnnnnnnnnnnnnnnnnnnnnnnnnnnnnnnnnnnnnnnnnnnnnnnnnnnnnnnnnnnnnnnnnnnnnnnnnnnnnnnnnnnnnnnnnnnnnnnnnnnnnnnnnnnnnnnnnnnnnnnnnnnnnnnnnnnnnnnnnnnnnnnnnnnnntgagaagagctgttctaaatacccactaattaaaccataatttccaattccttgaatcttcctggcacttctatagattaatttctctgcaaggtaaaacattagaactatcagattacttaattttacatattagatatcaaaaatagtatgacactatcatgagatcatatcacattagatattgaaagtatccagtatctttccagagtcacgaaacacaattgacaggaaacaaatatataacagtggtattcttgagccattgagtggggaaagggacgccattccataaacttgggacat

SEQ ID NO: 373015 - DNA, 502 bp, Homo Sapiens
gcaagacagaagagtaggcctctctggtttgtctttcttggtccgtccaataaccatgtaaatcagtggttctcaagtgtggtcccaggacaagcagccttcaccattgcctgggagttagtaagagtacaaatcatgctgccccactcagatctactgaatcagcaactgtggagatgagacccagcagcctgtgtttcaacaagttgtccaggtgatttgttgagaagagctgttctaaatacccaagaagtaaaccataatttccaattgccttgaatgctgtcctggcacttctataattaatttctctgcaagtagacattagaactatcagattacttaattgtacatattagatatcaaaaatagtatgaaactatcatgagatcatatcacattagatatcgaaagtatccagtatttttccagagtcacgaaacacaattgaaaggaaaaaatatataacagtggtattcttgagccttgagtgggttagtct

SEQ ID NO: 373016 - DNA, 289 bp, Homo Sapiens
ccttagaggacccttcagatgaaatgctgaatgatctctatagatatacagatacagacatagacaaagttagtctgggggagaaatacaaccaagttccaacactgagtgtctctatagagatacagatacagacatagacaaagttagtctgggggagaaatacaaccgagttccaacactgagtgtctctatagagatacagatacagacatagacaaagttagtctgggggagaaatacaaccgagttccaacactgagtgtctctggtggtggggttaggtctg

SEQ ID NO: 373017 - DNA, 141 bp, Homo Sapiens
gctgtgtgggtgattagaggatccccagactaaccccatcacagccagtagctatagacagatgcactcttacacacaaactttgcaatctatcttctactgagaacagctgatagaggataggtggtggggttaggtctg

SEQ ID NO: 373018 - DNA, 275 bp, Homo Sapiens
aactacaacgaacacaaaataaccagagaggaacaggagcttgccagggtggtatagagcacccgtcgctgagcctggtcccgtatttccagtctggtgactgcccccttccctcagtctattccttaaaggttcaaacatcaacatcatgagaaacttgtgagagccagaggggaggaatctcacagtggactcaggcagggcagggcagtttgctttccaggtggtgtgctgaggcaggaagcacacatggacttgggatggggttaggtctg

SEQ ID NO: 373019 - DNA, 390 bp, Homo Sapiens
cagacctaaccccactaggcctcaaaacactcctggctctgggggtttgtcccaaagtcctctcattggtgttaggcaagaagccacaattccaaactccccaccatgacagcaaacagaagcctcattataaagtagctccagaagcctcattataaagtagctccagtaattggtcagataatggcgagttacagggagcactgctggtcatcctgacgagtcagatgactgaaccgagcatgaatggcactcgaagtttcacaggcccccatggatcctgtttttgtttttggtgagcctgacaccaatttaagacacatttctaattggccctggctggattcactggaagaggacgtacagtccaagttaggtggggttaggtct

SEQ ID NO: 373020 - DNA, 677 bp, Homo Sapiens
cagacctcaccccacaccactgatgtgttccatgttatcttcagttacaatgcaactaaaggaaaccacacaactgagtcagatataccaaagaatcaagtttgcactttttatctgagaactgcaacagcactgaattctgcctgacaaattacagctctaaccccacacccacacagttttgatgtaagctagctttaccatacaagtgttaggtgctgcactgtaatatcattgtcagaaatgtgatgccagaatgcccacggaataaaagtacatacaagtcaccaagttagattatattgcttgttacctacctgtatgcagtcggcaatgagaatcttggagcaagcaggaatactacatccgggtcctaatgtccattgccatttgcggtactacgttcctcacagttacgcactgcagaaatgctggctaaatgcagttatgtagcaggccactactttaatagtgcataattgcagtccaagaacaccagaaaacattccgccacaacttagtggcttgcccaagaaaagccaagtatctaaattttaatctgccataatatgccacttaaaaattgcacaggcgtaacattacatttccccattttttagctgtttatattagtggtacatacatctataaagagtggtgggttagtctgaagccct

SEQ ID NO: 373021 - DNA, 414 bp, Homo Sapiens
cagactaacccacgaatgaatcagctgtgcttcaaatgacatctctgtcccacggagaccggctggcactctcatgggggtgctcattgtggtttaagtcagctttgattcttgacctccaaggctgcctctgagtagctaactggagaatcgggtggggaggtgaaaaaaaccgcagtcaaatgactcaatctttaatcctgtgcttaagacaccactgttgctgttttttatatttgaagcacccaaagactgggcgtccagcacagccttgatgagcgagcagctattttgtcaggccatctatgatgttgggataatggacaaaggcctgattgggccatatatggccttctttaggggcctcctggaggtggaggaagtagtggggtaagtgtctggggtaccgagctc

SEQ ID NO: 373022 - DNA, 425 bp, Homo Sapiens
tgatctgcaggatcttagactaacccacagcatacacctgcacatgctgaaatccaggtgttggcacctgtgtgtacgtgatgagcctagtgaaaccagagcaggggcagaggggcgtcatcctcccaccggacgctgggagctcagaccccaaaactgaaacaccgtggcttcggcggtggtggtgtgcctcctgatgtcaggagccccatccacgtgtgtccacacagatctcgtcgcagcacggcaggaaggggtgctgctatagggctcattgaatggggacattgaccgggttcagcgtgctagaacatcaagccccacagcaagactcctcctccacctgaagagggtagtagtctccctgaagcagtcacaagcagtgcggtctctgccgctccgtcaccacagtggggaaaggtctg

SEQ ID NO: 373023 - DNA, 418 bp, Homo Sapiens
tatagagtgatccccagacctaaccccactgtggtgacggagcggcagagacgcctgctgtgactgcttcagggagacaactaccctcttcggtggaggaggaggctgctgtggggcagatgttctagccgctgaacccggtcatgtccccaacaatgagccctaagcagcaccccttcctgccgtgctgcgacgagatctgtgtggacacacgtggatggggctcctgacatcaggaggcacaccccccgccgaagccacggtgtttcagttttggggtctgagctcccagcgtccggtgggaggatgacgcccctctgcccctgctctggtttcctaggctcatcacggacacacaggtgccaacaccctggatttcgctgtggcaggtgtatgctgtgggggatcctcaagtaac

SEQ ID NO: 373024 - DNA, 435 bp, Homo Sapiens
tgtgctgtaggtgatctagaggaccccagactaaccactaccagaataatctgtctgagaagtgaagtgccttgtagacctcagctcctttctgggatgactatactcccatacctgttccctgagtaggtccacactaccatgaggtgcccgcactccgatatctaacacacgtggggctagaatggccagtatcattcctttcccgggggctctgccttgctcctgcccagtgacctggctggtgcccctgtagtctctactggtgctggttccactccctgagggttggcattgtggtccaggcccaagccaggggacaaaatctctctgctgttgctgttggcagctcacccggcgttgtcaatgtcaccagctggaattttcctttaggctttgccggaatagtccttccccacctgtggggttaggtct

SEQ ID NO: 373025 - DNA, 371 bp, Homo Sapiens
cgagctcggtaccccacaaaagcggcccgtgagaagacaggatccagcctccctcccttcttcccgaaggctgcactttggaggaggcacggtggagccacactggccccaggtggcaggaggcagaatagcagcttccaggctctggcctcacttcccgctctgctcttcctcccttacgtgctttggagaggagtgacttcacttcctcgacctcaccttccctttctgtaaaatggggatagcgatagcactgctttggtcggccccagggactcagtgagatggaacaagcacgttcagtacatgggaacaccactgcccaagtattccccttcccgcttttgtgttccggatcctctaggtcagcc

SEQ ID NO: 373026 - DNA, 263 bp, Homo Sapiens
ggaacacaaaagcggccatgtgtaatgggtacatgagtcttaattgctattgagtcttgtatctggtcttacacagaaacctttctccattttcatgttcatcttaatggttcttttggattttctacatagaccatcatgtatctgcaaacaactgttttgcctcttcctttccaatcctctgcttctcatttcttttcctttcttccaaccttaaaatttttctttccttcccgcttttgtgttccggggtcctcgtagaa

SEQ ID NO: 373027 - DNA, 707 bp, Homo Sapiens
atactcacacaaaagcactcaattcataattttcttacacctcaggtttatcttcagagttaaatatacacatattactctgaagataaagctgattgtaagaaaatgggtaccgaactctgatctagaaatgcttgatttgggtaaaaatcattaagttaaggtggatgcacatcttgtcatatgatcaaatgggttcgcgaaaaatcaataatcagacaacaagatgtgcgaactccatattttatacgacgctatttaccaagtgtgtcccgaatttgcttaaaacgactcaacagcttaacgttggcttgccacgcattacttgactgtaaaactctcactcttaccgaacttggccgtaacctgccaaccaaagcgagaacataacataacatcaaacgaatcgaccgattgttaggtaatcgtcacctccacaaagagcgactcgctgtataccgttggcatgctagctttatctgttcgggcaatacgatgcccattgtacttgttgactggtctgatattcgtgagcaaaaacgacttatggtattgcgagcttcagtcgcactacacggtcgttctgttactctttatgagaaagcgttcccgctttcagagcaatgttcaaagaaagctcatgaccaatttctagccgaccttgcgaccgcttttgtgttccgggatcctctagactacctcagcaa

SEQ ID NO: 373028 - DNA, 376 bp, Homo Sapiens
atcccggaacacaaaagcggcatcataaactagatgattcctttgcagaattacatattcaacctcttccttttacatgattccttcccatcgtattttaaacattcacaagtttgtgcaatcaacatatgaaaacaaacctaaatcaataatttttaaaaaataccgatcctgtgttctcctccagcgaatgccttctttcttccacagcccaatttttttaaaggagttatctatacttatagtctgtattttcttttctctagagtatgccaatctggcttcagttcccatagtccactgaaatagtttttttgtgaggacggtgctgactttacatcaccgaatccattttctctacctgacctctcatcag

SEQ ID NO: 373029 - DNA, 377 bp, Homo Sapiens
tttgtgcactgaaacagggaaaggggagctggaaaataatccagtaatctggggccaaatcttggctctgacattcaccaactctggagattgggtaaattgctaaatttctcccctttttagtttctgaccttataaagttgttgtaagataaaatgagaccacaaatgtaaagtacctgttagtactaagtgaataataagttaagcctctcttgggggaaaaaatgtctgcttgtagctgggtcaaagaaaaaaataccacctgtggggtagtggtgatttgatcttttgagttctgtggctaatccttggataattaaaaggttgaattctgtattatgcttgtgctattaagcatgcatgtgcacatgagtg

SEQ ID NO: 373030 - DNA, 257 bp, Homo Sapiens
  misc_feature (235)..(235): n is a, c, g, or t
cgttgcagtctgcggctgcgggcacagcaagccaggtcggaaagggtcggtggaacagacctcctgaggcacctccaaaccactgaggtccgagctccgaggccgcggctgcctggcaggcccggggcgggcgcactgggcattccgatactccttgaagccgctcaaggacggaggtaataaactagcagcaacagtggttatagcatgctgttttgcatgtgactccaccgancctcccccgtgtacatgcaagg

SEQ ID NO: 373031 - DNA, 438 bp, Homo Sapiens
ttcactctgcataggagtaagcagggagagctcattgagtctctgcctacactatattgcagggaagtcaggctgtaggttctcacagctcaccatgaacactccattttgcaggaataattctagttctgtatcccagagcagaaatagagacagatggaattctgcatctcacctctccttaccccataaatgccttttcagggcacccctgtcctaccaacaggctttgaagaatggatattgtgtctggtagtactgagcagggagagcgtgaatcacgtggagaaagaaagtcaggagcacatagctcatttcactgaggaaatggagcacagcggagctgaagaatcaacacgctagaaaaccggagcaagtggaagctggacgaactgacacgccggacaagctcactactgaatgtattgcccatccgca

SEQ ID NO: 373032 - DNA, 481 bp, Homo Sapiens
  misc_feature (408)..(408): n is a, c, g, or t
  misc_feature (431)..(431): n is a, c, g, or t
tgaacaacgcagctaagttcagaatcaacttttggtttgggggaaaaatttagatgatatgaattaaatttatgaaattcattcattgccaagtgtggctaacctagcttggtctacataacctagacaggcatggatgcaatcacgtgttacttaccatgacacgttggaaatattttacctgtagattcatgctgctcgaggacaaaagaattgaaatcctgaggtcctctataactgtaagccatctggtcagcaatgctatcctcacttctttgaccagctaggcgtggattttacgctgccaccaatatctgactgggtgttctgcctgtcaatggatggctggggatctacggctcactccaacacttcgggcatggacttctgcctgtaagtgccccccanagaaccagtatcactggatgaanacaagttgctaggagagttccgacactgggatcttgctaaagccatggat

SEQ ID NO: 373033 - DNA, 517 bp, Homo Sapiens
  misc_feature (303)..(311): n is a, c, g, or t
acccatccctttcactgtccttgtcagataaaataaaaaccaaataaatattgatacaaaggattaattatcatgaatcaggtgggctaataaaagtccactgaagcctttacattgcagagaatgtagttttccaacaaaaaagccacaaaaattaaatacatgggaggccaaggaaaaaactgtaagaagtactgaataatagactctctaaaaagtagtaaggccaaattctttgactaccaaacaataaaactgaagaaacattaataaaagtagaaggtagaaaatttggaaatttgnnnnnnnnngcttccgaagtaactatcatgtcctaaagaaaatcaaaactgcatttatttaaaatacaatattgggctgggcacagtggctcaggcctaattctagtgctgtggaagactgaggcaggtaggattgcttgaagccaggcagctttgcagagctagcactgggctacatgcacagatccagtctctacacaaatgtttatttagat

SEQ ID NO: 373034 - DNA, 438 bp, Homo Sapiens
  misc_feature (335)..(344): n is a, c, g, or t
gccaatttaaaaaacatttttgtagagactggatcttgccatgtagcccagtgctagctctcaaactcctggcttcaagcaatcctcctgcctcagtcttccacagcactagaattaggcatgagccactgtgcccagcccaatattgtattttaaataaatgcagttttgattttctttcggacatgatagttacttaggaagcttttttttacaaaatttccaaattttctacctgctactttaatacatgtcctccagttcaatggttgggcagtcaaagaatttggccttactactttctagaaagtctattattcagtacttataaaagnnnnnnnnnngggcctcccatgaattaaattttggcggcttttttgtggaaaaactacattctctgcaatgaaaaggcttcaggggacatttattagacaccct

SEQ ID NO: 373035 - DNA, 415 bp, Homo Sapiens
gaccccgaccatgccggccaagccagattctttaaagggctctatcttctctgtaatttgctccctgcccactttgatcacgccagattctactcctattcccattgtcttttaactcccacttcagggcctttattcttgctgttaccatttcctagaacaatccttccagatacctacctaaaatgctgcatcatctgtccatctttgttcagataccaccttttctttgaggccttctcttaaacactgtcgtacatacagttttgcacatacattttagttgtaggataaattgctaaaaattaagttacttgagaaaattatctgcatgcttaaaacgtgaatgactactgccaaatgacccttctagtacttgctaacgttggccagtgtgagcatctaccatcacttt

SEQ ID NO: 373036 - DNA, 718 bp, Homo Sapiens
tggtacccccgacgaccgactaggtcatgctgatccaccaaactttgctacgagcttccagcctaggaccaagctgaggccgactttgggaacggcagcgcctgtgttatagaggcacagcctgtcgtctggcagggtcggccgctcagccagtctgtcttcttatccactcagccggtccttgtggatcatctcctttacggaccctgtgttacatagaaatccaatagctttgtcgaggactgtcagagagtgccaagagcttcttgatcttagactgcgcggatgggtttttttgtacctgatgtgtacaaagttccctgccagctcttgccaagaattcaaaggagtaagaataattgatcatatagccatcattgaagcagcgccagacactgtgctaagagcttcatatgcattaccccagcgctcctgttctcgaggaactcctgtcgtctagagaaggtgaaatatttacagtgcctgctgcgtgtggagtgacgtggaccaccatagtcgggggctcagacaaggggcctccagttctgatctctctcactccccttcaaatctgaaacgttgaactgtcctgcaggattgggccacctctcttatagcctgtgatttgggattgtgtgtcgcattgtccatcctaagagaacagggccaagtccttttcagcgtccaaacatatggcacattgtctcggctgtctact

SEQ ID NO: 373037 - DNA, 560 bp, Homo Sapiens
ggaactggcacgagagcaagggaaacacaaagccacatgcagatgtgctggagacaatatgacagataatctgttgaagttgtgtaccatgaagatctagtcttttgtcaaagttctatgcagtcccaggatagcgtgatagcagtggtcaaacacaaccagctagttatagcttacattgtatggaaagacctctctggtctggaactctgcctttgaaattatccacgtagttcagaaggcaaatacttgttaaagggatcccaaaaggtaggagacaagtagtaaatgttatgcattagggcagactttcaagcacaagacacaaaattgagcagcaaatgtatgggtagtcccatctcccttcggtatatatgtgggtagtaaaataaataaaattttccttctttgtctctttcttgaaataaaatatcaggtatccaaggagagctgaggattctcaatttgctagattgctttaaaggggtcagatttagaaaattaaggaataaatgaagaacaattttactggagtaggtgtggtcaataggccttttcca

SEQ ID NO: 373038 - DNA, 706 bp, Homo Sapiens
tcatatagactcgggttagtacccccgcggcgtatgaggaagtactgcccacgtacctgttcctacaatgactcagtggacccacgcatcgccaacgtcttcaccaatgccttcctgctacggccacaccctcatccaacgccttcatgttcctgcctggacaatcggtaccagcccatggaacccaacccccgtgtccccctcagcagggtctaaattgcctcctggagggtcgtgctggaaggtggcattgaccccatcctccggggcctcatggccacccctgccaagctgaatcgtcagaaccaaattgcagtggatgagatccgggagcgattgtaagagcaggtcatgaggattgggctggacctgcctgctctgaacatgcagcgaaagagggcaccacggcctcccaggatacaatgcctggaggcgctactgtgtggctcccgcagccgtgaaactgtgggccagctgggcaccgggatgctgaggaacctgaaattggcgagagaaactgatggagcagtatggcacgcccaacaacatcgacatctggatgggccgcgtgtccgagcctctgaagcgcaaggccgcctgccccactcctcgcctgatcatcggaaccagtccaggagcccgggatgtccggttggtggagacgaggttttccgatgctccgagggcctggccgattcttgcggac

SEQ ID NO: 373039 - DNA, 625 bp, Homo Sapiens
ctgaactgggtaccgatgatgcaggcgaagaaggggcccaacgcggcctatgagcttcagaggctcggacacgccgcccatccagatgtcgatgttgttgggcgtgccatactgctccatcagtttcctcgccaatttcaggttcctcagcaccgtgcccagctggcccacagtttcaggctgcgggagcccacagaagcgcctccaggcattgtatcctgggaggccgtggtccccgctgcgctgcatgttcagagcaggcaggtccagcccaatcctcatgacctgctcaaacaatcgctcccggatctcatccactgcaatttggttctgacgattcagcttggcaggggtggccatgaggccccggaggatggggtcaatgccaccttccagcacgaccctccaggaggcaaaaatagaccctgctgagggggacacgggggttgggttccatgggctggtaccgattgtccaggcggaacatgaagggttggatgagggtgtggccgtagcggaaggcattggtgaagacgttggcgatgcgtgggtccactgagtcattgtaggaacggtacgtgggcatgtacttcctcatagccgcgggggtactacatcagagcta

SEQ ID NO: 373040 - DNA, 658 bp, Homo Sapiens
cttccgtttctagcccggttgcgctgttgagcaacatcaccatccgccagcgagatcaacgctgctcgcgggcttcgtgtacgccagcatggtgtacggcagcgaggagccccttgccaggaacctgcgcaacatgtccaaccagctggggctgctggccgtcaaccagcgcttccaagacaacggccgggccctgctgccctttgacaacctgcacgatgacccctgtctcctcaccaaccgctcagcgcgcatcccctgcttcctggcaggggacacccgttccagtgagatgcccgagctcacctccatgcacaccctcttacttcgggagcacaaccggctggccacagagctcaagagcctgaaccctaggtgggatggggagaggctctaccaggaagcccggaagatcgtgggggccatggtccagatcatcacttaccgggactacctgcccctggtgctggggccaacggccatgaggaagtacctgcccacgtaccgttcctacaatgactcagtggacccacgcatcgccaacgtcttcaccaatgccttccgctacggccacaccctcatccaacccttcatgttccgcctggacaaaaggtaccagcccatggaacccaacccccgtgtcccctcacagctgcat

SEQ ID NO: 373041 - DNA, 636 bp, Homo Sapiens
atgtagtaccccgcgacctatgcagtgagatacaggaggaggagcctagggaagaagtcagggacagggaccaggataccactctgtcactgtggtcccctcagcaagtcactaacccttggctcatttttcctgtcttgtgaaagaggacaataattcctacttctcaagattgttttcaagataaaataacattagcattgtacaatgatgcaaatgcctcattaccattattccttaagttgttttccagctctaatgttgtttccaacattacatttaagaccttaggattctgtttcttgcttttgttcatatctcttcccaagtgtcatcactatatggatgttgagggcccccgatgacagtccctttggtaaggtcctcttttgaggaggggagggtacagggtggactcatctcagtgtgaacttggcaagtcactgtccctctctgatcttgtttcctcatctggagaaggagtgagagaggagaaaggaagaaaccagtcaggcaggcagtaagggtgggtactcggtagaattcttttaaacaaaagaacagcctgaaaaatcaagctgcaggcacagatatgggaacttgcacaggggggcttgcctaagacatgcccacagc

SEQ ID NO: 373042 - DNA, 237 bp, Homo Sapiens
cgcttagatgatcatctaaagacaatcacttaccttttgctttatccaaatatcaaaaggtcagtggctcaatttactgctccttagacaaactttttttcattgatttagaaaggagaagagcaaaaagagtaaaacactaatcagcttgagagaaaggttaaagccattcttttttatatccattctgcgtagtgatccataaaaaataattaggacaaggatctaatcggaaag

SEQ ID NO: 373043 - DNA, 246 bp, Homo Sapiens
ggatggttatgggcttgtagaactcatggctggccatacttaccttataactgaactggaaggtgttcgtggggttgtccttatctcccagtgacacaaccgtcaccaatattgcactctactgtcatctaactgggaaattgtaaaagcttgccataagcgacaaagtgggcatcttagtggttctatccatggctatattttcccacaggagctacagtcagtacggagtacaagttgaagacg

SEQ ID NO: 373044 - DNA, 207 bp, Homo Sapiens
  misc_feature (104)..(104): n is a, c, g, or t
cacacacacagacgcatctatgtacatacatacagaccatacagacatgcctaattccagcaatttaccttcttgggtctttttcttcgtctgactactgccanttgaacttctctccactgtcgcttttctgagctgcatcttcgttcatcattttgaacagttggagaagaaaatagctctgccattaaacatctaatcggaaag

SEQ ID NO: 373045 - DNA, 382 bp, Homo Sapiens
acttccgattagatccctaggagcctgatttactcagtgctgttatgtttgtagacgttatatttcgctgttaaaggacctttgaaaactttcctccttttgggattgtcccactatctgatttttcagcctccatttctcccagtcatttctgtcctgctcagttttgtttgtttccgagtatgtttgtatttttcagttttctcagcatgtatatctcagttctggaaagtcataggaggttggagagggatttcctatttcactgatttccaagttccagacttcccagcattctgtgacttctcccaggtgtgcacactaattttcttgcactcactttcatcattggaggcagtgaagattttgcccagggtcccct

SEQ ID NO: 373046 - DNA, 531 bp, Homo Sapiens
cctctaccaagtcccaagaatcccagccaccaagaatcacgtaaaccatccactgtctcacttaggcaccagtcagaatgtaggggacccacccctagtcatccatcatcttatcaacaggacggggcttgtagccacatttatcaggtagggaaactgaagcctagagatattaaagcacttgcttaaggacacacggttggtcaggatggaaggcgatgtctcctgactccctgacaggcacaagagacaagcgagaggtgcccgtgacggcatgctcaagaacgtgcagccctgggccagccaggcccctgctccgtgcctctgtttgcccatctgtaaaaggtgaggttggatcgagggtccctgagggccgcccactggatggctgtgcagagccaaacggagaaggccccagggttcctttcacccgacacagcaagcacttccccctgaagtgcaggctccaggccccagctgacctcccctctcccagaccagcggctctcaccccacttggtagagttgtca

SEQ ID NO: 373047 - DNA, 346 bp, Homo Sapiens
gcccgctcaccgacggggtgacagggctgtgcccccattttcaggaagatgggaccccggaggaggcggcagcttgtggaggggcttactgaggctcaggtggctgcactgcatgtgtcaagccagggtagggcttcagggagcagcagagcagggaggagctcacacctcacacagcaggcagaggtgcccactgtacagcaggcagcctgggaggagagacctccgtgtgcagcctcctgaatgtccctggctattcagtgggctgtcttatctttttaaacctttctgagctcttaggccagtgccacaggcagaataaagctgcccaccccgtcgggtggag

SEQ ID NO: 373048 - DNA, 258 bp, Homo Sapiens
ctccacccgacggggtgctgacactgcctcctgtggatgggctgccagggcgtcctccatgcccccctggggctgaaagtggacctcagacaaagttctgttcagagatttctttgattgtgtctccaaggcgaatatcagtccagctcgacagccatcagcccacacagagcatctcacagcctccaccacctccatcccttctgtggtctgctgggcaaggacagcctggtccatctcgccctgagttaagatcct

SEQ ID NO: 373049 - DNA, 302 bp, Homo Sapiens
ccccgctctcccgacgggtggggtagggattgggtgaagcctgagttaggatttcaaatttaagagtataatgtaccacaacaaaaataaatgtcagaaacaaaggagtgcatactgtatgactctaattatgtaaactttttatagagcaggcaaaactaatctagtaaagacaaaaagcagatcagtagtggagtggggtgagctacctaacaaagaacacaaagcaacatataaaaatgttctggccaggcacggtggctcatgcctataatcccagcactttgcaccccgtcgatgga

SEQ ID NO: 373050 - DNA, 188 bp, Homo Sapiens
aaattccgtctcagaaaaaaataatgcctttgtctcctatggttgcttgcttgattgagttagataatccacatgaaggggttagcagagaaactaacaattagtacttgataaacattagctgttgtgattattgtattcatacttgcagggcctcacctgtcccttcaaccccacgccgtcgggta

SEQ ID NO: 373051 - DNA, 270 bp, Homo Sapiens
tccaaatactaaatttaactaacactccaaagctcgctcagtagggttccagtaagtggggattctcatcttacttagaaagatgaagtctgttggaaggcacaccacatgcctgtaagaacccaagaaagggctggcaaatgtggaccacttcttggacttcatctagatctagtggggagaggtccccagcttgtgggcagtggagagtcttccagaagcccttgaatccttacctgccacccctcggtaagcgggccgagctgatta

SEQ ID NO: 373052 - DNA, 452 bp, Homo Sapiens
gaggatccccgctccacccgacggggtgggagtggggctgccatgccctgtgagtaggagaagggcgagtgatggggtgatgggcagagccaaagtggaaagggagaggagctgaaagttgggcttggacagcttttgttactggatcagaaaaagagaaggaacgcctcacttttggcgtttctcaatttaatcaccatttcactccataaaggtatttttttgtgtccatataggtaggaaaattctcaggggtaccttcttgagaatttgatgaacagagattcccctattctcatgttatgttgagtatcatttaacatttcaaaaaattcacagctgtcttatttttttaaaatcttacttatgtagctcagttaatcttaactatcatatttattatcttacccccagagcaaaagcacccatatctgccaccccgtcgggtggag

SEQ ID NO: 373053 - DNA, 175 bp, Homo Sapiens
ccacagcgtggcagctcgtggcccacgaggggttctccccagaagagacaggaagggcccaccgtgtttcccacagcaatgtcctcatgcacgctgaggcacacatcttaacgtggatgctgttagtattcagtacactgcgtctaaaatgcacgtgtgtgcaaatggcgtgtct

SEQ ID NO: 373054 - DNA, 545 bp, Homo Sapiens
  misc_feature (41)..(41): n is a, c, g, or t
  misc_feature (167)..(167): n is a, c, g, or t
gtggcagcttacctagatgtactagtactcacagtccacangcaagacaggctgtgtggtgtacccacgcctgtacaggctttacacatacacaggttctctggaaagaaactgcagcaactggccatgacggtggcctctgtgggaagggaggctgggggttagangaaagatgccactgaatcacccacagggtttgaagttcaaacatgtgcaggtatggctttgaacagttttcacacatctattcataggtgaaattaactggaaggaaactagcaaagcatttgcctttggggtcagcacaggagcagaggcccaggcagggccttgctttgacacacagatgatgggtcacacagttgtcaccttgacagaagagtaacagggacagcacaccagtcactctaggagctgaggccagaggaactcaggtatttccttctagaggtagtaagtccaccgaggcagatgccaagccgggtggtgcctcgctgtgtacaactgttctgctccctgtcccctatgataccctatgattaggc

SEQ ID NO: 373055 - DNA, 240 bp, Homo Sapiens
acggcgctctatattcctccacacttgcccaggactctacgctgctataaagacatcagcagcccccgtagctcacagggtgctgcttcgagccatgccagcccgctgctgatgtgacacagctagcaattactgagttcttcccacgggccagacactggttctatctacttagcacagagaggcctagtcacttgcctggggtcacatagctagaaagtagcagtccaaccttgaacc

SEQ ID NO: 373056 - DNA, 314 bp, Homo Sapiens
tgggtgttaccgtatttatacactgcattcagccaagtataaggcctgcgtaggaccagcctacaggatactaatgaagcatggaatctggaacctatgacagaacaattctgagacagggagtcacgtaccagagggtgatcatgggctggttagggtcaagtggctcctgcagctagtcagtactggaactgatttttacttgttgtcttttctatcgggaccacgaacttctcctctggaaatgaaaaggacatcaacccaaatgcgtattggtgccctaagctacacttgcaggcttttaaggcgtcacg

SEQ ID NO: 373057 - DNA, 445 bp, Homo Sapiens
tccccgtactgtgtgtaccgtatttatacactgcattcagccaagtataaggcctgcgttagaccagcctacaggatactaatgaagcatggaatctggtacctatgacagaacaattctgagacagggagtcacgtaccagagggtgatcatgggctggttagggtcaagtggtcctgcagctagtcagtactggaactgatttttacttgttgtcttttctattggaccacgacttctctctggaatgaaaggaatcaacccaatgctattgtgcctaagtaattgaggttttagggtcagaaactcaaatattaccgcaggagaactaaaaccacatgggagctctcaaacaaggttgcaactctcacatctgggcagttagtcaagcaaaacagtgaagtggtaaaatgaaatactcattacacggtacaccacatacggg

SEQ ID NO: 373058 - DNA, 296 bp, Homo Sapiens
ttgtactaacagaaccccaaataaaacccatttatgtcaccacacattctttaagcacctggtaataaaacctattcggaaatactcagacgtgttggttgagtggataaaatccccttgccacatggccaagcaggttcctcgccgtcagcagtataatttacagtgtttcactgaggccttaagcacccatgatttgattctccctaattttccgattcctaaaaccctttagaatctccctccacccacacaatgtggcagtgagaaaaaccacaattcaactgtacatgtca

SEQ ID NO: 373059 - DNA, 230 bp, Homo Sapiens
ttgtgttaccgtgacctataggttatgctacaccacagccagagcaatgttgggatcctgagccgtgtctgcaagctatataccacagctcacggcaacgcgggatcgttaacccactgagcgagcccagggattgaatctgcatcctcatggctcctagtcggattcatttccgatgctccacgacaggaactccctctttaagggtttatggtaacaccaacagtacg

SEQ ID NO: 373060 - DNA, 374 bp, Homo Sapiens
ggtctttagctgttgattgatagcagcataggaccaacgtgtgatggtgaattttagccacaggaaaggctgctggcattttctaagtaggctggcatttctgcacagtccattaaaggatgttcctagggactgagggtttgccttacttttggattctgagcctgccaaatgtcatcgtctactcttacagcctctcttaatggtgccctgtacatgcttacagatccaacatgggcacacaatcatttccgttgcgcatcgcctatccacggtcagagctgcagacgtcattattggtttcgaacacggtacagtagtggaaagagcacccatgaagaactattggaaaggaaagacggtacaccacagta

SEQ ID NO: 373061 - DNA, 218 bp, Homo Sapiens
  misc_feature (108)..(170): n is a, c, g, or t
gtgtgtaacttccaagcaataccttggtgtcatgttactgctgtcagatgtattgttccttacataggaaatcaatgccaagatgcaactagagattctcatactaannnnnnnnnnnnnnnnnnnnnnnnnnnnnnnnnnnnnnnnnnnnnnnnnnnnnnnnnnnnnnncatatggcacaaattaaatctacccttacaaaacagaccccacaggac

SEQ ID NO: 373062 - DNA, 242 bp, Homo Sapiens
cagaaataaaagcgaggacatcaccatgtatcatacagataataaaagtattttagaagaatgttatatcaattaagatgagacgaagaaattaaatgaaagcaaaaaatcactaaaactgactgaaaaggaaattaaaggagagttccctgatggcctactggttatgacttagcactttcactgctgcggcccagattcaattcctgtctgggacctgagatcctacatcaagctgtggc

SEQ ID NO: 373063 - DNA, 227 bp, Homo Sapiens
  misc_feature (24)..(25): n is a, c, g, or t
  misc_feature (88)..(88): n is a, c, g, or t
ccgtgccctgagtgttaatagttnnggagatcccatatccctgtattatgtgtcgtgtcttgtcaagtgtctattatctagagtagcnttgaggttatatgaaaaatgttaaatctcaagacatcatgtgtgatttatgatgattgttttcttctccatttaactagattctgaagggaactgaaaaggaatccatcatcatatcaccctcacggtaacaccacgta

SEQ ID NO: 373064 - DNA, 266 bp, Homo Sapiens
ggtacgtcagccactgccgctgtttagctctgatgaggtaaaagcaacttaactttgtctatctaattctcctgagtcatgaaagaaatttactttcagctctggatccacatgagggtatttgacgaggaagtttgtctgccctctgcttctgttgtaccttgtgtgaggcaatgacaacatcccatctttgcattctgtctaaatatcatattcatggaaatagaaacataacttccacaaacaagccctttccatcttactgg

SEQ ID NO: 373065 - DNA, 201 bp, Homo Sapiens
tccccatccgttccataccgcctatcgcacgcttctcttcctacagctccaattcaggttgtacacataatgccatcattttctgctgatgtatcatgtccgtagtgcttggaatacggttctcttgaagatatagagccacccactgcagcagcaaatggccctccccagggcactgtgaaatgtaagtaccacggtaac

SEQ ID NO: 373066 - DNA, 231 bp, Homo Sapiens
actctagaacgaaggatatagatctgccttctgcatgtcagcagtcagagtccgggactgtttccaccttgctagtttttgcaaccttgctgacctcagctgcatgaagagataacttggaggtcctcacctaggcgggtggtccctggaggagttatacccctttcatgtaaatgcagatggtccagatatcctgatatacaggagattagatcagtgattcaaataaga

SEQ ID NO: 373067 - DNA, 257 bp, Homo Sapiens
atgcacatattaggaacaaccttacattagaaacagctgtcttggaagatgcagattcaatgaaagtttttgccttgtaaaatggatagcctttttaaaaatgtgaaaatttaaacaaaaacatgttttcattagattcagaccatgaatcccttcttaagaaagtagttttggtgtaatggagtcaatcagcaatgccagaagaaaacaaaaaacccccaaacctcctcataccgcttactgtgatttgtgacggt

SEQ ID NO: 373068 - DNA, 285 bp, Homo Sapiens
tcctgtactgtggtgtacgtctttctacaaccacttaaatgcagtatttgggaagggcaacaattaactgtatagtaccatccgttagttttaaagtgcttcgttttctgttcctgtgatccctcgaggaccactgagccctcagtttatttctgggtctggctttcttttttgttttcttatgggtggggcggtgggtgagtgtcgagactatgacctgagagcagactgtcgtcagattagtttaggtggacattgctacagggacatgatgttgagaaattc

SEQ ID NO: 373069 - DNA, 264 bp, Homo Sapiens
tgtcagcatcgctaatgtggtgtaccgtagagccaagctgattgaaagggcacaggcagagatagctgagagctcagtgtttccaaatggtataaataccaaggatatgtatcctcttacccttcttagacccacaaattaacctcggtacttcaaccaaagagtgagatcacgattatcacgatgatttccacaattaagacttaactgccacttacaagctaacgaaaacatcatttttacccagcacacatacaaacgaat

SEQ ID NO: 373070 - DNA, 291 bp, Homo Sapiens
gctagaggatcccgtactgtggtgtaccgtcccaccagagtgggatagtgactagctagagtcacatcactttgacagcagatgaaggaccacattctagttttctggtgccaaatcctatgccctttcttccttagtggaagaggagctggctggaagcctttttggtcctccttttcaaaccatacctttcacacgtggggaacaaaaagtgaactttagaccaacacaggcaaaacactagccacttcttttttcctacaccccaatactttcagtggcaagcgctaa

SEQ ID NO: 373071 - DNA, 243 bp, Homo Sapiens
  misc_feature (42)..(42): n is a, c, g, or t
tacgaagttcgagctcccggtacccactgtggggtgttaccngtgagtccgtcacaatctattagatattcaggatacaaatattattaagatactgacctgccaataaggtctttatccaacatgttaagtggactcacatgaaattgacctttaggttaaaatactttatgggagttccggtcgtggctcagtggtaacaatccgactaggacggtacaccacgtacgggatcctctaggt

SEQ ID NO: 373072 - DNA, 158 bp, Homo Sapiens
ctttcagggctgcactcgtggcatatggaggttcccaggctaggggtgcaatcagaactgtaaccaccggcctacaccacaaccacagcaatgtggcatctgaaccgtgtctgcgacctacacacacagctcacagtaacggtacaccacagttataa

SEQ ID NO: 373073 - DNA, 378 bp, Homo Sapiens
ctggggtaccgtctgtggttagtggaagctttcagaaattgatgaattgggtgtggagatttatgataagcaaaaatggattgcatttattttaaaaaacatcagtcacagaactcttctgaaatcagatcataatggtttggtcactctctcttttgtgtaaatttatctctctctgattcgggaatttcagtccaccttctattaaattaacctgtgaggaccatctagcataaccagaatggatccccctgtatgatttagaaccttttggaaagtaaccttgggatttcccgtcatggtgcagcagaaacgaatccaactaggaaccatgaggttgtgggtttgatccctggcctcactcagtgggttaaggat

SEQ ID NO: 373074 - DNA, 244 bp, Homo Sapiens
tagaggaccctgatactgtggtgtacccgtcatggaatcaagtgaattcaatcacgctgcatggattccacttcattcactcgggatgcaattcacaacgctgcatcggatccagtgcattcaatcatgcttcatggaatccactgcattcaatcgggatctattgggccaagctgcatgaaatccattgcagtcactctggatgcatttcacactgctgaatggactccagtgcattcactca

SEQ ID NO: 373075 - DNA, 213 bp, Homo Sapiens
gggtcattacacattgtggccaggccatagatggcccacgggtgagatttttgtttggctgttttgtgaggtctgcacagtgttttaaaaggcaggttggggttcctgtcatggctcagcggttaatgaatctgactagcatccatgaggatgcaggttcaatccctggcctcgctcagtgggttaagaatccggcattgctgtgagctgtgg

SEQ ID NO: 373076 - DNA, 385 bp, Homo Sapiens
aggatcccggaaaatagccgacgaggtataattaggaatagtgtagtaggatagtatggtaatatatagtttttttcgggtgtgtgtttcttttgataggtgagattggctagctattagtataagggggaggagtcatgtggttagaactagtaggggtgctgatagtgagtcggagaagaatgttaaggaaaaattaaggctgttttcgcctagttggtttagtagggatagactgatcaggctaatgaggagactatgtactgttgcattgattcagattatgttgtgtttagatattcatgttatgggtagtagtattgttgttgggataataatttttagcattgtaagaggtttaagttttggacgtaatcggtaccgt

SEQ ID NO: 373077 - DNA, 279 bp, Homo Sapiens
cagatacaaaaacaacaacacgaaactccaaggacatgaaaaatcaagggactgtgacatcaccacaagatcacaataatcttttggtaacctaacccagagacatggaaatctgccatttacctgctaaagagttcaaaaaactcttttaaggaaactgagtgagctacaagaaaacacagacaattcaatgaaatcaggaaaacagttcacagtccaaatgagacattaacagatggaaatcacggtacccacagtacgggatcctctagatccccc

SEQ ID NO: 373078 - DNA, 178 bp, Homo Sapiens
taccttgcttatatattctagagattaagcccttgtcagttgcatcatttgaaactattttctcccattctgtaagctgtctttttgttttcttttgggtttcctttgctgtgcaaaagcttttcagtttgatgaggtcccatgggtttatttttgctctaatttctattgctttggg

SEQ ID NO: 373079 - DNA, 352 bp, Homo Sapiens
cagggtgagagaggattggatgtggctcctagattttcttactaataccccacaccaaggcagattctccactctggagactgaaggcctgttaggaaacactggacaggcagaaacaatatcactacttgtctttaggctctgagcaagaaggggacctcaccccaaagaaatgctcagcctaaggcatttgggggcccttagctcatctagagttgatgaaaaatgatgtgggtgggaatggggagaactgctccataacagttctttccataacagttttgattggagagtttagtccattaacattcaatgttagtattactattcttgcccggtacaccacgtacgc

SEQ ID NO: 373080 - DNA, 161 bp, Homo Sapiens
aggactccgtactgtggtgtaccggctgcagatataggaaaggacagtattacatggtagaagctctacaaacaggaactttgaatttacaaccaattaatagacacaacaaaaatgtttattcatcaggtgaataaacaaatatatatcccaccacagta

SEQ ID NO: 373081 - DNA, 182 bp, Homo Sapiens
taggtgtaatattaacacaggcttaaagcataggcagctcccccggtaatgaacacatatacacagtctttctctacaactctggctcacaggctcttttttgaaccattccatgtatatatactgtgggtcacgctgctggacagcaagaaattggcacaacattgtaaatcaactctaat

SEQ ID NO: 373082 - DNA, 291 bp, Homo Sapiens
ttgtggctgttaccgtgggagaaagtgggcattaccacagctcttcggaccagggtcgaggcagcgggacagttggtccactccgagtcagttcggacccaatactcagttggccgcgggagctggtcgattttatgtcagctcggacccggtaccgagtcgggcggggatagctcggggaccccaacagctccttcggacctgggtccgacataggccgtaagtgtgggtcgacccggcggcagttgcgacgcgaacaacgttgtcggcctgacgggtaaacacctacag

SEQ ID NO: 373083 - DNA, 159 bp, Homo Sapiens
cccagtcagtccccaagcagaggcagcagccaggccacaccaccgacccaggactggtcctcaggcatataaattgtgccgtatctttaacacagtgatgtatcacaagcattcgacaacatactcggggattaattagtacgtgtgtacgagagtaag

SEQ ID NO: 373084 - DNA, 254 bp, Homo Sapiens
tccgtgggtaggtgagaaactgaactagataacgtgctcagttcaaatcagagactattttaatatggttataggcaatataacgggcttcactcgtgtgctttcctatgccttagaaagtctgcacaggtttcccagaggtctgctctacgacactgtaaaaaggacaatagaaggactagatcagagctgtgaaaaacctccacgttcttaacgtttgcccgccacacagacggtattcaccacagtacggg

SEQ ID NO: 373085 - DNA, 229 bp, Homo Sapiens
gagggcagttcttaagggtattaagtcttcagtctattgaattttccagtgcaggtaacactgtacatagaacctctaatgaccctcgtaggttgcagatagcgcgactcagttttgctcagaaatgtatctttgtggtcagccgtgaatatttagagctctaaagttagattctggaagaacttgtcatagctcagtggtacaaacccaacccagtacggtacaccac

SEQ ID NO: 373086 - DNA, 164 bp, Homo Sapiens
ctatctaaatttacattcaagtggaaaaacacatcagctgtgttataataatttattgagtctctctcaggataggatatttatactgctgtggtgcacaaagacaaaatctcgggagattaacaccacagacatttagtttttgctataaatcagtgggaacg

SEQ ID NO: 373087 - DNA, 229 bp, Homo Sapiens
accccaaactcccagcccatcacggtagatgcaaactattacactgagaaaggataagcaatgaggtcctgctgtacagcacaggaaactatacccagtctcttgggatagaacatgatggaatacagtataaaaaaaggaatgtatatttacgtatgactgggtcactttgctatacagtagaaattctcccaacactgtaaatcaacacggtaacaccacagctacg

SEQ ID NO: 373088 - DNA, 206 bp, Homo Sapiens
cagctgctggcttgtgccacagccacagtagtgtgggatccaagccatgtctgtgacctatagcacagctcacagcaatgtcatatacttaacccgctgagcgaggccagagattgaacctgaatctttatgtttactagtcaggtttcattactgctgagcctcacagactcccacggtacaccacagtacggagatcctctagg

SEQ ID NO: 373089 - DNA, 247 bp, Homo Sapiens
tgtttccgtaggttctactacactaactgtaattcagataaaaatggttaagcataaggcgatagagtaaattacgagagttaagagcagggataggtgagtgcagcatctgggaacatagctgactctgttattgtcactgttaaagaagtcatctgttccctagtcccaggctttaaagaaaagtttgatggaagtaagccggaagagaggggagtcctggaatcacaggtacaccacagtatag

SEQ ID NO: 373090 - DNA, 258 bp, Homo Sapiens
gatctagacgatcgctatactgtggtgtaccgtcatccatttgtcgataaagattgtagaagacggaatggaacgatgggtgggaggttgggttcaactgacctctagagtcccttttacctctaggattattcaattctggactaccagggagctgggcacctcatgccagccagggcacatgcatgaggtggggaatgagcagtatcctatggaggctctctctcctgcccttgggggtcaatgaactctaccctc

SEQ ID NO: 373091 - DNA, 195 bp, Homo Sapiens
agcacagaggttaatacttaaaacagcacagagatttaggcctggcacctccatcagaataacactgatgcaaaatatttatactaactgaaaatcctggggcggtgaacattgattctgcctcaattcttctgaaatcctggttccaagaccgctcacctaccgccaataaagtgcaaaggagtaattagaaac

SEQ ID NO: 373092 - DNA, 186 bp, Homo Sapiens
cttctgtggtgtaccgtcaattgacttaagttcattcacgtacataacccagcaatagacactattggtcccacctaacagtctgtctctgcctgaggctccaagagacctgttaaagtacagttcgaggttgtcctcaatggctaaggacatcaacaaatatcctgaagttgaagagataattac

SEQ ID NO: 373093 - DNA, 259 bp, Homo Sapiens
tctgtggacctcaggacacctcagctatttaatacacttcgcatccttggtctccatcagggcccactctcagtctggaatgactaccctgaagacaaatatcatactgtgagtgttcataaaatgataagtattatcatcttcaaggcataacctgagccatgaagagcaggtagagctgagattggcaaatcagggagaacgctggcctcctgcccttccctgtgtactctgcacttgtcttgagactcaacaagtc

SEQ ID NO: 373094 - DNA, 267 bp, Homo Sapiens
ccctccttgctgtttgtgtccttgggggcatgttgctttgcttgttgccagtattactgttgtcactagcatcacagcttgggggctctgggaaggtggcacctccactgcttccaggtttgcctgagtcatgagctctaagccgcaagagagcatagaaggtggcaagggagtagacgctctgggtgcctcttccacataaggggttatgttaagtgtaagtcgtccacctttgttctttttcaagatcattactgttgagccaca

SEQ ID NO: 373095 - DNA, 166 bp, Homo Sapiens
gagatcccatcgtgtctcagtggttaacaaatccgactaggaaccatgaggttgcaggtttgatccctggctttgctcagtgggttaaggatctggcattggcgtgagctgtggtgtaggtcgcagatgcggttcagatcctgcgttgctgtgcctctggcgtagg

SEQ ID NO: 373096 - DNA, 199 bp, Homo Sapiens
ccctattccatggctagatcagaaataggttgagccctgtgtcaagggtcctcattaggtatcaaaaggtagcagccgtccatcttaccaagttatatcttctgtttacgggggactgctaaacaggttcaagtggaataaactgggacagcctcaaaaagtgttgatgtggcctgcatgtgccaaacaacgtcctttt

SEQ ID NO: 373097 - DNA, 228 bp, Homo Sapiens
  misc_feature (52)..(115): n is a, c, g, or t
  misc_feature (212)..(212): n is a, c, g, or t
cctttggtgcccagaattgccacatttgggctccatctcttcttcccaccannnnnnnnnnnnnnnnnnnnnnnnnnnnnnnnnnnnnnnnnnnnnnnnnnnnnnnnnnnnnnnnagcttcacgtgatgttccgtcacagcttgagtcttagcactgtaggcacaggccccacaactgccacgtgtatcctgatgactacagtcctaacgtnacaccacagtagtatc

SEQ ID NO: 373098 - DNA, 204 bp, Homo Sapiens
gtggtgtaccgtaagactctgaaagttgataatgtatccctcccaatccctgtatcacatttcttatgtcatacagcatttgcaagtacaataatgttgaggatttggggcaagaacaggtgttatgtccagttcctgacattaataaaatgctgctaatgttaccctattaagtatgatgattgctatacatttaaaaaacac

SEQ ID NO: 373099 - DNA, 245 bp, Homo Sapiens
cctacaccacagctcatggcaaggcgggatccttaacctactgaataaggcctaggaaaaaacccgccacctcgtggttcgtcagtcggatgtcgtttccagctgcgtcaggacgggaattttatgttccaactgtacaagcaaggggatcaagttatatacattacatttttttcccccaccctttgtgtctgttgcaacagtgagtatcatagacatagttcacggaacaccacagtagcggt

SEQ ID NO: 373100 - DNA, 173 bp, Homo Sapiens
cgctatctgtggtgtaccgtggctgtggaggttaggttgatcctcagcctggtgcagtgggtttaaaggatcctgtcttaccacagctgcaggagtagatcacagccgtgggtttgccaggtcccaggaacttctatatagtctaggggtaacaaacaaacaaacaaacaaac

SEQ ID NO: 373101 - DNA, 271 bp, Homo Sapiens
gctagtgagccatgagttagcgaagttcgaggctgcggtacccgcgtacatgtgggtgttacgcgtcgccagttaaggtcgccgagcaagctcagactcatctggtgtaagttcaggccccacctagccttgtcagtcattggttcaccaccttcctacgcctgctggtccagctattcaccagccctcaagtatgtgttacactttgttgatctctacctacactgctccccctcaattaaaatgttcggccacggtaacacacacaaaa

SEQ ID NO: 373102 - DNA, 226 bp, Homo Sapiens
tgtggtgttaccgtgaccaggtgttattctcatgacatttacattcctgtggagaaacaggctataaataagtaaactaaacggtacatgatgaactaaggtcgtttgccagagagtgatggggacgggacaagccaccaaagtattggatgaccaggaaaggctgtttgaggaggtaatatctgagtgaagagctggatggtagttggttgtataaagatttggg

SEQ ID NO: 373103 - DNA, 185 bp, Homo Sapiens
ctgccattactcttctgccgtcatcatttcattaaaaaaagaatatttcaacaacaacaaaaagatatggtatccaaataaagggcggtggggactcttacccatgggtaagattattgctgtattgaccacaggtgttcctgatgctcttccatgcaagtagagtagttcagagtgaacggatc

SEQ ID NO: 373104 - DNA, 192 bp, Homo Sapiens
tactgtggtgtactgtctcctgtgttatcacacctatagtccatcaaggcaacacacttggagtcaggtaactgcctttacattattccccacaacacctcacatctccagcctttgttatgtgtcacctggctttgggtaagatggagaaaaagtaaggcgcattgcagaaaacccttggaagagggctcc

SEQ ID NO: 373105 - DNA, 276 bp, Homo Sapiens
gagggagagtgtcatgtggtagcaaatatatgctggatgctaaacaagggggtgttcgctctggagagagaaggctcagcggattggggacagtgtcaccttccatgtgcagggctggtacctgggagaggaatttgggctccgtttcaccgctccagagggaagaactgatgcttttagctactgtaatgatgatgatgctaatgaaaaatgtatcatctactcttttttgaggggaccgtgcccgtggcttacaaaagttcctgggccagggat

SEQ ID NO: 373106 - DNA, 215 bp, Homo Sapiens
  misc_feature (127)..(127): n is a, c, g, or t
accagtactcccatccaaaaattggaaaggtgatacatactaatgccagataaaatagactttaagataaaaattgtttataacttttttcttagggtcacaccaaaggcatacggaagttcccagngctaggagtcgaatatgaactgcagctgctggcctacgccacagccacagcagtggaggatccaagccacatctagacccacaccacg

SEQ ID NO: 373107 - DNA, 312 bp, Homo Sapiens
gagcttatactgtggtgtacgtaacgcagtattaaccaaacatttgaaagtatgattcctaatgaaacacactgcatacttaaaactgttagcatttactcaccgcactatgatgatatgtgttttcttgtggaagacacaagaatacttaaaatcaaattgttgtactactctcctgcggatcaaagatcactctgtaggattcaccctgaaggcataaaacactcctcaagtgctttcaatctcatccgtttgaattctgtattcaacaagcagccttaagtgacggtacacaccaccagtacggggtac

SEQ ID NO: 373108 - DNA, 195 bp, Homo Sapiens
ctagaggaccccccagccaatatgcgtccatctctgcagcgtcgagctggctcccgctctgatgtgacacaccatgctgtcaccgcacagctaccacaggtccctgctggagcagggagccgacctattggggagcaggtagtatcttctctacactattttttctcttttcacagcaaagcaccaagtaaaata

SEQ ID NO: 373109 - DNA, 213 bp, Homo Sapiens
ccagacaacatgtgcgatgcccacactaattggctgaggggccgataaagtgatctgattggttagaagaggttcgtggcatcactgaactataatgattgctgtgtgaaatcattttcctagggagaaaatttttaaaaattgaattcctacttgaccaagatctatcttgcaaactattcgcaaaaaagtactaatgtttttaacttaccc

SEQ ID NO: 373110 - DNA, 200 bp, Homo Sapiens
tcaggatcttcagcgtgagcaatcattcctctgtcagacagataagccctccttccaccccatggcagcagagctaagcaagggtctctctaaagacaacctgtctaagcaggaagactgtactctcactgcgttgctaccagcatgcacccttccttctgctttcagcatagcaacagccaggacattggcaaagaacc

SEQ ID NO: 373111 - DNA, 499 bp, Homo Sapiens
  misc_feature (16)..(16): n is a, c, g, or t
  misc_feature (24)..(24): n is a, c, g, or t
  misc_feature (49)..(49): n is a, c, g, or t
  misc_feature (67)..(67): n is a, c, g, or t
  misc_feature (73)..(73): n is a, c, g, or t
  misc_feature (99)..(99): n is a, c, g, or t
cgggttcaatttaganatggcccnccgtttcccaacgtccccccaaaangtttgcctccttcccccntcaaangggaacctcgaaaactccccaagtgnaggtcgtgagcttgcaccccgcccggctgtgtagatcgacctgtatagatacatgaagtgggggtgagggccaaggggcctattactgctgttgggaaatacttgccctctcgtagatccagccttaatgtttttctgacatcctagtaatagcagaccctgcacaaagtggatatcagacttaatactgtgaggagacaaaataatgagaatagttttaccaaagataatgaaatctcgcatcatgtctgcattttaccatagattggagtgcatccttaggaaactgaatgtaacaaaaacccaggacatttttggaaattgtatgctctctagcaactttgtgtgaatttttatacaaacactgttttatgagttatataaaatgttataaaaatag

SEQ ID NO: 373112 - DNA, 233 bp, Homo Sapiens
gaaggtctggaaatgtatcgagtagcgtcttcttttgataaagtaacggtctttggcacattcttaagtcagagaatataagatgaatagtgcaagtcattactgaaaaaacacagataaggggatgtgagcatggagcagtcatgttagcatgaggtctaagaagtgctgtgagagcttgggaacagacatggagaccaaccatgtggaggggctcaggaaggtgagaaccg

SEQ ID NO: 373113 - DNA, 323 bp, Homo Sapiens
gttgaagttagattgcctgctcttacgttacccagatgaacagagacctgaaaggagagaaacctgtaaaatagtgaagtgtgccacatgcttcctgctggtcttgatgttctgtgatatatctactaaaaggcaagcatagagatccttcggtggactcagcaccctcccctgcttctctgtgcttgtggttttcattttggctacaagcagaggtggcagccccactagatccctacctcctcatttgtccacccatccattcatcaatgtattcagtcattcaacatgtctcctaacttcaaccaagatcctctaaggtc

SEQ ID NO: 373114 - DNA, 243 bp, Homo Sapiens
tgtgctgtagtgatctagaggatcccggttgaagtagattctctctaaaaaagatttgttactatttctctcccaaagagactgtttaacacaatttttaggtacggaattacaacctgaaatcaagccttcatttccctctcaacttaattaccacttcctataagaacttgattatatgtctgagaaccgagatagtaaaatgaggagtctgactgaacaatcgagattactaccatggga

SEQ ID NO: 373115 - DNA, 638 bp, Homo Sapiens
tggggaatgcttgccttcctccagtaaatgaaggttttccctgataaagtgcagtttggctccttgttcctggtacctggtgttcaccccagacgacatggtgtgattggctgtggtggttcccttatgaccttggtcacacctgctcatctgtggggctgtcatgggcctggtgaggacctctacactgtacaaaagggcctgtagggacgtcgcaagagcagcagtggccgcaatctcctctcgggcagcaggtactgtctccacctgtgatgtctgcctctttagctttggtaggtaacatggaactaaggcttctaagaccatcagcatctgaagacttctgaatgattcgggagcatacgccaccacagtgacacagagcttaatggcttcactgatagaaaatgtcagatcttcgttcccatagcagatctctaatgacttgagagcgctactcaggtttgaccagctctaagatgtctactatgtcggtggtctctcactcctaggagctgcagcaagtcaaacagggcactgagctgacacacctttgctggccccataatggagcatcagggaattccaggagaggaactaccttcaacgggtacgggctcgaatcgaatcatgtctag

SEQ ID NO: 373116 - DNA, 223 bp, Homo Sapiens
caggagctgagaaaatagcgacgctatttgcagttcgtgattttcctgctcattacattccagacctgagcaatgacccgaaatatgactctttcctatggggaggtgtcctaacctgccaggcctgcctctccccaggacaagtacgccttggggacaattacaaagcaactgcagccttcaatctcttcatggttaaaaggaagaacaccacgccttcctc

SEQ ID NO: 373117 - DNA, 286 bp, Homo Sapiens
tactagtgaccaggagtggacagcatgcctcactctccctctacaagcacgggcggcttattacgggtgtacacttgtgattttctcccagccagcttcccagctggactagcctattttatggggaacacagtggacggtttgtgttagaagctccagtcacatccttcaatcccaaagcttattttccatggtgaattacacaggcagtgttttccaaaattgtcattgatcagtacaggcccagagagacactctgacaacccgtcgctattttcaggatccg

SEQ ID NO: 373118 - DNA, 233 bp, Homo Sapiens
aaggggtactagaggatccggaaaatagccgacgcatgggtgggaaagttattccttttcaaattcctttccctctggttgtaacgtgaagaaagaccctctccaggctggaatagccttcgcgctctgacgcgtgttagtctcctgctttgtaaccgagaggccagccccggggccacatcagctggaaagaaggaacacggccgtcggctacatttgcccgttcggtaaat

SEQ ID NO: 373119 - DNA, 171 bp, Homo Sapiens
atagcgacgctaacatagcaaagtaatgctggatcaagctaagttgcaagcctacactacagctcacagcaacactggatccttaacccaatgagcaaggccaagattgaaccagcaacctaatggataccagtcagcttcattaacaactgagccacgacaggcaactcc

SEQ ID NO: 373120 - DNA, 197 bp, Homo Sapiens
caatgatgtcttggttcaagtgaagaaacaggtgcagagagttgagtcctggccaaggtcatgccattagcaaggggttggaccgagagtcaaatgcagactaccgaagcatctgaacaagtcaaagatatggaggcttaatgggagctcagcacttgtggccctcagcatgaagggcaaggcgtcggctaactttt

SEQ ID NO: 373121 - DNA, 266 bp, Homo Sapiens
tgcctagcggatgcttataaattagcgacgcactctggggcgaacctgcaaaggatgcccttcgagtcggcgacagtccagaaagagccatgacaacaaaaaccccaagaaagcatctcagcctgcaccgaggaaggcgtccgggtcgagacggctgcccctcgctcggcaaaagagacagaccgaaggactccgcggattcggtcaagctctccaagcctagccacatcggacccgacccgtcggctcaattttcctgggtaccg

SEQ ID NO: 373122 - DNA, 199 bp, Homo Sapiens
cggaaaatctagccgtacgcaactaaagaaagaaaggaggtgatccattcaaattaggaaaattgagatatgaacaggggctactgtttggtgactatacttgcttgtcatatatcctgctttcctctctctcatctcaaagtgccagatcagtgccaccctcgcccacatgccctcgctatttcaggatcctctagac

SEQ ID NO: 373123 - DNA, 266 bp, Homo Sapiens
ttataaattagccgacgcctatctaagcatttctcaccagatcaacgctcgcttccaaaggctaacttcagaatgtgacccgaaaacacatacggactatggactaaaagaccggatgacacacgttcacagtacacgtgtaaagcttcatgtcaccgtatgttaaaaacacgaacctaaaagcagctcatagcaactcggacggtccgcccaaactcctcaggctgcaaagtgcttctcgaccgcgacccccgtcggataatttt

SEQ ID NO: 373124 - DNA, 230 bp, Homo Sapiens
ttagccgacggcaccacagcaggaactccctgttgtgataatttctgctgtacaacaaagtgattcagtttttactacagtggtgagcctttccagaaccaaaagagagttatttctacagcctctcttaagagttttactattaccttaataaattagagagtaatggcagagtcacactgttagcttacatgtgtattacttatatatattgcactttcgtcggctat

SEQ ID NO: 373125 - DNA, 275 bp, Homo Sapiens
  misc_feature (42)..(42): n is a, c, g, or t
catcggtaaatagcgacgcatatccctttcagcgtaagcccncgtctggcatatgggaggtgcaccaccctaatgcagcaagcttgttaaatatatggattcctgggtcctcccattggaaatactgattcagtagaatgggggtacggcctgggaatccgaatgtgaacaccccaggtagcctgggctttggtcatggagcagcagggcttctcaacgccctttccttcttcacctctagcctgtacccctcgcctcctacgtcgggtaatttt

SEQ ID NO: 373126 - DNA, 225 bp, Homo Sapiens
  misc_feature (70)..(70): n is a, c, g, or t
ctgtgctctagcggatcttaaaatagccgacgcaactgatgataactaacaggagatctaaaggctctgnctccaatttccacagatggcctttcccctttattgagaaggttctggttggagaaagccataatcggaccagaatatctttaatgggtaggctaaattataagccactggactttcccttcctccttccgtcgggctaaattttccggggtaccg

SEQ ID NO: 373127 - DNA, 379 bp, Homo Sapiens
  misc_feature (54)..(54): n is a, c, g, or t
tgttgacatcggtttaatagccgacgagatgtaagcaagtggtgtatatatttngagcaaatctgataggattttatgatggatggatttaggatataagagaaagacagaaccccgaaaaaacttcagagcctctggtctgagcaattagaagaatggaagtacttttcaccaaaattaagagcagtagattttagcaggaagtcaagaatttttatttgatacattttagtttgcaatatcaactagacagcctaatagaggaatataaatctagggctctaagaagtaaacatggaaatcgttgctacagagatggcatttactctaagagactggattggactgataacattgtgtgtgaaatgggaaggtggga

SEQ ID NO: 373128 - DNA, 306 bp, Homo Sapiens
gcgggtgtcaaggatccggaaaatagcgagcatgaccattagcaattaatttttctattactacatagatctttctgtgtttttaaaaactgtttttcagactttgagttaggctagtcttactctgcctgaaaccctgttttctactcataattctaataaaggttctagctgccatttctgatagtaacctacatcagaaataaaaaccacaaatcttaagataaatgcagtgtcaagtgtctgctctcctcccagcttacttgctcgacaccccgtcgctaatttttaagctccgtagtcact

SEQ ID NO: 373129 - DNA, 243 bp, Homo Sapiens
ggcacggagggacatctgagtcattgtgtcgttccccaagcacccagaggatgagttgagactcggatgtccatttatggagaatgagagtttatagcattggggttggcagtttacaaagggatgctggctcataaaaactctgatcattgtacaactataaatgtaataaaattcactgagtaataaaaaaaactctctgaacatgcacattagtcccgagttgaatgatccattcatctg

SEQ ID NO: 373130 - DNA, 156 bp, Homo Sapiens
attcgttgagcctcatcttacttccaaccagacatatgacttttcagcttcactgcactttccacatttccataaacaacccaggcccttttacaactccctgctttgctcctggttccaccacccagaataattttcaccctctccctcgcataa

SEQ ID NO: 373131 - DNA, 225 bp, Homo Sapiens
gatctagaggatcccggaaaatagccgacgcagggaggcaggaggcagccagaccctccttgttactatggcaagcacagacctaggggagaaaccagaacgcgctgctttcctgagcaaacacgcattggggctgagcttggtttcccggaggagagttgcactttctgcgaaagcagcttgcaaggaagctagattttggtgccattttcttgaacatggcgc

SEQ ID NO: 373132 - DNA, 319 bp, Homo Sapiens
tagaggagctgtagaaaatagcgacgcgtgttgtccttcgcaggagaaggctgatttggcatgaagaagccctgtttgcactggccttagcagccctcccatatccagctagggagctacgtatatagggcctatctccgacacggctcaaaacacgcatctaggagctgcattctgcaaacggaaactgtgcacggggaacacacctctgccccaatgcggcttgggtcaggattgcggcgccggcctagttctcccgtagccctatgccccccatagggccaaggaggggctggactgccgtcgcaaaattttccgg

SEQ ID NO: 373133 - DNA, 223 bp, Homo Sapiens
agctttaaatagcgacgcacaccaggctcattggtctacagctgctctcaacccatcatgtctttgttgatacagtttattcatattccttagtattttcttaagtctgaagtcccagagattatatagacacatttatggctctcgatagcactgccaactgttttctaaaagggtgtaaccgtgtcaaatgccactgggggaaaaatcgccacgcaaaacc

SEQ ID NO: 373134 - DNA, 376 bp, Homo Sapiens
agaggatgcgtgaaatagccgacggcactgagttgtacggttcctgctgtttttctggatgactcataccaattgtttatatcatggttaattaagagtagtcaaggccaccggatcaatactgtcacgagacactcttttggcgtaggtggagaggagacctgaccttgtgtgatttcccactaggttccaggcactgtgtcacataggcacacacgctaacatatttaattcccacatggaccctgagccaggtaccctcgtcttcctttcacacatgaatgatctcgtactacgagatgtaacagacacatagccactcaaacaaactcaggacccaaactcacattttcctcatccaaaagtcggctaattt

SEQ ID NO: 373135 - DNA, 256 bp, Homo Sapiens
gtgactctgacgagcttataaatagccgacgaatagatactagatatctcactatacttttgaattaatgcaggttaaacattagactttcatataagcttattctttcagcttcatgaatatgttagtttataatttttatcacatttgaaaaataattttccaggattaccacgttacacattatcatttccaacgacctccagttgtacatacatcaacgctgcttgaaagttgtcccagaatacactgatgc

SEQ ID NO: 373136 - DNA, 376 bp, Homo Sapiens
acgttggaaaatagccgacgaacactggcgtggttggattgaaggatggctaattaatcgttcccactcaagagtggcatctctggcttagggattggttgttggagggagtgggcctcacttggggaaatgtatcaaatggataagattcttggaattattaggattacagagaatctccatataaaccacagtggaaaccggagaaacctgtacagttggatagagtagaataactcctatgagggcggtaactgggctaattataatgactgaagtgctgagaggaagggtggaaaagtgaacaggtttcctaggtagtggatctcactggggtcggcgggcacctcttcagaacaataccgactacctcctc

SEQ ID NO: 373137 - DNA, 335 bp, Homo Sapiens
ccatcgtgggccccctaagtcttcccatctttgtctgaatcacccccatctctcactcacacctcacacaaggtgcccagagggctcacccttctgctgacatttatatggatggactcaaagctggttggtgtccaccttcagaggcagaatgaggctccaggggctgtgacctgcccagctcccttgcagctgctgttccctccatgctgaccctcgccaggccccacatggctggctcctttggatcagtcacgtgtccattcaagaccccacttgctaaagaggattttccagcctgtgagaccaaacagacctccgacggcttaaatttt

SEQ ID NO: 373138 - DNA, 257 bp, Homo Sapiens
gatcccgagttactgtggctgtggtataagccggcagctgtagctctaatttgacccctagcctgggattattgctcattgacaatctacctggtcacccaaagagctctgatggagatgtgcaatgaaattagtgttgtttttatgtctgctaacacataatccattctgaagcccatgcatcaaggagtaagttgactttcaagtcttactatttaagaattcaacataccatttgcgtcggctatttatacggc

SEQ ID NO: 373139 - DNA, 288 bp, Homo Sapiens
aaacatgtatttttaaatactgtatttcccgtgggcagatcagactctaaatgtttgtagtttgcttgttttgaaatttttctcccaaaaaaagatatccaaatgatggaatatttccagactagctaccaaaggtttatttcatctgctaagtgctcttaaaagaagagcagcaacagtgggaaagaagggttttacaggcagggagcagaaacggtagcatcagcctagtaaaataaatgtctttttctaagctaaatattacagcgacgtcggctatttcccagt

SEQ ID NO: 373140 - DNA, 261 bp, Homo Sapiens
gatccagcgttgccatgagctatgggaaaggtcacagacacggctcggatcccacactgctgtggctctggtgtaggccagccgtccctctcccgctcacaccatcagaaccagtttggggtggtcacgttacgtaatgatctaagcggaaccaccccgctgcccaagcaaggtcttcaaggcaatgtcaagagccatggaataagcatgggttttctttagcatttcttctattctatgacaagaaaattcaatactaca

SEQ ID NO: 373141 - DNA, 236 bp, Homo Sapiens
atctcagagcttagaaatagccgagcagcgtgtctgttacctccgtgtgggaagtgtgccggtgggtcaagcgcagaagttttcattctgacacttctttgatcctaagtcatggagtaatgtttggaaatttcatttatcttaattgggtcttcgtcttgcgggtggggaaaatgagttcgcattacatcagtgcttttcagcctgaccccgtcggctaagttttccgggtaccg

SEQ ID NO: 373142 - DNA, 198 bp, Homo Sapiens
gctccaattccactcctagcctgagaacttccatatgctgcaggttcagccctaaaaagacaaaaacataaaaattaagcattgaatcactaacaaattagatctaagtaactactccattgctggagaaggatcccagtggtgagttatataccagaacttgttttttataaagtcactatgcgtcgctagttttcc

SEQ ID NO: 373143 - DNA, 180 bp, Homo Sapiens
catagcgacgggttccagagtgttatggcacggattatcattctctaaattcttacaaacagaaagaacagtggggacaaagatgaggaaagcagaggagaaaggtaagaaataagagtaacatgacatttacagtcattttccccacaaagtctcttaaagtatttaaatctctaactg

SEQ ID NO: 373144 - DNA, 322 bp, Homo Sapiens
ccgacgcgtgtatgtgataatgtaaatatgtacacatagtttaaaaagaaaggtcttgattaatgggtcccttccctcagttctgtgagatacatgagtataaacacaacatatagaaaaaagtttttagacttttgaaagaaaagcagttacaaacagcaaatgttgtgacagtagcatggtgataacagctctttatttttattcaagagcacataggtttctgtcactaaaatacagtttaaaaaaaccttgtttatagtcttcatttgtggagaacctgagcatgagaggaaacctcatgtatattgcgtcgctatta

SEQ ID NO: 373145 - DNA, 171 bp, Homo Sapiens
atcataaattcccgtttggaggggcagagtggggcaaggccctgtcctccctttagctcagctgagaactgactaagatcggctttcacccgcggccgcaccgttagcactcaagtgtgcttggcgcaatttaccaagaggtttgggtaactccacaggcagactgtcaga

SEQ ID NO: 373146 - DNA, 307 bp, Homo Sapiens
cgacgggtccttacgtggttcacaacgggaactctgacaaagctgtgtttttgactagctattcctctctgggtcctgaacacaaacctttgatctgcagaggacattcttctggcggtgggtggtcgggtctatctgtctcagaaacatcaaactacagaccacgaaaactgggaagcagaggattagaataaacacctttccctccggatccggagccctgatagactcgccctcttcaacaaacagggctctgtccaaggcactgggggccactcatggagactagggcattctcaggccccca

SEQ ID NO: 373147 - DNA, 357 bp, Homo Sapiens
gccgacgctgatggaccctgatttatacaacatctctgcagtcaatccataactggcaataactaagaagtcaacaaaatgactgcgctcatgtggatgcatctacatgtattatcatggaacactttgactgtttattcagcatttactctaggccaggaattgtgataaataattacttatgtaatcatgtataatccttgcactattaccaagaaggagatagtatcgattattcatatataatgagtgagaactgaggcttacagagttcactagattatttgtctagagtcccccagctgggaaatggaggtgctaagattcttaacctgactgactacgtcggctaattca

SEQ ID NO: 373148 - DNA, 289 bp, Homo Sapiens
caccaagctcaaggcggaggaggggacgagatcgttagagggcttcttaaaggctggagtatttattctgtcagcttgtcagcagttaatgatagagctgaaaaaattctgtcatgaaaaacagtttgaaaagctgtttgaaaaatacataggctttaaagtcttagctgtcaccatgtcctgtctatgtgtagttcctaaacagccgtggcactaatgacggcggcacccaatcagaggcgctcgggtggttagttcgcctctggcaagtctctttctgctggagccc

SEQ ID NO: 373149 - DNA, 360 bp, Homo Sapiens
aggctggttaggatgtgctcgacagcttacctggctggctggagacatgcttcccacaggctaacatagtgcatacagtgaaggtggatggtggtgtctgttcatctcggaagagcccaggatcaaactatcactccctagtcaccctgtggtctctgccatgtttccacagatctctaaagttgcttaaccctgatttatgcagtgctgaacatctctttcagcgttagaactgaatattaccacctctgatgatttctcaaggaagcagtagatatgacagtaactgtcattgagatggtgaggcaaaggtgggggtgaggagtgtgggaagaaaattccatggtcctcactggctgg

SEQ ID NO: 373150 - DNA, 326 bp, Homo Sapiens
  misc_feature (65)..(159): n is a, c, g, or t
gtggttatatgtgcatgttatgtatgtatctgggggttgaatgtatgtattaaaagcgtgttgannnnnnnnnnnnnnnnnnnnnnnnnnnnnnnnnnnnnnnnnnnnnnnnnnnnnnnnnnnnnnnnnnnnnnnnnnnnnnnnnnnnnnnnnnnnnnntgaggggtggattctcctctcaaaatgaagctgatcatgaccctgaagtgaagtttcctccatactcttgtatgaggaactctccccccatgagatatctttcccttcagtcatgcttcagtataagaatgatgtaatacatcattacgacatgcgggatcctctag

SEQ ID NO: 373151 - DNA, 244 bp, Homo Sapiens
tagaaataaactctgaataaggagaatacctgagtctaccctcaaaatatttgacactagtgatgaactaatgaactgctattaactaaatctgtaaaatgtccaggtctataaagtcttgcctgagatgaagagaatgagatccaaattcagggagactgagacatccaaaaattggggggagaatatcagtttggaagtagagcccagtagaaacactctagaaatctgcattggagttctc

SEQ ID NO: 373152 - DNA, 437 bp, Homo Sapiens
taggatccccacttcaatatccacacaatactacaaagtaggtatctcccattgtatacatgggcaaagctgagccacacagaggtgaagtaacttatctcaagttgcgcacattgtggagaggtggaaagaaaggggacaatgtcagagagagaaaaatctctcaacttactgttagagatatgagagttggcaggggctagaaatccagttaactttggcttcttcattttataaatgagaaagctaagaccagaaagccttggtgcttggccacattgctagttcgtggtagagctgagactagacccaggtgtcctgacctcttttatagctcctcataagctctggaagcaatggctctagacaacaagaaaaagttgtctgcacttgaaagctgtgccaccaagaagaacgacgaaaaacacggaaaccaa

SEQ ID NO: 373153 - DNA, 255 bp, Homo Sapiens
gttaccgtatgtgtactgtttaaatgaacctctcctccagggatttagtctgttttgttcactgtttccccagctcctgctactgtggttggcacagtgtagacgctcgataaatctttgttgattggtcaatcgcatgactagagaaaaaggtctgcaaggatgataagttaaacatggcatgctgtggtgtgttgcatctgggaaatgggactgaggtaggatggggtcggcatgttttcttattactttata

SEQ ID NO: 373154 - DNA, 381 bp, Homo Sapiens
ctgaggtcgactctcgaggaccttagcaccattccgacctaacaaaactcgctgttctactactgcccagagggagcccttattctatttcgaaggaggctgctcagatttatgaatcgcaaataaaagccaattagatctataactaagtttactgtaattttgtcttttgacaaatatgtgattgtatttaatccttatatcagaactgcagacaagggtattgacagagccatctttacagatagagacacggaggcagagttgatcaggggcatgtcagaagccaccgatccgggcagcccgcgcgttcccctccctccgcaccgattaaaaagagaacagtcctcggaatggtgcataagtcctggaatcagctca

SEQ ID NO: 373155 - DNA, 447 bp, Homo Sapiens
actctccaggatcttatgcaccattccgaccccaggttcacggttccctcatggctgttattccagtgaaaggggaactctgtgcagctgaaggcagtggtggctgaccagcagaccccagggcgaggaagactcatcatccttctggaaggcactggggagccacaccccactgggccccctcacctgcacttgtgctttgggaaggtggccctacctgggtttacattgccagtctggagttccttcatgatgcctgtggtgtggctcccatatgctctgtcccctcagccgcctcgtgcctggcctggccccttctcgtcacttcaggtcattttctccaaaagtcccaggaaataggaaagaaaaacgactttgtatatttactctctgttgccttttgacccctcggaatggtgcatgagatcctgtagagtgacctcagca

SEQ ID NO: 373156 - DNA, 564 bp, Homo Sapiens
ccgaggattcatgcaccattccgatccaacaccaagtcatgtatggatagttacagcctttgcccaaagctgtctagagatcctctccctgtctccaagtctcatgcatttaaagtagtttctccctagttagcaatagctaacccttagcactgtgctagatactttaacctgcattatcttagtccttgtaacatcacaatgagaaagggactactcttgctcccatttgaaaatggggaaactgaacttgagagaggcaaacaggcttccttgaggccacacgtctagtaagtggtggacctgggatatggactcaaaacagtttagcttaagacccagaagccacagttgctcaccagctgcccctaacgagggtcctagaggagttcgggtcctagaggagttctggtcctagaagtcctctctctcagcagttgtgcagtcttctccaaagaagggcccctggagactttcaggagaagggaaaaggtggaaatgataaggcagcacaagcctaagaaataggttcagtcgacagaaaaggaagagatagctgagaaa

SEQ ID NO: 373157 - DNA, 498 bp, Homo Sapiens
caactgaacatagctcctgcacagagctcagggcattcctctcctctccttctgattaagtgatgtattgttagacatctacgaagtcactagtaaaacatgataacaattatttctttagccacaatgtgaaaggaaaggaagtcaaattctaatataaagacagtagctggtgccagaggatgggaaaaaggaacagggataaatcggaacgtttttctaacttgttgaaaggaatggaaggtctcaatagatgctatttagaggtcattaaatacaggattaacaaggaagacttaatgtccatctcaaatctttctgaagaagtacagtacctacagggccatttactatatttgcataattgtcaagtttgtatacacctgcttgctattatgttaattcatctttaggccataataagggaagaattttctatggtgccattaataaaaacacatgacacagcttcaggagacgacgaataaagaggggtcg

SEQ ID NO: 373158 - DNA, 443 bp, Homo Sapiens
atgcacccagggcacaaatggcctggagtggagacagcctctgtgaaggtagcaatagggctggggttcaaatagccccaaattacttcatgtccaagagcacggacttgagtgcctatggagcctacggcatcctctcctcccatagctcctccatcggaagggctgcaggtagtgcccattcagaagtcggcagttgacaggtctgtgccaggctgctggatgaggtcacttattgcaaaaaaccttattatctttcattggcaagcacctggctcccaatcttaaaaggaggatttgtgaggcaggcattcagacactgcacagattgggcagaaaaagtccggatggaaagaataagcaggacactgagataggaaagagaaaaggaggaacagtgaaccagtgcccaatcacagtcctgtttctacgagtgcgcctag

SEQ ID NO: 373159 - DNA, 533 bp, Homo Sapiens
ccaccattccgaaatgtccgccgggtaaaagcagacagatgtacttagtgtggtaccaccagaaaagtcatcctaccgacagtagtccgtgtctgataggtcttctattagcggttgaggaaatcatccctgctgctcgagttgcaatacaaacaatggaagtaagtgatttcacttctactgtggcttgcttcatgagattgtcatgggctgcggctgcaggacggcttgatcttgttgggagtagccagccaattaaagaaagtaattccctgtgtcctgctggaattcgaaacagactcagcagttcaggaagcaattgcagctctggaagtgaaggagaaccagtagccctgcatgcgggaatctgtgttcgacaacagtctgtatccaccaaagactcgctgattgcgggagaggctttgtctcttcttgttacgtgcctacagcttcggagccagcaactggcatctttctataacttgccctgtgttgctgatttcatcattgatattctgctcggaatggtgcat

SEQ ID NO: 373160 - DNA, 339 bp, Homo Sapiens
gaatttgtatgtaaaatgctcagcccagtgacttgaacatagtagatgttcgcttttattattgcctacataatcaagagttggtcattagaaggaaaagtgttatgagtgttgtgaaagaagtccacattatcattatgtaagcagattctagtgttaagaggtagtcttattgaaagggatatttatttccttggccatggatttcccttttcaaaggtgcacatatttattgcctgcatctctcaggcattctcaattccaaacatttcatggttcttattccttccttctataaagaattgaaaataacgatatttcaaccggggccgagctcga

SEQ ID NO: 373161 - DNA, 376 bp, Homo Sapiens
cctggcccgggtaaatatcgttatcatttattctagattgtatatagtgagtgatcatataacttatcacccaaaccagcacattgaagcagaaaggcgcaattaaatttataccagggcaacagaactaacaggcaaatgaagaggtatggtccctacatataatataaaggtcaaatggcttgttcaaagtaatgacagatgagtgccagagccaaagcacattgatattgtagcctaattagatgtcactcacagctttgctttccacagaactagttatatactttacatggctccttgcaatacgtaattctctttgcaaattagatcctaaaggcatttacggattctgagattatgagctgaaaattgc

SEQ ID NO: 373162 - DNA, 529 bp, Homo Sapiens
tatcagctcggaccgggtaaatatcgttatttgacacaggtctctgacagtacaggaatatttgtacagagacctgaagggagggagtcagctatgtaggcatatgggggaagttttgagactgagagacagcaaggacaaagactctgagacagaacatgctttgagggtgttctgggtgaaggaaggaggccagtgtgactttagcaaagtgacaaaagaaatagatgaggtcagagaagtggcagtggcggctgaggtggggccaaaagtaggacaggttatcacaatgcccttctaggccactgtaaggatgttgacattccaggtgagatgggaaggcattgagggactagcagaaaagtagcataacctggaatatgttttaacaccatcatatcaggcaagaagtggcttggacccagagtggattgtggatatattctgaaactagggaaaacaggattaaaaaagaaatggattcgatgtggtatgtgaaagtgaaaaataaaggataacgatatttacc

SEQ ID NO: 373163 - DNA, 580 bp, Homo Sapiens
ctacggggtcatcgcagccttcacctcccgatttacctcccacatccgggtcatcgagccgctcttcgtcttcctctacagctacatggcctacttgtcagccgagctcttccacctgtcaggcatcatggcgctcatagcctcaggagtggtgatgcgcccctatgtggaggccaacatctcccacaagtcccacaccagcatcaaatacttcctgaagatgtggagcagcgtcagcgagaccctcatcttcatcttcctcggcgtctccacggtggccggctcccaccactggaactggaccttcgtcatcagcaccctgctcttctgcctcatcgcccgcgtgctgggggtgctgggcctgacctggttcatcaacaagtaccgtatcgtgaagctgacccccaaggaccagttcatcatcgcctatgggggcctgcgaggggccatcgccttctctctgggctacctcctggacaagaagcacttccccatgtgtgacctgttcctcactgccatcatcactgtcatcttcttcaccgtctttgtgcagggcatgaccattcggcccctggtagac

SEQ ID NO: 373164 - DNA, 402 bp, Homo Sapiens
tatcacgtggtcactcagctagcagcacttctgtcaccgggcagtcctcggcggaccacacaacctaatgcgtcgaagcactgtgagcctccttgatacctaccaaaaatgtggactcaagcgtaagagcgaggagatcgagaacacaagcagcgtgcagatcatcgaggagcatccacccatgattcagaataatgcaagcggggccactgtcgccactgccaccacgtctactgccacctccaaaaacagcggctccaacagcgagggcgactatcagctggtgcagcatgaggtgctgtgctccatgaccaacacctacgaggtcttagagttcttgggccgagggacgtttgggcaagtggtcaagtgctcaacgaacatcagtgcggaccagctcga

SEQ ID NO: 373165 - DNA, 418 bp, Homo Sapiens
ggtgactctagaggaccctgtgtatctcattctgcaaggagtatggatatgggctctctccaggctctctctttcccgttccaccgctgaataccattggttactaggccttgggaagggtgaatctactaactgtaaagaacacgggtttccgaatcactgcattcagcttttcaggagaaaagccacgtgccactaatgagctctcactctggcttgttatgtgagaaacacatctctgtggtgttttaatcattctgcattttggggtctatttgttacaggagatagtgtgcactaatgaatacctcaaaatagagtgctgccataacttgaaacctacaaatatgtaccattggcttcagtgtccaggcagcagggaacactgaaaatagatgatgcagaatgagaatataca

SEQ ID NO: 373166 - DNA, 352 bp, Homo Sapiens
tgcaacatagatgaaccttgaaaacatcatgctaagtggaagaagccagtcacaaagaccacacacggtatgattccatttatatgatgtaagttatatctcaataacgctatttttaaaagactagtcatctttaattgggtaggctggggggaggagtagagtgaagggtacatactctctcgtcataaagttaatctaagggagccaataaacatgtttcccaagagggcactatacaggcaaaataagtgatggctcatattactgctgggtgacaaggagcatccttcttacatccacatatgcacagtcttgcattgcagaatgagataacggggatgcctctgag

SEQ ID NO: 373167 - DNA, 410 bp, Homo Sapiens
agagcgatcccctgttagtctcattctgcaagggctcatcaggtaatcttcctgaaaggctgagataactcccatggcttgccaggttctctctgattaaatataaactgcatgccctgccgtaacaggcctttctctcttataggtcttacttattttaggcttgctttaagttcctctttagagttagacaagcaatgggattgagattctctattggagactgggagataaggtggttttgatggacatgtaaagagaggagaatgtctgatagtgtgtattgtttgagtgggatggaagtcataaccggggatggaacttaggagaatgtctgatagtgtatattgcttgagtgggatggaagtcataatccgacggacggacaggttagcagaatgagattcaca

SEQ ID NO: 373168 - DNA, 439 bp, Homo Sapiens
gactctagagcagtcccctggttatctcattactgcaaaagatctgtgaattggctaagctgaaggactctaccataacctgattccatgagaagcaaactgtgaacccttttgaaaacatttgctgcactactcagagcagacgtagtgaccaggaattcaagaccaactttcaatgaagctggaagtgtgcctgtcttggcggatttagaaactggacagccccttcctatcttgaaaccacatttgatttgacagcgtagctaaaaggaaaaggacgaatagtaactgagttgagttttatgtgcacacggaacatataaacacagcttcaagataaagaactttgagtcagattttcacatgtcatgtgtgagaccatgcagcaaacaatagagagatgggatgggatagctgttgcagaatgagataacagggg

SEQ ID NO: 373169 - DNA, 342 bp, Homo Sapiens
agtacctaagatgattataaataaataatctgtaactgagaccatctgaaagaactgaaacagatgaaggatagcttcatagctcataaactacctttagtcaaatcaaaataaagtcaagtaagtatgtactgagttcctacacgcaataccacagaaaggacaggaacaaatggaactgaagaattacacagaaatacaagaagagcacatctaaacgtctgttactaagggactagatcaaatgcagtacaatggaatactatccaccaactaagataaatgaaccagattaatgtcaatatgaagagacctcaaaaaatacagtaagactaaggtaag

SEQ ID NO: 373170 - DNA, 264 bp, Homo Sapiens
tgatttaatcgattctgcaaccatgggcatggtcagcctcctcttaaaggggactggaattgataagcttacctaaggcataaaaggcacatagtctttgcaaagcaacagatgccttcaaatttttatagacaatattccacttggtacacatggtcaataatagagacagaagccaactagaatttgttagaagcctcagggaaaaaagctaagcctgtgaaaaacaaaattaatgccaattttaaatgcaaccctcaggct

SEQ ID NO: 373171 - DNA, 360 bp, Homo Sapiens
caaactatgctcttgctcagtactggaaaagctctctcagcaacgccaaaggccttttgcctctggggctgcccaccaggtccactgcctctgacacggtcaacatcaatacctgccccaggtctttcattgccctaggttcgggcagtccgtcagcggccgctttgaacccctcttcacagtctttctcagaaactcatttcatcactctccccatgggcttttgtttttcagttctttttagaattccttctgcttttcaaaacttgggactttttatcttcacgggaaatctaacgtgtaggtgaactatcttctttaaccctgaatgcatctcaggaaaagggtatcatgccacta

SEQ ID NO: 373172 - DNA, 311 bp, Homo Sapiens
agcacagaacttagaataccaagatctattacactggtcaagaaaactgaatcatcttgctagtttaactaaagtatctcctcccgaaccctcccccgtcccatatgaaagcatttaccaatttttgaaatatgcatgcagagtccaagaatatacatatatttcaaccatggtcattcctaactacctgtgcagtttaaaaccacaaagcctccttgaattaactccaaaaatctaaaatatatttcacatactattaatgctccaaaggaatttactttgacaatgaatgtaactttttaaaaggctat

SEQ ID NO: 373173 - DNA, 365 bp, Homo Sapiens
gatcaacagttacatttctgtcactgcatcaaataccaggttcataattccagtgtccacatagggctatgggaaaaaacaggaaaactctgaggcaattgccagtaaagaatgtaagcctaatcgcattccaccaagagttctcccaaagcccccctgcagccttgcactcgggagagcctcatttagcagtggagacacacaacagtggctgcctccattttgctccctgctttgaattgagcatgaattgtgccatgatggggtgcacagaaggtagggccgaagagcagaggcagaccacccagctgagcctgggacaaaagacagctctcaagacagtttgcagaatgagatatagcagg

SEQ ID NO: 373174 - DNA, 341 bp, Homo Sapiens
ggtcgctctagacgatcccctgattatctcattctgcaagtgtagcaattacaatttaatttattaaactgataagatttaggccacaatggttctataaacaaaaagatcatgaacagtaagttgttaatcctgaaacccccaagaaacaataaatgcttctacttgaattaaacttaaaatcattattgaatgtttcacaatcccatggtacacagagacagcaaattacacagatacagatctttccccttcttccgagtgggtgaaagataatttctgtgtgtttaaaatgtatggggaaaaaaggaaacatttagaaattaccttcttgtaataat

SEQ ID NO: 373175 - DNA, 353 bp, Homo Sapiens
atggcagaaaaaaagggctaacactgacccatacagagagattcctaaaacttctgcttgggtatagtgtctatcacctttgctcacattctattggccaaagccagccacatggcccaagcctgatatcaaaagacttgcagcaagcagggacataaagtcatctcccaagaaaaacagccaatgatagggaaaaaataataccacactggttctccttctacctttccaatagctccttgatcgcttccttcaccaggttgtcatgttcaacccacttcctaaatatcagtgtcctcaagagcttcttgctttgcatccattctttgagtactcatatccaatgcccataa

SEQ ID NO: 373176 - DNA, 314 bp, Homo Sapiens
atcttatgggtatcttgtgatgttctggactctaaaatgtcagagacatgtgaatgaaggagcgaaacgtggtgatcctcaaagcctgtaggagaagtgggagaggagagagtgggaggctgtcttcacgtttgcggcattgttctgtctccatctattgccaagggccagtagaggtcagaatattcttagcagattacttgacttctgattagtttgattaatcaatgatagaaactgttgtccatttgtcgatttgtaccgttgctcagtgaagttatcatagtaaagttatagtactgtatagttatgcg

SEQ ID NO: 373177 - DNA, 283 bp, Homo Sapiens
gggtgatcttatgggagttgacatcaaggccttactttgtatatgtaatatgagagctacttattatttaagggtatctgaccatcttgaaattcctgatgttactttctgaaggtccctgaactctcacaattggcctctttgcaactagattcaaagtcgttcacttagccatgtacacaactgccaaaatgactctgtgaattccatgctcaaagattttcgatggttccccactgcctagtcaatgatgtaggaattccctagtcaagcattcaagtcc

SEQ ID NO: 373178 - DNA, 230 bp, Homo Sapiens
ggagctcggtaccggtgtgtcatgaaacaattaacaagcccttggggtcccagagaatgtatgcatgaacaagaattttttttaaagtcttcttgcaaaaattacatagggaaaccaggatttgaaaaacccagtcaacagcttgctaccacagaagagacatttcatccagaataactggagttagatagctttggggatgcctccacaacatttgtttcatgacacac

SEQ ID NO: 373179 - DNA, 372 bp, Homo Sapiens
ggccggtgtgtcatgaaacagatgaaacatttgatcattcatgtctatggatcttttcagtagagattttctggttctgagttgagattggaagtgtgtctcatactgccttctacttcctacagccaacaacattgtaggcacacttgactatttggtgtttcacactgatttttcaaaagaattactgtaatttttgaaccttgtcacagaggagcaatggctttccattctgtaggggaatatagtaggaagtgtatatggcttgagggttgagggatgtgaaccccacatcagtacattgcactgtgtctgagctacagtgagtatataatgatatctgtttcatgacacaccgggccgagcactgac

SEQ ID NO: 373180 - DNA, 303 bp, Homo Sapiens
tcggtaccgggtgtcatgaaacaaaaatagagtcatggttatcctataattatccacaaagggcagaacttcccaaactgcacagatcaggaagcagcacatcctaactgcctactcgtgtcatttttcttgaagaatgccaaaacccagaaagattaattctaggtaacaggtatgaaacaagagtcttccaatagcattctgaattaagtagaaaaatgaaaatgaatactcattttaaacaatttttctttaacgtatgagtattaaatttgtacattgtttcatgacacaccggaccga

SEQ ID NO: 373181 - DNA, 372 bp, Homo Sapiens
ggtgtgtcatgaaacagatttaaaaatacaatgcaaagtcccaaagaaatgacagttacacatccattgttttgggcaatctctgggatggcttctaccctaccctttatgaacctacacagaaaatacagagtggactctgtctagtttccttaacattttagtaatttcagggagagtcttcctatcacaagtgtactcacacttgccttttaaattcaaaatactaccaattccttcttcctattataagaagcttagagtgaaatgaaaatattcttcatggcaccatctaataccaccattatccttttgttgtatttcctttcaatttttatacatctgtttcatgacacccggtaccgagctcga

SEQ ID NO: 373182 - DNA, 263 bp, Homo Sapiens
atcagctcggtcggtgtgtcatgaaacaaatatccaacaaatgagaataagtagataagtactgtcttttaaaaaagtgtacttaaccatttccccactctccttatcccctggtgtggtgacggctgtaacccactaactgctggtaactgcccttcagagaaatgcatcccaggtgctgaatctgtagagagtgtgcattattctctggccccttctccactacattctacattctgtttcatgacaacccggaccaggct

SEQ ID NO: 373183 - DNA, 462 bp, Homo Sapiens
tactctgtttgtaaaacaagtcttgtgtctacaaattgttcactggcatgtattaacgagatgataataaggcccctgatattcatatttgtatgaaagcattgaatatatttgcatttgtctatatctaataaatgtttatttttgcttgacactttatactagttacttaggtgagtgcttaaattgatttttcttttctggaaaattgaatcattttgaaaagcaaaatcttgcagttctggctgtaaaaaaattcttttgctctttttgatacatcagctgattctcattttgaaattttctatttgacttctctctgctgtctttgtgtgttctctctctccagcccccctctccccaaccctagttacacattctcttacacttggtattctctttttctcaggaatagtaaactacttattcatatatttgtttcatgacacccggaccgagccc

SEQ ID NO: 373184 - DNA, 526 bp, Homo Sapiens
cggtgtgtcatgaaacagatggtgtgcctgtgttcccataaaatttacaaaaacaggtgcacggcagtttgtcaatctagctctgttcggagtccctgctcggcccaaagcacagacttgatcatcctgattcaggtctgctgtaattgctcatcgggctgagtgcagaacagaacagccaatccaattcccaggctccaatctcccaatctctacaactgggaaatcttcatgttccctacgacctctactattaattgattctatactttcaattgatttctttcatcctcagcaggtttaaaattaatttcatagcatcctctcctcttaagaagcaaacgcacacactccacattctactggacttatttgtttcaaacacactactcaatattcctccctcaactcaagcttgaaacagcagtcaccttccactttttgctggttccccataaagttatcatctacaagactacaccatcacagtggatggcaccttccttccaccagaaccatctttcct

SEQ ID NO: 373185 - DNA, 200 bp, Homo Sapiens
gagatcgagctcggtccgggtgtcatgaaacaaatcactctccctccatttgagtcagaggcaagaaactgaatcaaactagagttctgaaataagctgactagcacagagctagagcacatgtttattaccattcagtaccccttatcaatatcccaccaatattctcagtctggagtgaaaaaatacctgctacaagc

SEQ ID NO: 373186 - DNA, 261 bp, Homo Sapiens
gccggaccgggtgtcatgaaacaaatagaggttgcaaatattgtcagattgtcaggctgtaagaaaggatgaaattcatttcccattgcatcatcttgtggcccatggatttcaagtgccttagccaaaatcatatagctagttagcagtagagccgagactcagaaaaaaacaaagtaaaacaggcagactgaaacaaaaagtcttctaattcccagtccacatgtaaatttgtttcatgacacccggtaccgagctcga

SEQ ID NO: 373187 - DNA, 378 bp, Homo Sapiens
tgaatcgggtgatagagggaggttcaagaatattaggcactgtaaataatccagaaattaatgacctatagaagattatgaagaggggctaatggaagacactatggatgggacggaggtgaggagggaagaggattgctttagacttgagtggaggctgtcttccacctctatattctccactgtttcccatttatcggaggaacaagtaacggctgattttaacttacatcgtcagatatgtctattgctagaaaaatttattcatccagaatacagtcactcccacctcatttttcagtgaatgtttgaagctgaccctcagaatgcagctatgaaaggctctttgagtgggcgtttcagatccacggacacaag

SEQ ID NO: 373188 - DNA, 296 bp, Homo Sapiens
atggttcatctcaaacgcaaacgaaaattaaaatgatcttaggcaatttagaaatggcaactgagatgagagctggagagaggcctttcatgggaaggtgagcaggggttacttagagttgttaaagggcaggggggtggcgggaggttcaatgcaattttcttactttcttgattccctaatactccagtcctttggacttcttggtcttaaggctatctgaatgaccctattagacaagtttcccatcttccactgatcttccttcaccgtctctctactatttctcaaccttg

SEQ ID NO: 373189 - DNA, 508 bp, Homo Sapiens
aggatacatgctgtgtcattccagttgaaaagattgttttccgatcttggagtgccgtacacgttctgcttctcgtagaaaagccgcaacagctcagaggtgacttcctgtcctttggaaatgcctgttccactggcttttcagtttcctgaaatagctcagtcctccagaggcgaggctcccagcatcctgaggcacgtgtccatggggaaggaggggcacgctgattttagttgcttttccaaaggcgccttctaaagccaggcctttatcgggccctgctggtggcttctccacggtgccctcatgtggacctcagactgggctttggagcctcctgtctcacacacccattttgtccttcccacacactcgttctctctcacttgttctttcacacttgtccgcactcattctcacagacttgttctcacacggtttcattctcacatttgttctcatggacacacattttcacacttgtcacccatgcttgagcttcacacgg

SEQ ID NO: 373190 - DNA, 485 bp, Homo Sapiens
aactggagtgtgccatgtgagccgttgagaacaagtctgtgagaatgagtgcggacaagtgtgaaagaacaagtgagagagaacgagtgtgtgggaaggacaaaatgggtgtgtgagacaggaggctccaaagcccagtctgaggtccacatgagggcaccgtggagaagccaccagcagggcccgataaaggcctggctttagaaggcgcctttggaaaagcaactaaaatcagcgtgcccctccttccccatggacacgtgcctcaggatgctgggagcctcgcctctggaggactgagctatttcaggaaactgaaaagccagtggaacaggcatttccaaaggacaggaagtcacctctgagctgttgcggcttttctacgagaagcagaacgtgtacggcactccaagatcggaaaacaatgtcaggtttcaactggaatgacacagatgtatccacttgtttcatgacacccggaccag

SEQ ID NO: 373191 - DNA, 386 bp, Homo Sapiens
taagtcagtgcggtccggtgtgtgcatgaaacagatctgtcatatttgaaaaggcctgcatagaatatagtgtgtatgaaaagtggtggctacagaatccttgtagttaaagctcagaaagttttgatagccagtggcacaaagggggccagatgtccacgggggtgattgtttaaagggatggtagggaaaatgtaaagtgaatgtgtagaatgaaggggtgcttatgaccagggtgaacttctaatttattgtgtaaatcaggatgctttgaagatgaaagttgtaacagacataaactgggactgcccacgcaaaccctacctatatataacattgccgacacacctcagaattatgggtaggcctggttggccttcatgatc

SEQ ID NO: 373192 - DNA, 387 bp, Homo Sapiens
gatgaggcagatctactggagtggagagtaacctggagcagatcgaggtggccaagctggatgggaccctccggaccaccctgctggccggtgacattgagcacccaagggcaatcgcactggatccccgggatgggatcctgttttggacagactgggatgccagcctgccccgcattgaggcagcctccatgagtggggctgggcgccgcaccgtgcaccgggagaccggctctgggggctggcccaacgggctcaccgtggactacctggagaagcgcatcctttggattgacgccaggtcagatgccatttactcagcccgttacgacggctctggccacatggaggtgcttcggggacaccgaagttcctgtcggcacccgg

SEQ ID NO: 373193 - DNA, 401 bp, Homo Sapiens
  misc_feature (379)..(379): n is a, c, g, or t
tggagcttcatgaggtgggggcaggcgcaggacacggtccggttgtagttgatgagacacaggtgggagcaggggccctggccaatttggcctcacagggattgggagccatgggtggcgggaggggtggtacactgcaggtcaaagggctgggtgttggtcctctgtaccacggtgacattgtggccggtccacttgttggccttagccagtgtgtttgttcgccagtcagtccagtagacctcccccccgtacagcgtcactgcaaacgggtgcgacaggaactcgtgtccccgaagcacctccatgtggccagagccgttcgtaacgggctgagtaaatgggcatctgacctgggcgtcaatccaaaggattgcgntttttccaggtagttccacggt

SEQ ID NO: 373194 - DNA, 339 bp, Homo Sapiens
gtactccaggtgatgggtggtgggtaggcctcgaacactacctgcagtgtccggctccgatgcagctcagcaaattgtagtgtgcccacctctcccaggagccgcacgtagccgctctcaaccacggtgatgttgatggccttttcatcctgatggtcattcacactctccgtcacattgcaggtgtaggtccccgagtcttctaactcggcactggggatgtgcaggatggagcggatgtggtaaggcatatccaagaggaagtcagtcaccggctccaccagccgcccactttctttgcgggggtatgtccactcacatctgggcacacattatgga

SEQ ID NO: 373195 - DNA, 363 bp, Homo Sapiens
  misc_feature (209)..(233): n is a, c, g, or t
cggtcagtcagtcagtcatcaacagacttccattgaaaagccaggcactgtgctagatgatggcctttaaaaagccagggccattggtgcatgcctgtagtcccagcaactcaggaggcctgagggaggaggttcgtttgaggctgcagtgagctatgattatgccatggcactcatgcctgggtaacagaatgagacccagtctcttnnnnnnnnnnnnnnnnnnnnnnnnnagccaagacccgtccctgccttcactgagttcatggcaaaggaagtaagtaagcaatgccacatttgttccaggtgtcatgacagagaagtcaaatccatttgtttcatgacacccggtccggctcgatg

SEQ ID NO: 373196 - DNA, 276 bp, Homo Sapiens
  misc_feature (146)..(170): n is a, c, g, or t
cctttaaaaagccagggccattggtgcatgcctgtagtcccagcaactcaggaggcctgagggaggaggttcgtttgaggctgcagtgagctatgattatgccatggcactcatgcctgggtaacagaatgagacccagtctcttnnnnnnnnnnnnnnnnnnnnnnnnnagccaagacccgtccctgccttcactgagttcatggcaaaggaagtaagtaagcaatgccacatttgttccaggtgtcatgacagagaagtcaaatccattgtttt

SEQ ID NO: 373197 - DNA, 426 bp, Homo Sapiens
ccgtcactgatgtctcgattgaggatgtccacggcagccatggacaggctgctgctgctgagtttgcagctccttatgaaggtacgaaagcctgttggccccaacttcattgtccccttgatgcccaggaaccggataaacaaatttgccatcctgtccaccaggcgcaggtagttgaactgttttgcgtacttggggaacacctgcttgaggcaaatggaaggcaggtgggcttcggggttggcgttgcagtctggagcactggtcagctcgccgtccaaagcatcttcctttccagcgaatggtttttcaagctgctgagactgattctctcttttcttcttaagtgggtccatgaggcgcagagtgtctctgatcacagccactttcacttcttcatcaacgaacatcaggcggaccgagcag

SEQ ID NO: 373198 - DNA, 357 bp, Homo Sapiens
atgtctcgttgagctcagctatgatcttctctgtttccttcagtctttcaatggcctcctcgctgcccggggcaaacaagatgcgctcgtggaggctggacacggaggccgcgcggctggacagggctgagagcgaggatgaggggctcatacccaccagggcattggtcactgtggagagagggtcaggggcttcattcaccgtcccgccacggttaaggttattgttctcaaggtcggacacgtctatggggaggaggggtagggcgggcagacagacagagggagggagagaaaaaagatgaagatgggaaaaagtaagagatggggcccagagaaggcaagaaacagaaacca

SEQ ID NO: 373199 - DNA, 393 bp, Homo Sapiens
ctgagtgtctgattgaaaatgactccttccaagtgacggagacaacatattgcaaattattacatgcaggacaggacgctgtggtttcaggaacaagagcatgttctcatctcctgggcctgatgaagctgacaaatacaatcaaagcctttctcagtgaattctcaagagggaagtgttcagaaggtgttgctgtcttacaagtgaggctaacttgagaacccccaaccatttccttgcacccagcacagacatgtgaactcctggtatggagggcccttctctaggtccttgtctgttctgcccaacagtcctatgcggtgaatgcacacttaccctcgagggaaccaggagtgaactaacatgctgggtcaatcagacatcagtgcggct

SEQ ID NO: 373200 - DNA, 258 bp, Homo Sapiens
tgctcgttgatgtgtaggagacagaaataattagtgttctcggctggcttcttatgtagttggtgagtgaatttaaaacatataacaagttaaacaatgtcaagcattaggtgagtgagaattaagaagttcaaaatgtaaaagctcggagaatatatgtatgtggacatgagagtgtaggaagaacctgatgcagccgcatgagagtctaagaggatccagacagaatggttagagataaaagcataaggtatactg

SEQ ID NO: 373201 - DNA, 418 bp, Homo Sapiens
agatctggtcgcgtgtactgcgtttgtgactgggattactttcagtccactggccccagctcatctggctctggggcctttgctgtgatgacctgccctgcccctgctctgtaaggcaggcttgggagttcctaagaaataaggagccttccccagggtccagcctcagggtggaagatgctggcagctaatgctgaaggcatgtatgcatgagcaaacactgccaggactgtgagcttaaaaatggatccctctctactcagagggaaccccatgactctgcggttttttaaatgcatgcattatttatctcaggcttggaaacaaacattgagaaattatttgtgaaacgggggtgcagggagtaggggggtgcttgaagacataatctttacattacgtctataacagacttcct

SEQ ID NO: 373202 - DNA, 670 bp, Homo Sapiens
tggctcacgtacagggtttcagggcagaaagcaggtaacggggagggtagctagcctagtaggtttctgcgggctgagagtggtggcctcctctcccccttgcctgtcccacatcccatgggacgtaccacgggaggctcctgacctctcttggaagagcctgtacctgccctggaagtgaaggtaggtttggctgcaggggcctgtgtctgtgctgagagccagctccttccctctgcctctgttcaacattcccctgactgtcaccagaagcttcctcctgagggcttgatttcctaacaggcctgcagggaggaaggactggaccagcttggggctgagatgcagggctgggactgggagcccagggcactctgtgctgtgctgggctgggaatatgagggagggtctgcttccacccatcctgctcggaggctatggagcccgctggccctgggcaggctctagtgctctgcacccttgcagtttcttctgagagaaatgttcaaacgccattcccagactgggcactcggcatgaggggtgcatgccttcgcgaaccgttcaggtccttccaagtcaatcacccactggtgcgtgtaccgggggccgcatcaggcacacagactgcacagcttgccccacaggaggagccaacataagctattga

SEQ ID NO: 373203 - DNA, 580 bp, Homo Sapiens
tcccccatcggaacccaatgagcatacctgtccagtaaatccctcagctgggaaacaggtcaagcgatccaataatgggggtaaaactaatcaataccaccctccaggcactcactacgcatggcactctaagtacttgggttggaaaaagacacaatgcccagcagaagaaagggatgctagaaacaaagatctgggggcaggggtgaccatgggcctctagaaaaggagaggactttggctgctgctgaaggatgtacactagcaatgcgaaggataacttgaggaaagtaatctggggacttgtgtactcagtggagcaaaggtgggctgatgggcaagatactacgtttgtaacagctttactaatgacagtgttaagaataaattggaagggagtgctgctagaagtatatgactaccagatttagttctctgaatcaaggtgatgggggtctgaattccaacgcatgttagaaatgtacaaaatattatcgagacctcatataactcggtgatcgactgcattgggctgtggcctaggagagaatgaggaagtatggctcattgggttccgatg

SEQ ID NO: 373204 - DNA, 750 bp, Homo Sapiens
ttgactgttaatatatacacaagtctgtgctggattctgctcgatgggcaccaggacagcaaaaaggctactgggaccacagcaatgtgagcaagaagggtaacaggaggtgagatcagagagggatgtactgtgtgtgtgggttggggggatatcacatacaaccttgaaatgctcaatgagatgggagccactgtagggggttgatcagaggggtgacatgacttgatgagtattaacagaatcgcacagctgctgtgttgttctagggagaacagatggtgggggcaagagtagaagcaggagagtgtggaaataatccagagcagagaggacagctgcctgtactagggtgttggagacgaaagtgatgcgaagtggtcagaatctggatatcttctgagggtagaaccaatgagacttcctaatggcctggagtgtgaacaaaagggtgaggtcaagaatgagtgtaagggtttttgtctgagtaaatagaaggatggaatgactgttgcctaatgtggggaagagtatgggaggagcaggttttagggacaagaccaaattttagacatgtttaatttgagatttctctatggtatttgagtagagacatcaagtaggtagcacaagacacaagccttgcgtttaagagagacaccaaggccacggactatttgggtgtctctagggtagaaacagtatttaatgccatgtgattacgtagatcctgatgggtgcacagaaggg

SEQ ID NO: 373205 - DNA, 601 bp, Homo Sapiens
  misc_feature (569)..(569): n is a, c, g, or t
ctccacccgaccgggtgggactaggttggcaggggccggaggccagacaagccacgcatgtgcaccactagccagggcacggctgaggcaggacgggcagaagtcattcctggggcctgggcgatgctgcatgagctcttcctccaagaggaagtgtccctccagcttggccctgagagcacagtagatcaggactggacagggagcaaggccttggagaggcccccagggatgtgtgcatgtgcctctgccccacgaatgcagctgcgccctgctcactgatgccctctgcagctctctcttcagcccaaagctcttctccctaaaagcctctgggcctttgaccaagggagaggtaacctcctgcctgaaagactgcccgagcggacgatggctctgccccccattctgcttcccaggccgagctgggctggcccgccagcactctgtgcaacatgaccctaattatctgaggattacccatctcctgtgtcttcccgcactggtgtcacacagtgtgtgagcaccctcggggaagcacaaaggctgggcaagtgctgaactttggncctgtccccaaacctcccaacccgtcgggggg

SEQ ID NO: 373206 - DNA, 596 bp, Homo Sapiens
  misc_feature (57)..(57): n is a, c, g, or t
  misc_feature (71)..(71): n is a, c, g, or t
  misc_feature (87)..(87): n is a, c, g, or t
  misc_feature (93)..(93): n is a, c, g, or t
  misc_feature (99)..(99): n is a, c, g, or t
  misc_feature (110)..(110): n is a, c, g, or t
aaaaaaacttccttgaaatggggttctctgctgctctgggggtttggccccaaaaangaaacccttacccnaaccctgtccaacccnaacccnaacgtnccctgggcccncccctctgggaaccttccctcttggtcccccaggaaactgcggtggtgtcctgccccctgcaactgggctcctgtgcccctgtgggtgttcaggaagactggactgtctctgctccctcatgcaaaaccttgtgggggaagcaatgacccaggagcagcaccctggcccctccctgaggcctgtgagtgtctcggatccgccctggagaagtgagtggctgagacccgggtggggccctcctacccttggctctgggggcttcccttctgggtcttgtccgggatatggccttcctgaaggtcttacctcccccagccgccctgcacttgaccaccaaagcaatctctaagcttataaaggagaaacatatatatatggggttttttggagtaaaggaaaattctaagatattaagacatatttttatgtagatctgatctatctgtgtttggtgaatttaatattctacattgatttttcaaact

SEQ ID NO: 373207 - DNA, 413 bp, Homo Sapiens
atcggcaccttgggggggccaagggcaggcatgctgggaggtggggggtggtagcgagcggagatcacgccatgactccagcctgggcaccattgagcactgagtgaacgcaactccgtctgccatctcgggctcccaaagtgcggggattacgggcacgagctactgcgttcttttttaagatgattaagacatcccgcaatgagtggttgtcccctagcctggcaaataaccaagatacaagatacaaacacccaacacctgtcccttgagccccatctctatgccgtctggcctggtcactctcaggtctgccttgcacccctggcgaactctttttattgttgttaaaacttgaaattctatacccattaaacagtaactcaccaatcctcccaacccgtcgggtggag

SEQ ID NO: 373208 - DNA, 169 bp, Homo Sapiens
tgaatatctagcggtatatatcttccagctggagattagctaaactagctggtgtaaaaccgcaaacagctagtgaacatctttcaaaattagtagaagctaatttaatttcagtaaatacatggggacgacatcgttattataaaattgataatgataaagtggttga

SEQ ID NO: 373209 - DNA, 122 bp, Homo Sapiens
ctccacccgacggggtgggacctttaggatgtgattaagtcatgagggcaagccctcatttataggattagtggccttgtaagagagatgaggtctcaaacttctggcttcagccatctgcc

SEQ ID NO: 373210 - DNA, 585 bp, Homo Sapiens
  misc_feature (535)..(535): n is a, c, g, or t
  misc_feature (542)..(542): n is a, c, g, or t
ctagaggatccccctggctcagaacttagggaagagcagtctgtgtgatgcaagcatggagaggggcacctcaggtcaggtgacagcttccccccaggctctggaggggacaggataacacctgtccccaggcttggcggaattcctggtctctaacgcagcccggaacacacagagaaatgatccagtgtggggcagtgttgctcacatggtggtaggactgggtcctaggctcctggagccagcggcctcagaaagcccctctaggttctctgagtctttgacactgtgcagcccagactcctcattttatagacagggaaactgaggccagatgactcatccttgacagagccgggatcatggtgcagctctctgactgagccccctcgatgtcctgtagtctctccaagcatgccctgcagtggtcatgactgctgacatctgtccctgcatagactgtgggcctcgtgaggacagaacatgcctgctgtccccatcacctctgtcccccagctcagcctgactggtaatngcccggncatgtcatgagggcttggaaccaagcctaagttcagagccagg

SEQ ID NO: 373211 - DNA, 378 bp, Homo Sapiens
agagaggtctgcagccaggctggctggggaacagcaccagactccaggccccacggagagaggagccagcaggatgcccaggtcttccctctagtgagagctgagacttctgtctgccaaagatgggagggaaggtggccgggaacaggtgactgcacctgtagccttgcgcctggccactgaggcaggtagaatggctcctgaaccaggggcaaggatgggagagaactgagagggaggatggtggtaggtggaggttaggggacaggaggagggagaagaggtggcctgggacagagaagggccttaggaggaaaccaggccccctgtggctgcttctcatggaagccgagaagtcctaaacataatcctcctgca

SEQ ID NO: 373212 - DNA, 455 bp, Homo Sapiens
cctggctctgaacttaggcccgtctcccaactctgatgtcacttgtgatcaagaactggcattactgcctggcgcctggggcttccatgagccttctgaacttcagtgctcctattctgacccccaggcacctctggcccaagtatgcccactggagttcccataaccctggcctgcgtagcagatgtcactcctgttggggaactcaggcttccaggatggctgccagagggaccagggaaccagtcagaaatgggggttgaggagtcggtaccctgtggtgcaaacattgatggttgaagaccagagctagtagaaattctgctcccatggtggactgtgtgcagattcaggggtttttacagatactctgatctgctgtgcctgtgaaaaccgtggccaggtcagtaaccaacctgccccatatacctccctcccctaagttcagagccagg

SEQ ID NO: 373213 - DNA, 537 bp, Homo Sapiens
acctggctctgaacttaggcaccgtggtaaaattactgagagtgagggggcttgagcctgcctgcctgcttacctgtggagggactgattaagacaggagacctccctccaggtgtcctggggcccccctctgtacaaagatagaagggaagaggcacccaaaacatggccaggattcactcacagccggtaaacaccaccggatggtcccagtacaacctgacatctgatagcagcccaaacggccaggagctgcctactgccttacaacactgttctggacagctacacgtccgtaccctagccagccacacatgcactgttcagaggccctgacaacacccctacagatacccccacaacagtacatgacaactccaattccaaacagtgccactcagctcaacatccataaacaactgacaaacccagctgcagtgcaaaccacgcacgtgtgggactgtcctgactccagccgcttccccagcgaggctggagcctctctgaggagccttcctgacccaagccctgctctct

SEQ ID NO: 373214 - DNA, 497 bp, Homo Sapiens
  misc_feature (318)..(381): n is a, c, g, or t
ttctagaggatcccaatgcagcggactcgccaggatctggcccatggtaagatcagcaacagggctggggctaggccagtgacaggaccagagtcagggcaagggccagagcagtgcaaggccagggtagggccaggcatttcagggtcagggccaggggagaaccagggcaagttctcaagcagggaatggccagggccaggacaggtccagggcagggccatgacagggccaggggctgcgttagggcaagggcagggccacaacaaggtaagggtcagggccaaggccagggtagggacagggcaagaaatatgnnnnnnnnnnnnnnnnnnnnnnnnnnnnnnnnnnnnnnnnnnnnnnnnnnnnnnnnnnnnnnnnagggcaaggcagggcatggtatggccagtgcaggacaggacaagagccagtccagagagagagcagggctaatgccaaggaaagagccaagctagtgcctgaatccgcagcaatgg

SEQ ID NO: 373215 - DNA, 779 bp, Homo Sapiens
  misc_feature (32)..(32): n is a, c, g, or t
  misc_feature (733)..(733): n is a, c, g, or t
gtgctagaggatccccaatgcagcggactcgngatctaaccgcacgagacagtccactgattcacatgtctgagtcctctgaaaataccctctcagacatattcagaaacaacaccagccatctaggcatcccctcaatctagtcaagttgacatctgatattaaccatcacaccaggccacaccctgaagtgccaggctgcatctaccaaaacaaaagactccttttcctaacacaaaagtattgatcattccctaggctgcatggcttcaggttgacatcttcaccaaggatatctggacatctttttccagttcacacaaaggcattttataggcttgttgtggtcctcagtcacctggacttctgccctatgtctgatggcttctatttataaacctaaccctgtaaccaaggcagttagtctctcttccacatcccctgtgacattttcattttggcatctcgccttggctaatgctgactcctttactcattcttcttcctgtaaggtgcttgtttgccagtgcttgttcattaagtctccactatttttagtaagcttccaagctcactatgtctgttccctccaaaccactaccgtgcttattaggattccatccatccattcatttgtatgtttattcttcaaggaatattttcagtgttttccaataatatggcttgggctctgggggttggcaggacatggaatcaattcaatccctgttcnaggtgggggaaaataaaacaaggcaggagggggtaaaggacagtgg

SEQ ID NO: 373216 - DNA, 299 bp, Homo Sapiens
  misc_feature (168)..(168): n is a, c, g, or t
aatgcagcggaatcggcaggcagcgcgcagccgtgttgctgtgcttccaggcctccttagcaccaggctctgccgtgccggccccctcatgccctctactggcccgtatctccaggtgggtggggcacctgtgggtctgctgccccgttcctgccccatccccccaancacacgccgcttcccagccaccgatcagctcctgtgggcggcactatttctgaatcccagtgagttaggacgggacagccagagcaggtctgtctggaggtggtgtgggtgggtgccgagtccgctgcatt

SEQ ID NO: 373217 - DNA, 576 bp, Homo Sapiens
aagtgcagcggaatcggaaggccccctggtgggcgtaaggagaggacggtatgtttccaacacccccagctgtaaacatgggatgggggagtgttcgagggctggccactggcgcatatttggcagagcaaacaacacgggcctccgagcacactgtcccctctgtgtacacaggatgttagcacaggctccaccgagctgcacttcatggcaacaaagacaacaatgctaccatctcgtaatcgtcaatagcatcgcctcactcaagtctttggtccaatatttgcagagccaggggagccacgtctactttgcaatattgacttagattcgtcaccttaccagaaaaacctgagtgcccaggcccgcctgctcatccatcgtggcatttgggaggtgcgtggccttaggcagaatgtgtggggtcatggaaaaccagcccccttcgtttcatggctgttgtcactattatcttacccgtgtaccctagagtcaggctgtggagaggggtcatgaatctccagactctgacttaagattctccgattccgctgcacttgggatcctctagaatca

SEQ ID NO: 373218 - DNA, 510 bp, Homo Sapiens
gtgattctagaggatcccatgcagcggactcggcagtcctctgccgtctgggccacagcacaccatctcccaacaaccaagagattctcttcgtcccagcctcatcagcccccaggggatgggagagggcaggcaccaggcaacaaggtccaaagagacctcacgacttgctcaaggtggccgagcctgtcccctggaggacagactcagctgccaggcctgtccaggcctggggactgcaaagaacaagaattccattcacacgaagcctcccagcagccccatattgggggggcgccagcctcagagaggggagggacgttaggtttcatccaaagaaagcatttccgtgactcaaaatatctgcaggggggatactgtctagcctcctaatgtttagcccagggctgggcacacagtagggcttcaagacctacgtggggatgacagtggaatcacatttagtgtcagcacactccatgccgagtccgctgcattgggtcctctaga

SEQ ID NO: 373219 - DNA, 639 bp, Homo Sapiens
tctgtcgtctagaggatccaatgcagcggactcggagcactttctctacgtgtttactgcataagcacatagtaacgggtgtgatttagaagcactagactcaaatctgtttaaaaatcattccagatttactctactaaaaatactaagagaaaatttttctttaagatttcttacttgcaacatagcatttaagaaaaattactcaatgtaagacaatatcttgagaaacctaaaaccaagtggaaaagacttggaaaacatgctccggaccacgatggtcaaatgttggtgggtgtctatttgattagcacaacaagcgaatatagaatggcctgaactgtgtccttttccctgatgctaacctctgtttcttaggatataataaaactagataggccagtttgcagctcagagatttctcacttaacaacttcagctgggatgggggcccagaatctggctctggtgttataaaattacacttttaactgtatgtgaggatattaacacttgccttcgccagttttcaacagacacatatatgtgggatgcatgtaggtatttaaccttctaagatgtttatagttagaaatgcctttaaaaaccctggactatgggtgtgtcctgtggaatgcg

SEQ ID NO: 373220 - DNA, 303 bp, Homo Sapiens
aatgccagcggactccggcaaccgcggctcgccagtgcgccagtccttccgcaaggactcgggctcctcgtccgtctttgccgagagtcctggagggaagacccgcagcccggggagcgcctcgacggccggagctcccccttcggagctcttcactgggcctggggaacgctcgctggttgggttcggccagccagtgccagccaagacacggagaccagggagcgcatggaggccatggagaagcagatgccactacagcctgtccgagtccctgcattggatcatctagatcacgagaac

SEQ ID NO: 373221 - DNA, 696 bp, Homo Sapiens
aagtgcagggaatcggcattctcttcagtggtgaggccatcaggtgaacggtcacctgacttaggtcactcaccatctgggtaacactccaatcagagataaggcgccgcatcactgtgcctgcttgaggtataagccgctgagtcccccgagtgaagacatggccctgactgcactcaatctggatgccccgttgctgggcaaatgaggcccaataatgtacctgcagctggggaaagagggctgtataggaaagttgcttgtagtgctgaccaagtttcttcttgctgggtttcaggttattgaagagctttcccctgcagataggccttgtgacactagtccaagtagcccagaagttatgcatccagcgcagggtactactatatagcagaattcggggctaggaatattgttccactgtgccgagtcagatccatcttgatggagagattgaggtctccgagcgaaaggcccggtcggagtcatgaagctggcccaaggacacctcaggcaggaactctggggcccgcagagtgacactatggtgatcatgggggatcccatggcacagccactgcaggtccagtgtcatgcagaggtcaggcaggtaaaggaagcagcagtcgtcatacttagaggctgttctcacgttgatatccaagtcacccttgaacacaaactgaccaggtttcc

SEQ ID NO: 373222 - DNA, 599 bp, Homo Sapiens
  misc_feature (184)..(201): n is a, c, g, or t
tcgcgtctagaggatcccaatgcagcggactcggacaaatgttgggaatcggctgagcaagtcctcctcagcctgaagaaacctgatagttttcccccacccatctccaaaccacgtgaagcccatgtggagaagatgcgctttatgtcaaagaaactgacaattaaatgacatgggctaaacnnnnnnnnnnnnnnnnnntttcttttggctgcttagcttaactaatgtaagaatgcaaatatagttggcatgaacaaacgaacttttaaagtgatgctttctgcttctgagaatcaataaaatgaaaaaataaaatccatttggctgcaacggaaatatgctggtcccggcagcctctcttctgtttctgtatctggttagttttgtcctaagttgcattgactgatgtggaacatgcagtaaccacctgcccaagcattagaaaatctgtaagtctagggagcggggtcctttgcccttggcaggtcactgctcaagatgcagctgtgttacgtggtaagcagacgacgtttggtatagatcttcaggttagagtctccacagctgttctgcattgataatattcaggaagtttg

SEQ ID NO: 373223 - DNA, 575 bp, Homo Sapiens
ctttatgtcaaagaaactgacaattaaatgacatgggctaaatgtgactgtgtgtgtgtgttttctttttgctgcttagcttaactaatgtaagaatgcaaatatagtttgcatgaacacacgaacttttaaagtgatgctttctgcttctgagaatcaataaaatgaaaaaataaaatccatttggctgcaacggaaatatgctggtcccggcagcctctcttctgtttctgtatctggttagttttgtcctaagttgcattgactgatgtggaacatgcagtaaccacctgcccaagcattagaaaatctgtaagtctagggagcggggtccttggcccttggcaggtcactgctcaagatgcagctgtgttacgtggtaagcagacgacgtttggtatagatcttcaggttagagtctccacagctgttctgcattgataatattcaggaagtttgtaaaccatctttcacctgcgagttttagatctgtataatactgaatttttgttctcctctaacacttggattctctgacctctttttgtcttttggctcttcccttctgtccgtcc

SEQ ID NO: 373224 - DNA, 534 bp, Homo Sapiens
  misc_feature (374)..(374): n is a, c, g, or t
aatgcagcggactcggcaggccctgcagctcaggtggactgcctgccgactggaagggggcaatggccgctcgaatacagttgaaccactgctgcttgggaaacacgtcattggcttgcaaagtgtgagactgggctggagaggggtcatggaagcgaattctaaagatatttttagctttctctgagttactgaaagctcctcgaaaggagcctcccattctcacatctccatcctgcaggtcttctaggactagctcttggactgggattggctgccggtaaacctggtaagagtgccgttcgttccgtgtgacgggccgagtcagaaccaagatgtcttgaaacaggaaaatgtaaagtttatgtccactncttgctccgcagctccccatggcacagcagcactttgctcgcttcgattctggggtccctctgcttttcatccaggtactccagcttgtcgatgtaataccggcactcggattcacctttcttcaagttgatatcagagaggactccctgtattatcaat

SEQ ID NO: 373225 - DNA, 517 bp, Homo Sapiens
cttattgccaactcagcctagacatgctgatggtgtcgccactatttgctaggccccaactcaagccaaggtgtagatatttagatgaatcttcgactggtgcactgatgtatttttatataaccattatttaaccaggcaagtcagctaagaacaaattcttatttacaatgacggcctccgcctggccaaacccgaatgacgctggcccaattgtgcgctgccctatgggactcccaatcatggccggttgtgatacagcctggattcgaaccagggtgtctgtagtgacgtctcaagcactgaaatgcagtaccgtagaccgttgctccaagcatgtcactttttctgtggctttcggtctcctctcggttcaggcattgaagcagaggtgctggtggtggagtcttttgaggagctgaagaaaaggcagaaggaagccattgggaagatcgtggtgtataaccagccctttgtcagctatgaggagactgtgcagtacagggagtttggggcg

SEQ ID NO: 373226 - DNA, 467 bp, Homo Sapiens
caactcatgcctagacctgctgattacgttaccactatttgctaggccccaactgaagcctagacaatgctgatggtgttgccactatttgctaggccccaactcaagcctagacaatgctgatggtgttgccactatttgctaggccccaactcaagcctagacaatgctgatggtgttgccactatttgctaggccccaagctcaagcctagacaatgctgatggtgttgccactattggctaggccccaactcaagcctagacgatgctgatggtgtagccactatttgctaggccccaactcaagcctagacgacgctgatgagtgttgccactattggctaggccccatctcaagccacggtgtcgatattcagatgaatcttcgactggtgcactgatgtattggtatataaccattatttaaccaggcacgtcagctaagacaaatgcttatatacaatg

SEQ ID NO: 373227 - DNA, 135 bp, Homo Sapiens
gttttgcttgtttcttagggttgttattctatgtatggtaaaggcattggctttccatttgtagcatcaatagaatatctcctgtgtactacaaccttatgtcatagtaaatggtcaagggataaaaaccgcggg

SEQ ID NO: 373228 - DNA, 408 bp, Homo Sapiens
agtcacctcggtaccccgccgtaccagttgcggccaactctcgggctcagagacgctcctgatgacagagtattaactccaagttcatctcattcaaatcaatatccaagatcagtgttagcacaaggcagagctccaagacaaagaggataaagtccaagtgacaggggcgtgtggccagatacttcttctacagtgaagggcaaggatgattgcagaggcagctcagaggatattgatcacaacatcctgatggcctcatgtttcaacagtataatcaaaggaataagtccccccaatcgctagctcttggaaaccattacccacaaccctgatctcaggatcagcataatccaagggacactgaaccccagtgtgtgtgcgcaactggtacggcgggggggatcc

SEQ ID NO: 373229 - DNA, 455 bp, Homo Sapiens
tacaatagcggtgaggattggtgacgcgggaaaaagcgtctaacctacctcagggctgagcgaggtgcacccaccgggaccggacctctgaccctgaagcaaacttgccctcccatcccctcttcggtggaccacccagtgaggtcagctctgcaggggccacagggtggtcttaccccagccgttcgcctaatggtgtgagaactcactgtagtcacaaagcggggtctctactttcagcttgaggagcacataaagggctgctagagtgggcacctctcccctgggctgcgggagctgaccgtggggcccgatcccagagggttgcggtcctcccaccccagcctgtccttcagccccgctgccactgccttgtccatgcagggcaccaggaccctccgaccctcacccaatcctggaggctgctggactaagcagctggagacactcccctt

SEQ ID NO: 373230 - DNA, 347 bp, Homo Sapiens
cccgccgtaccagttgcgcaaggcattcgctcctgagcggaatcctgcaaagatggagaaggaggagacaacccgggagctgctgctgcccaactggcagggtagtggctcccacgggctgaccatcgcccagagggacgacggcgtctttgtgcaggaggtgacgcagaactcccctgcggcccgcactggggtggtcaaggagggggaccagattgtgggtgccacaatctactttgacaacctgcagtcgggtgaggtgacccagctgctgaacaccatggggcaccatacggtgggcctgaagctgcaccgcaactgtacgaaggggtgccgagctcgatcaa

SEQ ID NO: 373231 - DNA, 160 bp, Homo Sapiens
tagtcaggctcggcccttattctggcaggcagtctacagagacagcttgccagatgaagccagttttattaacgtagcataggaaatttttacatttcttcacgttttccatagtttccgtggcagctgaggaagtggtggtcgcaactggtacggcggg

SEQ ID NO: 373232 - DNA, 216 bp, Homo Sapiens
ccgtaccagttgcgggaacattcttgggtagagtgagaggcctggggagggaagggtctctaggatggagcagatgctgggcagtcttagggagcccctcctggcatgcaccccctcatccctcaggccacccccgtcccttgcaggagcaaccctggggagctgtccagagcgctgtgccgctgtctgtggcccatttttatttacttatttatt

SEQ ID NO: 373233 - DNA, 244 bp, Homo Sapiens
cccgccgtaccagttgcgcccgaaggcctatggcgcgctctccaagctcaagatccaccagcgtggccacacaggcgagcggcctcacgcctgcgccgactgcggcaagagctttgctgacccttcagtgtgccgcaagcaccggcgtactcacgctggcctgcggccctacagctgtgagcgttgcggcaaagccatacggagctcaaggacctccgcaactgtacgaacggggcgccagctc

SEQ ID NO: 373234 - DNA, 552 bp, Homo Sapiens
cgggaggctgtcagaggatccccgctatcatcggcacctgatgaaaacacggaacaattccacaccagccaaaaatgctctcaggcccacaaggcagcaagagggtgtttatggaccacatctggggattctgaggcataacttgaggttgctattgtctccttaattttgtggtttatgtactattctggcctttccaatatcacatccgcctagtggccctgagcagagaagaaagtgggtcttgccttgggccagaaaacaagacgcaattgcacctgcagcttgccttcttgggaacagtccctccttcccagactcctgggatgtgtgttcggcagggaggggagtccaggaggaggatgctttaagccaaagtggtgctggaggggctgggcctcagcgcagagagggcaggtctctcaggatgaagctgagcagcccccgcctgcctggccacctgccagggaaggggccttccagagaggtgggtttccaggggatctgtgtgcctaatcttcagcttgtctcactggtggtgggagcagggaa

SEQ ID NO: 373235 - DNA, 539 bp, Homo Sapiens
tgttctgaggatccctgctatcatcggcacctcacgtgaccatgccatggtggggggctggtttctcccctcccctagggggttccggccctcatggtgggcagacttctgctggggcgatattggcttggggtctgcttggagtctgctctctggattctgcgtctgcgtgggcacaggggtggaggggggtcccctggcagagctctctgagggtcggctcaggtgtttttccacagagtggcacctccagaactctctgactttcccaatgggctgagattctgcttcaggcacagacgaagacagggaaatgatcctgatgccggtggcgtgaggactcaccaagttccccagctcgtcaatcttaatggctccggtggagagggacacatctctgtcgtaacatcgcatctctgactttggaggaatgattttatacgttgtgaggccgtgcttaagtctgtagcttttccctgggttttggcctcgttggtgccatgatgttggtgccaaggcagcgtttttatcgttgctgt

SEQ ID NO: 373236 - DNA, 934 bp, Homo Sapiens
ctctagaggatctctcgctatcatcggcaccccatgccttccaccccattgagctagtgcacacatgaatggggggtgcctcctttccctcgcacggccaagtgctcctcaacatgctggcatgggccccaagtgcacgctgggcctgcagctggggcctgcatgctccaacacactagcccacacctcatcactgccattcccgtctccgcacgctgctgctggctgagctgacactcgggtagcttttggtgaccaacattgatagctcagaccccgaccagctggtgtataaaacttgggaccctgctgaccggctcccaggaccagccggagactgggccctcaatagctacttagggggactttccctgaggggatggatggtgggcacatatggaagaaagggctaatgttgttggcttctctattgactcggggaaaggtctggtgcgtgcagaagagctgagctttgcggctggagccccccgcgccaaccacaagggtgctgtggtcatcctgcgcaaggacagcgccagtcgcctggtgcccgaggttatgctgtctggggagcgcctgacctccggctttggctactcagctggctgtggccgacctcaacagtgatggctggccagacctgatagtgggtgccccctacttctttgagcgccaagaagagctggggggtgctgtgtatgtgtacttgaaccaggggggtcactgggctgggatctcccctctccggcatcatgcggctcccctgactccatgttcgggatcagcctggctgtcctgggggacctcaaccaagatggcctttccagatattgcagtgggtgccccctttgatggtgatgggaaagtcttcatctaccatgggagcagcctgggggttgtcgccaaccttcacagtgccgatgatagcgaggga

SEQ ID NO: 373237 - DNA, 541 bp, Homo Sapiens
tcgctatcatcggcacctggctggtaggcttcctgtggacactgtggtggggggctgagtccgggccacgctggggaagccagctggtgacatgctcacgggtgagggttggggctgggcagggggctgcggcgtctggggtgtgctgggctgctgtgtgggggtcccgggcggtgctgaggtaggagaaggcagactctgctgaggcacgttgcgggtgttcatggtggccatccgccggcgcatgagctgggcctgctgcaggcggtgctggatctgctgctggcggagcttgtgtttgatgttgaggcagaagggcacggggcatttgttttcttggcagtgcttggcgtggtagcagcagagggcgatgagctgcttgcacaccgggcagcccccgttggtcttgcgtttgcagcccttggtgtgctgcaccacccgcttcatcttctggcaggatgccagcgagcagttggcgttgcggcactggcacgcgtgcaccagcgactggttgcagcgctggatgctcagccggcgtgac

SEQ ID NO: 373238 - DNA, 499 bp, Homo Sapiens
gggtccgtctagaggatccctgctatcatcggcaccggctcccactcgctctctatcccccaaaaatccacagtcctcccacatgtaagtacattcaccccctcccaaggaacaagacagtcccatcagctcacagcatcagctgaagagttcatcttatctatgttaggtccaggggcggatgacgaccctagggttctcaggtacagctctaagacagttcttcctgatctgcaaggctgagaactagacaagttatcgccctccaaacacccagcatgcaatggtgggacagttacatgatgcccagatgctcctgttcagaaaggctgcaaatgaaaggcacacacacggctggtccataagcagttctgaaattcagctgggtaagcacgggaacccagtgatactcctgccaggaaatgactttccagacggttggactctgcccggggaggacttgatttcatcttaggagtcatacttttacatgaaaggt

SEQ ID NO: 373239 - DNA, 547 bp, Homo Sapiens
gtctagaggatcctctgctatcatcggcaccaggccctcatggatgggcaacagtctaatagagaggaggcagaaggtcactgtgggcaggcagtccagcagagcagcacgcagggtgcaccaaaaggagcctggaggcccagagcttctggagggtgagaggagaaggtgggtgcagagggcagagtggatcccataacgtccaaaattttttcaagacagaccaactctacatctactcctcttatccgctgagtacctccaaaactcactgaaaaactccatagatttagctgaagttcttagcacttctgcccattcttcaatagaccagaaagaagaaaggaagcagcaggaaatgggcggaagtgttaagttgcaaatcctggcagcatgcccagaatgggaccaactcagcagacaggaagcgaaggcaataaaagagcaatctacgctacaggcaggctggagcagaaactcgggaaaggagggaagacagattactggaacagccagtttgcagggccatgaaacccgaactcttttc

SEQ ID NO: 373240 - DNA, 302 bp, Homo Sapiens
tgtctagaggatccctcgctatacatcggcacccagctgtgggagtggaagctgatggctgttaagaattgctgtcattgagattggggggcatcaagtatgtgatggtagtgtgagacattcagcttcaccattagggacaacctaggacattttccttttatttccattatgcctcttgagtataggaaacttgtttcctctgtataaaacaaaaactgtagcctttccaaggtgcttagcaatctgcttagaggtcgggtgcagtggctccccaatacttcgtgagtagggcaggcatc

SEQ ID NO: 373241 - DNA, 771 bp, Homo Sapiens
ctagaggatccctcgctattctcggcacctactagcaataagcacttaatatacttggctaatcctcataactctgtaggatcccctctctgaaagagcgcaaattctaaaaaggaagttaagacatgcacctaaagtgttattttaacaacaaatacaagggatgctttgtgaaagaggtagtcttgatggatgggtgaagtgtcagcaggaagaaatatggaagtatacagcaagcagaaacagagggcatgcctcatggtctcaaaccagtccagcaagcagggactatagagtgaggtagcaggaaataaggctggcaagtgctaaggacagagttaagtgggaagagtaataaaatttatattttagaaaaagatgatacccagggggagtgtcacctctggtgggaagccgcattacacaccctcttctgtgctcccacagcatgctgaaacctctctgacaccgttctccgtggcatggcattgtctcatgtctgatttggtggaaaggcaacagggctctggagtgtgatagacctggctccaaacctaacttcacccacactagctatgagacctcaggccagctctgtgctaaatccagctttcatttctgcatctgtgaaatggatgagatgatctcccaatgagatagtgtattacatttgtcatgtagtgtgcctgccatgtaagaggcgcttctaagatttttaggccccctggtccctacttctgagcttcttgagcccagaggcgtgccgatgac

SEQ ID NO: 373242 - DNA, 568 bp, Homo Sapiens
gaggctgtctagaggatccctgctatcatcggcacaactgggaaaacagaggggtaatgtatcgctcccccggtagaataccaggtttcaaaacatatggttacgggaaacatctagattctactgataaatgtgatgcctggtgaagtttgacagccacaggtctaaacggacctgggagcagaagtgccaggtccacttagagcccaacactagcttttcaatagtggggcattaactgaaaataagggcacagcccattctctctacacccatgttggttccatcatacttcatatccctattcccagaagtactgctcatgtctcctaggagtttctcttcttcctcacagtaaaatccagcccccatcccacagcctgtaaagccttgtatctgcccttccactctcccagaggatccttcagtgccagatacagtggcccttggtatttttcaaactctccaagtgcttggtactctgctcagaaagcatttttttccaaatttgagcatggcacactccctcacttcctccagatctcagcttacagggcacctcatccca

SEQ ID NO: 373243 - DNA, 617 bp, Homo Sapiens
tgctattcatcggcacctttcaacactgctgcgctgcgttgatatttctcacctgtttattttttttatctgtgacgatttttcctttcaaggtactgccaagggagtgtagacttctcacccgcctgactctaccacaggcatttcttaatagaaagtctacaggagagccgcgtgaaggacccaggcaccagggcgggatcaggctaacccagggtgccctgggctgtgcctggctgggaggcctgtttgggtctccttggtgctggcctccagttccctcgccagcaagagtgtagagttgccatattgatccctgggcacccagattcaccccaacaaatctgtcaggcacaggggccctctccatgggatgggccagattctgttccaaacggggcgtttgttcctccttttcagaatcggtgtagtgcagccatgaattcttttatctttgctccagaagtcccactccctggtgtttgatgaactgtcttccttgagtggccaaaagcagtgttctcacaccgaggttttaaccaatagaaatacttgaggcatttccccctgcttcccccagcagtgtccgatgatagccgggatcctctagaacacca

SEQ ID NO: 373244 - DNA, 562 bp, Homo Sapiens
cgggcgatctagaggatccctcgctatcatcggcacagcatcatcacaattaattgccataaacagcagcacagcaggatctaccactctgttcctcttcaccctgcatcacacacctagtttctattccacagcctcacatgtaacgtggtgggaccatgtaactgggttctatagctaacagaaatgtgaactcaagtgacatgagaccatttcaggctgggcttataaaaaacttcatgacagtccatgttctctcctcttccaccagctcatcacaagtgtgcatagtggcatggaaaccacatgctgcagatggcagagccacaaaatgcagagcctagagccctgaatcaccacttagaagagagtcacctgctaattagaaacacctctttgggaaatttggtgaagaaagtatagatttctcacagattaagtcacagaggttctggagtttctctgttatggcagctaacattacctttctccattcttaaacattgggtatgttcccactatctacagaatgaaacctgacctccctagcatggcattcaag

SEQ ID NO: 373245 - DNA, 535 bp, Homo Sapiens
tcgctattcatcggcacccctctctcagactcagcttcctccttgaagacggggatgctatgtagctcagaggaaacatacacctgaaggtgctgccccggggggtgcaatgacctgttactgaggctggatggaggatggcatccatcatcagctacaggtgcctcctctatctacaggttcctgctccatctatactagccacctcctggacaagggctccagtgtcctccatgacaccagctttctccagagcctgtgcaggatttccttcctctaccctgaatcagggtgattcttaaaggacagtttcaggaacatataggggcacttgggtaatcttggtcagtaactgacctttaactatcatccatgtgaacatctacagttagggattttcttggtgatgtttggcaaaaagtaaagaattccccaagtgtgaagcctcattcattcacttattcaacaaatagttatggagcacctactatgcgtaaggccctgggccaggtgctgggaatacagcagagacaga

SEQ ID NO: 373246 - DNA, 1225 bp, Homo Sapiens
  misc_feature (934)..(1065): n is a, c, g, or t
acccaccgtgaaacgcccccctggctctgtcccacggtgctgaaaaacccaattggtgcctacccatcgcgtgggccataaagtttaggggaacgagggaagaggcaattgttgaaaggttccgcagcttcccaccctgacccctgtgccctgtgatagcagaaggctaggaactcaggcagggaccaagcagacacgacgcaggcgatactgtgcaatccgggctgccttcctgctggaggtgtttggttgctgttccaagaacaagtggggctctggcatccctattcgccttcctggtgcttctgaaaacccacctgaggagcctagaggccccattaatttcttttccatcacccgatgcagatctcagcacccagaaagacctctggctaaacgcttattagcagtttcccaagtggcaggtttgtgtttatgtaaaatacaaatggagaactgctcttggcccgtgtttatggcaactctgtcactcccctgctatttctccctccccctcgcgagttcctgggggaaattcacagaacaaagcaccttgtatggcctttgcagagaatgaaaaagcacaggaccattccaagggcccagacctgtgatgcagggaaatcaatatttggcttacatcgagtgggggaatttgcatctaaactgaaggcaaaggagcttgttgggagcagagcaggtggcaggagccgagaattaacagataatttctcattgttcctggattcagcctccacactcggcaggcgcttctgcagcgtctctggcgccccggcagcagctccggacctggcatttctccatctagcagtgtgaaggagctgctgccctgatagggctgcagaaacaggttagggcccctgggtcagtccatagctattgaagttggattgtaggagttagcgtgtgtggnnnnnnnnnnnnnnnnnnnnnnnnnnnnnnnnnnnnnnnnnnnnnnnnnnnnnnnnnnnnnnnnnnnnnnnnnnnnnnnnnnnnnnnnnnnnnnnnnnnnnnnnnnnnnnnnnnnnnnnnnnnnnnnnnnnnaaacagacagggagacagatgtacaggtaaagaaacacacattcagaaggagacattaatgtaaagcctcaccctagttgtcctctttagcccgctacctcccccagcccccaggtccattgctcgataccactctggtcacataatccacgcccccaac

SEQ ID NO: 373247 - DNA, 559 bp, Homo Sapiens
atggtgtctagaggatccctcgctatcatcggcacccttcagcagcttctcatagggcatagaacaaaatccacactcttccctgaggcccacaaagccctgtcccccgtgactgctgcctccctctagggaacacatgccttccagccgttcctgcctcctggccttggtctctgctgttcctacccccaagacagccttgtgccccagacactaccaggtagctcttcatcactcagccttccctgaccaccattcatcagggcttgctcagccagtcgaccatgtcacatcatccaagacaagggctttacttcacagtcctggccacctctgaaatgcccctgtttatatttctttatgcatggcctgcctgtctcctcccgccccacactgtatgctcctataaggccagaggtttgccatctggctctgcactgctacctctgcccttagcacagcacctaagcacatgagcatgcatgaagccttaatgaatggtggttgccttattgtcttccccattggttgggccatgacagatgcaagagagtctgtg

SEQ ID NO: 373248 - DNA, 514 bp, Homo Sapiens
atgcaggcgttaaatgatagtattagtaaggtactttgtagtgtcattatttcagtaggggtgataaaacctttttttattctgcaaaattatgctggagaaattgtatgtatctgcatgtgtctgtctgtgatttctaccatagtaaaatgaaacttcagtttgtgagccagaactgagaactctgggttcttaggtctagcccaagagaagacaaaagggaagagaagggagaggctacctttccgtgacagcttcatggagttttcatttttagtgtgtcccctccccacgccgtacacacacatattcccattacacttctgtagatcagttagatcagttagtggctgctctgtttttccctgcaaaaggaatttttcaattggattatccatcccgatttcccagtgggccttcatgaagcagtcaagacattttcagtatgttctttccctccaacagatgtgaatccagccatatggagcatatgctgtgtatctagggctgtaca

SEQ ID NO: 373249 - DNA, 536 bp, Homo Sapiens
tgcctgatctagctcctgcctatatcctccctcttagcttatatagtactctcccacactctctgtccttcagccatgtttgccttatttttaagctccatcccactgaagattctttgccaatgttgttccctctactaagaacactgttccctccccttgttactcaggtaactcatagtcatctttaattactagccccagggccatttatttaatgaaaccttccttcactcccctaccctctgacctagagtttgggactaatttaccaatttcagcttttcccaaagtgatatacagagagagcccactggctcagagttgccaagagtattaaactgttggtaagatgtcttgcccatagtaaacagtcaacgaatattatttcctcctctcctgccatgttacccacctcctatgattgtgtaagacctagaatactgctgccttaatctatactttggggattgaaataaaaacagaatgaccctttctttccaccctctgctgccgatgatagcgagggaccgtct

SEQ ID NO: 373250 - DNA, 534 bp, Homo Sapiens
ctatcatcggcacagggctagtccagcagtaggaagaagaaagagaggacgaacattaagatccgtatgaacaagggtaaagaagttaaattctaactccttaagcctctcttaagtgtgaaaatcaagtgagttatttctgtggttaacatcaagaatgaacctcatgttactttccttgggtggaacaggtgtggaatttcagtatgtggataaaatgtcatggacctggtttagcctttcacagtccttgacagctattcattttcggtagaatgtagcatggaagaaagtgctccaatttgggtcagactacctaggttcaaatcggtgccttcccaccggtgtgactggaggctaaaagttaacctctccagtctcagctggttggagagcacattaggttagtgggcagcatgagtatagtatggtcccttggaggatggaggggtatccacgaagcacggagtacgtagtaagtgctcatgctcactaactaggatgccagttgttatccagattcatgtctctcag

SEQ ID NO: 373251 - DNA, 423 bp, Homo Sapiens
gtggtgtctagaggtccctgcgattcatcggcacacacccagtttctaagggatgcctaagtgccctcctgactcagtcccctcctgatggccatacctctcaatactgttgcattggggatcacatttcaacaagaattctggaagggacaaaagcattcaaaccgtagcagtatgtctgtaccacattttgtttatccattcattcctcagtagacccaggggttgcttccacactagggctttctttcagttttaaaactgggatggtcttgggcaaactaggacaagatggttttattctggtaccaaactgcagcctctgtttggagttggccaagttactactttcaaaaaagttcccagtgggtaggggttgaccagaagcttagaaaatctatgcatcagttttggtgcaatatc

SEQ ID NO: 373252 - DNA, 372 bp, Homo Sapiens
gattcatcggcacctgaatacctggaaatcataagtctatctggagcttaaaacccggatttaatctattctatattaaataaatagtaaaagtacctcaattatcttaaactagatgttactctgccacttaacatggacaaacacaaaaccatattttaccaggaaggaaaaacaaaagcttctgtctaaatccttaatcgttatagttaaggctactacgggaaatgtgtaagaatctcagataatgtcaatttcatactgctgtgtgcttcccagatccagccatcgcagatgtactctactttcagtgtagtcagctagtcaccatctttttctaccaatacctatagtgaatacttaatcagaacc

SEQ ID NO: 373253 - DNA, 490 bp, Homo Sapiens
  misc_feature (272)..(359): n is a, c, g, or t
actagtcagtgtgtagtcaggaatcttcccatacagccagcgctgacaccccggaaggggggccactgttcagcccccacctcaggctgcaggatccagcaatcagcctggccttttagccagtgttccccaaccaaaaccccaagccccacccagccagcctctgccgcaaactcaggccaagcagccacaggctcctcccactccacagcagacgccttctactcaggcccagggtctgcccgctcaggcccaggccacaccccagcacnnnnnnnnnnnnnnnnnnnnnnnnnnnnnnnnnnnnnnnnnnnnnnnnnnnnnnnnnnnnnnnnnnnnnnnnnnnnnnnnnnnnnnnntggccacagccctgcatcaacaacagctgatgactcagcaggctgccttgcagcaaaagcccactatggcagcaggacagcagccccagccacagccagctgcagcccctgcagctcgcccctgagttgga

SEQ ID NO: 373254 - DNA, 539 bp, Homo Sapiens
tggtgatagttgttctagaggatcccaactcagaggcgagctgccatcgagtgcctacagcgtgcctggcaccgacatccaagccagggatagaacaggaaggaaacccggggttgcatccgcgagcgtagccagttaattgcaatagcagcgctgtgggaactcagtttataagggggtaggaggagagatttgtgcagcggggtggagaacggcattccacctgtcttcgttttattaatgtttcctgagcgcctgttatgtgtcaggcacagttctaagagcttaggactagagctgtgcacacgacacgtcaggtccacgttctgtctgatggaggcagacaattaaccagcacgttaataaaatgatttcggataatgttaaatgccatcaaggaaagaaaaggtgttgtgccaagaacaactttagatagggtggtaacatttgatctgagacctgaatggggagtattaaatgggtgtagacttcattctacatttcatcttctaatcagttctaaaaacacaaccattgaa

SEQ ID NO: 373255 - DNA, 280 bp, Homo Sapiens
ctcaggggcgagctgctgctggtaaggagactgagcctgtggctgtgagtaggggggctggctctgggggtgctgctgtgtcgtcgactgctgggaggggtatggagccggggactgctgatgtggaggctgggacggctgctgggagtatgcgaggctgagaggactggagcagtggtggttgagactgtggctgctgctgatacgaaggttgggcataggggggtctgggacggtgttgctgggagtagggtgcagctcgcctcgggatcctcgagag

SEQ ID NO: 373256 - DNA, 373 bp, Homo Sapiens
ggctactcagggcgagctgcaggaacatcatggtgaaatataatcattgctctgatggccttcatatttacaattaaagttgtcagtgctttcagctaattcctgtttatgcccttccaggttcaacatgattttccttgatggcgactgcccaatctctcgaacaggtgaggtcttcaggacttttggttttggggctattgctggtttcattttctttgtcgactgtggaacactagaaatcacaatgtcgggtttaggtgcaataggaggtggggctggcttattatttgccacaacaaacttgggcttgggggccactggtggcttctttatctcggctgcagaagtcatgattccccggtgcagctcg

SEQ ID NO: 373257 - DNA, 672 bp, Homo Sapiens
ttccaccatctccatgtgctccatgggtgacgctggcttgtgcccaggactttaccccgcttggaaccaaaggagtgttctcgggggctcgctgcgggtagtttcggctgattgaaggcaggcgtctgtgaagccggcagtggctgcgattccggcggctgagcggttgaggcatcggaactcttggggtcggactgctcctgtttgcttgcccatcctgttccgtcttttggcactagtgagacattggggtcattgcctttgttctcggctttcagacttggaaggttggctggaggtggcatacgccgggcaatggcaactttcccgagactctgcaggccatggcgaggggcaacagcgggtttctggatctctaaggacttgcccttatacgtatcaaacaggttgagcgaggaatacttctttccatcctttcccttggcagtcggccccgagcgatcagacattgcgctggaagctcattgagtatgttgggtcctgcaggcacctcccccaaaacgtgccagagcctggccgggtgcgcggggatccgggacccgggcctaggggctccccgtgacgggatggcggtggggcgggggaggatggcggcggatggcgccgggttcggctcctcccgtctccctcgctcactccgcggctgagccc

SEQ ID NO: 373258 - DNA, 181 bp, Homo Sapiens
ttctcacagtgtgctggtacgggcgagccatgtagttattatggggaccaaaagacaggatggatgaagtcagggaaaccccccatcggggaaatgatggcagtccaggatggctccagatgtgtgactcaggtgccgctgtgaacatgtgagggcagctcgccactgagttgggtaccga

SEQ ID NO: 373259 - DNA, 399 bp, Homo Sapiens
ctcgcgcaatcaggtcataacacacgggctacagatgtcatggaagtttgaaaccccgcagggaattcattaaatgttaaagctccaaaataatcttgttttgactccgtctcccacatccagggcacacgtgatgtaaagggcaagctaccaaggctgagggcagttctacccatttggctacgcagggttcggcccctgtggctactctcatagcgctgttaagtgcctgcagcttttccaggtgtaggatacaatctgccagtagatctaccattctggaatacagaggacagtgacctccttcccacacctccactaggcagtgccccagtggggactcggtctggggcctccaaccccacatttcccctccacactgacctagtagaggttctg

SEQ ID NO: 373260 - DNA, 502 bp, Homo Sapiens
  misc_feature (45)..(45): n is a, c, g, or t
  misc_feature (58)..(58): n is a, c, g, or t
  misc_feature (94)..(94): n is a, c, g, or t
  misc_feature (108)..(108): n is a, c, g, or t
  misc_feature (139)..(139): n is a, c, g, or t
aagcactgctcggccatgtttgggggctggaaggtggtcccctgnagttgaccagaancttggaaacatgactgcggcttcctctcccaggaanaggctgaaggaaanactttggcctgtgtgtccctcgaggctgcancgtatggccgtgcagcagggcacctctggccaaggggcaaggggtgctaaaatccaacctgtgtgtcactcccaaagctgtgcgttctagtgtaggtctgaatccacctggaaagggcaccgtcttctaattcacatcaaggcaccatagggaccagcagccaccaggagccctgaaggcaactgccctctattacttatccctacaacgtttccctgaccatgggcttcctgaggacaggggctgggactgacccatctctgtggctccagtacttggcatagagctgagtcatcagcaaaggatggtaggctgaattcaactaaatttggccattgccttgtgcagtcctggctccaggag

SEQ ID NO: 373261 - DNA, 559 bp, Homo Sapiens
tatccgtgttcgcgttgggaatggtcttataggcggcaggtcaggtttgatgaatggtcatggttttggttgggggtgtatttgtggctgcatacctggcgcgggttaaacagtcctaattggctttggctcccctagctgatcccactctgaccttgccactccttccccagagtcagtgagaaacgtgggtcagtgggaaaagcgcaagcaattgctgctggccaacctgcctcaagagctgctgcaggcctacggcaaggactacatcgagcacttgcatggacagttcctgcactcgctacgcctggccatgtccgacctcaccccagttgtagatgccatcacagatgcgctgctggctagctcggccccgccgccagctattaccccaggccagagcctggggctcatgtacttcatccactactacctgcctgaaggcctgcggcgccgcttcctgcaggccttcttcatcagtcactgtctgcctcgagcactgcagcctggccagcctggcactaccccaccacaggacgcagcccaggacccaaacctg

SEQ ID NO: 373262 - DNA, 564 bp, Homo Sapiens
cgtgtgttcgggttggggctggaggaggcagacacacgcgcgcacacgcacacgttacagaggagggctgagaggcatgcggcataggcttcatctgcagtgtcaatgcggcgcacccgctgaaggagggaaacgcggcgcgtccagtaggggagactgcattgctgagtcctggccctctgaggggacgactgtgcctgagtgctgctgtgccactgggacccgcctctgccatgaaagccatgccctggaactggacctgccttctctcccacctcctcatggtgggcatgggctcctccactttgctcacccggcagccagccccgctgtcccagaagcagcggtcatttgtcacattccgaggagagcccgccgagggtttcaatcacctggtggtggatgagaggacaggacacatttacttgggggccgtcaatcggatttacaagctctccagcgacctgaaggtcttggtgacgcatgagacagggccggacgaggacaaccccaagtgttacccaccccgcatcgtccagacctgcaatgagcccctgaccaaca

SEQ ID NO: 373263 - DNA, 518 bp, Homo Sapiens
cagagctcaagccactagaaaatccattctagaactttcacatctcattttcagccgcaacctgtttccaccatcggctcacatagcaccaactccaaggtacttgtacgcagatgttctgcttcaccaaaagtcctcttatggtgaaatacagtcagtgtggaactcgcagaaaggtgcgtggtgccacaggttcttctggtccatgaccttcagatagattctcattgactttcctggcaatcacaggccagcacaggctgaggagtgggatggaggacaaaacacctttaccagataaaacaaccaataccaaactaggctgggtcctaagacctctccccagcaaagcctcgggctacttcaaggatcgtaaagacaggaaaatccagcaggtaagaggccaaatggagtcctatttctcccattgcagtgcagacagagaagcaatttaacctagtcattgaacacagagctgtcaaggacccgtggtctggtcctaacattgcccaatgggt

SEQ ID NO: 373264 - DNA, 556 bp, Homo Sapiens
cacgcccccaatatccgcctcatcatctagaaggggtgctctgcaatgtctagtaaataacggattgcctaatacaatatcacctcctaaaagatggctttaaagtccgaataatgaagagttgactctctggtcaaaggtcctttgtcactgcattcatctcactagaaggttttatggtttctaaatccacttaaattttgcctgaccttagcaggttagcattaaacccaagagagactgagttacttcctatttccttccttgtttggtcctattgcattttctccatgaggtaacttgttattgacccagatggcccctagttaacagtaccagacaccgaatgcatgttttaggtgtcattttaaaagtcacatttcttttcctatatccctagtctgtataaagcttcatatgctaaccaaagtgttttgaccaacgaatagattttggaacattagaacagctcttcattctaaagtgtctaaaagagtcttggatatatcagagccactaaaaatggccccgcttaaaacgtcaaatagagggggtt

SEQ ID NO: 373265 - DNA, 537 bp, Homo Sapiens
tacactctcacaaaccccctcctatatgacggacaacattcagaccctgcaacagtgttctggaatactaggtgaaggacaaacattcacaccctcgtagcagtgttctggaatcctatgtgacgaaaaaacattcagaccacagcagcagtgctcgggaatcctatgtgagggacaaacattcagaacccaagagcagtgtgctgaaatcctatgtgaagggacagacattgagaccccagcagcaatgttctgaaatcccatgtgagggacaaacattcgagaccaccgcagcagtattctggaatcctatgtgagggacaaacattcaaaccacagcagcagtattctggaatcctatgtgaggaacaaacattcagaccacagcagcagtggtctggaatcctatatgagggacaaacattcacaccccagcaacagtgttctggaatcctatgtgagggacaagcattcagaccacagcagcagtgctccgaaatcctatgtgagggacaaacattcagaacctcgtaacat

SEQ ID NO: 373266 - DNA, 563 bp, Homo Sapiens
tcaacacgaaagcccctacagtgaaacataggatagtatagcaagatcttattcgtctagcttgatgtatcttagtcgataaagtcgtagtatgtgtaatgtgtccgtgtatacatatctacatattaatcatgtcggtgttgatactgtgatcacatgacaaatgactggtttatagtgaaaagctgtaggggttcagagaaatgaacattcttctaaaagtgaggtagataagttattttatagttcttgcctttgagtctctgttcttctggtagaaatgttagtgtatttataacctctcagatttgtttggttctcttagtgttcttgatccaggcagttagcgatatgttggatgaattgagaaaaatgagtttttcctttcctactaactgaattagattagaaataagcagttaagtgagaaaaatagggaattagtgccagatatgttgaggtgtagtgttgacagggggtcttttaccttcagatgtttggtgcaacttagagaatgcagtggtagttgctggaccagcccatacaaacaatctcatttgtgg

SEQ ID NO: 373267 - DNA, 214 bp, Homo Sapiens
gtcgtaccgggtgcgctagagggccgggcattgatctgctaacatgtccaatcagtttccccctttgaacggcagctgtcagcctgctgtactacccgtctccccacaagcccaccacatttcagagaacagctgcgactgtcacctgcctcatttcacatgagtttggacaggggtcccatatggggaccttcacccagggttgtatgcatga

SEQ ID NO: 373268 - DNA, 512 bp, Homo Sapiens
ctaggcatgatgcagggaggacccagacctccaaattgggatatgaggttcagagaacagcctccctatctcccagcctggacttcagacttctcctcacctgctaaggtcactctcactgagtcccagcaagtctccttgtctcttctcttggtgggcatgccctggtctgaattactcttgggtacagccccctctcccgcaggcaggcaggctgcctctcaatgctttgcagggctcagcttgagaaggcatggcgggtcctgacagccaacaagaaccacactttcttgcctgatcttcagcgcccccacagtctggctcccatgtccctctttagccttgtgctcacctggcaacagcatctgcccaggccttccccaaccctcacggaccctcctgggtgggcccagcatcaccctgggtaggctttccccgttatggggctcccatgctgccatgaaggtgttacatttgacaatatatcgtcaaggattctcccagtcacgagc

SEQ ID NO: 373269 - DNA, 721 bp, Homo Sapiens
accagcaggactgatgtgcacacagaaggaatgaagtatggatgtgaaagaacgcaggccttactgctccctgaccaagagcagacgagagaaggaacggcgctacacaaattcctccgcagacaatgaggagtgccgggtacccacacagaagtcctacagttccagcgagacattgaaagcttttgatcatgattcctcgcggctgctttacggcaacagagtgaaggatgtggttcacagagaagcagacgagttcactagacaaggacagaattttaccctaaggcagttaggagtttgtgaaccagcaactcgaagaggactggcattttgtgcggaaatggggctccctcacagaggttactctatcagtgcagggtcagatgctgatactgaaaatgaagcagtgatgtccccagagcatgccatgagactttggggcaggggggtcaaatcaggccgcagctcctgcctgtcaagtcggtccaactcagccctcaccctgacagatacggagcacgaaaacaagtccgacagtgagaatgagcaacctgcaagcaatcaaggccagtctaccctgcagcccttgccgccttcccataagcagcactctgcacagcatcatccatccatcacttctctccacagaaactccctgaccaatagaaggaaccagagtccggccccgccggctgctttgcccgccgactcgaacgac

SEQ ID NO: 373270 - DNA, 356 bp, Homo Sapiens
ggagagaccgatgaaaggcagaagctggggctagagaggccattggcaggcaaaagctggggctagagaggccattggcggcaaaagctcggcctctggaggccgcaaggagacaggagccgggcctggtgaggttgacttaaggatgttttgctcctggagaggccgggcctaaagaggatgttgaaaggatgatgccaggcctgtagaggccaacagaaggcaggagctgggcctgagaagcccaaattaagaaagttttaggcctgtaagttccctaaagaggcaggagctaggcatgcatggagaggctgctgtgaggcagaagctggaccactagaagtgtcgggtgcgag

SEQ ID NO: 373271 - DNA, 656 bp, Homo Sapiens
ggtcaggcactgaagcctggtcaggcactgaagcctggtcaggctctagaggtgaggagacgcacaccttcccatccccagctggaatggggcgctcaggccctggctgctccttagcctgctggggcctggctgggctgtccccatgaagggcagctgtaccctccatccccggagccttgtcagagcaggctgggtcctgacagcttcctggcagcacccaatcaccttccactacggagaatgtcctcgtagtacctgcttcaggcagatcaccggacgcacatgcctgtgtctcagctgtgctcagggtgatgtcaccctctgctttcccagcagcgcccttgccaccttgccaggctcccaggggagtgtctaccaacttctccagttgctggtaaaggggtgctctggttgcccaggccaattccccatttccaagatgccaagtagtgactccgggtctcctttcacccccaagcgtgtcaagggtccagggctcactgttggcctcaggcacagtcaaaacctccctctgaggagaaaggggcacacgtggaccttggcacaatgtcctggaacccctgtgtgagcaaagtccccgggaccatcttctaccatgtgactgccgaagccgctgtctgacggatctgtag

SEQ ID NO: 373272 - DNA, 653 bp, Homo Sapiens
tcttgaccccgatttccagttcttaagaacataaaacatgggatcacaggccttgttcaaggattaaataagataatatattcaaatatagtaagcactcagcaaatgctcgattaagtctgaaatctaaacggggctcatagtgcacggaaatagaactgcagactttttaagagacctccaaaggctcactaatccaacatcctcgatatggcactaaaggcattaatactagtggccgtaatactagtaaacacacataatgttttctgtgccatctactgttccacagtacgttatttgtatatatgaactcttaatctttgcaccgacaggatttgaaataaggaaattttacaaatgagggcatttggctgatagaggctgagagccctgctcttgttactggtcaagccaggagtccaatctagccatactggttgtagattttgctcttaatcactacccaacactgcctctcagatatgccagtgaggcagctccagcctagagggcagtaacttgctcaccgtcacctcgctggtaatcttctccctctcaggcctgggctctttctcgtgatgttgaactgattactcatattcattgggagctgctagaaggacccatcttctgcaccagcccgctcgccc

SEQ ID NO: 373273 - DNA, 420 bp, Homo Sapiens
tgatcgaatcgagctcggtaccgctcgctggatgagatgatggggttaaagctggttggggacaaggggccccaatttttttcctcatggctcggatctgaagcagtgcccggaagggcagtcggcagatggggcagttgttggcctggtagcgcagcgtgtctgcacaggtgttacagaggcagaggtggcgacagggcagaatcaaggtgtcccggacatccgagagacacaccacacactcggcactgttatcactcacttcgtcttcagccacctggccaaggagaaagaaatgtagccaatggcacaaagcccttcctgtcccatactttactgacaaggcagcgtggctgaagagctacgatcagtcataattacgaacaaaatctgcattgacattggactttgtcattttcc

SEQ ID NO: 373274 - DNA, 528 bp, Homo Sapiens
gtaatggattgggggatggatggcattggtggcagagatggatcgctggaattggaggaatggtggcggcgggactgtgttcattggagaggctgtgcttggaacagttgagctaaacgttgggctcccaaaggaagcccccatatttggaggagctgttcctacgctggctgtggaaaatgtctgtatgtttttgttgctttcatgaacagaagtggtggcagtaactacactgggtgatggattattaaagttggatactgttgtgggcaagtttaccctgctactcattcctgagctaggtggtggtcctgatctactggcatttgctggtggtatatctaagttggcagtttcaaaacgcctacgactcagttcaatcatattctgcatttccgtcttactactcaacaatagtgttacttttgaccctttaattgtaccacctgtgcgcatcataccaagccttgcatcttcatcagtggcaaaaacgatgaaaaggcgtcacccagttcggcccctgtgagg

SEQ ID NO: 373275 - DNA, 459 bp, Homo Sapiens
gggctcttcagtctgcagggatggcttggtgctgccaaagccactgtctgtgcctgccgtgcaggtccaagttcttcagctctggggacaccttcaaaaaggcctcctcatcaagcgggtggatggtgtcttgggtctctggggagggacgctggctgatgaagatgaaggggctgggcttcttgaagagcaggacactgggtagcttctttcggcgccgcacatacagctggagggccaggcagtaggcgagggctccggagagcagcaggacaaaggcaaagaagatgatgacgttggtcacggtgaaatactgcctggtgagggagatgcactcctctttagaccacatccccttgttacttcgggaagcgacagatggtttcacctggacacagaactctcccacttctccagaggttaggaggctgaagttttcatgttttactttcttgtgtg

SEQ ID NO: 373276 - DNA, 334 bp, Homo Sapiens
tgagccaccaccaccgggcccgatctttttataaactaaaaaactgaaccccaagattgtttcagtggtttattcacagccacacacctgttaatgagagaatccagccagattttttatctgtaagaactaagccacagggataaaatggttccagcattcccttggctgtcctcattgcctcctttctctctctcccccattataaattctctccttttggtgaaaaattacatgctttattcaaaagctatgaaagttttctgatttattcccacctccttttaacactgaagctcatctttttaaacagaatttctttccagaatcatgc

SEQ ID NO: 373277 - DNA, 1104 bp, Homo Sapiens
tccataatgtgtgcccatagagaagtcactttgccaaatacatctccccaaggaacaaaccacctgatagaagactttgcttctttgtggcattctggtcgctctcccacagccatgcccgagccctggggaaatcctacagatgatggtgaaccagcagctgtggcgccattcccagcctggagtgcatttggtaaagaagatcatgatgaagctttaaaaaatacctggaatttgcacccaacaagcagcaagacaccttctgttagggacccgaatgagtgggccatggcaaaaagtgggtttgccttttcttcttcagaactactggacaattcacccagtgagataaacaatgaagcagctccagaaatctggggcaagaaaaacaatgactccagggatcacatctgtgcacctggaaatcccagttctgatctggatcacacatggactaattcgaagccaccaaaagaagatcagaatggtttagtggagcctaaaactaggggcaaggtatatgaaaaggtagactcctggaacctttttgaggagaatatgaagaaaggagggtcagatgtcctagttccttgggaagattcctgcttagtcttacaaatgttctgattacagtgcatccaacctaggagaagattcggtgcctgccccctcatatacccattattccacctcagactcggacacatcaccaacatttgctggagacgaaaaggaaactgaacacaagccatttgctaaagaggaaggttttgagtcaaaagatggtaactccacggcagaggagactgacattcctcctcagtcactgccacagtcactgcaacagtcatctcgaaatcgaatcagttcaggtcctgggaacctagacatgtgggcttcacctcatacagataacagttctgaaataaataccactcacaacctggatgaaaatgaactcaagacagagcacacagatggtaagaatatctccatggaggatgacgtcggggaaagcagccgtccagttacgacgacccccgcatgatgcactgtacatgacacaaccgacaactcacacttttgcacacagcaccaactcct

SEQ ID NO: 373278 - DNA, 511 bp, Homo Sapiens
  misc_feature (342)..(366): n is a, c, g, or t
tgggttggccaggcatggcagggaaggagctgagaaaatgtaccatcacagggtcgtgcctaagcctatagaaaacttctacctgttgctcctttaaactacactaaaagtccaagtttccaatgatattatcttaaccagtcatttgctttatcccataaaatacacacaaaagccttagaataacaataccaacataacaagcataatacgattactctaacagttgaggattatacttttggagacgctttatccttcagttataatctattagggccatataatcaaacatctgacatttgaaatagtgcctctctgtatggttatgtaagcaaatcnnnnnnnnnnnnnnnnnnnnnnnnncaatgaattagaatcacctgtctcgtttcaatctttaaggctcttttacactttaatttggttttaaaatggtgcaagatatgtacatggtcccaaagtcaaagagacaaaacaagatatattcagaagtccagcttccagttcg

SEQ ID NO: 373279 - DNA, 756 bp, Homo Sapiens
ctctgtgggcgaactggggtggagggcagggagctctgcagttggccagcagtgggtggggacagagggcacatgcatggcagatgcaggggcactgccccagaccagctcttgtgccgtggccacacgcagccctgtctgtgtttggtggggagagtccctgggtgtggctggcagtgccctctgagggcaggaaggaaaggatgtctgtacaggatagagtgggggcccatcctgagagggcctcaccacagagacttgattctgtccaaaataaagacacctgagatgtggtggcctcacgtcttcccagtgtggagctgtggtggcgtctgaagtgaccgctttgcactcggcattttgatgtatggggagagcttttagagcctgcagctcttttttttaatgtctctgcttatttttttccagacttctttaatgtttagacctctttattgcgatctaatttacatgccataaaatgcactcatttaagtgtacggttaagtggtttttatatatttacagagttgcgcaactattgccataatttaatttccgaacattttcattgcctccaaaggaaccctgtgtttaagaactcactctttactctccccagcacccccgccctggcagccatgtctccagtgtctctgtgaatttgtcttttatagacatttcctaacagtggaacctacgacatgtgatcttttggcgtccgaattcttcggctgagtttctctgtgtcgtagc

SEQ ID NO: 373280 - DNA, 369 bp, Homo Sapiens
gatgacgatacttcccagtggaagctcaaacccgaccaggtgcaaaccaagctctacactcccttgccatgaaacaaataaacccaagcaaaaaccgtagcatagtcagtagtaccacagatcgagccaggccagaaatctgggagttatccttctttttctcctagccgcctaatcaccaagccctatttagaaacagaggaataacattcaagtcactcttcttcccaccacattggctgccactgtcctggtccaggccgccgatcatctctccaggcatggtagccacttcctggcagtcctgccatgtctatccctgctctctaacagcctgttctccacccagctagcttttaagaaatatgc

SEQ ID NO: 373281 - DNA, 136 bp, Homo Sapiens
ctcggctctaccttgtcttgtgtttgtgtttcccctaattggctcaggttctgagatgtggctggaaggacaaaccccaacatcacccaaaacaagccaattaggggaaacacaacacaagacggtaccgagctcc

SEQ ID NO: 373282 - DNA, 288 bp, Homo Sapiens
ctcggctctaccttgtctaaaggccttccagccacagagaagggagcatacaaggcctttagacaggtggataaactgaagggcttgtggtgaaagaacaggcagcaggaggaagtggtgtgagatggggtcacagagggaggaatgacaatcacagaaaggtggttgatttttttgttgttgttataattgaagtttacagccacgggaagttgtttttgaaggtgaatactcttatttttggacttagaaagaccacagctgggtggggatgtgtgaacacaccag

SEQ ID NO: 373283 - DNA, 234 bp, Homo Sapiens
ctcggctctaccttgtctccagatgctctggagaccaaggtgggaggattgcttgagctcaggagtttgagtcccgcctggacaatatagtgagaccccatatgggaaaaaatatatttaacacattatagggtttccagactgtactgaagaaaaaatttaaattgccatctaggtgtcttaaatgttctctgcagaaaaactatcttcaattttaatatacgaacagtagtg

SEQ ID NO: 373284 - DNA, 284 bp, Homo Sapiens
ctgctaggctagttggagcgttccctagagctcagaacaaattgtgtcctctgcgtgatccctaaagtataggacaccaacaagcactctgaaacaggggcagacattcccacctggtacctctcaaagtcctaggatgcctgggatcttccatctttcagtctagcacgtgggaacaaatacaagagatgctgcctcacaacagccttggaaaagatgagcgccagggctgtcgtacccatctggttcagtaatgcgaggcatgtccacgctgctatcatgga

SEQ ID NO: 373285 - DNA, 583 bp, Homo Sapiens
gcgtatatcatatatcgggataggggtagtgggcaccacacctgtgacattgcagaacaaccaccaccaagcaaatatagggccatcttaacatacatctcaggagacgaaatgagaaaagatggggatgtcattttctagtctatgcgttggaggccaggtccatgtatatttatttctttagtctatgcattaatgcacaaatgcatcctgagtggaggttcagctgaacgttcaatgtactggagcaagcatcatcaaaagctgctagtagccatgtgtttgaacaggaaaaactcattacagaaaatgaaatgtaaaggcctatatctggcagcttgtatcatcttcactcatggcttacagccaatgtataacgcagctggacatgttttcaatacaaggtctttgacttcaatgtggattttaaatatgtactcccttgacacatgagcaaattatggtgacctatggctccctgcgttctttgatcattacctatgacttaaccaactctgcctggagatgtggacattctgcatatgattctgtatctggcgagatgttggtatatctccaggcc

SEQ ID NO: 373286 - DNA, 609 bp, Homo Sapiens
tgttgcctgatctactttcgaaagcgtatgagggatgtttgagcatattgctcaggagtcttgcacagtgggtcaggggcgtggataatcggcgataaggtcgaggatggacctataagacataagctggctttttcactggcccttaagtttcttaactcctgagccagggttcttcttcagaccagacgggacctggaacatctttggtcctacagatggtgtaggttgggtatcagcatactggggagatacgtgggtgggaggagctgatgtcagacaggccttgagtttggaacattggattacaatcacaggaaccatcttgagccttcaattgatgaaaaaacctccttagttgaacaaatgcaaaactctggcagactccttctgaggatgatgaagaaaagacaaaactctctgaacatacattaaaactcctgcaggagggatataattatatatgggggtactagaaggggagtcaggataagggtggggattaggggagttattagacagggagtcagggcctcctgccatgggaacttctggtcagtgatttcttcccttggccctgagataggcagctgggtggagaaggcttat

SEQ ID NO: 373287 - DNA, 527 bp, Homo Sapiens
  misc_feature (427)..(440): n is a, c, g, or t
ggacattatggatttgatacacctttgtgatatccagggcaagcattacactctggagtgtgatggaagacatgggctgtagatttgtgagtcatatgcttagaatgtggttgaattgagaaagatgggttattataagacagagaagtgagcggagaagtaggaggaaaactaggagaaggttgtatcacaggaaccaaggaggagagtatctgattctgctggccagaattaaatatgctgatgattggagagtcttttgcatttacctcgtcagtcactgttgaccttactgacagctggagatggaatttggaagcaggttgagggaccagtgggaagggacggaaatgaagactgaaaagttccagaaatttagccatgatggggatgactgaatgtagtggttgaggtctcatgagttggnnnnnnnnnnnnnnctgtttaatggatgagattctggagcgtatttaaaaatggaaggctctatttgagagggatagtttaagtatgcagaatggacgtct

SEQ ID NO: 373288 - DNA, 610 bp, Homo Sapiens
  misc_feature (558)..(558): n is a, c, g, or t
  misc_feature (592)..(592): n is a, c, g, or t
tgagctcggtaccgacgtcattcttgcatcagcagggtataaaagcagaaccattgaccccgtatggaagatgcactaccacccagcctatcaggacaggccaagcctgaggacagtgactgtcacagaaaaatagaaacttgtggttccaggaaatccgagaggtcttgcaaaggtgctctttataaaaccctggtgtctgagggcatgctcacctctctgcgagctaatgttgacagaggaaaacgaagctcaggaaaaggaaactcctctgatcatgaagggtgttggaaatggatgggatatttttaaccttatgaacaggctccatggtgtttctgtcttctgaaaatatggcttctgtagggtgaatggcatccaagaagagtagctggtttgaccatttatccccacttcctttgctggttttagtcggttctgaggacacatttccagtcttcttcttttttcttgggacaggtacacatttccggtcaaatgtaacaggactatatcgagggaggctgtagaattttttttcaaattcttcatccagcntttgcggagccaaggagacagtcttctttgtgcntctgttttcttgaacttc

SEQ ID NO: 373289 - DNA, 464 bp, Homo Sapiens
  misc_feature (103)..(140): n is a, c, g, or t
aggatccccatcatatattactcaagattatcaatatccttaagatgtaaatggcttttgcacaacaatctatagaaaaatgactatgaattagtaaatcatnnnnnnnnnnnnnnnnnnnnnnnnnnnnnnnnnnnnnngaccaatggcccattgacacaaggtagagatgttcagtcaccagcagacaaagccatgctcacatccacagggaaagcagactcgatccgtcggaggagcaaaggttttcaatgtgataaagccggttctgaggaagaggggaaggcatcaggtttgcctcaccagtgagaacactaattgaaaaaaatccctccctgctgggcaggttagcaatatgaacctgaagtcttaagagtttaacagtcatttccttctcgaaatgtatgtattcagcattcccaaagagataacaacagacgtgaaaaagtctgagctacaaggaa

SEQ ID NO: 373290 - DNA, 643 bp, Homo Sapiens
actcggctcggtaccaggacgtccatagctagtctgctctagtgactacggcgtagtgtggagcgagaagtggcagaacacctagcaagaaggcttctggagtgacatatgcagcacggacactccttgccaaatgcagttatcacctgcggtggccaaagatggctcagaacagatctcacagaaacggtctgagtgtccgtggttaggtatcaggattagtgagagcccagaaccaggtcaaaggactttcacaacattaagttctgtcaactgcccttttataagtactctgagtactgaaggctgttcaagcaattgggaaatgggaaacgatgattatgtttcagaaccccagcaagaaccttgcccatatgcttgtgtcattagctggggagacgactctgagacggacaccgaaggagacagtgaatcctgttcagccagagaacaagaatgtgacggtaaaactgccattcaatgcacaagggataatttcactgtctcgaaatgatttccagtccttgtggaaaatgcacaagcttactccagaacaggtggattgtatccatgatattcgaagaagaagtaaaacagaattgttgacagggtgtcgcagaagaaaattgactgtataagaatt

SEQ ID NO: 373291 - DNA, 517 bp, Homo Sapiens
aatttaattgatcaccacatacattcacataggctaaaggtacgaggcaaaataataaaactacctactctaggcatctgctgtcacatcataaagctgttaagtaatgttaggattttaattatcaggacagtatcacagaaatgttcccctgtatctaaaatcattatactcattttaaccatatttttatagacacattagcaaatttgactgattatttcatatcagaaactctcaattcattatttctgaaccatgttataaatggacaagacttaacatttaaaaactttcctagctttaatatactgcccaaatacgtaaatctggagttatcaacatgaaagaaaaagcctaattatttgattgttagcatttatatcaacccacaccatccatagtctatgtaaaagaaatgaggacaccgtgagtggcttagtggaatattagggagaatatattaacagctgggcatgctcagcttccctctatactgatttctgaagtcaagaat

SEQ ID NO: 373292 - DNA, 565 bp, Homo Sapiens
cgtgtataacgtcgggtctgggtattttttcaagaaacaaactcgggttttcttaatattttctattattttcctactctctatttctactctgatcttggttattcccttccctctgctaagttgggacttagtttgttctccttctaattccttgaggtataaagttaggttgagacggttcttcttttttaatgtaggcctttatccctcttagtactgctttttctgcatctcttaagtttgggtacgtcgtgtattcagttttattcgtctcaagaaacttttcaagttccctttggatttttggactcaaaggtggttcaaaaggatatcatggtttagtttccacacatttgagttttccggttttctattatggattcctaatggaattccatggtgagtggaaaagattcttagaatgatttggatcttcttaaatctgaagactggtttggtgaactacatgaactatactggagaatgtttcatgtgcacctgagaagaatgtatattcttttgctgttgtgttcaaagttccatacgtatctgttagatccat

SEQ ID NO: 373293 - DNA, 335 bp, Homo Sapiens
cgaatcgagctcggtaccagacgtcattctgcatagacgtcattctgcatagacgtcattcttgcatgagctcggcttccggcttcattcctctcctcattagtgtcaggagcacagttagtcctgtatgtcgcaatacctctactgctggctgattagtaaaaccctgattcatccatttcttccgggaactcttaacttagccaaaattttaggttgtattcaattaggaaaaatcatacaaaatacctattcccactcaattctagattaatcgaaatcttcctgttgagttggttatgcaggtaaaactacaccaccggcttgggatatat

SEQ ID NO: 373294 - DNA, 613 bp, Homo Sapiens
gagacgtccattctagtcatgctggcaggtgagtagctggcagggttagaatggggcaggtgggtggtcttcgttactacgacgggagcagcaggtggtagtgaggcctgggtggctggacagtgagggacttcttgtggatgggtagttctgcattgaactctccatgcagttctactcaaacatctgctcatcaataaactcgtggttcttgatggtggaggttcgtacagataacaggggatcatccacaagataggacaacccagtggttttttccaggcagtgcagcaggtgatgatgctggctctcgatgagtgaggtggtcttgcccatgtgctcctcttctggggtgcccgtcagctccagcgcctcgttgaggagcccgttgcgcttgctgtgcaggtatgcattcgaactgcctgttttggccacacggatcctggcaaggcgggccttctttggtgccctgcggtttatcagctctctgattctggtggtaaatccggctaaagtgggaaaccaatcacagggactggcagggcaatgaccaggacgccactcaaggagcagatggagccgagatcttcctgcaatcgcttaggaccatgtc

SEQ ID NO: 373295 - DNA, 650 bp, Homo Sapiens
ggagtcggtaccagacgtcattcttgcttcttctccagccaccactcagatctttctgcttctccttacagcaaaactcctccaaagttatcccttcttctcttcccttctgaacttacttcaatcacacttcaaatatcgtaacatcatctacaccagaggtcagtgacctgtggcccatgaaccaatccagcccactatgtgtttctgtaaataaggttttattcaaggataaccatgctcattccgtaggtactacctatgactagtgctacagcagcagaattgagtatttgcagcaaagatcagatggcctgcaaagcctaaaatatttactctctggcccgttacagaaaaagtttcctggctacttatctaaaccactttattcagggccaccaatgaacttcatgttgcccaatcaaatgttgattctcaggtctcatcttactctgttgatcttcccattagacatagttcatcatatctttcttcctgaaacgctggcttccttgaactctggtacacctccacattttcatggtcatcctaccccatatagcatttgtcctcagtctgttttgctggatccctcttcatctttctggtctttaaaaatcgggggtatttggactcagttctcgagtctc

SEQ ID NO: 373296 - DNA, 492 bp, Homo Sapiens
tccagttcactgagtgatttcacacactggctggcaattcttgagcctgctggaaaaccaaccagggattcacctcatccatcactggtctgcaactgcctgttgagggccacaacaggggatggagaaatgtttcttaaccagggctacatcagccagtgaagggggatacgctctcaaatgcaaaccctggaaaaccagatggataagaagcagacctggagctcaagatgggctccaaaggtaagagaggtatggttcagatcctgcttcagacctaactagttgtatgaccctggacaagttacctaatctccttaaacctgtttcttcctctgtaaaatcgggataataaaacctacattacacgggtttgggagctttaaaagaagtaactgcaggtaacgtacacagccccgtgtgtggtaaacaaaatgtacttggtaaatgttaaaccattgtgctcgagctcgcaatcgactgtctgcgacc

SEQ ID NO: 373297 - DNA, 637 bp, Homo Sapiens
  misc_feature (15)..(15): n is a, c, g, or t
  misc_feature (587)..(596): n is a, c, g, or t
agacataacatacgnaattctctgggatgcagcagaacagtgttaaaaggaaagtttatagttctaaatgcctacctcccaaagaaagatttcaaatccatgatctaacagatagtactctaattcctaggttacctggggtcccagagcctagtaaaagtccagaatagaaaatccactttcaccccaatctattagaaaaaagtccccccattaccaatcttggccgaatgccatactacaccgccataaaaaaagaatgagaccatgtcccttacagccataccgatggagctagaggccctcctaagtgaattaataccggaacggaaaaacccaatatcgctctcacttataactgggagctaaaccctgagaacacatggacaccaagaagggaaccacagacacccgggaccgacttgagggtggagggtgggaggagggtgagatccaaaactacccttgggtactatgcttactacctaggtgatgaaataattggtacacccacaccctgtgacacataatttacccatataataaacccgcacatgtacccactgaacctaaaagttggaagaagnnnnnnnnnntcctgatgcagaatgacgtctggtaccgagctcgatcgtac

SEQ ID NO: 373298 - DNA, 663 bp, Homo Sapiens
ttagaatcgagccggtaccagacgtcattctggcatgtatcaatagttcatccttttcactgctgagtcatattccacgatatggacataacacaattgtttatccattcaccgtgtgaagcacattaatttcctgtttggggctactacaaataaagctgctatgaacatccgtgtacagttctatgcatgaacataatacttcatttctctgaataaatgtccaagcgtgcatttattggacaatacaataagtgcaggtttaattttaatagaaactgccaactgttttccagactgtgccattttatattaccatgaacagtgcctcagtgatccagtttctctacatccttgtcaacaattggtgttattactattttcattttcaccatacttgatagggtgtagtgatatctcattatagctttgaattatatttccaggaaagctagatgttgcatatcttttcatgtacttagttgtcatctgcataccccttctgtaaaatgtctattcatatatttggttcattttctacttaaactgggtttatttaacggttgaactttaatatattctagatacaagtacttcatcacatatgcagttggaattatttgcttaagtgtgtcattctcttaatgaagaatggcgtcggga

SEQ ID NO: 373299 - DNA, 653 bp, Homo Sapiens
tagacctccattctggcatcaatatttggtacaattttgctactagaagactcagtttccagagttgtaccaggcatttcagcatactccacccccttagttgatgacgctaagtctgctttcagaaatactgctgcatgccatgctgaagttgtatggattttgaatgcttttgtgctgtcgatgatactggatgtacaagttaagtgctacgctaccggtcatgtgagcaagcaatccaagatcatcactaacacccagatgtacttgtgtgtcctgaatatttggaataatgtgattgctagaaagttcaggaagtagtttttcctcctgtttgggtattttatccaagagaaatgatgtactactattgggaagggcttctttctcatctgctaatgttatcaatggaccattatccttttcttcattttttttaatgataccaacacttccatgtacattgttctggagtttctcaacagcagcactatatacattatccaacagagattcaacctccacaagggcaccattctctccacctactaaagtctccgctgataaatccatatcatcgagctttacttctattgcttccactttctctgctttatatctactaaaagatcatgtatcaagaatgacgggat

SEQ ID NO: 373300 - DNA, 575 bp, Homo Sapiens
ggtcccagacgtccattctgcattcattcagaaaatacttctcgagctcctacggtgtgtcaggcactaagtgcttgtgatagacatcagtgaaccaggacagagatctctgcattccgggagcttatttgacgggggaaacggagaaacggggtgaattatagataattaagtaaattatacggtgtagtaggaggtgataaatatcatgggaaagaaaagaaatctttttcctcctcgcaaaggtggcatttgacgccgagacttgaagatacgagaggtctgagagaagagtcgtccaggtagagggaacagcccccgggaaggtcgtgaggtgggagtgtgtctgaagggttggcggagcgtcaaggaagccagcatggcagaggcccatggacaagggggacagtcataggagaggaggttagagagatcagaactggtaggccttgctcagggcttcttgagcaatagttcttaatccaaatgcctaatgagaagccttcttgtttggcatctgtaaaggttttttttctgcccttctctccagcagaagtgcagaagcactgacaaat

SEQ ID NO: 373301 - DNA, 204 bp, Homo Sapiens
agagttgagctttgatagaggaaccaacatggaaaacaggaagatggaacaaagaattcccaaagtgggggtgcgccagacctcatggtgcaattgttgaaataagcagtattaaagccagatcataagagcagagcagatcgaagaagcaagagcctgggcattttgcaagtgagcccttagggtaccgagcctcgagtcgta

SEQ ID NO: 373302 - DNA, 277 bp, Homo Sapiens
aatgcagcggactcggcagcgtgtcactgaaaagggcctccggttcaatgaaattaagctcctttctactttgtttggccttcagagacatttcaatccactcccaaacagccatgccctgcagtgagctgacttaccgcttaagcagaggtcctcccattgtctgtgcaaatgctctatttgctccttcaaaaccatcacatcttccacgagaacgtgccgggttaagtccgccttcatagttggaagttctttcaagtgccgagtccgctgcatt

SEQ ID NO: 373303 - DNA, 386 bp, Homo Sapiens
  misc_feature (15)..(15): n is a, c, g, or t
  misc_feature (365)..(365): n is a, c, g, or t
ggatcagtcacaggnttggggggtggtggggtcaaatcttaatatgtgaaagtgccacagggcacacacaactgtagagacaaacagaatgctcatcttctggcaggcgacgagtggtcagacctcagatggcctcccagctctgtgtgcgaggcttcttggacgtgcattgccaagggcactgatgaagctgagtggttggattctttggtatccacattacattgggaactcttggtccttgcagcaattcctcactgaacactcagggtggtgatgaggcataaaaagaacaggcatcaacttggaaacacatgctttaagtcagggcagagaaacaataagttgcagccttcatggcctgnactacctctagccacagtctt

SEQ ID NO: 373304 - DNA, 648 bp, Homo Sapiens
aaagagatagtcagagctttctctggtgctttaaacaacatgctttcaaaccttgtggcttttgatgtttgcttactcttagcttaatttagcctggattactagtcctcactggagctgcccctgctggcatggcctggtatggaggggaatggggcgggggcagtggcactgggtatgtagggcatctgggaatggcagaggaagctagaattctctcttccctgtcctctgagtggctcccctggtctctcggaacattaccagtgctgtcaacggtggcatagcactttacagttaaactgcacagccagcttgcctcacgggatcttctcacacacacccaaccccaaccatcgcccctcacagcacaggaaccatctcagtgtcctcgtctccccggtacacatacacacgtgcacacacatacaagtggtgcacacttgcaagaaccagaatgcctcaaagagctccctgatgggggttgggggcagctgctgtccatgaagcccagggacatctgttgctcctgcagggcccccctttccccaacaacagggctcagcttaccagatgaagggcggaatttccaggccctctgaagccgagctggaaaggccaggagcggatggttgggagcggatggtt

SEQ ID NO: 373305 - DNA, 523 bp, Homo Sapiens
agaagaagacagtgtgattcgcacaatggcagggtcatgatacaatccagatctctgaccccgtggaggtgaaggggctcgtacagcatgccaggctgaggactcctcgggactgaggcatccagagtcgcagctataaatcaataagggttccctgccccattacatcacaaggcagcagcatcccaaagagtggcgttgaagaaaatctcatcaccgtgggctcagtttagattgctagtcggctcagaaagctacctgcaattgcgtttcccaggatgcaccacaaatactctccacatgagtgagaacatcagtggatgaaactcagcatgcttagtgcggggccaagtcctctaacaaaggacacagcggttaacctgcatttcgaggacaggcactgtcaagccctcatcagggatccatccagagaactttggtaattcttgcaaaatccctgtatcacacaatttccttccttaatgtgatgaagtgtaacggacacatctataaagcttcttca

SEQ ID NO: 373306 - DNA, 523 bp, Homo Sapiens
  misc_feature (481)..(481): n is a, c, g, or t
  misc_feature (503)..(503): n is a, c, g, or t
  misc_feature (512)..(512): n is a, c, g, or t
tggcacgaggctgaagaagctttatagatgtgtccgttacacttcatcacattaaggaaggaaattgtgtgatacagggattttgcaagaattaccaaagttctctggatggatccctgatgagggcttgacagtgcctgtcctcgaaatgcaggttaaccgctgtgtcctttgttagaggacttggccccgcactaagcatgctgagtttcatccactgatgttctcactcatgtggagagtatttgtggtgcatcctgggaaacgcaattgcaggtagctttctgagccgactagcaatctaaactgagcccacggtgatgagattttcttcaacgccactctttgggatgctgctggacttgtggatgaaatggggcaggggaacccttgatggattttaaagctggcaacttctggaattgcctcaagtccccgaggagttcctccagcctgggcattgcaggaccaaggccccttnaacctttccacgggggtcaagnggttccagntttgttattca

SEQ ID NO: 373307 - DNA, 566 bp, Homo Sapiens
tcgtgcccgctccctgactgtgtctctccctctgctgagtcctgcaggggacctgcccaccctttgtaagacaagggactagacagacgtcccgaagccagaatgtggggctctgtgcatctcagcagcctggggcttgcatttcttcctacctggtgtgctggcccccgggggggccatgccagtggccatgggcaccacttccccaacattggggaaactgaggcacaatgaccaattcccccacgacaaatcccccctccgagcagactacctgggaggtctcctgtccacggttcctgacttagcctgttggggctgcaacaaagcaccgcagcttgggcggctcatcaatagcagacattgctttcccccagttccggaggctggaagtccaagatcagggtgccagcagatttggtgtctgcagaggacccactttctgggtcctggacagcaccttcctgcggggtgctcacatggtagaagaagcgagggtgctctctgaggcctctttcatcagggcactagtccccactatgaggctcagtcctcagccccatcag

SEQ ID NO: 373308 - DNA, 455 bp, Homo Sapiens
caacgggaatcagcctggtggaaacagccagggaacagctgttcaggggataacttttaatgttagtcataatttacaaaagcagaccgccaatgtggtgccagtacagaggacttgcaatcttgtgactcctgtatctatttctggagtttacccttctgaaaacaagccatggcatcagaccacagttcctgcattggctaccaaccaggctgttcctctttgtcttcctgctgccatttctgctcagagtattctcgagcttcccacctctgaaagcgaatcaaatgtgcttggtgccactagtggctcactgattgctgtttcaattgaatctgagcctcaccaacatcattctttgcacacatgcctaaatgatcaaaattcttctgaaaataagaatggacagagaaccccaaagtattgaagaaaatgaccttgtgttacaacatccc

SEQ ID NO: 373309 - DNA, 395 bp, Homo Sapiens
aaactgtgtgaagtgggaagtgaggatagccacgaggctggcacagaggtgtacgatgttgagggtggcagccccacgaggagaggtgaggcaggcagatctgctgtggcgtgaatggagacataggagcaaaggctcaaatgggtggaggaaggagccaagttgctgtcccagcacagggaaaggccagggacagacccagagggggcagtacttgagaaaaggcaagagggaaaggtggctaaagtgggatcgaggagagagggagagtgaaaagggggctctcgagggaactgtgagcctctggagagtctacagaaggagagtaatgtgaactgatgttttcaaaggctcaactggctgggcatcttcggatatgcaatagcccaggcctg

SEQ ID NO: 373310 - DNA, 631 bp, Homo Sapiens
  misc_feature (418)..(440): n is a, c, g, or t
taggcgagacgtggtgttaggaaagaaagcatatagtgtgctgaaatctgtaacgcatatttgaggctggggatatcaagaaagaattccccaaggaagtaaacctaaggtgagatctgaatgatctcatctgaaatcacatgaaataactagttgaaaagagtgggaaattgtactccaagcagtgactacatttgtaggggagaaagcattgtgtgccagttatcaagttatagtgtctcttggctccagatctactcttcttgccctactttgtgatactgaagctggaccctgtaagcaattctctttggccagctagtagaatgttaactttggatgtcagcagatggcaataaagtgaccctgcaaggccataagaacaggagtatatctctcttgggggttctggatctcnnnnnnnnnnnnnnnnnnnnnnncacaggaacccagcagccattcagaggagctccaacctacatcctcgtgccattccccacctcccgccactgtcagtggctttgagcagctccaatccatctacaccctctggcaatggcagcctcttaacagaagagctcagtctgtgccctttgcaagttcttcacaccacaagtgccgtcctctggta

SEQ ID NO: 373311 - DNA, 261 bp, Homo Sapiens
  misc_feature (47)..(47): n is a, c, g, or t
  misc_feature (54)..(54): n is a, c, g, or t
  misc_feature (161)..(161): n is a, c, g, or t
  misc_feature (168)..(168): n is a, c, g, or t
  misc_feature (215)..(215): n is a, c, g, or t
ctgccacgactattgatctctaccagtcgcactgggatgatcccganaacgccngttgagatgttctcggcacctatcaggagctgatcaaggccggtaaagtccgtgcaatcggcgcatccaatctgacaccggaacgtctgacagaatcgcttgatgtntgcgaangaagcatggcctggccgcgctagtgaaaccttgcagccggctttacnaatctctacgaacagatcggcttttgacggatggacttgaagcgat

SEQ ID NO: 373312 - DNA, 577 bp, Homo Sapiens
cgaagtctgtggacggggaagccacatgcgtcacttccaggcctgggcgtgtgcatcctccactctcttcccctgtgggtgcagaaggcggggcagagggccctgaaaccctggaggtcggtggagccccaaatgaaggaacgtgggcccccgggtcctccatgtaaatttaggtaacactgaactgtccaggtgaacaagaaataaacgtcaaatgtattccagtcgattagatttggtgatggttgttacagcggttaccctccctcaacataataaattttcaaacaactcataatggctcactcatgtataaaatattcccatatgaaatcccgggataacatgcttattctagctcaagcttaatcagagtagtccatctgagggaggagatagtagagggcagcaaggggttgtcactgaagataactagccttgctaaaagaatggttgaagaagtgagctacagatagggtaaatccacatctcagacattctgtgatggtcctgatattatcctaaagtaaaatgtagagttgaaccattttaattagattctagaattctattaatt

SEQ ID NO: 373313 - DNA, 397 bp, Homo Sapiens
  misc_feature (33)..(33): n is a, c, g, or t
  misc_feature (42)..(42): n is a, c, g, or t
gacatcttgaagggagcagttcagttacagcantctctccanacccaactataccatctctctactctttatcttgccctcacatacacataagtttgtcattgttcttcagttctttgggtaatctcttcctagaaactgcatctaacaaatagaccacatccccaaattccatcatgtccaaaaagaagcacggtatttccatcaacaccccagctgccatcaccaagccaactcgcctgacttccattcacttactagcaaacatttaccaagtatctgccatgttcattttgtcaatgagaatgacatgggacttgttcctctaggagatcacagtctaatgagatcaatgtttatatagaaaatgtaaataggttgtgataagtactaaatg

SEQ ID NO: 373314 - DNA, 582 bp, Homo Sapiens
ggcattgctcctgggtgaaggagctacagctggagctgtaccacacggtgatgtatcgcaactaccaaagaaagaacgacatggatgagccgcccccctttgactacggctctggggatgaagacggcaagagcgagaagaggaagaacaaggaccccctctatgccaagatggaggagcgcttctaccgctacggcatcaagccagagtggatgatgatccaccgaatcctgaaccatagctttgacaagaagggggatgtgcactacctgatcaagtggaaagacctgccctacgaccagcgcacctgggagatcgatgacatcgacatcccctactacgacaacctcaagcaggcctactggggccacagggagctgatgctgggagaagacaccaggctgcccaagaggctgctcaagaagggcaagaagctgagggacgacaagcaggagaagccgccggacacgcccattgtggaccccacggtcaagttcgacaagcagccatggtacatcgactccacaggcggcacactgcacccgtaccagctggagggcctcaactggctgcgcttctctt

SEQ ID NO: 373315 - DNA, 285 bp, Homo Sapiens
gagactggtttctccataagattctgaggctggagtaggatgtagaaatgactggtgacaagagtcaggacttgcactgcaagcccttcctgatgtaaaataatccatagctttctctagttacttcttactttgttataccctgaccttacccacggcagtaagcaagaataacgtataacccatctctcttattgtcttttgtttgctcacatcaacgacgttgtatacgacgccatgtcatcattcatcctcaggtcactctagagatcccgtaccgagctc

SEQ ID NO: 373316 - DNA, 603 bp, Homo Sapiens
  misc_feature (569)..(569): n is a, c, g, or t
cgacgagcaggtcggtcggttgctctcttactatgcagaactaagtctagtacagggcctggcagcatggcacgccctcaagcgccgtggatatgatcatatccattttatacataaggaaaatgaggctggaagagttcacacaggtctcagtgtaagtagcagagtcaggatttgaaccaaactgttccgcaccagggagaattttctggcgtctaaaagcactagtgaggagaggagaaagttttaaaaagtaagattaaagaaaaaagtaactacttgtctgtgtggaagctgaggtggaagaagggcttcatggaaaccctctctgatgaaatcatccctcgtttttgaacagcaatttgggcttttccagtttctgtgtgcgctgttggtgcaggtgtgttactcttcttatttggcagatgagcaaactgaggcacataagttacatgagaaagtaggagatagaggactggaacatgatacttcgaataaagaatgtctcagcccctgggcaaacgcagggagtcgctgagaaacaagttccccgggagtagactcccagntcggcaaattcttccattccaatcgggtctgggg

SEQ ID NO: 373317 - DNA, 144 bp, Homo Sapiens
agtgtgatgaaacccctcccacctcagtcagcgagtcagccccatcccagaccgactcgggatgttcccccggagactgaagagtgcccctcgcatcacggccgatgccaatatcgactctgaagatcgagtcggaaaccatcc

SEQ ID NO: 373318 - DNA, 874 bp, Homo Sapiens
  misc_feature (801)..(801): n is a, c, g, or t
  misc_feature (814)..(814): n is a, c, g, or t
tccgccagcaccagacccagaaggagcactgacctgacctctcttgcatttggggcttccccctcccagctctgcgtttctgcaacctgatgcccaggaaccaagctacgctgagggcctgtggggcagtgagcagtgccacccacacagagggactgagcggaagacgcacaccgctcccttgtcgtgtggcacagctgtgtcactgctcttctaaacgtggagaaagccccttaaactccaaatggccaaaggctttgcagtccttggttccacatccgtggcaccttgggtggagttgcttctgtaagccaacagatgagcaggtgaggagcacagcgcggaccccagagctccctgcaggacgcccttagcctcgcttgcatatgccctcagaccgggctgcagaggggcttcccacgcccccatagcacgggttcctaggggtctagggtcattagtgtggagggcagacaggcagggttgttgcccagaggtcagcagtggtttctgtgtggtttttaatacctacctggaaaccggacttgccatctcctacggaagaattagcctcaccatactgaacagtcggcccctacctgaatttccaaagtgttgagcctgaattagtagctttcaggataatcacatctcatgagagctaaatgaaaaaccagactttttaaaagtcaccttcaacatctgtactgtagtattcaaaatattagttacggaagtgattgtggagcatttaaacattgggattgtgtttgtttaaactttgaaaatgaagatgaattnccagagttgggancatgaagtctttggtgacgtggaaccagctgagggcagtgctgccgccctttgcacttgt

SEQ ID NO: 373319 - DNA, 399 bp, Homo Sapiens
tgctattgggtaatataatataagtagcacaattatccaacaaacagtgtcgctccttaaagttttggaaactaatgattgtcctatttgtttcttctatcaatacttctaaaacgatttagaccaattgcactactcgaaagggatagagaaacaattttatgtatcgtaggaagaccagtttttcatgatagattgtggtttgtggcctgttaggaactgggccacacagcaggagggggcgccagggcaagcgagcgaagattcttctccagttgacagcggcatccctatggcgtcgcatgaccacctgagctatgcctcctgtcagatcagcagccacatcagattctcatgggagcttgaaccaactgagaagctgagaactgtcgtcccata

SEQ ID NO: 373320 - DNA, 490 bp, Homo Sapiens
tcgatcgagctcggaccaagttagtcgggacgggggtgaagccggaagggttagggccccagatgctgagcttgtagcatgcagatctgggacctttgaagcatgggtggtatcacggggatgatggtagatccagactgttggaggtgaccttgtcaagattggctagtgagggtggtttgacaaagctcttcgctgtggccctgagaggggttggtggcagctctgccagcttggtggctgtggggtggcttgcttggttcttgggagtactttctggggagccaatactcttcaaggagatgttgtctgagtccaaggccactgccttggctttggccttctccttttcccgatctgtctgattgacaggggctggaggggtccgcccactggctaccttggtaggctccttcagtctggaaggcgtaaggcctccctgcttggtgctgaggagactggggtcaatgctgctgctcacagggcgagg

SEQ ID NO: 373321 - DNA, 463 bp, Homo Sapiens
aaggtgcagacagacccctcagggatctacattgccaccagctgttctgacaagaatctctccatttttgacttctcctcaggcgagtgcgtggccaccatgtttggccactcagagattgtcactggcatgaaatttagtaatgattgtaaacatctcatctctgtgtctggggacagctgcatatttgtgtggcgcctgagctctgagatgaccatcagcatgaggcagcgtctggccgagttgcgccagcgtcagcggggcggcaagcagcaaggaccatcctctccccaaagggcttctggacccaaccggcaccaggccccatcaatgctctctcctggaccggctctctcatcagacagcgacaaggagggagaagatgaggggactgaagaagacttccagcactgcccgtcctgccagaaaccagaaggcactgcctcgtcccactacttggccg

SEQ ID NO: 373322 - DNA, 548 bp, Homo Sapiens
aagtgggacgtaagggactccatctcctcgttgtgtcatccacacgtttcctgtggaagtgcgggaggaggcgggggctgagggcgaggtgagcgagaccgatctcctggatggcgaggcgtagcctgagtcggtgcagcgggttgctgatgccgatctcgcgctggatctccgtgtctgacaggttggccatgatggcacagctcttgacattgccccgccaggcggccacataccaggcaggcatgcccacccacagctccagccagtacaccacggtggccccgtcccaggcagcacataggtaggccctggcagacaggcctccctccacgagttctatgcttcctcttgtaccttcggtccttgtctcctgggcctgtcagcttggctagcccaagagggtcagtggccagtgtctcatctgagggtgttccagccagagaagagctgtccaggcctggggctccaattcgtcccttccacccggccaacgagacggcctatgtatgacttgatgctcttctgtcttggggtcatttgtccac

SEQ ID NO: 373323 - DNA, 367 bp, Homo Sapiens
aatatccttcccttacatgttatacattctctgtctttagagctcttacacctctgaagcgacagatgcgtgtattaggaaaatctttatagattaagcagggctgactttgaagtgaggcacgtgggctggatggtatcatcactccacttcaggagatgtgaacagttgccatcagatgtaatctatgaacttactcatcggattaatggttatgggcttcagaaaactaaagagtaataggagcagcaattcatttgctggctttcatagggttcttgtatcgaaaaaggtctgtagtagaactgagatccttacagttgcatttcctccgtcccgacttcccttgcggacccgatttaacttg

SEQ ID NO: 373324 - DNA, 444 bp, Homo Sapiens
aatcgagctcggccaagttagtcgggacggcaactggaatcaaatgtcttagactttgagtattcctgagcaagtttgatggagatagaattggacaagattttggccattgaataaccacatccagagatagaaccacgcgtatcctgatgctatgattaatccctcattcctggccttggggtaaagttcatgagggccagacgctgggggctgtataccattcataaactatctcttaaggctcagggctcactgttaaagggaaatacaagcagtgcttggtctccggtgttgaggaagttaggtggttgtgagagagggggtcttcaaactcagctctgttcctggggtgacagaatttcagggcttttgaaaatcaaatacatttctgttgctcattctgagacgaaaagcgtttacatcccggtcccgacttaactg

SEQ ID NO: 373325 - DNA, 561 bp, Homo Sapiens
gtgatgggcgacgtgtggcacgtgctgaagacacactgttcttcctcgagggatattcaacatggcgcctatttcccagacctcagcccgagtgtcagccactgtacagttcggaaacagaactgtataggagaagagaggagagataagggccagtaaagggctgtgtgcccagcctatggcccatgtactttctcccaccccacaaatacgcttacctgactggacaatgaaaggtggacttgccagcactagaatggcactgtggaaaaatgaccagggacctctctgccactctctgtgcttgcttaagctctaggaacatcctctttgaagcttcaatcccctggactagggacccctaacctcaaatcccacctcagtctgatttttgaaacatggtatttcaaccttgatttttctgctgaagaatctggcttggcttatctcttcatctttcgcatgttttctccctacctgccctagcctgccactccataacatcccatcctcacccccacccaggaagaggcatgatgatattcaagaagatagacaacc

SEQ ID NO: 373326 - DNA, 500 bp, Homo Sapiens
ggctggccccacgtagtgggacgcagtaaggctcactcttagtaatcccaaacccagaagcagtctcatttcccggaaacattggggccaccttcatcctcatctccagagtcaccagttctagctgcttccccagaagccttggggaccatccccagctgcatctccagaatctcggaagtcagcccggactacctcccctgagccaaggaagccatccccttcagagtctcctgaaccttggaagccgttccctgctgtgctccccagaggctaggaccccagcccccgctgtgtacaccaggctcttggaaaccagggacacctgggtcccctaggccttggaaatccaatccttcagcatcatcaggaccttggaagccagctaaacctgatccatctgtgtctcctggaccttggaaaccaattccttctgtatctcctggaccttggacaacacgatcaatctgtgtcttctgcatactggaaatcatcatcag

SEQ ID NO: 373327 - DNA, 362 bp, Homo Sapiens
aagttagtcgggacggaacttgccacgtttacacatacagggcggtgcagaacagaattacacataataagggcacagaggccagagagcgcgcagaggcactgcagcaacatccggccagctcacagaaaccgcccaaacctcagtctccttggaaactccagctaagtcccatgagcagcccgctccatctggaaaggcgggtacccccagtctctcttccctctgctcccacagctgcccaagggggacagtgcctagcagctgccaacgctgtcctcaccagaggggctcacacccaccgcccatgccaattcaagcaagaggctgtgacgtcagctggacaggtgggactcagcctg

SEQ ID NO: 373328 - DNA, 405 bp, Homo Sapiens
gttcctcacactgcctataaatccctgagctccccagaaggttgtttatgagagaaggatgttggatcacatacttcttcaaaaagcaacaaaatatttgcagtggtgcctgattttgccttagcgatggatgaaactccagaaagaatatagatatatcctacgagtatccgctgaatgctcgaacaggtggggattttgaaaaaacctgtgaaggcactctctgtgccttgctacccagtgtgcggtgggcagactggcagcttattaatcacctgggggcttcgttagaaaggcaagatcttggcccccacccagaactactgagaagagctgcttgagagatctttcagaacacttgcagttccacctcccgtcccgactaacttggtaccgactcgatta

SEQ ID NO: 373329 - DNA, 562 bp, Homo Sapiens
gagtctggcgtgctggcctgggaagggaacctgcccgggggttgtttatgggggtgaggacaagaggggaggttttatcctccctcctccacttctttctccatctggccccttcttatgccttcctagactccaaagccgagctctttcccctgccctgtgtgtggccgtgtgtaccccatgcagaaaagactcacgcagcacatgaagacgcacagcactgagaagccccacatgtgtgacaagtgtggaaagtcctcttaagaagcgctacaccttcaaaatgcacctgctcacgcacatccaggctgttgccaaccgcaggttcaagtgtgagttctgtgagtttgtttgtgaagacaagaaggcactgctgaaccaccagttgtcccacgtcagtgacaagcccttcaaatgcagcttttgtccctaccgcaccttccgagaggacttcttgctgtcccatgtggctgtcaagcacacaggggccaagcccttcgcctgtgagtactgccacttcagcacacggcacagaagaacctgcgcctgcacgtacgtgtcc

SEQ ID NO: 373330 - DNA, 490 bp, Homo Sapiens
  misc_feature (67)..(67): n is a, c, g, or t
acagcctgcggaggagactggggtcaatgctgctgctcacagggcgagttttaccccgcccgccggncacgctcatagaaggggacttggctggccggggcaggctgcggcactggatgttagaacgggctccaggagccaggaatcctggctctgcactgttggaaacatctaagctagtcttgcgcccatttactggcttgacagggatgcctgaggacttctggatcttgctgagagtggctgaaccaccagtttgcatgacagtggctgtgcccgtggcaggaggaggcttcttgtagccaaaggatcacgaagtggaggggcgagcaatgcccgaggggggcttcttagcatcactcagtgcggtcccgaccagcatcagaggaggagcgttggggcccagtattcttcactgcaaggcttacccttggtctgtagctttgcccctcagggtttgccctggcgactttgagggcactcctgggct

SEQ ID NO: 373331 - DNA, 664 bp, Homo Sapiens
aagcagaactgagaagctcagcacgggatggcaaaagtgaacacgtcgctccagcgtgcaccacgggaggccggtgggggccacagtccacgtggtcccgggaccagcactcaccaccacgtcagagtccaacacacgttcccacaggacaacagagcaaggacaggctgagtctaagattcacacacaggcagcccaacaccagaatggccccgacagttccacacggcgcccaagtcggaggcttctcaccacagccagctctgccgcgggaacggacagacacgtgcagcagtgggacggaggaaggttccagaacggagcccgcacacggcacagtcacgacgccgaggcaacgctgcgcgcctgcaaagctgatgctgaggacagtcggacacccggacacccacataccacaaggggaacctcaatacaagcttcacaccccacagggaaggttactcaagaggaccccagaccgagacgcaaaacatcgcagaggaaaatcttcgcggctttggattcagaaatgaattcttagatatgacaccagaaacaccgcctgtaaaaataaccagtcagtgtctcctcctccaaattcagaacatctctgagacaccacgtgaagagggggtgaaaacatacgtcccgcaaactgagatca

SEQ ID NO: 373332 - DNA, 436 bp, Homo Sapiens
ttcgggacgagtgatacacacaagcgctctaagctatatttacttgcctcccaactgacttacgatgttaatattcactattcaaattttatcctaaacatctttattggctatgttcccctccccaaacaaatactaaaatatactggtttggggtttgctctatgcattttccaagagccaatcaaacagcgacttgcatctctcctcactggaagctttttccatcacttcatagtattgaagcacagcctgcaggaggtctcccactttccatcctttctcttgtaattgttttgaaagtagcataaactccttatttgcagagtcatgaaaataaagttctgcaacttcagcctcagaggcaatgagccactgaagaataatccttagctgggggtctaccgtgcatggctccatgtcaatattcgtaatt

SEQ ID NO: 373333 - DNA, 472 bp, Homo Sapiens
atcaagggtggcatcgaagcttgctatgcagccgtgtcctgtgtctgcaccttgctgggtgccctggatgagctcagccaggggaagggcttgagcgaaggtcaggtgcaactgctgcttctgcgccttgaggagctgaaggatggggctgagtggagccgagattccatggagatcaatgaggctgacttccgctggcaacggcgagtgctgtcctcagaacacacgccgtgggagtcagggaacgagaggagccttgacatcagcatcagtgtcaccacagacacaggccagaccactctcgagggagagttgggtcagactacacccgaggaccattcgggaaaccacaagaacagtctcaagtcgccagccatcccagagggtaaggagacgctgagcaaagtattggaaacagaggcggtagaccagccagatgtcgtgcagagaagccacacgtcccaaaaactgg

SEQ ID NO: 373334 - DNA, 544 bp, Homo Sapiens
ctcggccctcattccaatgtcacaatgggacagactgactggcagtctctttactggtctcaggatgatagtgcaggcagaggccccatggcaaagcagaggcaaatctgggatgctgcggttcattgtagctcagctttgataggaggatgccagccccgactgccgtgcgccccaaggcccgtctacatgactgtgaccaaaacataatgactatcgtctaaattcactctctaaaaggaacaccctcctgaatcagcgtgttactcctcaaaggcgttatgggaacctgagctcactccgaagacattcccagttgctcaaggcaggggtgaggcccctccatggaacttggagctacacagagcttgagctccggtgtgggaggcctcgcaggaaggcatcgcggccttgatgggtgggcctcacactccagcgtgtgtgtgtcctgtgcccagaccctctgtgtgtcttctccatctcacacagacagtcccataggactcacgtgttttctttttgtcgcattgatggtttcctcaga

SEQ ID NO: 373335 - DNA, 600 bp, Homo Sapiens
aggagctcggtacctcacgcccatgtcacaacatgatgaagaagctcttcctgcagtgagtgctcctcctccctgggctgtccaccgcgtcctcagctgggctggtcccttactccccagaaccagagacatggccagccagtgcctctgggataagtagtgtatttctgagtttgtggagcataacaatccaaaggatcccagagaaacacgcagctgctgctgcagcgtcgcctgcacatcctgcagagaacactaggtggcacctcctctcctgcccctttcctgcacaaagtcatgctacacattgtattgctgtgtgccttgttgttttagtgaaaatatgcctgtgtcaggagatctgtgtgaggacatgccatatgaaagaacatttagcctctctccagccttgtgccgttgttacaaatagcaaatcagtgagaggcttcatgcatgagctcatgcagatagatccgtggggtaattgctggggcgtagccctcttgcaggcctcagaggtgttgtaactcgggatgaatcctgatttgatggacttcaccagagcggccccacagaggccccttgtgacatgtgactgag

SEQ ID NO: 373336 - DNA, 472 bp, Homo Sapiens
catcccttggtcagattcggtccctgctgagtgtgagaatgggcaaagaagaagagaagctcatgattcgtggattaggggatattatgaataacaaagtgttttaccagcagcctaatctcatgagggcactggggatgcacgagactgtgatggaggtcatggtgaacgtccttggaggtggagagtccaaggaaatcacctttcccaagatggtggccaactgttgccgttttctctgttacttctgtcgtataagtaggcagaatcaaaaagctatgtttgatcatctcagttatttactggaaaacagcagtgttggtcttgcctccccagctatgagaggttcaacaccactggatctggctgcagcttcggtgatggataataatgaactagcattagctctgcgtgagccggatctagaaaaggtagttcgttatttggctggttgtgacatggcgtgaggccc

SEQ ID NO: 373337 - DNA, 390 bp, Homo Sapiens
aatgtacaccaatggcagagtctgtccgtgtatcctgaatatgactggggaatgcttctaaaacttcaccagtcttacatgtctcctcctgtcactgtggggcagtggcaatttaaaaattcaactcagggttcaataaatactccaaaagaagcatgatcccccaaacaggagtctttcctggccagaagtaagacccaccagcccttctgcagccatcatgctccagaatcaaagatacacatgaagtggggatcgatgcctcaagtgaagatgctccaaggaatcagagccttttatagttgcacctacctggactgaaatgaatctgagcataaaatgagaggaagctggaaggtatttacagtcatagcagcatttctcatgatg

SEQ ID NO: 373338 - DNA, 174 bp, Homo Sapiens
tcacgcccatgtgccacaactataacaccctgaacatggtatgagtaaatgatgtgactacaatacaatgaggctgcccctctcatgagtttttttaaaagtatgtgtgaagagtgaaacaaaatgaacgtgactatctgatgtagtgttcagtgaataagaggtgtccgagct

SEQ ID NO: 373339 - DNA, 450 bp, Homo Sapiens
gtgtcacgacctcatccagagcagcactgatgagatcacactggccttccgcaccctgcaacgcaacggcctgatgctgcatacaggcaagtcggccgactacgtcaacctgtccctcaagtctggggctgtctggctggtcatcaacctaggctcaggtgccttcgaggcccttgtggaacccgtcaatggcaagttcaacgacaacgcctggcacgacgtccgggtcacccgaaacctgcgccagcacgcagggattggacacgctatggtgaccatctcggtggacgggatcctgaccaccacaggctacacgcaggaggattacaccatgctgggctctgatgacttcttctacattgggggcagccccaacacagctgacctgccgggctcgcccgtcagcaacaacttcatgggctgcctcaaggacgtggtctataagaacaa

SEQ ID NO: 373340 - DNA, 413 bp, Homo Sapiens
ctccgtcggcctcactcatgtcacaatcttctccaaagtactggaaccctgctgtgagaagtgtagctgtacatttacatggtctccagaacttcctttctgggaacgagtaggactctggagaagtagacatggctctctcttgtgactcttggggaactggagatttatgttgggtagcctcagattggagctgagtattagagaggctcatggtgcagatgatgaatgtactaactcctcccagagtaccctatgtccatgtacgcgagctgagactggtcgtcctagtatatcaatctgcctttccaaatcctctaatagggtcaccacctcctctccgttctctagctgatgttccttaaccagtgtctggagctcctcaggtaggatggtcaagaactgctccagcg

SEQ ID NO: 373341 - DNA, 474 bp, Homo Sapiens
aggctgggccctcatgtcatgtcacaactcagctgcactatctccttgatttgtctgagtataggtttccctcagctaccagcttgtttccagagtccacaggactcaagagcgtatcccggttgttcttcatagaccccgaagaaatcctcaaacttccggatcccagcctctgcagcttccagggagtctgggggctccaagtgagccacgagtgtattcctgcgttgctgacggatggcttcagccatgcttggcatctttgcgtggaactcctggtaagccaaggcactgagacgagggtgtggctgcggatctcccacatcctgcccagggcattccagccagtatccaggccctccagccgctggcccagaagcagatactctgggtccgtctggccttggatcactttctccccagactccttaacacgctggtagctgtcttggtgcccgtcaatctcatccttga

SEQ ID NO: 373342 - DNA, 443 bp, Homo Sapiens
agggggacttgtcattccgctgtgaggatgtggctgccctggaccctgtgacctttgagagtcccgaggcctttgtggcgctgccccgctggagcgctaagcgcactggctccatctccctagacttccgcaccaccgagcccaatgggctgctgctcttcagccagggccggcgggctgggggtggagctggcagccacagctctgctcagcgggccgactactttgccatggagctattggacggccacctctatcttctgctggacatgggatctgggggcatcaagctgcgggcatccagccgcaaggtcaatgatggcgagtggtgtcacgtggacttccagagggatgggcgaaaaggctccatctcagtgaatagtcgcagcacgccgttcttggccactggagacagcgagattgtgacatgggcagtgggcccc

SEQ ID NO: 373343 - DNA, 351 bp, Homo Sapiens
gaaatacatgttctgtagcatgattgcagactactgcagtccagtatacttgggggtgagtcttgtcagtgataaacacacctccagtagcagagcagcatattgtacttccaggtggaagaagacctgcctgtgctgcgcaactgagggcaggatactcccagagagggactctgtagcctctctgcctgccattgaggcttgttgccttggcaactaaaacacagccatccatcctttccccaggcagggagctccagtcatccttgactttgccatgaccttttctcctcccctttacaatctgtttagggctctgccatgcatctcccaggcagctttgaattttct

SEQ ID NO: 373344 - DNA, 471 bp, Homo Sapiens
  misc_feature (188)..(335): n is a, c, g, or t
gtcctacgctactccagggaggccagaggttatagtgcagttgtgattgtgccattgtgctccgagccatgggcaacggaggagacacctatctcaacaacaaaaaccctgatttgcagccaaatagttacctcagcctatttcctgccagtaaatggttaggagaccagtggctttgttttgaacannnnnnnnnnnnnnnnnnnnnnnnnnnnnnnnnnnnnnnnnnnnnnnnnnnnnnnnnnnnnnnnnnnnnnnnnnnnnnnnnnnnnnnnnnnnnnnnnnnnnnnnnnnnnnnnnnnnnnnnnnnnnnnnnnnnnnnnnnnnnnnnnnnnggggtgcatgtcagggtgctgtgtgagaacacacctgttctttcagacgcctgtttgtctacctcaccatgaggctttgagaagcaattccttacatctttctgggattttaacaaagggcctcagttgaccagac

SEQ ID NO: 373345 - DNA, 248 bp, Homo Sapiens
ttatagtgagttgtgattgtgccattgtgctccagggggggcaacggtggagaccctatctcaacaacaaaaaccctgatttgcagccaaatagtttcctcagcctatttcctgccagtaaatggttaggagcccagtggctttgttttgaacagtctttgtccattttagtccaagctagtggtgcttgtgttagttcagttctcttaaaaacattgtgagttttctgtggattttactgggattca

SEQ ID NO: 373346 - DNA, 375 bp, Homo Sapiens
  misc_feature (177)..(324): n is a, c, g, or t
gggctcggcacctctcgcccatgtccacagtaaaacgtggctctggtcaacatgaggcccttgttaaaatcccagaaagatgtaaggaattgcttctcaaaccctcatggttagttagacaaacaggcgtctgaaagaacaagtgtgttctcacacagcaccctgacatgcaccccnnnnnnnnnnnnnnnnnnnnnnnnnnnnnnnnnnnnnnnnnnnnnnnnnnnnnnnnnnnnnnnnnnnnnnnnnnnnnnnnnnnnnnnnnnnnnnnnnnnnnnnnnnnnnnnnnnnnnnnnnnnnnnnnnnnnnnnnnnnnnnnnnnnntgttcaaaacaaagccactgggctcctaaccatttactggcaggaaatagg

SEQ ID NO: 373347 - DNA, 640 bp, Homo Sapiens
ggggctctccactgatatcctcaggtgagaagcagcgtgtagagcgagccagctccactccctgggaccaaaaagagagtctagccatctctgcgcgtggaaaacaaagcgtggaggtgtctgctgtttgtctgaaggcgaacaaacccttcaaaagtgtcccgtacctgtgcctctccttattggtagacaagcttgacctgtttctgcagtcaatctgttatatgttgttttgttcacagtatatgaggaaaatccagtctcacacagacatacagctccattgacagatcatcttcccaaggttaggttccaggtaacccagctcatttcttgtgcacttactggccagttttgatgtcaaatagacgacgatgtcttctttgatctcccctcctattctcaagacccctcttcctgctggtcacatgcagtatgtgattaaggttgatggagggatgaagaccataatgctgaccacctatgcagcgtctgacaagtcacccaattcttctgtgcttcagttttcacacacgtaaaatgaggctggtagtgctgtaccttcaggcagatgtattttgtaaattgccaagtgctctgaaaatgttggttgttatccttgtgacatgggcgtgaggcg

SEQ ID NO: 373348 - DNA, 629 bp, Homo Sapiens
caaaaagttacatgaagttcccccaaggtcccgtagctagcatgtgatgtggcagggagagagcctgtccgcttcactctctcacatgggaccagaaaggggtgatgctgtgcgtggacaggacatctggcaagtggtgtgtccaggacacaggaagcagcgtagtggccaagctgcctccagctgtcacatctgtgtgtctctgcagtaaggatgagtctgccttcatggtccacccgctgacggcacagggagtggccgtggtaatagtggcttacggcatcgcccccaaaggtaataggagtggttgctgcaggtccgagggccggtgggctttaggaggaagtgcatccctgacccagctcatgctctctgtgcaggcaccctggaccacatggtagaccaggtgacccgcagcgttgcgtttgtccagaagcggtatccaagcaacaagtgggtgttgccagtagattttcttcctgttggacctcagtgggtgggaggacagtgcaatcagtacctaggatacagccaagctgcccctctggcctgtggagcagaaagcaaattgggactcttcgaaggggggcctgatgttgtgactggctgagggatcctctagaacagct

SEQ ID NO: 373349 - DNA, 448 bp, Homo Sapiens
atcagttatgtcacaagacgatccagaacaccttcatcatggccagcttgttgctctcgtctcagtaaaggctcatgctcatcaggactggaattaatattcagccgggtgtcctcaccaataaactgattctgcaacatttcttgggccctatgtgtcactatgttggttgtttggccagatagtactgtcccattggcatattgggttgtggccgtgtgcgagtgaacacttgtggttacgtacctgcgatccagtacatgcgtggctcgtgggctccatagaattaggcctctgtgctcttctgcgctttgatggcccaggatctgctgctgtgcttggaacaccctgtgcaagaacatcttgttctgaacatggattgctgttgttgttattggaattagttcggccaccttctagtggccgttccctcctgtccacaagacga

SEQ ID NO: 373350 - DNA, 450 bp, Homo Sapiens
tcacttcatgtcacaactccaaaaactgaaaagatagcactgccttgatgatccgtatggggaactaagtacccttagaaagaggccctcagaagagtcggctctgaagaagataaagaaggtagtggaaacgaacttcctgagcttttcaggctctaatggctgaagaatcaagaaagccttcagccccatccccaccagaccagactcctgaagaggatcttgtaatcgtcaaggtagaggaggatcatggttgggactaggaatctagtctgcatgaaagtaaccctcttggccaagaagtgttccgcctgcgcttcaggcagttacgctaccaggagacactaggaccccgagaagctctgatccaactacgggccctttgccatcagtggctgaggccagatttgaacaccaaggaacagatcctggagctgctggtgctggagc

SEQ ID NO: 373351 - DNA, 542 bp, Homo Sapiens
ggtgttctagaggtcactcacgccatgtacacaaccatgagccagtcccacagctgagaagccaactaagagtatgtgagtgagctgtgaagcagacaggttcaaccacataaccaacatcttctgagcaacttactccacagcaggaatacagatgtgagcaaagcagacctggtacctggcctcatgaagcacggatgctatgagaggatatggacaagtaaacaagggaacacaattcagtgtgatcactgctttcaaggggaagtccaggggaattgtggggacacaaacaaggggcacctaacccagtctggaagatcaaagtgggctcccagaggagtaatatttaagctgagacctcaaggatgaataggaagtagtcagagaaaagaggagagagggagcaagcatgttgggcagaggaagagcatgtccgcaggccccagagctcagaagaacgtggtgcaatttggagtcttgctcaggaactaagtccacaatgctagggcactcctgctgtatggagtccactacatctg

SEQ ID NO: 373352 - DNA, 434 bp, Homo Sapiens
gcttaaaatgctccaatgcttcccatttagactcaaggaagtcttatatgattggagctcctgactagggcaccaacttcacctctacccacatagccactacactgatgtgactgctagtactaggtcttactgtctctagtacattgtcaagctagtggtcaactcaagtacccttgcattggctataccgggtgcctaaaagactctccccttagatctttatatgtctttgacttttttcattattcatatatagagctcaaatgtcacttcttcagaaagatcactttaatagtgaagaagccagttctctatcacacaaacctgctttatgtatacacagtactttccacaatctgaagttactatatttatcttagttttcataagctttttggctgcttctcctcacccagaatgtgtgcttcatg

SEQ ID NO: 373353 - DNA, 570 bp, Homo Sapiens
  misc_feature (58)..(269): n is a, c, g, or t
ttcccctactcgtaaaacacacacacccttatacacagagcacccatgctctcgtcgnnnnnnnnnnnnnnnnnnnnnnnnnnnnnnnnnnnnnnnnnnnnnnnnnnnnnnnnnnnnnnnnnnnnnnnnnnnnnnnnnnnnnnnnnnnnnnnnnnnnnnnnnnnnnnnnnnnnnnnnnnnnnnnnnnnnnnnnnnnnnnnnnnnnnnnnnnnnnnnnnnnnnnnnnnnnnnnnnnnnnnnnnnnnnnnnnnnnnnnnnnnnnnnnnnnntctgtggtattcctgagacattcaaccactgcagagcattatttaaatgccataaaaatgcatctttatggatcatttctatattaaaatataataatcttggcggccacaatagttaaaataaacagattcaagatcaaataaagttagagcagaacatgaggactggaagcaatcccagaggagagccttctccctggactcacagggttaacactcaacagtggtctgaagcaactgtattaccatgactcactcatcaccagtcattgtggacatggcgtgagggatcctctagatc

SEQ ID NO: 373354 - DNA, 286 bp, Homo Sapiens
tggtatagttgctgcaatttctggaagtacatgttgagtatgaaaatattagctaaggtgtgacaacaataattaaaattacattaaaaattggagcataccaaaatgagaatatttggaacagctgggctctttgagggcaggggtcctgtcttagtcatttttgtgtctctcaaagctccacacaagtacccttcatatgttaggcattaaatgaatgagcgataatgaatgacttgagtgaagggctctgctattacagcgtctctttgtgtgtgccagcagg

SEQ ID NO: 373355 - DNA, 337 bp, Homo Sapiens
gaggctgaggtgggaagatggcttcagcccgggaagtggattattattattttaaaacaaaaggatgagtaaacaaactgtggtatatccattcaacagaatacttggcagcaataaagaggaacgaacttaatacacgcaatcatatgaatgactctcacaggcacgtttagcaagaggagtcaagcccaaaagaatatacacagtatgacttcatttttatgaggatctaaaacagacagcactaatttgtgtgatgtgaatcaggaaagcggtttcctggtgggtaggtgtctgtgggaggacaacaggtgagtcattgagaaggggcgcgacg

SEQ ID NO: 373356 - DNA, 299 bp, Homo Sapiens
ggtacccggcattctggacttctcctatccctccacccagtcctcactcaggactttctcctatccctccacccagtcctcactcaggaccttctcctatcccttcacccagtccacactcaggaccttctcctatccctccacccagcactgactcaggactttctcctatccctccacccagcactgactcaggaccttctcctatccctccaccaagcactcactcaggaccttctcctatccctccatgcagtcctcactcaggaccttctccagaaggtccaggtatgccgcgc

SEQ ID NO: 373357 - DNA, 460 bp, Homo Sapiens
  misc_feature (408)..(408): n is a, c, g, or t
cgggccggcatcttggaccttctggataacccactgatggctcacctcctgtcaacaggccttcacaacaagaaggatgttttgtttggaaacatggaggaaatctatcacttccacaacaggatattcctcagggagctggaaaactacactgactgcccagaactggttggaagatgctttctggagaggatggaagatttccagatctatgagaagtactgtcagaacaagccccgctctgagagcctgtggagacagtgctccgactgcccgtttttccaggaatgccagagaaagctggaccacaagctgagcctggactcctacctgctgaagccagtgcagaggatcaccaagtaccagctgctgctcaaggaaatgctgaaatacagcaggaactgcgangggggctgaggacctgcaggaggcgctgagctccatcctgggcatcctgaag

SEQ ID NO: 373358 - DNA, 274 bp, Homo Sapiens
acctcggtaccggcatactggacttctctaccctcataggctgggcctgaaaggtagacagcagagagggtagagaaggtagacaggtgtggtctagggacagcaaaggcagggcaggtgtcagcatgaaggagactgactcagtggcgtctggcgtgcgtggagggcagggttagacacgagagggaaagaggaaggtggttgggcagggacggtacttcaggaaggtcagtctgcagaccagaaaggaaggtggacagaaggtccaggtatg

SEQ ID NO: 373359 - DNA, 476 bp, Homo Sapiens
ctggccggcatccttgactctggtataactaatgccctcataaatcttcagatgagaaccacttgacaaatatggagcaggattgtgctcaatacaaactttaagaagcagcctctttctgttaaaacccacaaaagagatgcagaagggaaacacactactatgagagagacttccctagaaggctttctgctctcattgcctatttttcacccttagaagaaatgagcgaagtggggaagcaaataggctcacagttagcatttgtaatgtgttggtgtaggtgggtgttgtgtggtaacttaattgtaatgcaaatcttttacctgtgaaaatcaaacacgacaagtttgctgacacactcaactggaactatatctcagttggagtggtttaggttaggtatagaatagtattttaaaagtggatgttttgagggaagcccttagataatttagtagacaggttagaaggtc

SEQ ID NO: 373360 - DNA, 408 bp, Homo Sapiens
tacgggacctctgtttgggttcctaagggtaaaatacgtcggcgtctattccatgtcatatattactatctaatatattacttatctacttaggttagtgtacttcaatgtataccccactaaaatataagctttctgagagtaagaatttttgtttactgctatatgtactaagcctagaacagaacagaacagaacacatgataggtgatcagtaaatacttattgactgacagactgagtgaataaatgttgctcaaccagcagagactcaacatttaattccctgactaggtagaatctagatagaaaattttcacccataaatggctacaaaattgtggcagggaagataactaggatgctattttcttttctatttaatcaaatatacgttttttaaaggac

SEQ ID NO: 373361 - DNA, 615 bp, Homo Sapiens
  misc_feature (298)..(437): n is a, c, g, or t
aacagtgggagttgggggtggggggcaaatccttcaccaatggttaaacaccatctttttgatgctgaccttgtgagttctcatgagatctgcttgtataatagggcatggcacctctttcctctctctgtctttctcctactcctgccacgtgaatcatctcattgccccttgacattctggtatgattgggaggcttcctgagtcctcccagattcagaagccagtatgtttccttacagcctgcagaatcatgaggttctttatgatcatagagaaaattagtactgggaagtgnnnnnnnnnnnnnnnnnnnnnnnnnnnnnnnnnnnnnnnnnnnnnnnnnnnnnnnnnnnnnnnnnnnnnnnnnnnnnnnnnnnnnnnnnnnnnnnnnnnnnnnnnnnnnnnnnnnnnnnnnnnnnnnnnnnnnnnnnnnntgacaaagatagctgataatgtagaagcaggttcagaagggggtggcagacagagatcaggagagtttggagggcttcgaagacaggaaaatgaagaaaagtttggatctttgtaaagaattgtaactacttgtgatcagaagactgacaggagatgtccccgtgaaaccagatcata

SEQ ID NO: 373362 - DNA, 247 bp, Homo Sapiens
agggtgacctctgtttgtccgtttgtaaccacttctgtactggcatgggctccaagagttgatgctgcatgcaggcctcatgtactttgacacaagtgtgagagtgctgggggttggaagactcatgtgtgccagcctccaggtacagctagcctgtttcctccatgccaaggccttgtctcccttgaggcagagtggtgtggtggagcgagtactgaactaagtcagaaggtccaggtatgcctgt

SEQ ID NO: 373363 - DNA, 343 bp, Homo Sapiens
gatctgcctgcctctgcctcccaaaagtgctggaattacaggcgtgagccaccgctcccagcccagaaatcttattttttatcactttcccatctgtacactccttccatccatccatccttacattatctatgcatccatcccaccatctagtcaacaaatatttattaagcatctaatatgtgctgtgtactgagtgtaggtactggggatacaacggtgaataggagagtcatggctgtacttgtatagccaatattcactggagaaacagacaaaacacaagtaaacagaccaattaattgtaagtttctatcagcaaagaaggtccaggtatgctggg

SEQ ID NO: 373364 - DNA, 652 bp, Homo Sapiens
  misc_feature (139)..(241): n is a, c, g, or t
  misc_feature (426)..(434): n is a, c, g, or t
ctgtgcttcattcttagtagaatgttcctgtcatattaaatgcttcagctttggaattttacattcagtacagattatttcattaatacagtgcatatctcccctgtcctggaccctagattataaggagtaagaatgnnnnnnnnnnnnnnnnnnnnnnnnnnnnnnnnnnnnnnnnnnnnnnnnnnnnnnnnnnnnnnnnnnnnnnnnnnnnnnnnnnnnnnnnnnnnnnnnnnnnnnnttgttaaatggacctggtctgaatatctaatccaaaggcaggcaattcatgggtttacccagcagcccaataatcctataatatttaaccacagtggaaagttacctcattgtatttgtaaatttgtaggctcaagttgcaattataaatgggaaattgcaactaaggtaattggtgtcaagagnnnnnnnnntttttaaatctactgatggcctaaaattgggcctagagaagctatggcaagccatgtacaaactcaggcaatgagaaagcagacactatggagagtagagaactatctctagaaaacaaaaaccagaccagatatataaataaacaaagggcagagtcctgagaaagacaccatatttactacaagcaaaagaagaagtttcaggtgcctagaactgt

SEQ ID NO: 373365 - DNA, 449 bp, Homo Sapiens
tggaggaggtggtgtactggatgacatactctgggtagacctggtgtttctcaaagatcacaaagatggaggggtcggacacactgttcacgcagctatcatagaaggcgttgctccagccctccttggccggcggacggacaaaggaggcattgcccctgacgaactcgcccaccagcacccgggccaggaacatcgtgtgggtctgcgtgtcggatttgctgtagtggtgggaatatgcagcatctcgggcaaagtagctccccttgccgtaggaagtgccatgaacaccacagacccgccagtcaaagttctgctggcagatggcgtccacaaaaatggcgctggtgccgtggaacagctgccgctcgtccacggccttccctccattctgcttctgcatctgtcttttgccactggtagacttcccagaaggtccaagatgccgg

SEQ ID NO: 373366 - DNA, 481 bp, Homo Sapiens
cgacccggcatacttggacttctggagttgtccccgttgagtcaagggtaggggccagaaggtacccctgcaaaggtgcattgcccctgtggtgcatgcagctccctgtggctgagagtgagttccagagcggagtgcatctctggaatgcatctctgccagcagcaacactgttctctcaagcagctggggtgttacccctgaaaaggtcatctgggcagagctccacagtgtccccacatgcagattctccctgtggtgtgtgatcacaaaagctttgcccatacatcctacaaacaaagacctccttcctgagggccactctgtgcctgagtgtccattcttttactgatgctccccaacactccccagacaagggtgctttcccctgaggctgtcattggatgtctggtaaatgttgattattgctaaagccttcccacagtccctacacataaacttctctcctaagtgtgtcctt

SEQ ID NO: 373367 - DNA, 584 bp, Homo Sapiens
  misc_feature (43)..(43): n is a, c, g, or t
  misc_feature (55)..(55): n is a, c, g, or t
  misc_feature (75)..(75): n is a, c, g, or t
  misc_feature (125)..(125): n is a, c, g, or t
  misc_feature (130)..(130): n is a, c, g, or t
cccctgtccttcctgaaaaaaaacttgctcttgccttgaatgntgcccaaaacanttggctcttaaaggtggganagcagccccacccaatcccccaacccttttcctcctgaaactgagccagnaaggnttaaggaagtggccaaggtctcccttggactgaaccatggacatgaagtccctgtgaggactggtgtctctcctctagagctttcatctttgggatgccctgagactccgagactatcagaagggaattgacccaccccagtctagcaccaccctgccttcacttcatctacataaaggtggtataaaaaaatagactggaggaggtaatccatggagagagaaaaagaagagggctcaggacaaggccctgaggaggcccaatcctaaaagtttgggcagagggaaccaggcacgttaaagaagacagaaagcggactatgcagagtgcttgtgagggtttcactaaaacagaggcaaaactgtccattgaattcagtaacatgaagtgtttgatgactattatggcagcagtttcaggaagggcggtatggaaggcaggctgtactggttga

SEQ ID NO: 373368 - DNA, 311 bp, Homo Sapiens
gcggcccggcatacttagaccttcttacagttctgggcgccagaagcccactaggtctatcaaggctaaagtcaaggtgtcagagaggctgcattccttctgggggaggctctagacagaatgtgctcctttgccttttccagcttctagaagccacctccattccttgacttacctcgtgactccatattcaaggccagaagtgcagcatcttcaaatctccctctctgacctcttcttccattaccacatcactttctctaattctgactctcctacctcactctcttataaagatccttgtgattggt

SEQ ID NO: 373369 - DNA, 1386 bp, Homo Sapiens
cgagagtggggcacccgatcttctcgaggtctccccactgaagtgctcgggatgatggcggatcctgtagccagtgatggtggctcgaggagcaatccagtgcacagtaaaagagttggcagtaatatcagaaaagtcaatgccagttggggaatcaagacctgttttctgtcttcctctaagaggtgtgctctcatgttgttcgtagacactggagacactcactacatattctgtaccaggcaggagatttgttaagaccactgcattgtctgaaggagaaattgacaactctgcaacatcttcctcatttttcacaggtgagtaacgcaccaggaagttggttaaatcaatggatgggggtggagcccaggtgacacgcatggtgtctggaccaatgttggtgaatcgcaggtcagtgggaggaggaacagctgggatgatggtatcagagatagggacactttccttgtcatccttgacagtgtaaacactgacattgtactccaggccgggactcaggttatcaaaagtgcaggagctctgatcagcatggaccacttcttccaaagaatttccctgctggccgtttgtaggggttgtggtaattctataaccagtaatgtctggggtggtgctcctctcccaggagactgtgagcactccagtgtcagggtttgcctccagatgcaagtttgttggtggagacaatggtgtcaccactttgtttacaattggcgcatctctttcctgtccatctctcaggacttggatggtgtagacgtattctactcctggagtcaagccggacacaacgatgcttcctgagtctgaagtcacttctcgtggtgcctctcctccctggcttggtcgtacacccagcttaaaaccaattcttggagcaggcgtccatgtgatcacaatggtggtctcagtcacctcggtgttgtaaggtggaatagagctcccaggctgcagtgtggtaaagactccagtggctttggggctctcttggttgccctttatggccacgagggatacggtgtactcagatgcaggctgcagattcctcagtgggtacttggagacagagggacccacattgtactgcctgggctgtcctcttcgggtaaggcccacggtcagtcggtatcctgttatctgggcccgaggtggagtccatctcaccaggacagtagaatcagtttcattgacaaactggaggttagtgggagcatccagtttggttgtctgttgagcagtcagaggcttgctctccctcccatggctcactgcaaagactttgaagtaataggtgaccccaggggacagcccggtgacttctgcaaaggtgttcctgctgatgggcagcctctgcccgtgctc

SEQ ID NO: 373370 - DNA, 689 bp, Homo Sapiens
atcgagccagcgcccatctgggagaagatgagtactttgtggccacctgctaatcagctatagggagtagtttatcaagtcaacacaagctttcctagctgcctagaatcatggctctgcagcttgaaagtcacggggcatcagtggctgtgggtaattccggaaatcttctagaattttctcctctgctccattgatcaggtagggatggttacagcacttcctcagctccatcatggtgtcgatgagattgggcatgttgtgctgatttgcccccttggtcaggaaggaaaagttcttctcgaggatggcacggtagtaacttttactaggatataggtcagttccacctacaatgatcgtctctagtaagggagcaaggttcttttccacatcatctttcagccgccgaagcatcattggttttaggatagactgcagtttctttacctgctcctctgttttcagatctccaaattcctccaagaaagcggtctctgaaggaaactgtgatggctccagaaaatttaacaaactgaagagctcctccacagagttctgcaagggtgttccagtgagaagcactttatgttccagggccataagctttagaccctccagaagtttgcagttcctattcttcagtctgtgggcttcatcaattatcacacagctccagtgaatcttct

SEQ ID NO: 373371 - DNA, 453 bp, Homo Sapiens
gccatggaagactgagaatgttcccccaaatctcctctgccaaccagagctcggggcacagattctaggtggctccctgctggccctcttgggcctctgctcacacctgggaaggggctctctaaatcccggccagaaactctgacttgtgccaacaataggatgacccaagggagaggaaaactatactcctcaccagaagagcctgtgtatgactgctcgaaaaaccactgttcctgaggactcctgctgagaagtcccaagggatagttatagcccttctgcctgtgtagacagaagctaaaccaccagtctctctcggaggaagctgagacaacatactctgtccatacataagcaggcagggagggccatgccaccttacccttggcttaaacagggacagttgaacacatttttggttcctattcccagtgggttaagagggcactt

SEQ ID NO: 373372 - DNA, 786 bp, Homo Sapiens
agaggaccggagaatagcagacagtgcggattctactgtgcccaaacagacgctcatgcatgagctgtcgctgccgggcttcttgctctcgtctcagggcttgagcctcagctgcaatgtcaggtggcatcacagctaacacactgtcctccatatcctctaggacactacggcgcaggtctgagggcagagtctggatgaaggtcacagggtccataggggtgtctgagctggcattctgtgctagttctcgtcgctgctgctcagctctctgctgtgccagtacttcctcctgaatggctggaggcagggcagccagaaactcagggctcacttcagtcacaccaggattccccaccactgcaggcgctgagctatttgtggagggggcagtccgggttggtggacgaatgcctagctggttctgtagaacttcccgacggatgtcatcaggcagggcagccagaaaagaggggtccacaccttcagggagactgatacccgcaaggggatcttcttcttcactgcttgttgaaggcaacggctcttctaggattcctcgggaatctgctccagaaatggccacggcagaatctctggtggaagagctctcagaggatgcaggtggggagctgtcctcaggtggctgggcagattcccctgacccatcactcctgccttgcacttccgccacagctggtggggcatccccaggagtggagctgcctgctctgggctgctcagaactgccagctgctgaagtgtcacccacagcctcctctaagg

SEQ ID NO: 373373 - DNA, 378 bp, Homo Sapiens
tatcgggacgattcactgaccgcttgggctggcgaatcacagcaaccgcgggggctgccgttgctttcattggcctccataccagctccttcaccagctccctaagcctgcgctacttcacctacgggattctctttggttgtggctgttccttcgcctttcagccatccctcgtcatcctgggccactactttcaacgccgcctgggtctggccaatggtgtggtgtctgctgggagtagcattttctccatgtccttccccttcctcatcagaatgctgggggataagatcaagctggcccaaaccttccaggtgctgagtaccttcatgtttgttcttatgctgctttcactcacctaccggcccctcctgccca

SEQ ID NO: 373374 - DNA, 397 bp, Homo Sapiens
ttgagagtagaaggcccaagttaggccacccctaactctagtgattcttcccaaggacccctgagctcagctctctagggaagcaggccctacttgggcaaacttggggagctcccagcggaaaaggctagaatagccaagtgctaaaaatgccatagtgataaaaactggaagagcccagcccaaaccctgggaggccaaacagacacgtggtgaaatccagtgagtctacccacaagctcccagaagccctgcccaggccagagctatccccaagccctgtgggaaggagggaatgctgtcccttggctctagcctcactggactcatctctacacactgggcccatgtcaggagatcatctaaagacctggacctggctcctcctcaccaaagc

SEQ ID NO: 373375 - DNA, 435 bp, Homo Sapiens
ccttgccctgtgggagctgggattgtgttactcagagaatttcacacttaaagaacttactctgaatgtgcatgaaaaggaaaggtcaggtgattgagaatgagggcaagcacatgggaccagcagccatctagggatatagatcacctactatgtgcaaagccccaggctaacactgtgaggggcacaccaactggatcagcaatctccaagccaagtttagtcaccatactggtgtcacccttgtggtgatgagagctccaaagactgccagcaaagccctgttttcttctttcaactgggccctcccgtctataggatctcatctcacacttccagctcttagttctcagggagagcctgactctaggttggagtcatcagctatgtctcttaatctaactgtgatggcagccttcccacgtcccgaaagcc

SEQ ID NO: 373376 - DNA, 456 bp, Homo Sapiens
tcccctaggccccaggctttccccagtgcttggcattcacacccatcctggggtgacaggtgctggagacagatggggtgggtgggtcataggtggtagtgggtcacttcgcttcccagcctgaccacccctattggcttctggaaggtcagaggcacattgctccttttgagagtggctcccagcctcgtccggctgggcccaaggacacacactggactggctggctgttgccatgggaacctcccagggttaccctgacacaggaatgtctcctcatcctgcctggttctgggccacagatgttcctggccccttcacatgctcacagcaggggtctggtagggacagtgcaggttgcagggtaggggtgtggagggctgttgcctaaatcagacaacaggttcttcccctccccaactcagctgcctgagccacagaagccctagtgaagca

SEQ ID NO: 373377 - DNA, 409 bp, Homo Sapiens
actcttcactcctgacagcaggtgtgcactggggctatgtggagaccaaggccttcctggcaattctcagtgagtccccattctcggaaaagcttcgtacctgtcaccagaacagccaggtgtaccgggccattgcagagcggctgtgtgctctgggcttcctgcggacactggagcagtgtcgctacagattcaaaaacctccttcgaagctaccggaaagccaagagcagccacccacgcagggacatgccctttctatgaggaactggactcgctgatgagggctcgggctgcagtcagggccatggggactgtccgagaggctgcaggtctccctaggtgtgggcagagtagtgctgagactgatgcacaggaggcctggggtgaagtgccaataataacgcaag

SEQ ID NO: 373378 - DNA, 316 bp, Homo Sapiens
cggcctggtgtgttgggagtgtggttgctgttcgtgaggattgcagagtgccagggtctccttggactcaaatgtagctgcatcagttgaagatgggagtgtagggtgagctgtcaggcataggcgtcccatctgagagattctgttcagtggagtcatttgacttagatgcagtacactgtgcactctgatccctgttctccttatcttctttgcctttatcagttatctttgtttcttcctcagacagttgtgtcctgcgcttctctcgcctttcttccagctcctcatccctcaggaattccaggtgattgcg

SEQ ID NO: 373379 - DNA, 470 bp, Homo Sapiens
aaaggtgatgagggtggagctggtggcttgcaagcaagagggagagcacaatttggaaaacgaagaagcagggtagaaaaagctgggggaactgcaagggcccagggatcgagagcgcagtccaggacaaggaccctgagggtgataacccagagactggcagaaccggtgcgggcggaggggaagcgaggcaggagagacgaagggaaaggtggacaacgatctgtgacaaatcgcggggtgctgctattcgaggagcgggagggtggctgctttaagcgtgggtggaggaagaccagaaaggcccctgagagaaaaagggaagagaaagggaagctggggagctgacacggaagagcgcaggagggcggtgaggggagagggggttggcagaaagacaagtgtgcagcttggagtcaggacgaggtggtcccagtcaaactcgaagcggatgtcgcgtccctaacact

SEQ ID NO: 373380 - DNA, 555 bp, Homo Sapiens
tccacgcatggggacaaacgtcccagcacaaaggggtctcaggcctgcaaggcccaagtggacgctcggacaagggcaggaaggtatttgctgattctccttctccatgtgacgtgtctctcaacccacaccagctaggggagcctcccgcagcttcagttcccctttgacgcccacacagtgttatgcaagcaccgagcccagagtcccgctgggccgtggtgtcctaattgtcttggtgacaaagagcaattttattttaaagcaactgaatcctttccccctgttttgtgtgccagtattttactgtcttcttaattgttttaagcaatgtttactttggatttctggatgttatataaaagccacgaaaaccctggccatgctgtttgtcaggcccacctggctgagtgcaggaagcaagcgcttttcaggagctcactgcaacaccgggcaaacacttcttccgccagggatgcggttaggacaatgccacgtggcgtcacagtatgctgttatttattccaataaagacctcgtgagcatgggcctgtc

SEQ ID NO: 373381 - DNA, 141 bp, Homo Sapiens
  misc_feature (66)..(74): n is a, c, g, or t
cccggcttgctcaggtctcctgaccctcttagagactgttgttaggcctgaaaaggggctgggcannnnnnnnnaccaaggatggacgaagaccccctccagagcaaggaggccccactcagcctgtgtaacgctgaatgt

SEQ ID NO: 373382 - DNA, 404 bp, Homo Sapiens
gatccactcactcatggagtgacagaaactcctgtacaatttttggaagtctatatgaatctaaaattatttcaaagtgtgtaagaagataagatatactcatagggcaaaaatacaccaggtaaagacaaacaacacacaagaccaaggtgacacagtctaatcagacaagattaaaagaaaggccaaaagcattaaaggagaccaagaaggaaatttaacaagatataatcaccactgaaaaatccataggccagactatgtaccaacacaacattcaaatttaaagaggaaacagtatgggaaattcaggcaaaggatacagaaaattcattatattaacttaccacatgaaaggacacaaaacctcagtgattccaaagagtagatctaatatagatgag

SEQ ID NO: 373383 - DNA, 434 bp, Homo Sapiens
  misc_feature (339)..(339): n is a, c, g, or t
  misc_feature (383)..(383): n is a, c, g, or t
gcagctcagcgacgcttggtgttgggactgaggggacaggcgaggagggaaagaaggaagatttgggacgagttgcactgggcacagagactaggaagggactgatgtgtaaaagaatgcctggacgtcaggcacctcacaccatttgcccattttacgccaagaattatttagatcttgtagggtggaaaaatttgaaagtgccattttctggctatttggaactactgttgagtttgtattggggtcaagtggcattgcagaagaaaataagacggcttagattttaggtcaggtgagaattgaagagattttaagttcttaagaatacatgctaangggagaagaaaggaatggaaggtggaagcttgcccatagtgaanggaggcaagcccagagaaaagagtagagacacggagaaggggtgggggttt

SEQ ID NO: 373384 - DNA, 561 bp, Homo Sapiens
gctatcagagaacactgcggagctcttactcctgggacatcaagtgatccttccacctcccacagtgtagcgattaagggcatgagccaccatgcctggcccgcccttgcaacttataatcaaaggataagagtagcaggagggtgagtgtagtgtgatctggttagctgtgttaaatgggggctattattctggaatctgggcgaaattggagtagacccagaataatatgaccggtcctgtgcgtgcggaatgaattccctctgctttgcatatagaagtaaacatagaaggaaagtgtgatgccttagtgaagcaagaagatagctgtattgagtgatgttagcatcggaggaaccctgaggtttccattttggaagcttggaagaaaataaatgtgtttggctctttgagcttgtacacagagctatagcatgtgcctccttcactcaccctacacactccctgctggtggtgatgcagtgtgctttagcagtcagattcttgatgctttcattagagcagagccatcctaggctttcaccccctgatacctgtcct

SEQ ID NO: 373385 - DNA, 426 bp, Homo Sapiens
cacccaggcgcacttctggagcattatgtttttctgacttgagtgactggatagatggaggtgtcattaaatgaaggactgaaggatattgaagtgaaatatatctctccttcctctggagaaatgagtttaatttgggataagttgcatttctgatgcctgtagagagttcagtatctagcgtgaaaatttgtttctagagttctcaagaaagaggttaggggttgaaaatagatttgacagtcatgtttatatgtgataattaagtcttaagtgtaagtgaaaccatacacagagaggacaaagacatgtagaatgaagacaggactctaagagctggtcagagaaagaagaatcagaaaggaaaatacaagaaaagagtcaccctaaaaagaagaaataaagagtgcgccagtgcggcccagc

SEQ ID NO: 373386 - DNA, 471 bp, Homo Sapiens
aatggctgtcactgagcagctggcagcaggtggccacagggggctggatgggctgcccactacagccccagctggacccagtcttcctatccaggaggagagggcagaagctggggcaagggcagaagctggggcaaggcctgaagagaacctcatcctggatgcccaagccacgtcccgcagcactgggccggagggcgtgacgcatgcaccgagcctgggcaaggctgctctcgtcccaactcaggccgtgcctggctctcccagggacccagtcaagcccagcccccacaacatcctgtccacatcactgcctgatgcagcctggatcccacccaccacgagaagtgcgccaggaagccgcaagttctgccccattcccacgtggaggaggacacagaccccaactctgtccattctatccccagaagtagccctgaaggctccaccaaggacctgatcgagacttgc

SEQ ID NO: 373387 - DNA, 430 bp, Homo Sapiens
ctgaatcatcagggagcctgtcagaggaggggcagtgactctgcgggacaagcaagcaggctatataagtttcagaaggctgggctccactcagatcttttccagcagctgctgcctgccagagaggcgccttcagagacccagcacttacacaatacccaccatgtcccaggctggtgctcaggaagcccctatcaagaagaagcgcccccctgtgaaggaggaggacctgaagggggcccgaggaaacctgaccaagaaccaggaaatcaagtccaagacctaccaggtcatgcgagagtgtgagcaagctggctcggccgccccgtcggtgttcagccgcacccgcacaggtaccgagactgtctttgagaagcccaaagccggacccaccaagagtgtcttcggctgagaagtgtgcgccactccc

SEQ ID NO: 373388 - DNA, 427 bp, Homo Sapiens
  misc_feature (292)..(292): n is a, c, g, or t
ccgtgggcctttgtcacagaagagcgagtaagctgcaggtgcggattcaggcattctggacaacgtgtttgatgtcggggtttgttggaggatgctgagaccaagaatgtagccctggagaaggtggaggagttggaggagcatgtgtcccatctcacagagaagcttctggacctagagaatgaaaacatgatgcgggtggcagaactagagaagcagctgctacagcgggagaaggaactagagagcatcaaggagacatatgagaacacaagccgccaggtgcacaccntgcggaggctcattaaagagaaggaggagccctttcagcgtcgatgtcatttggagccaaatgtcccggcctggagtctgtggacagtgaggcctggccagagtaggcctcgataggcatccgtatgctcagccc

SEQ ID NO: 373389 - DNA, 372 bp, Homo Sapiens
  misc_feature (271)..(271): n is a, c, g, or t
  misc_feature (325)..(325): n is a, c, g, or t
actgcatccaacgccgctggaagaacgccttgcagagagggttgcgtctcgacaggtacttgacgaagctggcgtaggggcagaactcggtgcccgtctcatacatgcggggcaagttctcctcgtcgctgctctcggcgcgcttcttgctccacgacgacgaggcgcgacttgtggtaggggcccgaggggacttgaagtagacgaacttgcgaccgtcctcgtccatggccagcccaaaagagtcctcctccaactcacgctggttctncggccgcgggtacagaagtacatgcacgtctcgaaccagaccttgttgagcacncgaagggcgtgttggtgctgaagacgctggaggtgtagcagttgcgc

SEQ ID NO: 373390 - DNA, 180 bp, Homo Sapiens
gactgcatcaacgccgcgctccctggtcatcgactcggccaacgccaagacactgctggaggcggcagcaagttccagttccacaccttctgcaaagtctgcgtgtcctttctcggtgagcccgggggccacatatgtcgcttggggggaagagtgcagatgggcggcgttggatgcagt

SEQ ID NO: 373391 - DNA, 530 bp, Homo Sapiens
gcatccaacgccgctatgcacacaaactaacaaacctagacaccaaaagaataaattccaggaagcataccatctcccaagattgaaccaggaagaaactgaaatcctgaacagaccaataatgagttctaaaattgattctgtaataagctaccaacaagaaaaagccctgggacatacggattcacagccaaattctaccagacataaaagaaagagctggtacaaaaccaacaaaactattccaaaaaatcaaggaggagggacttctccctaactcattctatgaggtcagcatcattctgataccaaaacctggcagagatacaaagaaaaaagaaaacttgtgctaagtatcctgataaacatagacaccaaaaatcctcaagcaaaatatctaacaaatcatatccagcagcacattaagatgctaatccacccacggtcaggcaggcaatattgattcctggatgcagttgtaacaaacataaataaatgtgcggcgttggatgagtcgggatcctctagaa

SEQ ID NO: 373392 - DNA, 411 bp, Homo Sapiens
acgtagtccacgtgtgggctcatagcctgcataggtcttctcataaattttagtgatctcttcatgtgggctaaatactagcggtaacgacccacatcctgatgcccagataattttttgtatagctctaattacacaaatatcaggcatatatcttgaagcctcatcagatatctgctgagcaagacgaactgacacatttctaagcatgcactcggatgatggattaggaatgctctgaagggcactttgtagcaccactgcttgatcatgggtaacttggttgatctgtgtcatgggattcacaccttctacacctggctgacaagcttctgccacagctcgaacatgaccatagccaatggcagttagcaaaagcttgtcagccaaccgtggactagtgggtaccga

SEQ ID NO: 373393 - DNA, 639 bp, Homo Sapiens
agaggatccccactagtccacgtatggctatgtaattataggggctggcaaatctaaaatatgttgggcagtgccaataggctagaaatgcaggtaagagtgatgggtgcagtcttgagtccaatatcaataggtcaggtcagcagactggaaactcaagaaggatttccatgttacagtctggagagggaattccttctttgaggggaaacctcagtctttgctcttaagcccttccacggatgggatgggacccacccacattatgaagggcaaactgttttatctgaagtcaatggactgtaaatgttgaccacatccacaaaataccttcacaccaatatctagagtgagggtgaggccaaacaaactgggcaggatggcctagccaaagtgacctataatatgaagcatcgtaaagtccatctgaaaaataagtgcaagaaaaaaggctaattcttacagagaaaccatatgcggaagaactgaagaagagccacaagccatgaaaacatggacggcgaagatgccttgatgaatgatgcagtcttccgggagaaagaatcagaagctctccagtggaggtcgaatggataccaggtgctatctggcatccagaaggagtccttacactacaga

SEQ ID NO: 373394 - DNA, 552 bp, Homo Sapiens
actagtcacggttggtgttatattctggaaagggagaaagcatctgtgtttcccacggtgatgggggtgaagatccgaggagtttagttttggtctttctggtaatgggacttctgtttcttcatagtttgatatttattgtcaataagagtgagatttagacgactgagagtccctgttagtctagacccaactagtgaatagctcatatccatgaatgtcccaggaactacacttctggggaaaccatgacgggcaggaggaagtatgcgatggcatcgtggggtcctagtaactgaacacatccagtctacacatcttgctgcctcccaaatagccaccaacaggagtatgaaagccccgatatctgaacaggatcctgagactttgccatagatgagagaagatctcccacttagtgcacttcttcatgtcagggtccccaaagagccttcttttcccacacaactttactgtccatggctcattccaggaatgaagagagatgctcaaagagacacacacagacacacattccaggaatgagccaac

SEQ ID NO: 373395 - DNA, 303 bp, Homo Sapiens
cggtacccactagtccacgcttggctcttaaaactactagcatcttagatttgacgaaatatgttaattaaatcaaacatgtatgactcccattatgaatcaagctcccgattagactggaaacaaaggaatggatgatgaaatagaattcccatgcctgagaagctagaccaaaagaaaacaagcacatgtataatcagagctaaatattttgtggtggacagagtatgtgttatgatggctggaacacactgtgtttgtctattgggtagaattgtgtgttccgccaaccgtggacgtagt

SEQ ID NO: 373396 - DNA, 301 bp, Homo Sapiens
tggtgatctagaggatcccactagtccacggttggctggtgatccttgatcggtgctatcatacttaacagacccttgaccactggcagtgcccccacctctgggagttcttggggtcctgggggttcgtggtgtggggacagagaagcgaggggttgctggagatggtaggactcctgccccactattgctggctggggcagcgctgttcaacgtcacgggtgtgttcatctgtggtgtgttcagatagtctggatctgctaggctcccaacactaggcacgttattgtagccatctcta

SEQ ID NO: 373397 - DNA, 418 bp, Homo Sapiens
  misc_feature (246)..(265): n is a, c, g, or t
acacacacacacgacctgacagctcagtcaagtcaggccctccaagcagaatactgcattttacctaaatccaagcagggcgtggcagggagccggttgccctccttttgggctctctataacaagagcagaaaatccactcctttcacctcttcttttcctgcaggcctttagatacgcagcctctccaagaattgcagaaagcatccagtcctacccaaacagcctaggggagtagaacagagnnnnnnnnnnnnnnnnnnnnacaatttcactgaagcactttcatcatccttcctctccttttctgtcttctctgacatttaagatatccacctaaaccccaaagtggggcctgaagaaggagataagtgttccattcggcaacataagagaagttaaaggtaccaggacaggg

SEQ ID NO: 373398 - DNA, 603 bp, Homo Sapiens
caaaccatgccagcgtattagcatctacgtatgttataaaagcattagtgtgggtttagtggaaggagatgggcgagaaaagtgtttctttttaaagggaaggtgggaatgaatgctttcatatgtgtgtccagattggcttggcaaatacagtatcccacattgaaataccactgtactataaatatcgctataacagtcttatggagatgtaatggtggaatcaggggaagagaactaaattaagagtcaggaaaccttaattctcattgggttttctgggtaagtggaatgatgattgagccaatatcacttaccctgtctgtgcctgagaggtctctgacctaaactaagtcactgggcggtagggcagagccaaggagtttaatatgtgggaaacaattttataagttatgatttctatctaaatctgagattgcattaggtctgagggaacaaggaaagccctttgaagtgagatagttacatttctttcctaaggaagttctgaatcagtaagttaattacctctctcagctagggaatcaattagctaattataaagagacgcaaggtcaaattaaagccagtctttccattagt

SEQ ID NO: 373399 - DNA, 945 bp, Homo Sapiens
atatccatgcagcgtattgggatattatgctgatcaaagagcttcaggtaacatcgatatgctgggagggagggaagggaattcagagatgatgagagaagaatgataagtttcatgggatggaaataatggcaagtggataggggataaagaacaaactatgataaggtgatatttagaggaaaagtcaaaagagtatagatatgctatgtgtgctaagctattagttatactacgagctatcttatcatgttgcccaaactaccaaagtacaaaaatcaagagagaagagcatatgaatgagtgttgtcataattctgagagggaaaattagtcatgtacacatgagttagaaaattttaaaaattggatccaagctcaagagtaatccatctgtgtagtaatagtacataaatattttgaaataactgctcaaattattagccacttcttattcaaataatgtttagagtaaccaagtgtgatttccaagtagaacacaccaatcgtgtataatgtcaatgctttttcatgaaaccaatagaagatgctctaactctggttcagtattcatcaagagggcaaatatattacacaccaatgctaattggttgacttatctgcatcttcataggtatgaaagatgagttaggtttaaatttctgctcttcccattactaagttgctttgatcaagttgcgtaacctttctgcaactcagttttctaaactaagaaagttctcctttcgtatcatatgtacagcatagcattctcgagattttgaaaagttaaagtgcttagccaatgcttgggagtcagtaagaatcatgtacattattcttaccccttataatacttataattactattactattatgacttttacatgcatagctttactatctctttgatatttgaaaaagatatatgcgtctggtgttag

SEQ ID NO: 373400 - DNA, 291 bp, Homo Sapiens
ggtacccccattccattccagcgtaaaataaaatggtttcccaaggttgcacactttatgattggtgaaagcagaattcaacactcaagtctgtctggttctttcacacacataagcctggctccctggattagaactaggctctcccgaagcacgctctctggtttctgtttgaacaggacttgcactacactaaatgtctgatctgaaatcaatgtggatccaggtattgctggaacccatttaagtctaaagccaatatttcacattccctaatcattctctctccgc

SEQ ID NO: 373401 - DNA, 615 bp, Homo Sapiens
tcggtacccccatccattccagcgtaggtagtgcctagtaagcccaaagtgaaactgtacaagagccatgaggtctggtcacagaaaggcagagttaagataagtatagactgtcataagtatctgaagccccagtccctaaggcttctcaagcagaggctgatttattagtcaagtatcagggatatggtcaaagaagtttcacacagataggtagtctagacaaatgactactaaatttcttttcaattttattaaccaatataaatgccaatgtaatgttttcactaactttagagattaaacaaaatggggcaatttatatgtttacatttagtttaatgtagggaaaaatatagaaaaaatattccatgtcattcaaggataaattaagaaaagtaaattcaattaagtggcatcttacataattttatatgatcttttcatactaaagttattagagtgtcaactatgactacactgagatatattttgagatgactcagctttacattcatatgaatggttaataaatgctttgtgataacaaaaataaaaggatatcaggctttcaagaagtggtgcagcaacaaatatgcagagcagctcgctaaa

SEQ ID NO: 373402 - DNA, 633 bp, Homo Sapiens
caattccattgccaggtagaaaaattcatttcactactgccttaaactgtattttacctttcatttaaattttctcactttcctaggtacggtattaggctgggaaaacattagtgatatctgaggtgtttgcctcccctgttggcaggtgatccagggagtcatgcagagggaggagaaataggggcagacaatctacatgctgggatgacaacctcgggcacatttagagtcaatgtctagcaagttggctctcccctacttgtttcatacaggagtgtggaagaacgtaggaaaaagcggcttatttcttaccaaaaacaaattatcaggaaagaaatatgcattagccatcccaaatatgccaattagaactaccatgaaatactgcttcacatcccctagggtagctataattatagagacatgataacaagtgccagggaggatgtggagaaactggaaccctcatacatgccggtaggaatgccaaatggtgcagctgctgtgggaaacgtttggcgttcctcataaagttaaatatagcataccgtatgacctagcatttcactcctagtcatacgtggaatggaattggggaatcctctagatcgaccgcagcagcagctgccc

SEQ ID NO: 373403 - DNA, 1155 bp, Homo Sapiens
gccaaccaccccgcaagggcccagaagaaactggagatgtctggatcgtccaaatgcaatcttctcatcatatgagggcatgagatcatcgtggaaaggcacgtcctctccatagggccacagttgctctggagccacgaaatccccatgcagctccctgtggccgcacttcaccagcatcccggagctgtggttcaccaggggtaaggcgtccaagtcatttgccaaaatgctgaagttgcttgttagcagatactgggacagtgtcttcggcaggtcgttggagtcgcacatgacccgtgtgcccacagggctgtggtgcaggtaattaatgatgctgacatagtccatggccagctccagcctgtgctgccacgtgttcacattttggtactttgaaaggtttagtgtttcttccaggttactcaaggaacctagagggtgatattcagtaagcatagtgttgtcatcctcacaatagccaagcagcgtgacaacatgtgtgccttggagagatttcagcatctgcagtccatggaggaaatcatctttcatctccaggctggtgagctgtgagagtgcaactttgtgctccttccactcagacagaaagactctctttacagctccttccccaacacgcttcagctgtctcacttctgttctcagctcctcgcaggacagccaaggtgagcagtttttcatctgtcctatcctgaagtgaccatagggacagtgtgtggggtccacagtggattgtcgaggagcgatgaagaagtggtcgaggcagaggtagagcagagtattcatcagggccatgatcagcagcagcccaacagctggcggcacctctcggggggcgaggcctctcctgctgttctggggctgcttttccatgttgacggcctctgcaatttcctcccaagcgcatctccttctccagctcaggtctccatccaggtacctggtcagtccatactctagttggcgcccagggactggtcgggaaacaccctgggtttccacaatagattcccaagcagacgcccagtttttcctctcttgcagtccattctcaggattacacagcaaacaggatcctttttctgcagcccaagcctctgcggctcctgccaccccgggccagcacgcact

SEQ ID NO: 373404 - DNA, 666 bp, Homo Sapiens
attccattccagctgtaatgaggagttggatggaatgtgtctgtcgagtgagtgagctggtatgaaactgtgtctgtaggggaggagctggatgcaatgtgtctgtatagcaggagctggatgaaatgtgtctgtagaggaggatctggatggagtgtccctgtagaggaggagctggatgaaatgtgtctgtagacggaggagctggatggaactgtgtctagtagaggaggagctggatgaaatgtgtctgtataggaggagctggatggaactgtgtctatagaggaggacgctggatgaaatgtgtctgtagacagaggagctggaagaaaagctgtctgtagaggaggacgctggatgaaatgtgtctgcagaggaggagctggatgaaatctgtctgtagaggaggagctggatgaaatgtgtccgtagaggaggagctggatgaaatgtgtctgcagaggaggagctggatgaaatgtgtctgcagaggaggagctggatggaatgtgtctgcagaggaggagctggatgaaatgtgtctgtagaggaggagctggatggaatgtgtccgtagaggaggagctggaaaacatgtccctgaagaggaggagctggattaattgtgccgaaaggggtacgtggaatgaattggggaccgag

SEQ ID NO: 373405 - DNA, 346 bp, Homo Sapiens
caatccattccagcgtacaggcgtgagccaccgcgcccggcggaaatggaagtcttgagaatgaatgtgggcccttgtctattcagaaaatagccggtgctccagcatagcatcatcaccatcggggagctacctaggaatagagtctcaccctaccccagtggtaccgatatgcacatggaaaagaacgaatctagaacacttttcactccttttttattactgggctggggaattacaaattgcggtggactttggggcaagagtggtttgtgatgtgtgtggagaatgtcgaagactacagtgtagccacatttactttacgctggaatggaatgggggtacc

SEQ ID NO: 373406 - DNA, 628 bp, Homo Sapiens
  misc_feature (591)..(591): n is a, c, g, or t
aattccatgccagctgtaactaccatattaccgtaaatgtcttagaatttgcattaccagggcatccacgcacagttaggtgtatagagaaaagcgttggtagagtatcacgacattttcaactaagatgtggggattgtcgtatgtggtttaaagtcaaatccctagaacctcagggttaagtttcttctcctcacccatgaaaacacttcggtaggacacctttagagtctaattaagccattacctaaagtcttctccctaacctactcattatcccacactggatattccggtttctcaccagagaccatactgggcagtggtgtggggaacagggagtgggcacctgcctgactgatggatgggttgtagtgtgcatgtggatgtggatttttatgaaggggaactcttccccaccaaagcgttttaaatagtggcgtatcttttaaaaaactacttagcaaaagaaggaagttcaccatttcattttatttacttagtttcctttataaaacctgaaaggtagtacaaaaataaagcaaacagaagccagtttcatttatgagcatagatccagaaaagtcaaancttagcaatagaattcacatgtttgaaagattaccat

SEQ ID NO: 373407 - DNA, 355 bp, Homo Sapiens
gtgtgcgcggtcgatctagaggaccccattccattaacaaaagagattggattagatgaaagattagatgctgtctaccaaaaatccactttaaatataaatacacaagtaggttaatattaacaggatgggaaaagatataccacctgacactaatcaaaagaaaactgaagtgtctgtattagtattagacaaagtaagtatcatagtccatggtgtggtactataacaaaatacctgagacggggtaatttatagaaaacagaaatgtatttcttcacagttctggaaactgagaagtccaaaatcaagacaccagcatctgttacgctggaatggaatgggggtaccgagc

SEQ ID NO: 373408 - DNA, 680 bp, Homo Sapiens
gttgcaagttatatgtaaggcatatggattcgagtccatgcgtctgacgactaatcttaatctcactgaacccaaagattcctcatctgtaaataggaatattgaactatccctcatgatttattatgaggattaaatgaaggctaatcaagctagcttttgttttctaaaaaggcggcttatgtgagaggattcaggagtacctcatggtacctcaaagacaagggaaaagaaagaactaaaaccaaacgggatgcccctctaataatgggctatgtcacatatgttttcttctttatcccttgaatccagtgcctctgcctctccaaaccacaatgtagaaatcatagttgagtcacctatacagaaaatgatttttcttttccaaattccttgataaaaggtgggttcttctagctagggcacctgcccacacgctgttcctggatgagagaggaaaataatccggcaggaacacaacagaaagctggttttcctaagccaccagcaagagcatacagattagaaggcaaatctaggtttaaggcagaagaaagcaatatttttccactacagagtttatgtattaaaacacagattatagaacaacaatgtccaatggagctttataacgatgaaaaaaggcacctaaaatgtagctaatgcaaacagataaaaag

SEQ ID NO: 373409 - DNA, 552 bp, Homo Sapiens
cgtacgttcagatgtataagaaacgagaaacaattcagctccagtcgaataatgtgaacaaatcgagggttgaagataagccctatgtgaccaggctggagtggcccagggcacctctgctactgctgattagcgtaaatgctaaacacaaaccaattaacacactctagggctgcttatctcccgtcacttagtgtggaaataaagcccagcgctaaatacacatatggattgagccattaaatccagcatcactcaaaataaaactcattatattatggggcaaaaacaaagtcaccttcgttaacaggatgggctatattatataaaaatttcacttttacacttatccattgatttcccaaagtgacctgagtatctcctcctactgtggataagggctagctctaggacaaattcagaaagtaagcattttgcattcactttaacatgatctttgcttgaagtgctaaaagtgcacacatatatgagaatcctttgactaaaagatgctatattagcttagaaagaggaactttatgcttggaagaa

SEQ ID NO: 373410 - DNA, 356 bp, Homo Sapiens
caattccattccagcgtacaacagaacagtgcttgctacagcctcccttgttcagcgaacactcatcacagagatagccttcatcagagccatcaggacaatcctttttccccttgcagagtttctctggctgcaggcagactgaggtgtcattagcacaaggatgcttgggtggtccacacaagaaactgtcacagtcatcttcatctgactgatcttcgcaatcaatatctccatcacacacccatgctttgttgatgcatctacactgtactccaacaggaaaacttggttttgtggtcacaccatctaggtaccattgcaacctttttcatcactaccatctacgctgatga

SEQ ID NO: 373411 - DNA, 1026 bp, Homo Sapiens
caatcccattccagcgtagggtagaagttctgacatcccacgaggtcttatgcctggtagggacaggagtactttgtcactcctccccatatggtatgcactgacaccactggaggatggccttgttatcactggttggggacaaaaatcctaactctactccatcttctctgacattgccccagtgtaaaagagggaagaacactgggttgccgcccgtggaggtggaagttcaggttccccatgtgatgttcattgtttgccgggaggcttgttactggcaccccgttcagcctgttcctgatgctactgtggtggaagggttggagtacctcattactgcctgtcaaggatagaagtctaggatctgtactcagcctttgagagtgtgtagggatggtgccacattttcttctgtggtgtttggctagagtagaatggttatcatctaagtgttttctgacttgctgggttctctttctttggcattaagttttgtcttttcagttcatttcaaatttaccattttatgtcttacacttttttaactgccacaagatatactggataataaaaatcataattgaaatttcaaacaatgctttttgatatattaaacttattttcctttttatgttttccctcccctcactcaaaggtgaagatttttactgaagtacatcagaattggaatgctcatagctctgcttcagagcatgcaaaaggatatcgtaacagagaattcacacgaggattttccagggccagataccctcgatcttgccatggcaggcctccacctcagcatttctataactcagaacatatggtatctcaggagacttcaggatttccttctcagagacaaaataatcccattatgccacaatacccctttcctcttccagtgtttgacatgcataatttttcccctccgccctccacccccaccaccacccccacctgtaaacatgggttgggctacaccaaacatggctgctcatccattacttaacttaccatact

SEQ ID NO: 373412 - DNA, 511 bp, Homo Sapiens
tacccgctgtttatcgatgccacctcttaagtgattttcaaaacagaccttgggtcatagaagaataggctcagctttgaaaatcattaagagatggctgagggaaactgaacgagcttgttctgctttaacttaacaagcactttgaggtagggtacatgaagcagagctacctctggaagatgcttaatgacatgagcctgaatataggacaccacatcatcagcatcttccatcccaaaccagaagagctgctatggaaaaggtaccaccctaggcgactagggatagtgtggtataatacactatccatgattttcagggagaacagaattcatacacaagaatatcaataaatctgtaatacttaacttgcccacgtaagtgtcaaatttgggcatctattctccataggagattgattagaaagtccttcagaccaaagtggacctcagatgagcctttaaggaaagtggcctcgatacactgcacgtggccaccgataaaccac

SEQ ID NO: 373413 - DNA, 609 bp, Homo Sapiens
aggcagttgctgctggcggtcgatctagaggaccccgtgtttatcgatgccactggtgtcaccctaggagacaagaggcagagggcaccctaggtgcctaagagacagagtcccacttggggtcgtttaactctgcattccccaagccctccggccaggtgaaccaatgaacctgagtaacacctacactagtgtcatcttagtgtgtttatttaagttgactttatttttttaaaacttaaacatgtatttcaaaaagacattttcctatgctacagtggatggaaaaccagcattcctaggtatagacgggagattccggaaaaacacatacaatgaaacaatgccatgaagttcaacaagagagcaaggcaagttctagcaagattctaagcctgggtcagatttgctcttggtcaaacaaacaaatgacatcagccagcgtctgacagatgttaacagcacaggagccccaaatggagattctccccttgacccaatgtggagtgaaagagaactgaaaggaaagaaacttctcatgacgagattcaatgccactcaatgctgtgtccgcccagcattgggtggctcgataaacaccgggtaccg

SEQ ID NO: 373414 - DNA, 554 bp, Homo Sapiens
tgccacctctctgaaatgcctagtcatttacaagtcatttctatgtgtgatcgtattagctgtaacaaatggctacaaatggcttgaagaacagaaatgtgttatagttctggaggtggaagtccaaaatcaaggtgtgggcaagatgggttccttctgagggctgtgagggaaggatctgctccagacccctggtcttgggctggtaggtgaccattttctccatctctcttccctctatgcatgtctaccaccgtgtgtacatttccatttttgtaaggacaccagtcactgaattaggacctacccatataagcgcatctcaactaatggcgtctgtagcgaatctgtttccaaacaaggtcacattctgagattctagggaatcctgagacttcaacatagaggtgtcccatagaggatggggacacctcaacccgtaacagtaatgaggactgcacattatgagagggactaataagatagtgtgcatgggtatcaaaacatgtaccccagagggttctctgtttaacttgcagtggcatcgataaaca

SEQ ID NO: 373415 - DNA, 1207 bp, Homo Sapiens
tgtttatcggattgccaaaagaaaatcagagcagacattatacttatttacaatatgcaactagcgatgtctgttaacaagctataaaaatactattcacatttacaaagatacagtagtatttgtggtaggtgtatttgaaaagggcagctaacttcgaatgctgggatttaaataaaacattgatggcttaccagcaaggtatttaggcaccccaatcctttgaagatacttcacaagagagagggctagtgctgtgcttacaagttaagaaaataaggaagtgagtacaaaggtatacaccttaagcctctgccttgacagtaaagtgactccctctctcacccaaagtgatgtcagtaaattactttgatgcatgtataagatgaatgtttgagagtagatttaagatgactttttttgtgctatgaattgtcttccacattgatctcattttcatttgatcttcttgtaatggtgctcaagaaagagatgaactagtcatacaccatgggaaaatgcggtttcagcatgcagccacgcaatccctggtgctctcaacatgagaaggagacacaccagccagggagacaggcattcaaagttagctgccctcacacagctgctccgtttaataatcgacccatttaacagcagtaccagtttatgctacatatttcaaagtaccttactttaaaagaacaccttacatatctacatttagaaaataactttcgtagttgattactggagtaatcccaaaagggttcttggagtgctatggttgtagtcccctcactcccccctcccagcccctgagagatcccagaaatatacaggaaaatgactcctcacattaagggaaaaggacaacccccaattaactaaaaaatctggaaatgacatttgaaaaccagattcgtgtcaatatacaggaggtatgatttgctttccttcacaaaggctataggcctgggggaaatatctacgcattggggataaaaatagcagtaaaggcaaagtggtttggacaagttagactattgcctacaggtatgaatctttgttttcctatatttgtatatttgcacaaatataaccacttctcatgatatagggaaagctcactagagcatgaaaagaaaaacgtccatacagagcaaaagtaggtaaaggatggcattctattaaacaacatggattttca

SEQ ID NO: 373416 - DNA, 545 bp, Homo Sapiens
tcctgttatctgccacaccatggatgcaactgcaggtcactatgttatactgaaacaagccacccggccgagtgcagttgctcacacctgctcacaggcccggccccccatctccgcaatattggcttcacgaatctgaggatcgctgtcatcgagattctccgctgtttcccgatgccacacccacagtatcttcttcatctcacagtctatctatgtgggtgtggcagaaggatccagagtaaaatctcaaacacagtgatctactggttagggatgataatatttaggaaattcagtacgcctataggataagaaagtgcgtccacaattggttcactgatccctttctggtatgaggtggctctgggccatgttctttctgttagggctgataatggagaacaatgacggatcttgggaaggctcctgactggaatgctacagttcaaggtttgacctcaagcagcagcatcctatgagatggagcatactcgctaccggcaggaataagatgacagtggcatcgataaacaccgggtacc

SEQ ID NO: 373417 - DNA, 600 bp, Homo Sapiens
cgcttgcatgattgtaggtggcatcgataaacaccggtgtttatcgatgccacactgctatgttcactacagaaacagctgctggcatttgccatatcaataacattagtgagaactcaagcagggtggcaatgcttcataaacatcttcagcttttgttgcctcatgccacagatatttattcacgttctgcaaatttgctcaaagaaagtccttggaatggcagtgttggagaaaaattaagagatgtgatatacgtctcagctgctggcagtatgctctgccagattgttaactccctgctgttactccctgtgtcagtggctcggcctttattgagttacctcctcgacttgttgccacctcttgattgccttaatagactcctgccagctgctgatcttttagaagaccaggagttacagtggcctcttcatggagggccagaactaattgatcctgctggtctgccattacctcagccagctcagtcctgggtatggcttgtggatctagaaagaacaattgctctccttattgggcggtgtcttgtgcatccataaacaccgggtcctctagatcgaccgcagcagcactgca

SEQ ID NO: 373418 - DNA, 301 bp, Homo Sapiens
  misc_feature (20)..(20): n is a, c, g, or t
gggtttatcgatgccaccancaaaaagaaggtattataactgaaggttaatggttctgaacacactggcttattggattacctacttgaaagagaaatttgaaatggccggctcggtttcctcaatatctgaaatgacaagaagaaaaagagcaaaatagaatccagagatacacttagaacaacattaagacttctacccacggcttcaaaacaacctttcccaactctctgggaaaccagccacatttctctcagggttccagccagagaaatgtggcatcgataaacaccgggtaccg
